United States Patent Application Publication US 2011/0014706 A2 - sequence listing, part 38

SEQ ID NO: 100294 - DNA, 560 bp, Arabidopsis thaliana columbia
taggtacactatagaagattatgacgtcgcacgcacgcgtacgtaagcttggatcctctagagcggtcgcccttttttttttttttttttctaggaacaatcaatctcattcattcatttatcagtaaatacacatattgattttgtaacaaattcctttcacaatacacttaacaattgtcttgagtggacgacattgaattgaaacacgagtacaccacacatgcttcgtcagcttcgacaaaataatcaaaatagatcaaaatacaataacatgacccaaccagaatacaaatcaaacaatataatacatgaaaaacaacaataatcttaatatttcacttcagaagcctaaccttttctgaacattctcaaaccccaaaagcatccaattattataaatctttcaatgcttccaccaccttcaatctataaatctcttatagtttcttcttaaattcacaaagaaacacaagcctttcatattaaagaagaaaaaaaggcaaataaaatattttcagtttcatcatctgtttatgtaacacacaaacacactcata

SEQ ID NO: 100295 - DNA, 615 bp, Arabidopsis thaliana columbia
  unsure (1)..(615): unsure at all n locations
ttaggtccaactatagaagatttatgacgtcgcctgcacgcgtacgtaagcttggatcctctagagcggccgcccttttttttttttttttttagtattaccaagtctaatgctcatatcatttctaagagttctacttcaaaccaaatcctccggttttttttgtttttctgttttaccttttattatgttacaacactcaaaatcaacacaacccaaagaaaaatgttcaaatcaaaagagatcacacaaatctgttaaattcctttctcccaactgttgttgccatggaggcagtggaaccaatgctcaaatttcctactgatttaagggtcttgcgcttctcaagaaccacacctccaggtgaaccaggacctcttgtggctgctgctgttgctcatgaccaatgaccctttgtcccatctaaacggatcttgcgggggggggatacggcattctcctcttctcggtgactgggtggacccatcaatttcttctttggntttcttgttttggctaacttttgcttngganngnctttttggggccatttnggttagggattggggggaanttntaggggntaacanccttnaagggggnnttnncccttac

SEQ ID NO: 100296 - DNA, 803 bp, Arabidopsis thaliana columbia
  unsure (1)..(803): unsure at all n locations
gctccgccaacagcgcccccccngggggggggaaatatttgggaacacctatnagagttctatgacgtcgcatgcacgcgtacgtaagcttggatcctctagagcggccgccctttggtttttttttttacccttgtgaatttgcttcaagtgtcaacttttttcattagtattaccaagtctaatgctcatatcatttctaagagttctacttcaaaccaaatcctccggttttttttgtttttctgttttaccttttattatgttacaacactcaaaatcaacacaacccaaagaaaaatgttcaaatcaaaagaaatcacacaaatctgttaaattcctttctcccaactgttgttgccatggaggcagtggaaccaatgctcaaatttcctactgatttaagtgtcttgtgcttctcaagaaccacacctccaggtgaaccaggacctctgtggctgctgctgttgctcatgaccaatgaccctttgttccatctaaacgtatcttgcgtggggggatacgacattctcctcttctcggctgactggtgtacccatcaactctctccttttggattgctgttttggcctaactttttngcttttggaagagactttttggggccattgtagntagggaattggaggggaagcttnttgagggtatnaatcaacccttgaaaggngntttttacccncttaggnttccccttgaggaanttnatgccccgnntgnntgggcttgggggggttnaaagnggcctnncggctgggggttaaggcaaanggttcaacccttta

SEQ ID NO: 100297 - DNA, 704 bp, Arabidopsis thaliana columbia
attacctatagacagcatgacgtcgcatgcacgcgtacgtaagcttggatcctctagagcggccgccctttttttttttttttttctttttttttctaagagttctacttcaaaccaaatcctccggttttttttgtttttctgttttaccttttattatgttacaacactcaaaatcaacacaacccaaagaaaaatgttcaaatcaaaagaaatcacacaaatctgttaaattcctttctcccaactgttgttgccatggaggcagtggaaccaatgctcaaatttcctactgatttaagtgtcttgtgcttctcaagaaccacacctccaggtgaaccaggacctctgtggctgctgctgttgctcatgaccaatgaccctttgttccatctaaacgtatcttgcgtggggggatacgacattctcctcttctcgctgactggtgtacccatcactctctcctttggattgctgtttggtctaacttttgctttggcagagactgttggagccatgtatctagggaatggagggcagcttgtgaggctatcatcatccttgaaaggagaatcttgacctcttagtctttcctttgagtatcttgatgcccctgtgtggatgggtctggagggagtgtgaaaagtggatcttgccaacctgggtgttgaagggtcaaagtggtttgccaagcccgatttggg

SEQ ID NO: 100298 - DNA, 510 bp, Arabidopsis thaliana columbia
  unsure (1)..(510): unsure at all n locations
nnnnnnnnnnnnnnnnnnnnnnnnnnnnnnnnnnnnnnnnnnnnnnnnnnnnnnnnnnnnnnnnnnnnnnnnnnctttttttttttttttaaccaggtgcaattggaatatctttggctaattctttgatacacagttgttgaaaggtaaaaataaacaaaagttacagtaagaatctaaagtaaataacaaaactcgcatttgatggttcgcaagtcgccttgtatttaggtggttcgtagccgcttaaaaatgcttctaaccgtattgttgatccgtctcatctaaccgaatcgattggtgacctccaaaactgtgttgtcactaactagtttgtataggatacaaaaccaaaacggagcagtttagtgaaatggcagataatcaacaccagctcttattcaggaaaacacttcccattctacctattaaccgtacttgttggagagtgctctggcccaggggctttggtctttcgaccatattatcccggcccccgagcattgcaca

SEQ ID NO: 100299 - DNA, 464 bp, Arabidopsis thaliana columbia
actatagaagagtctatgacgtcgcctgcacgcgtacgtaagcttggatcctctagagcggccgccctttgttttttttttttttttttttggacaatgaaatgattggatttttctccatttttactgtttctcttctccaaaatgttttattattttgatatatccttagctcgaggtcttgtaagaacttctggtgacatttaaccaaatcaaaacagatacacttgaaggtggtagctacaaaattgaaaatcgagctaatgcattggtacattctaaccctctgactcgaagaagatatgattttcgcagcatcaaactgctatgatcaatgtaacatcagtctttgaggttggctccattctgtttccgttgaatccactgagcacatttcaggatcagttgttaccaaggaacttcacttctttgggatccgctcaaaggcagatatcatcgatgca

SEQ ID NO: 100300 - DNA, 534 bp, Arabidopsis thaliana columbia
  unsure (1)..(534): unsure at all n locations
taggacnnnnnnnnnnnnnnnnnnnnnnnnnnnnnnnnnnnnnnnnnnnnnttactgtttaggttcatactaaactgtgtgtctttgtcttaaaaaatgttttccttttcccttaacaaaaaatctacaaagtctgaaactctcagcaatcagataaaaagattacaagaaaacctcaaagaggtatacaagtttctttcttaaaacaatctcaagaaaacagacgacatagtcttttaagatggtttgaacacatgctgtctctcttcctcactcgtccagcaggccagcttcctttaatgcactcttatactcttcctctgagttccacgacttgatctccttaacatttgcttcaaaatacttctcgatcttctccatcacctctttatcccagccatcatcaagcagcaagttgaaaaccgctcctttgcgaccaaaccggccagctctcccaaccctgtgaaggtacacctcataatctggctctccagtttcatatttagggggaagattataattgacaaccaaatt

SEQ ID NO: 100301 - DNA, 493 bp, Arabidopsis thaliana columbia
  unsure (1)..(493): unsure at all n locations
gacnnnnnnnnnnnnnnnnnnnnnnnnnnnnnnnnnnnnnnnnnnnnnnnnnnnnnnnnnnnnnnnnnnnctttttttttttttttgataacaatgctaatgttctattcataggtttgtcgcagcaacacaaatttcataaagatagcaaagattaagagttacaaacaacctgattgaggcaaaaggtgtccaaataatcatattacctcgtttaagcccacacgattataatttggatctctagttcatgaatctgcaacagcaatagcagtaggggtaacttgtttaaccctcctttgatgaacatcccagttataaacacgtgcaatagttacctgagtaactgtgacttgatccctcaagaactgtaaatcagctacaagaacctccaggctggctttagcattttccagattgtttttcagaagagctgaagcctcttcacaggaatattccagcatgacattagctcccaaccacaaacacactg

SEQ ID NO: 100302 - DNA, 506 bp, Arabidopsis thaliana columbia
taggaccactatagaagagtctatgacgtcgcctgcacgcgtacgtaagcttggatcctctagagcggccgccctttgtttttttttttttttttttttttaaactccaaagagtgaaatctgtttaaagagtgttacatcatttaaccagtttcataagtacaacaatgcgtgatctaataagatgaatcatcattctcctatttcatctaaaagaactcgacatgatcagcaattgctctgcatactagttttgattccgcagccaaatttaggcttttagctatggcaagcttggttcgtttatgcgtagatgttggctcatactttttcacctcctcatcctctttccctaacaacaaagcctcccttgcaggaatcacactctcccaccagaactcccttaatacatcatgtatgattctccaatagcttcggtctctcatcacacggaaaaccgtgcttccatttcgtgtccagcagtataagttgacccattcccggtc

SEQ ID NO: 100303 - DNA, 716 bp, Arabidopsis thaliana columbia
  unsure (1)..(716): unsure at all n locations
tnnnnnnnnnnnnnnnnnnnnnnnnnnnnnnnnnnnnnnnnnnnnnnnnnnnnnnnnnnnnnnnnnnnctttttttttttttttgcagtatcaaatttctccatatattgaccaacaatgacaagaaacatctatggaataagaatttgacagttaaaacttatcttcatgagaccaaacaatgaagcacaaggaacaagtgcagggtaaacaaattgcattgtgtttgtgagagtatttgtatatcatctatatgtttcctgtaatcttgccaaactgtgattccgttcactcattgattttcctagctctatggtttggtttccatgtgcattcttcgaatatcaaacttgtctactgactccagaggagagactgtctcatttctgatccttttaatcttgggactcaacagtcccctgtggctaaacccatacagcttcagcacttgattatctgcaaaattaaaagccctctccatgctcttgaagcatctatcgactgcgtaatcagcatagctgccacacggtttgcaccctacaaaatgtgtcacaaagggccatctttcatcgcccaatcctggatgatacttctctatcatctcttcatacctggcaaccaaaccttcccaaaacccgtgcaagtagtattgattctccacataaaccttctctatccatttttccttctgcgaaagcaagagatatatcaacgct

SEQ ID NO: 100304 - DNA, 588 bp, Arabidopsis thaliana columbia
  unsure (1)..(588): unsure at all n locations
acnnnnnnnnnnnnnnnnnnnnnnnnnnnnnnnnnnnnnnnnnnnnnnnnnnnnnnnnnnnnnnnnctttgtttttttttttttggtcatcatccacaataatcatcatgatataaaccgatttatgtcgaatgattgaaagttacatttactctgcatactcgtatgagttgaaacgagacagagaaacacaacacaaggctcaagttttcagatagccacacaagtcggggcccgaaacagagagtgtgaaaaactgaatcctacctactactcacccaccgccatgaatgggattccccagccaccatgtcttgaaaagtaatcattatctagtgaaatcgcaagcgtaaggacaacagctctttctgacaaagtcaatgggccgtttcacttctaactcttctaccagtgtcgcagggccggtcttggctgcagcatcagcttttccaaatcggatcacgtactgcccagcatctgtgaatatctcaaagccaaaacctctccaatcacgatctatttgggctaagacttccccatcagcatccttcactgtaaatgnggggngtccaaaacccaggattttct

SEQ ID NO: 100305 - DNA, 501 bp, Arabidopsis thaliana columbia
actctagaagatctatgacgtcgcctgcacgcgtacgtaagcttggatcctctagagcggccgccctttgttttttttttttttcttcgcccccgaatttattatgattggaatgtaaaacgaaatcaattcccggatatacagtataacgaggaagaataaattcacaaacagattttgttgacaaaagtagttgaagaacagagtaagcaaaaaaaaaatcgaacgaagaaaagaatcataaaccaacaatttaagacaaacctatttcagaagccataaaccaaataagaacaaactaatggaagatatcaatcaatatggtgcaaagagatgtcgtgtatatgtaatagctagattttgcaatacctcagaaaggtgtaggaatcaagaagatgcttttctttaatttcttgattcacggggtccttttttttttgagaagaatccccaacttttaccaaacaaagggctggctcttgtttcttgtctttcgtcttc

SEQ ID NO: 100306 - DNA, 514 bp, Arabidopsis thaliana columbia
  unsure (1)..(514): unsure at all n locations
ttaggacnnnnnnnnnnnnnnnnnnnnnnnnnnnnnnnnnnnnnnnnnnnnnnnnnnnnnnnnnnnnnnnnnncttgtgttttttttttttatataagatgggtagaagaaaataacatattctatacataaatcatcctttggccagagaaactctcagacagttttacacagcattccaagaagacaatggtggagtgtcggagtttttgaaggttggcactgtggccatgtgtctgtctcctttcacagactctggttgggcaatggtctcaagctcagacatctcttcaggagtgagtttcactgataaagctctaatgttctggttgaggttttcaatcttagtggttcctggaatgggacaaacatcatctccctggtggtgaacccaagcgagggctagttgtgcgggagtgcaccctttcttctcagacattgcagaaactttctcatagagaatcttgttgtgatccaagttttcctgttggaatcttggtagagcctttctgaa

SEQ ID NO: 100307 - DNA, 398 bp, Arabidopsis thaliana columbia
gatgaaatcaaaccaaccattaaggaacttgtaatggcggcgccagacaacccatcaaacgccgtggaatgggccattgcggagatgataaacaaaccggagatcctccacaaagctatggaagagatcgatagagtcgtcggaaaagaaagattcgtccaagaatccgatataccaaaacttaactatgttaaagctattatccgagaagctttccgtcttcatcccgtcgccgccttcaacctcccacacgtggcactctctgatacgaccgtcgcaggttaccatattcctaaaggaagtcaagttttacttagccgttacggtcttggtcgtaaccccaaggtttggtctgatccacttagcttcaaaccagaaaggcatctcaatgagtgttc

SEQ ID NO: 100308 - DNA, 732 bp, Arabidopsis thaliana columbia
  unsure (1)..(732): unsure at all n locations
atgatctnnnnnnnnnnnnnnnnnnnnnnnnnnnnnnnnnnnnnnnnnnnnnnnnnnnnnnnnnnnnnnnntcacgggtcaaaccacgcgtccgcaagttttacttagccgttacggtcttggtcgtaaccccaaggtttggtctgatccacttagcttcaaaccagaaaggcatctcaatgagtgttcggaagtgactttgacggagaatgatctccgttttatctcgtttagtaccggaaagagaggatgtgctgctccggcgttaggtacggcgataacgaccatgatgctagcgaggcttttgcaagggtttaagtggaaactagcaggaagtgagacacgtgtcgagcttatggaatcgagtcatgatatgtttctttcgaagcctttggtgttggtcggagaattgagattgtcggaggacctttacccaatggtgaagtgaggcgacggtgacgtacggcgaggataattccgtatatactatggataacccaaagtttagtgaatcacaaaccaaactttgttcggttttggtccttttggaaacacttgatctgtgttttctcttgcttttttctatatgtatgtattaattttggttttgttttgatgattaataagaaggtattcacaaaaaaaaaaaaaaaaaaaagnnnnnnnnnnnnnnnnnnnnnnnnnnnnnnnnnnnnnnnnnnnnnnnnnnnnnnnnnnnnnnnnnnnnnnnnn

SEQ ID NO: 100309 - DNA, 615 bp, Arabidopsis thaliana columbia
ctataattagtgtactcgaattaaatatataatttcttaacgtaataataagatacaacaagttgcaccaaatcccactctctcactctagaaaccaaatgtcgttgataataatagaacactttctttctctctctaaaaagcaaaagtagtctagtcactgatttcttctaatcctccggtggagtgagagatgatatctccgacgttgtttcctctcctctgcgctttatttctatgtcttccagtggctgttatcttcacagtccagcgagaactcacctgcgttatctcgccggagtttggtttccgctctctttccgtcttctctctttactctcgaaatgtccccgactcttcttcttcttctccggcggttcggattcgacagccgattcccaaagaagacgaccctcttcttcgactatcttctcgggttaacccgaatctacctcccggttcgacccggaaaatagcttttatgtacttaacgacgtcgcctcttccgttcgcgcctctttgggagatgttcttcgacggaatctccaagaatctttacaatgtctacgttcacgcggatccgacccgagaatacgacccgccgttctccggcgt

SEQ ID NO: 100310 - DNA, 582 bp, Arabidopsis thaliana columbia
ttaggacaactatagaagagtcttgacgtcgcctgcacgcgtacgtaagcttggatcctctagagcggccgccctttgttttttttttttatccaaagagacttaattttattgcataagttggaattgttgggggaaataaattacaagtattaagagaggcttcacaaatttgccaatctcagtatattttagccagtgctaccagaaagctcgccagagaaggcactaccatacgatgtggaaccggttggtgtctgtgatgatgttgcgatccctcgagctttccgcatctgccttagtctgaaaacatctgtgggcaaaggctggctttgtacagttgctgtatcatcttcttcttgcctgtctgaatcttttctctttggagctcttctggctcttggtaatctttgagacacaccgcgggttggacccgagggatcgttttgacttggaggattgcctttagcagcaaaactctgctttacagtttgacctgttggaaagtcgctctgcaaacatatcgacagaacaacatccacattgggtgttggaccgttcacaataggcaagttagctaaa

SEQ ID NO: 100311 - DNA, 495 bp, Arabidopsis thaliana columbia
  unsure (1)..(495): unsure at all n locations
nnnnnnnnnnnnnnnnnnnnnnnnnnnnnnnnnnnnnnnnnnnnnnnnnnnnnnnnnnnnnnnnnnnnnnnnnnttatattnnttatattttcnnnnnnnnnannnnnggnnnnncggacaaaattctattataatgggtccatatatcaaaaacttgtcgaaaaagttagcgctggaagccaagtgaacataaccagggttcaaaatgattacaaagctcaaaatttaagataaaccctaaaaccatacagattctaaagagaccgagacaaagcaaaatctgaggtactgggaagagcgtaaagtaaaaaacttctaagcagcagtagcagcctttggctttttaggcatacggtagccaccaacgacacatgcatggtcacgctcaaatggctcaagcgtcacttgctcagctggtttgaattgctcctgttgaagcttcttcacttaagtctggaacacagcttttgctggaacgggggagtccatacagt

SEQ ID NO: 100312 - DNA, 519 bp, Arabidopsis thaliana columbia
  unsure (1)..(519): unsure at all n locations
cccacgcgtncgcccacgcgtncgcccacgcgtccgcccacgcgtccgaacatttgcccgaaaaaccctagaatcccaaaatagaatccctaaaagagaaagaaagcaaaaatggaggacacgaagccaccattgggaggtaacaacaatcctcagcagcagcagcaacaacaacaacttctctatcaacaccaactacaacaacaacagagacaacaacaaatgcttctattgcagcaattgcaaaaacaacaacagcaacaagcagcaatgtctagattcccgtcgaacatcgacgtgcatctccggccaccggggttgattcagaaccgacccattaatcctccgcctcagcagaatcctacccctaaccctaatttgggacagcagacaccgaattttcaacagcagcagcagcagaatgtatcgagtcagcagatgatgcagcaacaacaacaacagcagcagcagcagaaattgatgaggccattgaatcacatcgagcttcaatgcgcttat

SEQ ID NO: 100313 - DNA, 508 bp, Arabidopsis thaliana columbia
aaccggagggccggggctcgtcccaggcgtgcgtctgaatcgcattataagtctctgtgttcttatctttggtgaatgagctcagctcttaattcttagcgtctgtgatccttctctcaaatgggttgtctgatttctcctgtaatgaaactccgtcgtctctcctcagccgactcgcggcgatttgcataccggaatctcgccgagaatatggaagatccagtcataagggtggtggtagggaaggagaagaaggagttcatggtcgaaccgtatgtactcgaagagtacccgttcagagtcttgataggttcagctagggatcgtgccaagaaccggttaaaccggaccggtagagtggtgtggcttgatcatgtcgactcgatcttatttgagcacttgctgtggcttcttcggaacgatgcctctacgttttcggatttggatgttctcgagatcattgaattctatgctcaagattgttagggaaagaaatggattaacagtg

SEQ ID NO: 100314 - DNA, 567 bp, Arabidopsis thaliana columbia
  unsure (1)..(567): unsure at all n locations
nnnnnnnnnnnntatagctagactatgacgccgcatgcacgcgtacgtaagcttggatcctctagagcggccggccttttttttttttttttaatactaatacgatgtggtgatatatcacaaatttatgtcacaaatttaccaaaaactatttcaaaagcttttgatgggtgatcaagagagtgcaacattatttataggatatgaaagtaacttaggcaatctgcaaaacccaatctttagtgtcttggatagaaccagtttgtattccgacaagaatagatcgaagttgctgtgtaacaatcccatctccaactttgtactcagtccttgtgttcttaaaagtgatgcttccaacagaagcaactccagcggcagttccagtgcagaaaacttcttcagcttccttcagttcttctaccggaacacttcgttcttccactttgtaaccaagatcaagggcgatttcgattatgctcttacgtgtgatccctccgagaatcgttccgctcgtagctggtgtcactattgtattgcccttcacaaggaatatattagcagcagaga

SEQ ID NO: 100315 - DNA, 432 bp, Arabidopsis thaliana columbia
ctatgacgccgcatgcacgcgtacgtaagcttggatcctctagagcggccgcccttggtgtttttttttttttttttttttttttttttttttttttttggggtctgaaatagctctttttaggggattatataaatgcttcttcatatgctggatttacagaaaatagatgagagcttgtgtttctagatttcagaaggggcgggggaatcttcgatgattgggatacaagatccgacagattctcctttggacatagcctgcccgagcttcgatcgggctttctcatggcgacctagtaccagtgtggggttaaggactgaccaccttacctgcgagtccgctttcttttgtgtgaaccccaaactctttaccaaaccatttaacttgctgatatcggcaaggcctccttcagcataaccatacaggaga

SEQ ID NO: 100316 - DNA, 738 bp, Arabidopsis thaliana columbia
  unsure (1)..(738): unsure at all n locations
ctatgacgccgcatgcacgcgtacgtaagcttggatcctctagagcgggcgggctgttttttttttttttttacaaagcagagagatgtcattaaattatacatcatcataacccaattacaataaagtgtctttagcgcacacgcatgcatatagaggagccattatcatactgtatactaccacaaagattctactaaggggggaattatcaccagctaatatattaaaaatcaaggaaatgatttgaaaaaccattaacatctgggtgggtccaagccaatcctcacaagaacacctttgngcatctttaggggtcttcatgaaataagcaacttgntggcaccggtgganacagtgggccatgtaacccgntggnncgccgccnttcccaaagccaacattgtgaaatggcatttttgcccagtcggagattagggttagctctttgagaggaggcagatttccgtcattactacctccgagtgcttccatgtaagaggtttatgtaaccttggtcaattgatttcttggcttctctgatcttgttgactattgactcgagtgttagctcttcaagtaattctctggcggtggatgccaccgaggcaagcacgtatgcgttgccggaaaacccttctggcagcggtgtctccgttctcttccttatgtccactgcgaattgtaaacacaccatggcgtctctcctcaaccctaaagcccttgttcttgtcttnc

SEQ ID NO: 100317 - DNA, 716 bp, Arabidopsis thaliana columbia
  unsure (1)..(716): unsure at all n locations
aacacgagcttgatgcacgcgcacgcgagcttggatcctctagagcggccgccctttttttttttttttttttttttttttacaaagaaacataactttataattatttatccagaaattctggaagaaaataaagcctatcacgaaatgagtataaaagtgataacggcaacaaatacaaagcagagagatgtcattaaattatacatcatcataacccaattacaataaagtgtctttagcgcacacgcatgcatatagaggagccattatcatactgtatactaccacaaagattctactaattaattaattatcaccagctaatatattagcaatcaaggaaatgatttgaaaagccattaacatctcgtgggtccaagccaatcctcacaagaacacctttggcatctttagggttcttcatgaaataagcaacttgtggcaccggtggacacagtggggccatgtaatccgctggctcgccgccgttgccaaagccaacattgtgaaatggcatttttgtccagtcggagattagggttagctctttgagaggagggagatttccgtcattactacctccgagtgctctcatgtaagaagttatgtaacctgggcaatagatttcttgctctctgatctggtgactattgactcaggtagctcnaagaatctctggggggagccacgagcagcacttgcgtgccgaaacc

SEQ ID NO: 100318 - DNA, 486 bp, Arabidopsis thaliana columbia
  unsure (1)..(486): unsure at all n locations
attgagccgnnnnnnnnnnnnnnnnnnnnnnnnnnnnnnnnnnnnnnnnnnnnnnnnnnnnnnnnnnnnnnnnnncttttttttttttttttttaatttgtaactctcattgctatatagtgaacattaatctattatgagttaactcatttaagacaagcttaagcccaaaaaatgcttgtggatgaaacgaacttgcatttatccaaatggttataagacttcattgtttggaatgtgtcactttctagattcgtacttctctttcctcaacgtatcgaccttttcccattgcatcgactatcttgcaactcagtccagcaccgttcatgtcgtacagtagctgatcgtatgaaatgtgtcctcgctcgcttaacagtctcaaaatctttctcaaaccctccatgtctctttgaccctccagataatccacacagctcatcagcacaacctggtgtggtctccaccctggcttgctcaccttta

SEQ ID NO: 100319 - DNA, 532 bp, Arabidopsis thaliana columbia
  unsure (1)..(532): unsure at all n locations
nnnnnnnnnnnnnnnnnnnnnnnnnnnnnnnnnnnnnnnnnnnnnnnnnnnnnnnnnnnnnnnnnnnnnnnnnnnnnnnnnnnccacgcgtccgcgccttgttcgatctcatcatgaggttgctttcaaagagattcaaaacctcattgcatcagaccaacacacaaacatcattcggtggtatggtgtggagtatgatcaagattttgtatacctttctctagagcgttgcacctgcagtttagatgatctaatcaaatcctatttagagttttctatgacaaaagtattggaaaacaacgattctactgaaggagtggctgcttataagatccaacttgattctttggagggagttatcaaaggaaacaacttttggaaagtggggggtcacccgtcacctctcatgcttaaactaatgagggatatagtttgtggaatcgtccacttacacgaattgggaatagttcatcgggacttgaagccacaaaatgtgttaatgagtagagatatgactttgagtgcaaaactg

SEQ ID NO: 100320 - DNA, 424 bp, Arabidopsis thaliana columbia
  unsure (1)..(424): unsure at all n locations
gcnnnnnnnnnnnnnnnnnnnnnnnnnnnnnnnnnnnnnnnnnnnnnnnnnnnnnnnnnnnnnnnnnnnnnnnnnnnnnnnncttttttttttttttttttttttttacacagcagaatattttatcgcattacaaaacgaactaacatctttatctacagaattgctatgcctctacttcttcctctacttaacaacttgaacagattacaaaggcaaagaacatatctgagagacctggttcgagcaaccaggtgtacaatcaggttcgagcaaccaggtgtacaatcaggttcgaaccgaaatctagaccagaaagttatctcaacacataaatacaactgggttacaaaatccatgattctaatgaagaagcagccaggattttagtaactaacctgagcaattccgcttagccaaaatc

SEQ ID NO: 100321 - DNA, 619 bp, Arabidopsis thaliana columbia
  unsure (1)..(619): unsure at all n locations
aatttaactcgcactatagatagactatgacgccgcatgcacgcgtacgtaagcttggatcctctagagcggccgcccttttttttttttttttagacggcaaagacagggatgaaatttgctgtacacaatatttatgtttttgatctttagattctttactagaacaccgataattgcagaacaaattgacatcatgggaaaaccagacgtggcccaacataaagatgaaacgaaagaaatgggcaaattctacttggttatccagtaaatgaatatgagaaatgtgcatacagccgcaacgagtgaaagaatgattgtatccatcgactttttcctctttatcgctgccagaatagtgttcaccgtagtaagacggctggcgacattgctaagctttgagttgatgcctccaaaagttgaacgttgaaacacaagcgtaccgagtgttgcctgagcttgtgaaatgacaccgtccatctgagctgnattgcgggttgatnccatatggtccntgatcagggcttgtcagaccctatccanctctaaatcnatctagncgntcaaatcncnnaagccccagaaggaacatgccctggttgncaanctgggngngntt

SEQ ID NO: 100322 - DNA, 557 bp, Arabidopsis thaliana columbia
  unsure (1)..(557): unsure at all n locations
aattgaactgacactatagcttnactatgacgccgcatgcacgcgtacgtaagcttggatcctctagagcggccgcccttttttttttttttttttttcacataagccaagtactatcaatatgattcaagaagatttgaatattatgataagaagaatgattcaacggaggaagatccttaaacaactcctcaagcgtaaatcttctgagattcttcgtgttcttattgtaatacaacacaatgggtgattcgtcaacaaaatagcgtgctatgaaaacaagttctcctgttccaatggtacctttgaaatgatacgtgcaattattggtagtttctttccaacgaggaatcgtaatgatttcgcttaaccattctcccatgtcatctagaacccacatttgcaaatctccagtgtcgacgtcaacattcttcgctacggcaattttaccattgtaattaaccaagttccaaccacgacaaaagttaacttgctgattaggtaatttaatgacactaaactcttctgacctcacattaaacctcattaatagagat

SEQ ID NO: 100323 - DNA, 472 bp, Arabidopsis thaliana columbia
atttagaccgacactatagaatgactatgacgtcgcatgcacgcgtacgtaagcttggatcctctagagcggccgctttggtttttttttttttttttttttttaaaaaagatatctcaatacatatatcctggaaagtgtcacataaatattccatacaaaactttgaattccaaactattgaagcactagagagagccacagacatacgttggaaatttacttatgggcaatggttctcaactcaaatacatgtgaacaaaaagctagcaatactctcaagcactgatgttttcgaaacttgcgcttttatctactctcttgaatatccctgcaattacctttccaggtcccaattcgaagctgcttttaagtcctttggataagagagtctttactgttgcctcccattggactggagatgtcacctggcgtgcaagtatcttcttgatcgtgtctggatctgcatgag

SEQ ID NO: 100324 - DNA, 495 bp, Arabidopsis thaliana columbia
  unsure (1)..(495): unsure at all n locations
cactatagattactatgacgccgcatgcacgcgtacgtaagcttggatcctctagagcggccgctttggggtttttttttttttttttttttttggcctaggaacataaaaaattaaaatgctaataaataaggctataagtacaaagaacagaggaacatatattgaatacaactagattcgtatagcttgagaatcctcactttgtaccactggggcatttatatagcttttaggctaccttcaagatcggggacgaccaggagaagtagttcgattcgtcttgtacttccaaaactcatctttcttccccttcggcttagctttaacccgaccggatttgctattaattataccaagtatggcagncttatcctttctgttctttggctttgccttggcttccagaatcgccctaagtttctcataggaccttgggtctggtacttgcccgcttttaaccatcatcttgtggtaaaagaatgcccttttgaa

SEQ ID NO: 100325 - DNA, 508 bp, Arabidopsis thaliana columbia
tcgcatccctttagagcccgcacaagatgcaatatacggtacttatgcttggcgttttcaatggtcaagtccttcaccttagtctgttcttgcttcacagtggcgttagcttcttcgagctttgactgaagttgattgttttcctccacaagttcatcaccgaggatgaagaaactacaatagttaatcactcaaagtgaagtaagagaaatggcagattctaactgtgggtgtggctcctcctgcgggggtggtgactcttgcagttgcgagaagaactacaacaaggagtgcgacaactgtagctgtggatcaaactgcagctgtgggtcaaactgtaactgttgatgaaattattatgggctaaaatcatatatatggcagaaaaattggggaaaatatgtgttttatgctaagagatgtgtgtgtgttgttggaataaagacgtgaacctctattttccatatcaagggggggggggggtggacttttcccaacttttttattt

SEQ ID NO: 100326 - DNA, 718 bp, Arabidopsis thaliana columbia
gaagaagaagaaactacattagttaatcaactcttttctaagagaagtaagagaaatggcagattctaactgtggatgtggctcctcctgcatatgtggtgactcttgcaggtaaacccctagattctctcttctttacatttatatgcatatatgtagactatgtagttcgagcttcatggtacaaaattcaataaactcttcttatgacttcgcttacaattgtgtttgtgaatagacacaaaagattagttttgtttactttagattcaaaacacttcgggcctatcctgtatatatgctgatcagatgcatgtggttgattaatctttaatctcatcatattaattactaattttttgttggttggattaatttgtgggtgggtaaagttgcgggaaggaccccaccaaggagtgcgacacctgtagctgtgggtcaacctgcagcctgtggggcaaacctgtaactgttggtgaaatttttatgggctaaaaccctttttttggcagaaaatttggggaaaatatgggttttttgctaagggatgtgtgtgtgttgttggaataaagacgggcccgttgtgttgcgtatcaactctcttaagctttgacttttcccagctttgtattttcctatgtatggtaatggtgtgattgtgtaatgttttcatatgtaacgtaaaaaaaatatttatgtgacattgacttttgtgact

SEQ ID NO: 100327 - DNA, 643 bp, Arabidopsis thaliana columbia
  unsure (1)..(643): unsure at all n locations
aacgtacatcccggacagtttgcctgttccccagntatcgctccttnggaagctgtcccctcagtcccgtccggatccccggtcgacccacgcgcccgaagagaggaactncaatgttaatcatcaaagagagtaagaaaatgccggttctaactgtggatgtggctcctcccgcaaatgtggtgactcttgcagttgcgagaagatctacatacaaggagtgcgacaactgtagctgtggatcaaactgcagctgtgggtcaaactgtacctgttgatgaaattattatggtctaaaatcatatatatggcagaaaaattggggaaaatatgtgttttatgctaacagatgtgtgtgtgttgttggaataaagacgtgcccgttgtgttgcgtatcaactctcttaagctttagacttttcccagctttgtattttccctatgtatgggtaatggtgtgattgtgcaatgttttcatatgtaacgtaaaaaaaatatttctgtagaaaaaataaccaatttctcatacttggnnnnnnnnnnnnnnnnnnnnnnnnnnnnnnnnnnnnnnnnnnnnnnnnnnnnnnnnnnnnnnnnnnnnnnnnnnnnnnnnnnnnnnnnnnnnnnnnnnnnnnnnnnnnnn

SEQ ID NO: 100328 - DNA, 633 bp, Arabidopsis thaliana columbia
  unsure (1)..(633): unsure at all n locations
tcccgtttgcggtaccggtccggaattcccgggtcgacccacgcgtccgagaaaaaagaaaactacaaaatcaatcaaagagaagtaagagaaatggcaggttctaactgtggatgtggctcctcctgcaaatgtggtgattcgtgcagttgcgagaagaactacaacaaggagtgtgataactgtagctgtggatcaaactgcagctgcgggtcaagctgtaactgttgaagaaattatcagcatggtctcaaaccaaggaaaatgggaaaaaaatgtgttttatgctaagagatctttgtgtatgttggaataaagacttggcattgtgttgcgtaatgagtaagagtaactattaagcttgcttgacttgttcctgctgtgtaatgtttttatttgtaacctaaatcataaatagtatatgtattcttttgcgtttgtatggggataggcctcccctctaccgggaaccctaattttaaaggcttttcctatttttacgttttgactaacttaaaatcatatgtaactttggnnnnnnnnnnnnnnnnnnnnnnnnnnnnnnnnnnnnnnnnnnnnnnnnnnnnnnnnnnnnnnnnnnnnnnnnnnnnnnnnnnnnnnnnnnnnnnnnnn

SEQ ID NO: 100329 - DNA, 533 bp, Arabidopsis thaliana columbia
  unsure (1)..(533): unsure at all n locations
taggtgcaactatagaagagttatgacgtcgcatgcacgcgtacgtaagctcggagttcggccagaagaagaagaaactacaatagttaatcaatcaaagagaagtaagagaaatggcagattctaactgtggatgtggctcctcctgcaaatgtggtgactcttgcagttgcgagaagaactacaacaaggagtgcgacaactgtagctgtggatcaaactgcagctgtgggtcaaactgtaactgttgatgaaattattatggtctaaaatcatatatatggcagaaaaattggggaaaatatgtgttttatgctaagagatgtgtgtgtgttgttggaataaagacgtgaccgttgtgttgcgtatcaactctcttaagctttgacttttcccagctttgtattttcctatgtatggtaatggtgtgattgtgtaatgttttcatatgtaacgtaaaaaaaatatttatgtgacattgacttttgtgactctaataagggggagggcccgtcttggggggncccaggntt

SEQ ID NO: 100330 - DNA, 737 bp, Arabidopsis thaliana columbia
  unsure (1)..(737): unsure at all n locations
nnnnnnnnnnnnnnnnnnnnnnnnnnnnnnnnnnnnnnnnnnnnnnnnnnnnnnnnnnnnnnnnnnnnnnnnnnnnnnnnnnnnnnnnnnnnnnnnnnnnnnnaaacttaaaacacacacacacacacacacacaataagataggagtagcaaacaatcaatccattatgatatcttgtcagttaaagaaggataacatttcctcagtaagggaatgtcaaagagaaggaataaaaaaaagagacagaagaatgaaatcatttagagagcctctcaagcttctgatcagcatcctttagagcccgcacaagatgcaatatacggtacttatgcttggcgttttcaatggtcaagtccttcaccttagtctgttcttgcttcacagtggcgttagcttcttcgagctttgactgaagttgtttgttttcctccacaagtttagcatccggaatgtctgtcttagtcgacgcaagagcagcttcaagcttagccaatcgctcctgagcttcagtggctctgtgaaagaagggtttcaaattctcgggaagatgatgatgatcctccatgattttcctctctcagcagcttccgctcaaatcataaacctctcttcccccccttctgtcgtcttctcgcagccgtacggacgcgtgggcggacgcgtgggtcgacacgggaattccggaccggtacctgcaggcgtaccggctttccctaaagtgagtcgtattagtgct

SEQ ID NO: 100331 - DNA, 860 bp, Arabidopsis thaliana columbia
ttcaaaagaaaagcagtaataggaaagagaggcggaaaagggaaagtcaaaaacaaggagcctaccgatgaagaaattaaaactggcaattattggatatctttgaaaaggggttggactttcaaccacgggccacttttcactggacatcccctcaaagcgaactagatggctaagtttcaaccatcagtctccgccctcaaaaaaatcatctataaagcggatgatccaagatgagctaactaagctagcagacaaaagcatcataagaagaagaagaaactccaatagttaatcaatcaaagagaagtaagagaaatggcagattctaactgtggatgtggctcctcctgcaaatgtggtgactcttgcagttgcgagaagaactacaacaaggagtgcgacaactgtagctgtggatcaaaactgcagctgtggggtcaaacttgtaactgtttgatgaaaattaattatggttctaaaaatccaaaaataagggccagaaaaatattggggagaaaataattgtggtttataaggcctaaaaagaatgggggggtgttgtttgttggagaataaaaaaaccggtgaccccgtgtggtggtggcggtaatccactctcttcctaagagctttgtgctctttttcccacagccttgtggatatttttccccaaaggaatgtggaataggtgtggtaaatggggggaaatggttttcacataaggaaccggtaaaaaaaaatatttattgggacccttggctttaagaaacttaaaaaaaaaaaaaaaagggccgccccctctaaaggatccaagcttacgtacgcgtgcaaacacgtcaagtggtcataagagcgtc

SEQ ID NO: 100332 - DNA, 514 bp, Arabidopsis thaliana columbia
ccacgcgaccgcacacgcgtccggccaaaccaacaaaaaaaatcatttaattttcgcggagagatggagaaattctcgtacaactcttatccagattcaaccgactcgtcaccgagatctcgtgagatcgaattcgataacccgccgcctccatgggatgatcagaaccagaaccagcagcaacatagctacaaggtgaagtttatgtgcagctatggcggcaagattcagccacggcctcacgataatcagctcacttacgtaaacggagaaacgaagattctttccgttgatcgcgggattagattccctgttttagcttccaaactctccaccgtatgcggcggcggtgatggcggcggaggagaagttacgtttaagtatcagcttccgggagaagacttagacgctttgatctcggttacgaacgatgatgatctggagcatatgatgcacgagtacgatcgcttgcttcgtttgtcgtctaagccagcgaggatgcgtttgtttctct

SEQ ID NO: 100333 - DNA, 372 bp, Arabidopsis thaliana columbia
atttaactcgcactatagatagactatgacgccgcatgcacgcgtacgtaagcttggatcctctagagcggccgctttgtttttttttttcttttttttttttttactcaatcaatcaatctataaaatcataggtgccggctacaagtctacacaaccatcgggccccaagagtttcagttcattattcagtacattacgacaattacttcaaaggtcttaatggcgggatctttaaagtgttgattaaaggaaatcaaatcacgtcaaaagtgacgtcctcttcacgaaacgacctttgattcgaggtctctgctcaccgttgagtttccgaacctcatatcttattttctttgagaacaacctagtcct

SEQ ID NO: 100334 - DNA, 547 bp, Arabidopsis thaliana columbia
  unsure (1)..(547): unsure at all n locations
nnnnnnnnnnnnnnnnnnnnnnnnnnnnnnnnnnnnnnnnnnnnnnnnnnnnnnnnnnnnnnnnnnnnnnnnnnnnnnnnnnnnnnnnnnnnnngggtttgaatgttcatatgaaaccaccacaataagtcaggggagtaactccttacattaacaaattcaatagtaagtagtttgtttggctgtaaagaaagctcatcggtacgctcttttagatataatttgcaactttataaacagcttaaactttactagggatcttcagtttctgtgtcgtatgcttaatcactggaagcctctgactgatggagctcgggtcgctccagactgctaagtcaactgggtaccctttcgcagatagagactgaaatgttgcttctctccaacagttttcacgaagaacagttggtgcctcatcttcgccaaacctataatgcattctcgtctctctcaatctcataagcacaccatcaactctcagccaaaatcgcaagaggaggaaccatgagcttggcatgactctcactttcacagtcagaagtgacac

SEQ ID NO: 100335 - DNA, 618 bp, Arabidopsis thaliana columbia
  unsure (1)..(618): unsure at all n locations
cactatagctgagctatgacgccgcatgcacgcgtacgtaagcttggatcctctagagcggccgctttttttttttttttttttttttttttttggggatcctgatattcttattctcctgcaatctgttgactttatcttctgtctaatttatgtgagagatgtctaagaaactgtagctacaaaactagaaaccttatctagcaaatgcaaaatagccatgattggctaatttatcttctcctcttttgaaacttcaggagcattgaatttacagttctgctttagattccaagtcttgttctgtatcttcagagatgtcatttgatggaagaggattaggcttgtctgtagcaggagcagctactggctcgttgagttccacatcttcacccaagatttttgctgtgaattttcgtgcttcgagatcaagatcgggccattcggttacgattcttcgggcaccctgaagctttggttcctttgtcatgggattattgcaaagatcgattgttctggccttggcttttgtggcggttccacaccaggattcacaccacaacactcttggggaagtgaaaatataggnacagtatgctgggnataattaaggagagc

SEQ ID NO: 100336 - DNA, 585 bp, Arabidopsis thaliana columbia
  unsure (1)..(585): unsure at all n locations
nnnnnnnnnnnnnnnnnnnnnnnnnnnnnnnnnnnnnnnnnnnnnnnnnnnnnnnnnnnnnnnnnnnnnnnnnnnnnnnnnnnnnnnnnnnnnnnnnnnnnnnnnaggaagatcacatgatattccgatatgtatctgtttcatcggccgatagagttcacgagggagattgtcatagtcattttacatgattctagtagaatctttatataaatgtttttggtacgctggtttgaggtattggggacacactcaatagggtacctataagcagctagaagtctgcaaaagctttgacgctgcagctaagccactgagaattgcaccttcaacatttgggctgacacagaaatctccacagattgctagattcctgtttctatcccaaaggcacctctcctctacggctatgcttttggctggaaacgcacttccccatctgtgggctttcatgaaaaagggaagagaactaacaaggcctgagcactgaaactctttgaacatctcttcagatattttgtttagtgtttcactcgatagcttttggaggccggtcttagcaataacactgttggcatagtctgg

SEQ ID NO: 100337 - DNA, 446 bp, Arabidopsis thaliana columbia
atctagacaaccacaagaacacaaaacacacaaaaacaaagaggttctttctttgaagaagaaatggaaaaagttgatgtttatgatgagattgtcggaaagagaaccagataccgtcttgatggcaccaagatcatgaaggtatttttggatagtaagctaaagaacgacactgagtacaagctggagacaatggtgggtgtgtacaggaaacttacagggaaagatgtagttttcgagtacccagtcatagaagcttgaagagatgaatgtttgtttcattcttttttgtcggatagagagcttttgattctgtttgggagtaaaactctttgcaaagattttgttatttcagcatttcgcaatctcttcttcaaagttcgatttatcgatacaattcttttttcctactagcattcatagtttcaaaaacaaaagtttcaact

SEQ ID NO: 100338 - DNA, 847 bp, Arabidopsis thaliana columbia
  unsure (1)..(847): unsure at all n locations
acgcctgcaggtaccggtccggaattcccggtttgacccacgcgtccagcccacgcgtccggatccacaaggataagggtgtggcaccaacagagtttgaagagcaagttactcaggctttgtttgacttggagaacaccaaccaggagttgaaaagcgagttgaaagatctctacattaaccaagctgctctcctcgatatgtcggggcaaccgcaaagctggtgtgatctacgttccattcacgctgaggaaagctttccgcaagattcatcttcgtctggtcagagagcttgagaagaagttcagtggaaaagatgtgatctttgttgctaccagaagaatcatgcgcccaccaaagaaaggctcagctgttcagagaccacgcaacagaactcttacttctgtccatgaagccatgctcgaggatgtcgcttaccctgctgagattgtaggaaagagaaccagataccgtcttgatggcaccaagatcatgaaggtatttttggatagtaagctaaagaacgacactgagtacaagctggagacaatggtgggtgtgtacaggaaacttacagggaaagatgtagttttcgagtacccagtcatagaagcttgaagagatgaatgtttgtttcattcttttttgtcggatagagagcttttgattctgtttgggagtaaaactctttgcaaagattttgttatttcagcatttcgcaatctcttcttcaaagttcgatttatcgatccaaaaaaaaaaaaaaaaaaaaaaaagaaaaannnaagggcggcagctctagaggatccaagcttacgtacgcgtgcatgcgacgtcatagatctct

SEQ ID NO: 100339 - DNA, 702 bp, Arabidopsis thaliana columbia
  unsure (1)..(702): unsure at all n locations
nnnnnnnnnnnnnnnnnnnnnnnnnnnntaatacgactcatatagggaaagccggtacgcctgcaggtaccggtccggaatccccgcgtccgcccacgcgtccgccgaagctctggattaacctattttcaccttctaaggttcttcgtcgttcttattgatctgtgaagatgtattcgggtcagaacaagatccacaaggataagggtgttgcaccaacagagtttgaagagcaagttactcaggctttgtttgacttggagaacaccaaccaggagttgaaaagcgagttgaaagatctctacattaaccaagctgttcagatggatatttctggcaaccgcaaagctgttgtgatctacgttccattcaggctgaggaaagctttccgcaagattcatcttcgtctggtcagagagcttgagaagaagttcagtggaaaagatgtgatctttgttgctaccagaagaatcatgcgcccaccaaagaaaggctcagctgttcagagaccacgcaacagaactcttactttttgtccatgaagccattctcgaggatgtcggttaccccgctgaggtttttaggggaaggggaccagntaccgctttgttggaccaggtcatnagggttttttggtngaaactaanccggccttngacaacttggnnaatgtggtttcaggacttcggnaagttgttntgg

SEQ ID NO: 100340 - DNA, 941 bp, Arabidopsis thaliana columbia
  unsure (1)..(941): unsure at all n locations
cgaacgcgtgggcggacgcgtgggcggacgcgtgggcggacgcgtgggcggccgcaaaccattttttgtcaatctagggttcttcttcgtacttgcagatttcgcctccgttttcactacgatctgtgaagatgttctccgctcagaacaagatcaagaaggacaagaatgctgagccaacagaatgcgaggagcaagttgctcaggctttgtttgatttggagaacactaaccaggagttgaaaagcgagttgaaagatctctacatcaaccaagctgttcacatggatatctctggaaaccgcaaagctgttgtgatttacgttccattcagattgaggaaagctttccgcaagattcatccccgtctcgtcagagagcttgagaagaagttcagtggaaaggatgttatctttgttaccacaagaaggatcatgcgtccccccaagaagggtgctgctgttcagaggccacgtaacagaactcttacctcagttcatgaagctatgcttgaagatgttgctttccccgctgagattgttggaaagcgtactcgctaccgtcttgatggttccaagatcatgaaggtctttttggatgccaaggaaaagaacaacacagagtacaagctcgagactatggtcggtgtgtaccgtaaacttactggcaaagatgttgtttttgagtacccagtcgaagcttgaaagaagatgatgaagaaccatcaggatagtgaaagagagcttttgtttatgttttgtggtatttaggatgaaggaaactctcttgattcagttccttgttcacaatctttaatgttctatttacaatgactactttttgtgtttttcaattttgaaacaaaaaaaaagtcaaannnnnnnnnnnnnnnnnnnnnnnnnnnnnnnnnnnnnnnnnnnnnnnnnnnnnnnnnnnnnnaa

SEQ ID NO: 100341 - DNA, 373 bp, Arabidopsis thaliana columbia
gcttgattgaacagacctatagatgagctatgacgccgcatgcacgcgtacgtaagcttggatcctctagagcggccgcttttttttttttttttttttttttttttttggcaactccagaatgtttactattcattatacatgttcaacattgattaaaaactttgaattgaacaacttgttatttcttattgcttttgttcttcagcggctgcatcagtattccagactacatcctttaatccagatgagaagtttttgtagaacttgtgaaactcgagggtatcaccaccggttttcctaagctctaccacatgcaatgatggcgccacttcaaacacctctgtagctacggagagctgacctttacgac

SEQ ID NO: 100342 - DNA, 515 bp, Arabidopsis thaliana columbia
  unsure (1)..(515): unsure at all n locations
nnnnnnnnnnnnnnnnnnnnnnnnnnnnnnnnnnnnnnnnnnnnnnnnnnnnnnnnnnnnnnnnnnnnnnnnnnnnnnnnnnnnnnnnnnnnngacagtcaaaatcttttcataactatacattttataaaatttataggagactaaaaaacatataactttatccctaagtattagagtatttacactctaccatccataccgtcaagaagaccggtccacattcccttaaccggaggaagctgtgcaacgaaggcttgccatggaggataacccactccacttgcccttacacgcccatccaaacgcagagacaaatacactggagagtctgaggaaacattggcaagcttcttctgctcatttaaccacttttcccattccgggacaaaaaccggagtcacccgccacagtttcttccttctctggctcatttcttcatccgcaatgtcagtttcatcaaactccaaaaccggtgaattcccatccgtagcataagccaccacaaccacacc

SEQ ID NO: 100343 - DNA, 466 bp, Arabidopsis thaliana columbia
  unsure (1)..(466): unsure at all n locations
aattgaactgcactatagattnactatgacgtcgcatgcacgcgtacgtaagcttggatcctctagagcggccgcttttttttttttttttttttttttttttggcaacaataatagcggctttggaccttttgatacacattagcatcaatctacttcaatgtgcagaagatattttcctgattaaaccggacctttgagttttcattgtattacaccggtttagcgtcagcacaaagagtcaagacacaactgatacagatgggttataggtagagtcagagaaaccatcctcatgatgtttactctcttcctcttccacttcttcttcagcatcccatagaaaccgagcatacgacgcaagaacattacagtcatcaggagaagattgaacagcttgatcatagtaagactgagcacgaacaccgtctccatgatttttccatatcaaatctccatacataga

SEQ ID NO: 100344 - DNA, 436 bp, Arabidopsis thaliana columbia
  unsure (1)..(436): unsure at all n locations
aatttaactngcactatagatagactatgacgccgcatgcacgcgtacgtaagcttggatcctctagagcggccgcttgggttttttttttttttttttttttttgccaccaagatgtagcttttattttcgattctagtgtacagaacatataattacaatatctggatcttacagaggcaggacaagtaatgaaatctgtcctgaaaagttaaatgatacagagggggctgctgaagaatgtaatttctggtttgctacattcttcaatttctcaataatataggaccaattgtaataacttccaacaatactaaattgtttcggagtttggggattgggctttttaatatacttcttccccattagtaaagtccccatcaagtaactgctccctcagtctttcgcagaggcgggctaaagcttcggatcccat

SEQ ID NO: 100345 - DNA, 4843 bp, Arabidopsis thaliana columbia
tgacgtagcgaccaattagggtttcgcaatcttccagtagatttcgcttcgcaacggattttgaaaatggtggaaaatggggctaaagctgcgaagcgaaagaagagaccacttccagagattcaagaggtagaagatgtacctaggacgaggagaccaaggcgtgctgcagcgtgtaccagtttcaaggagaaatctattcgagtctgtgagaaatctgctactattgaagtaaagaaacagcagattgtggaggaagagtttctcgcgttacggttaacggctctggaaactgatgttgaagatcgtccaaccaggagactgaatgattttgttttgtttgattcagatggagttccacaacctctggagatgttggagattcatgacatattcgtttcaggtgctatcttaccttcagatgtgtgtactgataaggagaaagagaagggtgtgaggtgtacatcgtttggacgggttgagcattggagtatctctggttatgaagatggttcccctgttatttggatctcaacggaattggcggattatgattgtcgtaaacctgctgctagctacaggaaggtttatgattacttctatgagaaagctcgtgcttcagtggctgtgtataagaaattgtccaagtcatctggtggggatcctgatataggtcttgaggagttacttgcggcggttgtcagatcaatgagcagtggaagcaagtacttttctagtggtgcggcaatcatcgattttgttatatcccagggagattttatatataaccaactcgctggtttggatgagacagccaagaaacatgaatcaagctatgttgagattcctgttcttgtagctctcagagagaagagtagtaagattgacaagcctctgcagagggaaagaaacccatctaatggtgtgaggattaaagaagtttctcaagttgcggagagcgaggccttgacatctgatcaactggttgatggtactgatgatgacagaagatatgctatactcttacaagacgaagagaataggaaatctatgcaacagcccagaaaaaacagcagctcaggttctgcttcaaatatgttctacattaagataaatgaagatgagattgccaatgattatcctctcccatcgtactataagacctccgaagaagaaacagatgaacttatactttatgatgcttcctatgaggttcaatctgaacacctgcctcacaggatgcttcacaactgggctctttataactctgatttacgattcatatcactggaacttctaccgatgaaacaatgtgatgatattgatgtcaacatttttgggtcaggtgtggtgactgatgataatggaagttggatttctttaaacgatcctgacagcggttctcagtcacacgatcctgatgggatgtgcatattcctcagtcaaattaaagaatggatgattgagtttgggagcgatgatattatctccatttctatacgaacagatgtggcctggtaccgtcttgggaaaccatcaaaactttatgccccttggtggaaacctgttctgaaaacagcaagggttgggataagcattcttacttttcttagggtggaaagtagggttgctaggctttcatttgcagatgtcacaaaaagactgtctgggttacaggcgaatgataaagcttacatttcttctgaccccttggctgttgagagatatttggtcgtccatgggcaaattattttacagctttttgcagtttatccggacgacaatgtcaaaaggtgtccatttgttgttggtcttgcaagcaaattggaggataggcaccacacaaaatggatcatcaagaagaagaaaatttcgctgaaggaactgaatctgaatccaagggcaggcatggcaccagtagcatcgaagaggaaagctatgcaagcaacaacaactcgcctggtcaacagaatttggggagagttttactccaattactctccagaggatccattgcaggcgactgctgcagaaaatggggaggatgaggtggaagaggaaggcggaaatggggaggaagaggttgaagaggaaggtgaaaatggtctcacagaggacactgtaccagaacctgttgaggttcagaagcctcatactcctaagaaaatccgaggcagttctggaaaaagggaaataaaatgggatggtgagagtctaggaaaaacttctgctggcgagcctctctatcaacaagcccttgttggaggggaaatggtggctgtaggtggcgctgtcaccttggaagttgatgatccagatgaaatgccggccatctattttgtggagtacatgttcgaaagtacagatcactgcaaaatgttacatggtagattcttacaaagaggatctatgactgttctggggaatgctgctaacgagagggaactattcctgactaatgaatgcatgactacacagctcaaggacattaaaggagtagccagttttgagattcgatcaaggccatgggggcatcagtataggaaaaagaacatcactgcggataagcttgactgggctagagcattagaaagaaaagtaaaagatttgccaacagagtattactgcaaaagcttgtactcacctgagagagggggattctttagtcttccactaagtgatattggtcgcagttctgggttctgcacttcatgtaagataagggaggatgaagagaagaggtctacaattaaactaaatgtttcaaagacaggctttttcatcaatgggattgagtattctgttgaggattttgtctatgtcaaccctgactctattggtgggttgaaggagggtagtaaaacttcttttaagtctgggcgaaacattgggttaagagcgtatgttgtttgccaattgctggaaattgttccaaaggaatctagaaaggctgatttgggttcctttgatgttaaagtgagaaggttttataggcctgaggatgtttctgcagagaaggcctatgcttcagacatccaagaattgtatttcagccaggacacagttgttctccctccaggtgctctagagggaaaatgtgaagtaagaaagaaaagtgatatgcccttatcccgtgaatatccaatatcagaccatattttcttctgtgatcttttctttgacacctccaaaggttctctcaagcagctgcccgccaatatgaagccaaagttctctactattaaggacgacacacttttaagaaagaaaaagggaaagggagtagagagtgaaattgagtctgagattgtcaagcctgttgagccacctaaagagattcgtctggctactctagatatttttgctggttgtggtggcctgtctcatggactgaaaaaggcgggtgtatctgatgcaaagtgggcgattgagtatgaagagccagctgggcaggcttttaaacaaaaccatcctgagtcaacagtttttgtcgacaactgcaatgtgattcttagggctataatggagaaaggtggagatcaagatgattgtgtctctactacagaggcaaatgaattagcagctaaactaactgaggagcagaagagtactctgccactgcctggtcaagtggacttcatcaatggtggacctccatgtcagggattttctggtatgaacaggttcaaccaaagctcttggagtaaagttcagtgtgaaatgatattagcattcttgtcctttgctgactatttccggccaaggtattttcttctggagaacgtgaggacctttgtgtcattcaataaagggcagacatttcagcttactttggcttcccttctcgaaatgggttaccaggtgagatttggaatcctggaggccggtgcatatggagtatcccaatctcgtaaacgagctttcatttgggctgctgcaccagaagaagttctccctgaatggcctgagccgatgcatgtctttggtgttccaaagttgaaaatctcactatctcaaggtttacattatgctgctgttcgtagtactgcacttggtgcccctttccgtccaatcaccgtgagagacacaattggtgatcttccatcagtagaaaacggagactctaggacaaacaaagagtataaagaggttgcagtctcgtggttccaaaaggagataagaggaaacacgattgctctcactgatcatatctgcaaggctatgaatgagcttaacctcattcgatgcaaattaatcccaactaggcctggggctgattggcatgacttgccaaagagaaaggttacgttatctgatgggcgcgtagaagaaatgattcctttttgtctcccaaacacagctgagcgccacaacggttggaagggactatatgggagattagattggcaaggaaactttccgacttccgtcacggatcctcagcccatgggtaaggttggaatgtgctttcatcctgaacagcacagaatccttacagtccgtgaatgcgcccgatctcaggggtttccggatagctacgagtttgcagggaacataaatcacaagcacaggcagattgggaatgcagtccctccaccattggcatttgctctaggtcgtaagctcaaagaagccctacatctcaagaagtctcctcaacaccaaccctagataaccacccaaatttggcatttcctttttcaataatattagtcattatgatccttgtcttgaatgaaactcattggtgctgatacttttgataaagaaagcctacgaagagtttttgtatattccgtattcggattgaaaaatctcattatacaagcaagcaatgatgtct

SEQ ID NO: 100346 - DNA, 487 bp, Arabidopsis thaliana columbia
  unsure (1)..(487): unsure at all n locations
ctatagatttactatgacgtcgcatgcacgcgtacgtaagcttggatcctctatagcggccgggttgggggtgttattttaatttttttttnacacaaaaatttgttgggaaaacttgaaagcaattttacatgaaagtgacattatatatctctccattaatctgaacagagcataagatcccttttttctcttaagtctttacatgtcaataagatacgataggacaaaagaaccatgtctagatgttgaaactctttaaaatcaatttttagtctcaatgtttatgccacgaagaagaggaaaatcatgagaaatgcaatgagtccgaagaaaatcttcatcattagccatcggtttgatgatatactgttgagatacctggccagttggctctgtgcgccttccacatttgctaatgtatcttccatgttttgatcgatcctgattgcaaatttccccttgttgagaaaccatggttgctagt

SEQ ID NO: 100347 - DNA, 519 bp, Arabidopsis thaliana columbia
tgacgtcgactgcacgcgtacgtaagcttggatcctctagagcgtccgcccttgtgttttggttttaaggactctaaacaagtttaatgtaataagtgtatatataacaaaagaaatgtccaaaggtgcattatacatttgcctttagccagaaatttaagagaactgatggcagatgatgctaccatacataagaccattgcagcataagaagggagctcgcctgtacagaagaacctccttatgcgccctcaactaatatctcacaagtttgcaacctccaccacctgggttgtgtcttggccttgtaaattactttctttacccgattttccatgtggtttaactggaccccaacttccttccctattaggttccaccggacaaaatttaccaccctggggttgctccccgacccaatgggggggggggggggataggcaaccggttttaaaatttctattaacagtctttttgtttacttaaaatccatttggtggtttgcggccgttttcttgt

SEQ ID NO: 100348 - DNA, 523 bp, Arabidopsis thaliana columbia
tttaggacggcactatagaagagttatgacgtcgcctgcacgcgtacgtaagcttggatcctctagagcggtcgccctttttgttttttttttcatttataaaatttcaactaatagaaataaatattgtacaatttaagtagtcataaaatgatataaattgtacatagaaactagagaaaactaataaaatggaataaaagagaaaatccttaaacgtcttttatattgggacagatggagacttggtaacattaatagacgttaaatttatggatgccaacaatcggtagggcattgatcaccatcacttgatatgagctttacgttgtatatatgacaatgctcatcaaaatattcggttgctgcctgaaactacacacacctcttctctaagcactctcacagcttctgtgactccatcctcaagagataatatttcagcaatttccatggcacgagcccttgttttttggaaaaagggcttgggatttgggtttccctccccattggggccttttcg

SEQ ID NO: 100349 - DNA, 514 bp, Arabidopsis thaliana columbia
  unsure (1)..(514): unsure at all n locations
tttaggacgnnnnnnnnnnnnnnnnnnnnnnnnnnnnnnnnnnnnnnnnnnnnnnnnnnnnnnnnnnnnnnnnnncttttttttttttttttagtagcacatgctcgtgcgacaaaattttatgatttatgaccacattttcataattaccggcaattttttttaaaaacactatacagtatataaacaatttgagattatacgagcttcaaatacatttttcatttttcgccctttagagctgtcttctactttactttcttttctaattctaccgctaagttagagatatgtcacgaaattgatttgttaaccgaatcaaaccgttacgcggttcttgattttcttcccggtttagtgtttctttgcacaaaattaaattagttacgaatgtcggatcaatgaatcttcatctatggagaactctccgagctgtttctctgaatggacacgtggagctcacaaaccccgctaccaaatgtaaatacgttttcagctcatgacacgtggccac

SEQ ID NO: 100350 - DNA, 559 bp, Arabidopsis thaliana columbia
  unsure (1)..(559): unsure at all n locations
tatttaggacacactatagnaagctctatgacgtcgcctgcacgcgtacgtaagcttggatcctctagagcggccgccctttggttttggtttttttttttttaatgtaactaaacctgattttattatcataccaattcttgggacaacgatgacacaatctttttagcttcatcttactttacagaaactgaaaagggtctataaacaaagaaagaaacaagaactattcatttcctgcgctggggggtagggatctatatcattttaactagatacattctggaggatgggcatagaagtaatctcctcccctcgggtctaacggagataactttccggtgggggggttcccccattccgccgccctggagggggcctccttgacacctcctgcaaacctgatcccaagagagcggttttggttgttatccaagtctaaaaagctccacaatgtcttcttccgggctaaagaaaatttgttttcttaaacccgaagggtgccccgcggaagaacctttaaaaactgtgggccgttggtccccataaagagagaaaa

SEQ ID NO: 100351 - DNA, 471 bp, Arabidopsis thaliana columbia
atactatgacgtaccatgcacgcgtacgtaagcttggatcctctagagcggccgccctttttttttttttttaaccaaaatgccaatttttgcacttaatgtaacaaaaataaacaaggatctctaaagacatacacaagaacagaagaatatctctcactttgaagcatctccttttcattctgtcaggaacaaacaaagatattgcaatgcagaaatcttttaaggcaatatttctcttattttattatacattgacaagaattagagttacaacagtttgatacatacatacatagtacctcctttggtcatattctttttgttgttgcggctccacaaaatcttaacccatctcgcgaggaaagattgtggcctgtggcaatctcattttctgagagcatctgatgtgagaagtcccatctgttcagtaagatggctcatttgttgattcttgctccacacattact

SEQ ID NO: 100352 - DNA, 493 bp, Arabidopsis thaliana columbia
  unsure (1)..(493): unsure at all n locations
nnnnnnnnnnnnnnnnnnnnnnnnnnnnnnnnnnnnnnnnnnnnnnnnnnnnnnnnnnnnnnnnnnnnnnnnnnnnnnnnnnnnnnnnnnnnnnnngattatcaagattccaatttctgagctaatcaacaccccgacacaacaaggaaggcttctttagagctttgatcgtagtgtgcatgtgtgtgtatgtatattgtccgaacgtatgataaaaacatatagcatatgtgtctcaacgagaggatttcatattacaaacttttgcatcaatctttattttagactcctaaggccaacattgccagcaaggaaagaccgagatttgcagcgttggcaacggttcctgaagcaggaggaggatgtgactgagctcctccagttgcattggaggcagccaagtttgcaactggaggcagaggcggatcaatcacgtctttggcctcaagaggcgggtttggggcactagctggtgggtgtgcttccttgtctg

SEQ ID NO: 100353 - DNA, 510 bp, Arabidopsis thaliana columbia
  unsure (1)..(510): unsure at all n locations
cnnnnnnnnnnnnnnnnnnnnnnnnnnnnnnnnnnnnnnnnnnnnnnnnnnnnnnnnnnnnnnnnnnnnnnnccacgcgtccgaagcttccgtttttcttcatcttattctttcaaaatctcaaacccataagggaaaaagaagcataaagaggcagaagaggaaggtggtcatatgttcttgctttcgccttgatcaatcatacagagatgctgaggtttatcatatttttctccctttttatacacttatgtgttgcagccccccagactcctgctgctgccgcggcggttcctgctaagaaatggctcacccttaatggacaagagcctgccgttgtggccagagggggcttctcgggtcttttccctgagtcaagcgcctctgcaaacgacttggctattggcaccagctcgcctggcctcacaatgttgtgcaaccttcagatgacttaaggacggtgtgggcctttgcttgtcagatatcatacttgacaatgcaaccaccata

SEQ ID NO: 100354 - DNA, 804 bp, Arabidopsis thaliana columbia
  unsure (1)..(804): unsure at all n locations
gannnnnnnnnnnnnnnnnnnnnnnnnnnnnnnnnnnnnnnnnnnnnnnnnnnnnnnnnnnnnnnnnnnnnnnnnnnnnnccacgcgtccgaaatcttttaacatctcaccatcttcttcttcaatggaaactccggattaaatgacacttctgtaacttcctatatttactaaaatgccatctcgcctctctccgccagatattccgccgctgcaaccgacgcctacggttagtgacggccatcatcgtttccagactcttccacttatcatagccggttctctgactttaaccggagttttactcatcctcgtcactttacttatttaccgaagactctaccgaaaccgtacggctccttcagatcttatctccaactccaagtctcctcaacactaccaatgtcgacgcttctcttactctaagctccgccgcgctacaaactctttctccgagtcgactcacctcggtcacggcggattcggctctgtttacaaagctgatttcccgagtggcggcgattcactcgccgtcaaagtcatggatacctccgctggttctttacaaggcgaacgtgagtttcacaacgagctttctctctcttctcacttaattggctctcctcatgtcgtctctctccttggattctcctccgatcgtcgtggtcggaagcttatcctcgtctacgaacttatggctaatcgtagtttacaagacgcgctttttgatcgcanatgtgtggagcttatggattggaacanaaggtttgagattgccacggatatagcaaaagcatcgaggtt

SEQ ID NO: 100355 - DNA, 541 bp, Arabidopsis thaliana columbia
  unsure (1)..(541): unsure at all n locations
atttgaggaccnnnnnnnnnnnnnnnnnnnnnnnnnnnnnnnnnnnnnnnnnnnnnnnnnnnnnnnnnnnnnnnnnnttttgtgtggtggggttttttttttttttggatcaactggagctttatttagttaatagcacatagtctatatacgcctgcatatcaccagactgagaacaagttggatacacatgacaagttctagtatatacattaactaaaattggacaatggtggggattgctgcggaagtatttttcctatataacacaaagaaaacttatattgggagctgattcacttcatcgagcaagagctttgtaatgccatcagaattggtcggccagttgaggaaatttctgcagcagccaggcaactccctttatagcagccagaactgtttctccaggtttgattgcaggctcaacgcagtctcttccatatacgatctgtctcttcccatcaatcacctctaaccggtaaaagctgcaacctttgctaaatgggaagttctttcctttccattctaaatgccatgaaac

SEQ ID NO: 100356 - DNA, 688 bp, Arabidopsis thaliana columbia
  unsure (1)..(688): unsure at all n locations
ttaggacgcacttagaatagcttgacgtcgcatgcacgcgtacgtaagcttggatcctctagagcggccgcttttccttttttttttttttttttttttcaagagaaaaacaaccaccaggtttgggtttgtatacatatataacttaggttgtgttacaacttaaaacatcattgcacatcctaaaaaatttacagcgacagatgtgtttttgttgtgctcttctttatccactcaagtaaccatcatcactataacttacccaatctagtttgggtttggcttccacacggaacatgtagccatgggtcgtctcttccagaagaggtagagcgctccttcatggcctcccagtttgtagtttttgtcataagctttcagcatctcactcgctgcaaacgctgcagatgtgctgaccggccaacccgtgaacccagccatcatcattctgaccctccatttccccagtacactcgtgtctgctctactctctgctgactcctcacatgctatcatgttcactatgtctattgctacacagncgttgatctgcgctgattctctgcttatatcccgtggccgtgctgcatctatcgactcacacatcgctgtgtagtaatccagtgtttccacaaaccgcgacaggaatggcgaggagtttgtgttggattcttgctctactagagta

SEQ ID NO: 100357 - DNA, 469 bp, Arabidopsis thaliana columbia
ttgggacacactctagaagacttatgacgtcgcctgcacgcgtacgtaagcttggatcctctagagcggtcgcttttgtgggttgtccttttttttttttttatgacaactaaatatacttttatgtgatataaacaaggactattcacttgcacaagatagtcatagattaaatacaagatgcgtgccactaggtccaaataatcaaccaatcggaattgccgggtcgagttatatgacgcgcatcttcagaggtttttctttctgagggtatcaatgaatcttttctgtgtaatatcggttctggatatataatcaagaaaatcggggaagctgatttctccattggcagcgggtttattttcatggacgagcgggggggggggactcattttcttgggcatggggagagggggaaacctgggaaaaaagagcgctttgaatctttggcaccgggccccagaaaaac

SEQ ID NO: 100358 - DNA, 563 bp, Arabidopsis thaliana columbia
  unsure (1)..(563): unsure at all n locations
accccgaacccggccccnnaacccggccccatccnannaaagntaaaaagggnngcccgggtttcnaaaaccgnnatgtaaaagggtncatgaacactttaaaaattgattgcttgcaaaatagttttgtcagccaaaacacaacacaacagcttgataaatattgtagagcttcaaacgattagactgcaaaagaccttcaaagttcttcaccaaatttgacttatgcctaacggccctaatcatcatcagcttcagatcataaagacatttctttcttttctttatattcctccagagttatcagtgactccttgtttttggtccaatctgcaggtcttggcataattatcgcaatatacccttcgcggtcagccgttgaattaagaagctctggttgcttaatcaatctctcgttgacctccaagagagagcctttaacgcagcacctaacaatgtaagtatcttttgcagtggaaactttgcacaatgctgtattcgattcagagcgcaacgcattctttttacgcttgccggagactttcaagacgctacgatcagac

SEQ ID NO: 100359 - DNA, 509 bp, Arabidopsis thaliana columbia
  unsure (1)..(509): unsure at all n locations
nnnttaggcgcactatagaatagcttgacgtcgcatgcacgcgtacgtaagcttggatcctctagagcggccgcttttttttttttttttttttttttttacgtctcaagatactgtatagatcaatttatcagtttccatgaaaaatatttttttgttgttgttgtggttgtttacatgaaggtttatctgggagctgtggaagaaggcaacattgacgacaaaggacaagtttggagatgtgcatacaagattgatgaagaagaattataaggaagtacctcaatggtggttcgttgcggttctcgctgcttcctttgtgctagctctttatgcatgtgagggatttggcaaacagcttcagctcccatggtggggacttttactcgcttgtgccatcgcctttaccttcactttgcctattggagttatcctagcgaccacaaaccagcgaatgggtcttaatgttattctcggacctgatcatcgggttcttgtatccgggaaag

SEQ ID NO: 100360 - DNA, 458 bp, Arabidopsis thaliana columbia
aaaaaaagtcattcgttttaatcgcattacgctttcggatggcgcgaaaggttaaattataaaatggacgattttacgaatccacatattcctggatcaacgggaacccttcgtttctttcccacccgcgtgttatccccgtttctcaaatttctcatctttccgggaaaattcactttttttttttcctgggaagattcgttgtgttgtgaattttagtgggcaccttcaaattttcgatttttttttttattttccttgtctcttacctgatttggtgatttattattacatcaaccactcgattcgttagatttccggatttgaaaaagagtcaccaacttgtacggattctcgttttggggatcgagtattgctgatttgtgattttgttgtttttgggtactttccctttgtggattcggatctggttggtggctttgtcaaatgggcgcatt

SEQ ID NO: 100361 - DNA, 509 bp, Arabidopsis thaliana columbia
  unsure (1)..(509): unsure at all n locations
nnnnnnnnnnnnnnnnnnnnnnnnnnnnnnnnnnnnnnnnnnnnnnnnnnnnnnnnnnnnnnnnnnnnnnnnnnnnnnnnnnnnnnnnnnnnnnnnnnnnnnggcaaaaacaaatccattgtatttcaactgatatgtctgtcaaagagatctatttgcacactgaaacgcaaattcaatgcataccaacacttcaatatatcagtaatctaaaagcttgaacattctttataatagaaaagcaaagctcagacggtgctgaggtgaaccaaagataataattgcgcataacacattgatttgatccttagtaatacgccttcctgggatttcccagtggattgggtctgtgtttgtaacccagcatcatccgcttcttgtactgctcgtatatatcatcctcaggcttgacttctcctggagcggaagcaccaactcccaagttgtttgtctttacatcgcctgccattatagggtctgccataccctttctggagcttcctatacct

SEQ ID NO: 100362 - DNA, 600 bp, Arabidopsis thaliana columbia
ttaggacaactatagaatactatgacgtcgcatgcacgcgtacgtaagcttggatcctctagagcggccgcttttttttttttttttttttttttttttttgagagagaccctaaccaaataaacttctacagaagattaaatttacacaaacatcacacaatacatacattaacaaaatatacacacaattttagaggtaaagtgaaaaggttataaaacccaaaactcttgaaaagatgagtgaccaaagagaagacatttcaagattctagaagggaagcaaccatccaacagtccaacctaagagcaaaccagcaccaatgagactaaaccctaatgcaaaagccatcatatatctcccagtctcaccctttttcttcttctcccctctctggtttctcttcttcagattcattcctttgacctgttcctcttgttcttcttccttcttcatctgcagataaagagcttccatttcaagaagctttaaccattgcttataagccaacatctgactggcttgtttcaacaagattgttatcacacggtctttctcagcgcaagcttctctgcgctggtctctctgcttctcttgccc

SEQ ID NO: 100363 - DNA, 1033 bp, Arabidopsis thaliana columbia
  unsure (1)..(1033): unsure at all n locations
aatacgactcactttagggaaagctcgtacgcctgcaggtaccggtccggaattcccggttcgacccacgcgtccgcttactctctctctgatcgtcgtctttttcttttgattctgcttttttccgctaggtttctgagatcttccattcgtctcgaattaagttgctacgatgaaaacagcaaaggggaaagataaagttaagaccacaaaggaagccttgaagccagttgatgacagaaaggtgggaaagaggaaggcaccggctgagaagcctactaaacgagagactcgtaaagagaagaaggctaaaaaggacccaaacaaaccaaaaagagctcctagtgccttctttgtctttctagaagattttagggtcacgttcaagaaagaaaatccaaatgtgaaggccgtctctgctgttgggaaagctggagggcagaaatggaagtcaatgtctcaagctgaaaaagctccatatgaagagaaagctgcaaaaaggaaagctgaatatgagaagcaaatggatgcatacaacaaaaacttggaggaagggagtgatgaatctgaaaagtctagatctgagataaatgatgaagatgaagccagtggggaggaagaactactagagaaggaagcggcaggtgatgatgaagaagaagaagaggaagaagatgacgatgatgatgacgacgaggaagaagactaaatcagggatagaaatcagattttgtatctcaagcttaactgcagatccttaagcagaagtaagtattttgtaatttgtgtgtcgacgagaactatagatctaaaatcgtgtgtttttttgtttttcttttcctaagaaagcgaaacagttgttagcatctctcaggatgtctgtttcagctttttgccacaacaaacaatgtaccaatgtctgcgttagtgatcatccaaaccaaaacaaaaaaaaaaaaaaaaannnnnnnnnnnnnnnnnnnnnnnnnnnnnnnnnnnnnnnnnnnnnnnnnnnnnnnnnnnnnnnnnnaac

SEQ ID NO: 100364 - DNA, 545 bp, Arabidopsis thaliana columbia
  unsure (1)..(545): unsure at all n locations
nntttaggcgaactatagaagtagcttgacgtcgcatgcacgcgtacgtaagcttggatcctctagagcggccgcttttttttgggtttggggtgtttttttttgggacaaatcatgcgattgtataattttatttacgttacagaaagaattctggtataccaacaataacctggaaatttgtgtaccacatatgccaacactaaatttaagccgcaagcaacttctggatgtccttctcgatttggaaaggagaagttgtgggagggtatctctcgacaactttgccctttttatcaaccaagaatttctcaaagttccatttgatgatatcaccaaggaaaccaccagcattggatttcaagaacttgtagattggagctgtgcttggtccattcacatcaaccttgtcgaatatagggaactctgctttgaaccgggtgcaagcaaattgcttgatctcagggtttgaaccgggttcttgacctccaaattgattggaagggaaagcaagaatctcaaatccttggttcttgtatttttcg

SEQ ID NO: 100365 - DNA, 772 bp, Arabidopsis thaliana columbia
cctcccatcatcagttttagtgatgcatcatttggctaccctggtggtccgttgttgtttaggaacctaaatttcggaatagatctggacagccgtattgcaatggtgggacccaatggtattggtaaatcaacaatactcaaacttatttctggcgatctgcaaccaagctctggaacagttttccgttctgctaaggttcgagttgcaccccgcggccggcaccatgtggatggactagacctttcatcgaatcctcttctatatatgatgagatgctacccaggagtaccagaacaaaagctgagaagtcacttgggttctcttggggtaactggaaatcttgcactgcagcccatgtacactttatcaggtggtcagaaaagcagagttgcatttgcgaagataacattcaagaaaccacacttgctattgcttgatgagccgtccaatcatcttgatttggatgccgtggaagctttgattcaaggacttgtcttattccaaggcggtatttgcatggtgagtcacgacgagcatctgatatcgggaagcgtggacgagttgtgggttgtgtcagacggcaggattgcaccattccatggaaccttccatgactacaagaagcttctccagtcttcaacttaagctgcgccgcatttcttgtattccccaaatccatgttgcgtttttgtttaccctcaatacgacacaagagtcctttatacctgagaatttggcgacagtattttgctttatgtattaaggttga

SEQ ID NO: 100366 - DNA, 535 bp, Arabidopsis thaliana columbia
  unsure (1)..(535): unsure at all n locations
nnnnnnnnnnnnnnnnnnnnnnnnnnnnnnnnnnnnnnnnnnnnnnnnnnnnnnnnnnnnnnnnnnnnnnnnnttgggtttgggttttttttttttttttttttttttaaagaaacttaatttattctcctgatttgttatttaagggtttagagttttacatcagaagttaaaatatcttacagagtaagtaaacactcaaaagtacataaacaaaggagagggactagtcatggtgttgctccgcgtggttgagatgaagagcaccttcatggttcttgtgaacttccaccttgaacttttcctctttttctcccctcttcaacttcagtagcatgttgttttttgcagcctcgccggttacctcagctttagcatgcacaacctccagaaagttcataagggaacaaggagttagacctctgctgaatggtcttgacagcctgctcagcaacatgctcacttctggatcatctccggggaattncctccatccagattcaggtcactggctgcagccaagacggngggagga

SEQ ID NO: 100367 - DNA, 528 bp, Arabidopsis thaliana columbia
gggacagctggtacgcctgcaggtaccggtccggaattcccgggtcgacccacgcgtccgattttagtcaaaagaatcacagagagtattttttttaggtatcgtgtaatggctttgactacaaaacctcaccatcttcagagatctttcctctctccgtcgcgtgtttccggcgaacgatatttggaatctgcgccatcatgtctgagattccgtcgcagcggtgtccaatgctcggtggtggctaaggagtgcagagtgaaaggagtgaaagcgagacagattattgatagtagagggaatccgacggtggaggttgatctgattaccgatgatctgtatcgttcggctgttccaagtggtgcatctaccgggatctacgaagcgcttgagcttagagatggagacaagagcgtctatggtggtaaaggtgtattacaggctattaaaaacatcaatgaacttgtggctccaaaactcattggagttgacgttaggaaccaacctgatgtccatgctcttaagccg

SEQ ID NO: 100368 - DNA, 625 bp, Arabidopsis thaliana columbia
acacactagacgagctatgacgtcgcatgcacgcgtacgtaagcttggatcctctagagcggccgcccttttttttttttttttttttttttttttttttgatagctttttattgtaatagtaaagaaaatccaaatctttaggtattacaatgatagtaattgttgaaactcccctattatttttgattgacttaaaagggagtccaaccaaaagatattctagacaaagcctcaaaaaatagccaagatcaaatcacaaatcatacacatctcagttgagatgaaaaacaaaacaaatcacatatgaaaccggagaaaaaaagacatatttatcatgtatgtatatatagggttcatcttaatcgaagaattcccatttgaatcgcggagggaccggtttaaccgtttcagccgccttggccgtcgatgcggaatcaaacatttcccattttgaagctacaaccgccggagtacctgatgaggatgatgcattggaattcctaggctcctcctcctcttcctccacaaacgataacaaatcgcgttgctcaaatcgcgtttgcgtttgcggtttgtggcggacggacttggtgacttcaacttttttggcagagttttttgac

SEQ ID NO: 100369 - DNA, 430 bp, Arabidopsis thaliana columbia
aaaacaaaaaaaaaatgaggaagagctgaaagattcgcgacgaagcaaaacgacagtgttatctatcgccgccttgttgttctgtttaacaagtgtagaggaaccaaagttgaaaactttgaacttcccattgattttaatgttaattactgatcattcgaatctgaaattgaagcatatgagtgcttaatctgtgagtgttagaagaagtagaagaagatgcagagggttagggtttcatctcaaagagcagttgtgcataagcttggtgattctcagatgacattatctcccaaatttagagtagctgcatcgatacaatcgacattgttcgatagatcatcggaattagaactgtctcttagaggagagcccttgattcccggtttaccagacgatgttgcgcttaactgtcttttacgggttccag

SEQ ID NO: 100370 - DNA, 553 bp, Arabidopsis thaliana columbia
  unsure (1)..(553): unsure at all n locations
ctctnnnnnnnnnnnnnnnnnnnnnnnnnnnnnnnnnnnnnnnnnnnnnnnnnnnnnnnnncattgctccacgcgtccgcccactcgtccgctctctctctctctctctctctctctctctctctctctctcttttggactttctcaatccatatccctctctctgttttttctaatttgagcctctaaagtctcctcgttttgttcatgttgttgttcaagtgaagaagctcaattatgtttacaacattgttgtaatttcaaaacttcataagaatttctctgataataaagaaaaagctggagtagaactattttaaagtgtcatcatgaagagactaagcagctcagattcaatgtgtggtctaatctccacttctacagatgaacagagtccaagagggtacggaagtaattaccaatctatgcttgaaggttacgatgaagatgctacactaatcgaggaatattccggcaaccaccaccacatgggtctatcggagaagaagagaacattaaaaggtccccaaggcaaagcccttgagaagaattt

SEQ ID NO: 100371 - DNA, 375 bp, Arabidopsis thaliana columbia
agggtgaggaatctgacaagtcagtgtcagaggtcaatgacgaggatgatgctgaggatggtagtgaagaggaggaggacgatgactaagaagctgaatgttggtagcattagtatagatggctgacgaggcttcccaatacagatctcttttcgattgttagttatcatttatcaatatcaaatcaaaccaagctatccagtagctttaataaggaccattgtgacaagtgactttcagtttgaaattttatgtcagagactttgattcaaatttgtaatttctttctaatgtcgcccaatctgggtataaactaagagttatagctttggttgacactacttagtgagattagaatcaactccttcatgttat

SEQ ID NO: 100372 - DNA, 588 bp, Arabidopsis thaliana columbia
  unsure (1)..(588): unsure at all n locations
ggaccgaagatattttacaagcctttctccactaagcccttctctcttcttctcttggcctctcacttgaatctcccacaaagcgatcaatcacaaattccttcttctctctctctcttttcgtccctaagaatcaattatgaaaggagctaaatcaaagactgaaaccaggagctccaagctctctgtgaccaagaagccggctaaaggagcagggcgtggcaaagctgctgctaaggaccccaacaaaccaaagaggccagccagtgctttcttcgttttcatggaagatttccgtgagactttcaagaaggaaaaccccaagaacaagtctgtagctactgttggaaaagctgctggagacaagtggaagtccttgtctgattctnagaaagctccttatgttgctaaaggctgagaaacgcaaggttgaattatgtgaagacccattaaagctttcacccangaaactggnggaaggtccaaagggaggttgagggttctttgccaagtcagttttaggggcaattccggggggtttcttttgggtgtgttgtgggaggggccgtgctagagcttattttgtga

SEQ ID NO: 100373 - DNA, 781 bp, Arabidopsis thaliana columbia
cgttaactgtgactttcatgtgcgtcggaggcggagctgagatgctgaacctgcaagtaaccgggaagacgatcttatctagtattcgttgtcagagaaagatgtcgtctacttgttcttcgtacgcatttgggccgtacaaaatcgatccccgtgaagtgttctacgcaacgcctctctcttatgccatggttaatctccgtccgcttcttcctggtcatgttcttgtctgcccgagacgccttgtgccacgatttactgatcttacagctgatgagaccagtgacctgtggcttactgctcagaaggttggctctaagcttgagaccttccataatgcgtcttctctcacattagccatccaagatggccctcaagcgggacagactgttccccatgtacacattcatatcttgcctcgtaaaggtggtgactttgagaagaatgatgaaatctatgatgctcttgatgagaaggagaaggaactgaagcagaagcttgatctagataaagaccgggttgataggagcattcaggagatggctgacgaggcttcccaatacagatctcttttcgattgctagttatcatttatcaatatcaaatcaaaccaagctatccagtagctttaataaggacccttgtgacaagtgactttcagtttgaaattttatgtcagagactttgattcaaatttgtaatttctttctaatgtcgcccaatctgggtataaactaagagttatagctttggttgcccctacttaaagagatttggatcc

SEQ ID NO: 100374 - DNA, 779 bp, Arabidopsis thaliana columbia
  unsure (1)..(779): unsure at all n locations
nnnnnnnnnnnnnnnnnnnnnnnnnnnnnnnnnnnnnnnnnnnnnnnnnnnnnnnnnnnnnnnnnnnccacgcgtccgcaaagaggcctgccagtgctttcttcgttttcatggaagatttccgtgagactttcaagaaggaaaaccccaagaacaagtctgtagctactgttggaaaagctgctggagacaagtggaagtccttgtctgattctgagaaagctccttatgttgctaaggctgagaaacgcaaggttgaatatgagaagaacattaaagcttacaacaagaaactggaggaaggtccaaaagaagatgaggaatctgacaagtcagtgtcagaggtctcatggccgggttgatgctgaggatggttgtgaagaggagggaggacgatgacctaagaagcctgaatgttggtagcatttagtatagatggctgcaaaaatctctctgtttttattctttacttgaaatgttaaacggggctgattaaaatgggtctttctttttatctttttatatttccacaatctctcactaaagccctctgaatggagaaagtgaattgtagaatgtttagatggtgaaagagagacttgcagctctgtactctttgctttataaaacgatttagttttcttttctcagtttattatattgttgaattgatgatgatgttagctaaatttctttatactttgtaaaagaaatggtccctctagttttgatgcgttnnnnnnnannnnnnaaaaaaaaaaaaaaagcgggcccctcgc

SEQ ID NO: 100375 - DNA, 740 bp, Arabidopsis thaliana columbia
cttcttctcttggcctctcacttgaatctcccaccaagcgatacgatcacaaattccttcttctctctctctcttttcgtccctaagaatcaattatgaaaggagctaaatcaaagactgaaaccaggagctccaagctctctgtgaccaagaagccggctaaaggagcagggcgtggcaaagctgctgctaaggaccccaacaaaccaaagaggccagccagtgctttcttcgttttcatgtaatcctcgcctcaaattctttggttcagtagcttccatggatacaacttttattgccgtacaaaagtcttttcatctggttactgccaatcattttttttaagggaagatttccgcgagactttcaagaaggaaaaccccaaggacaaagtctgtagctacttgttggaaaagctgcttggagacaagtggaagtcccttgtcctgattcctgagaaagctcccttattgcttgctaaggcttgggaaacgcaacggttgattacggggaaggaccttttaaagcttacaacaagaaactggacgaaggtccaaaagaagatgacgaatctgacaagtcagtgtctgaggtcaatgaccaggatgatgctgaggattggagtgaacaaggagaggaccattgactaacaacctgaatggtggacgcatataaattcaagggctgcaaaaaaatctcttctggtctatattcttcaacttggaaaaggtaaacggggg

SEQ ID NO: 100376 - DNA, 980 bp, Arabidopsis thaliana columbia
atgcaatatcctttattgattgaccgaagatattttacaagcctttctccactaagcccttctctcttcttctcttgtcctctcacttgaatctcccacaaagcgatcaatcacaaattccttcttctctctctttcttttcgtccccaagaatcaattatgaaaggagctaaatcaaagactgaaaccaggagctccaagctctctgtgaccaagaagccggctaaaggagcagggacgtggcaaagccgctgcgaaggaccccaacaaaccaaagaggccagccagtgctttcttcgttttcatggaagatttccgtgagactttcaagaaggaaaaccccaagaacaagtctgtagctactgttggaaaagctgcaggagacaagtggaagtccttgtctgattctgagaaagctccatatgttgctaaggctgagaaacgcaaggttgaatatgagaagaacattaaagcttccaacaagaaactggaggaaggtccaaaggaagatgaggaatctgacaagtcagtgtcagaggtcaatgacgaggatgatgctgaggatggtagtgaaaaggaggaggacgatgactaagaagctgaatgttggtagcattagtatagatggctgcaaaaatctctctgtttttatctttacttgaaatgttaacggggctgattaaaaagggtctttctttttatctttttaaatttccccaatctctcacgaaagccctctgaatggagaaagtgaattgtagaatgtttagatggtgaaaaaaagacttgcagctctgtactctttgctttataaaacgatttagttttcttttctcagttaaaaaaaaaaaaaaaaaaaaaaaaaaaaaaaaaaaaagggcggccgctctagaggatccaagcttacgtacgcgtgcatgcgacgtcatagctcgtctataggtaaacggaattgcaactccaaacccggggcgcggggg

SEQ ID NO: 100377 - DNA, 530 bp, Arabidopsis thaliana columbia
  unsure (1)..(530): unsure at all n locations
tgattctgccagctgctnnnnnnnnnnnnnnnnnnnnnnnnnnnnnnnnnnnnnnnnnnnnnnnnnnnnnnnnnnnnnnnnccacgcgtccgattaattgttaaaaacccacaaaatatctacgaaaatggaagaattagaaaaaacccagaaatttcagaagatgaagaagcaacaacaagagaaacaagaccagtcttcaccaatcaacttcgagatgtcttcaagatcatcacttcattcattaccacaaacaacgattgaatcacctcctgattcaccaaccctctcttcaatccccgatagccatggatcttctccttcacacgattattccaactccttctgtggccaagacggagactcctttttagggtttctaacggagaggaggagaagaaagtcagcgagagtaggagacaaattgagaccgagcttttcttcttcttgttctactccccgtgaatcgaaatgggcaagcttgattacgaaagctctacttggatttagggttattgcgtttgtttcgt

SEQ ID NO: 100378 - DNA, 632 bp, Arabidopsis thaliana columbia
actatagaagagctatgacgtcgcatgcacgcgtacgtaagctcggaattcggctcgagcaaaaccttctcatgtcttcttctctcctcgacctttgaggtggaaaattaaatatattcccttagctttttttctcctttagttttcttcttcttcttgagttttttttcttttgatcctctctaatttccttgttgattcatcgactagatctaattcttctcacagaagactgagtgtgttctttctttcaaatctttcaaaaactagggtttttactgtcttgaaatcatatttattcttctaaatttagcaaaaagaacacgatttactttccatttcagtcgtcttgtcactctctctctcttctttaaagtctccctttttagcaaaaattctctctctcacaaaatttatttcctctggcttcttcttcctcctcctccatctcttctctttactctctctttaatcatctctcattcttgaatcttgatccatcaaaatcaatcccgttctcgaaagatccattaaaatcaaaacctaagctctctctctggcttctagggtttttttgttcggtggtgatggcgagagaaaagattcagatcaggaagatcgacaacgcaacg

SEQ ID NO: 100379 - DNA, 490 bp, Arabidopsis thaliana columbia
cacgtgtattctcgcattgtctgaagggagataaaagcggtggaggtataatggttctaggtcaaatcaagaggccagataccgtctatactcctcttgttccatcacagtgagttctcaatctttctattatacatttaaactcttatcacattacgtaaagagaagcacaggtagattttggggtacttaacatcatgatgaatcagacttcaatgttagggtaggattcctagatttatttttgtataagacaaggaggtagatccagggtttaactgatgattatgaaagtcatttacacagatataaatgcgagagttgttacaatatctgctatatcattctgcttgtaggaatcatatgatccagaaatagacattttgtagctgactctatggaaataatatgcagttcgtatatcttgggttaggaaaatcaaaatatataaacccacgtcttgattcagataatatgctgcaaaaaaata

SEQ ID NO: 100380 - DNA, 573 bp, Arabidopsis thaliana columbia
  unsure (1)..(573): unsure at all n locations
cttcaaaccctacgaagatcttctccttcttcttcaagaatcgatcatgaaaggagctaaatctaaggctgaaaccaggagcacaaagctctctgtgactaagaagcctgctaagggagccaaaggtgctgctaaagatccaaacaaacctaagaggccttccagtgccttcttcgttttcatggaagatttccgtgtgacgtacaaggaggagcaccctaagaacaagtctgttgctgctgttggcaaagctggtggtgaaaagtggaaatccttgtntgactctgagaaggctccttatgtggctaaggctgacaagcgcaaggttgagtatgagaaggaccatgaaagccttcaacaagaaattggaggaagggccctaaggaggctggggaatctggccaggcagttccagaggttaccggttgaggttgttcctggggtttgccgtttaagggggggaagccgttcttaaaaagttaagttttggtgcgnatttngaggttcaagnatcttncggtntttaccccccctnaatgtatcgctgtaangttttttttttccnccnncagc

SEQ ID NO: 100381 - DNA, 1070 bp, Arabidopsis thaliana columbia
  unsure (1)..(1070): unsure at all n locations
taggtgcactatagaagactatgacgtcgcatgcacgcgtacgtaagctcggaattcggctcgagaaaatatcttatgagaagaaattttaacatcccccacttaaccctctcatctctcggcctctcattcgaatctccttcacaaagcgtacaaatcacaaacacgtagttattctctctttactctctctatttctctctcttcaaaccctacgaagatcttcttcttcttcttcaagaatcgatcatgaaaggagctaaatctaaggctgaaaccaggagcacaaagctctctgtgactaagaagcctgctaagggagccaaaggtgctgctaaagatccaaacaaacctaagaggccttccagtgccttcttcgttttcatggaagatttccgtgtgacgtacaaggaggagcaccctaagaacaagtctgttgctgctgttggcaaagctggtggtgaaaagtggaaatccttgtctgactctgagaaggctccttatgtggctaaggctgacaagcgcaaggttgagtatgagaagaacatgaaagcctacaacaagaaattggaggaaggccctaaggaagatgaggaatctgacaagtcagtttcagaggttaacgatgaagatgatgctgaggatggcagtgaagaggaagaagaccatgaataaaaaggtgaagttgggggagccgtaatattagaaaggctggaagggaaatcctctcgggagggtttttaatcctctttccccttaaaaaaagggttaatttccggcttgggttaaaagagggggttttttctaaattttaattctgaacaacccttattttcccttaaccgggagggttttcgcgttttttaggtaaaacccttttttacccttttttttccccaacctgggtttctttcccgggggttaatggggaaacaaagggaaaatggtgtaaaaagggttctaaaatatgggggaaaaatggaagaaaaattttgggccacccccttttttatatgggaaaggaatttaaaccttttttaaaancacacaantagacgtcttccgtacac

SEQ ID NO: 100382 - DNA, 882 bp, Arabidopsis thaliana columbia
  unsure (1)..(882): unsure at all n locations
cgcggtaccggttccgaattcccgggtcgacccacgcgtccgtcaaaccctacgaagatcttcttcttcttcttcaagaatcgatcatgaaaggagctaaatctaaggctgaaaccaggagcacaaagctctctgtgactaagaagcctgctaagggagccaaaggtgctgctaaagatccaaacaaacctaagaggccttccagtgccttcttcgttttcatggaagatttccgtgtgacgtacaaggaggagcaccctaagaacaagtctgttgctgctgttggcaaagctggtggtgaaaagtggaaatccttgtctgactctgagaaggctccttatgtggctaaggctgacaagcgcaaggttgagtatgagaagaacatgaaagcctacaacaagaaattggaggaaggccctaaggaagatgaggaatctgacaagtcagtttcagaggttaacgatgaggatgatgctgaggatggcagtgaagaggaggaagacgatgattaagaagttgaagttgtggtagcgtaatatagaaggctgcaaggaatctctcggatgtttttatctcctctcttaaaatgttaattcggctggttaaagtgggtttttttttttttccttttctttttcttactgatgtttcgttttagtaaactattacctatctcccactgattctacgggtaatggaaaaagtgaatgtagaatgtttagatggtgaaatgagagatttgtagctctatataatgaatgatttagtttttaaannannnnnnnnnnngnnnnnannnnnnaannnaagnnnnnnnnnnnnnnnnnnnnnnnnnnnnnnnnnnnnnnnnnnnnnnnnnnnnnnnnnnnnnnnnnnnnnnnn

SEQ ID NO: 100383 - DNA, 555 bp, Arabidopsis thaliana columbia
  unsure (1)..(555): unsure at all n locations
nnnnnnnnnnnnnnnnnnnnnnnnnnnnatgatcctgccagctcnnnnnnnnnnnnnnnnnnnnnnnnnnnnnnnnnnnnnccacgcgtccgaacagatccacaaatttcataaggttcagagcaaatcggagagagagagatggtgacgaaaacggaggagatacagttaaaccaactcgagaatcaagttgagaatggaggaggaggtgtttgggagtatctgtgcctcgttcgtaagctcaaggttcgccgatcagagattgtgctcaagcatggtctctcgatcttgaacgattcgggaaagcgatccgctcttggtccagatgaatggaccctgtatgagcaggtagcaattgcagctatggactgtcaatctctcggtgttgcacagaattgcatcaaggttctaaagaagaaatttccggagagcaaacgtgttggcaagctggaggctctgctgctagaagcaaagggaatgtgggaagaggctgaaaaagcatatacaagccttttggaggataatccacttgatcaagtaattcacaaaagaaag

SEQ ID NO: 100384 - DNA, 677 bp, Arabidopsis thaliana columbia
gggctattgcgtcctgtaaaggcttttttggagggagataaggctagaaactacttgacccaaaaaacaaaggaggagttactgcatggcagtgtcagtgaaattaccaggcggtattatgaattagctgctgatgttgttagcgtggcaagaaaaacacagtcatcgcttcagaaattgcgtcaaaatgcacagagacgaggaggtgcagcatcaggtgtttctgatcaaaatgtatctgaaacagacaagatgtgtatgcagttgttccttgatattcaggagtatggccgaaacgtttctgctttggggctgaaaccggcggatattccggagtactgttccttctggcaatgcgttgcacctgcggataggcaaaactcaattagtgtttgaggacgctcgcttccatacatacatcattgtggtatcatatatctgataataagaaatcgctgcttcttcttttctatagcttgtgtttgtttgctttaacagtgaagataagaggaagagagttttgttgaagagaagagtggttttttttttttccccgccgaagttgcattatgtgaggtctgagtttagtgccagctttggccatttaatcttttatgtaggactatttcatcttcagtatataacacgcaccaaagggaatgaaacttttaactctt

SEQ ID NO: 100385 - DNA, 344 bp, Arabidopsis thaliana columbia
  unsure (1)..(344): unsure at all n locations
aacgatgatcagcttcaagaacaatacagtgcaaaaaaagtctcgagtttntccgaagagaaagaagcgagtttggaagaagtcaaacaagcttttaatgcgtctttcgaaaacaaagatggtttcattgatgctatagagttacagagagttttgacaatctttagggtttaaacaaggatcttacttagacaatttgtttggtaatgattaggtcattagatgggaacaaagatggaaaaatcgattttaacgagtttgttaaattcatggagactagcttttattgaaccaaaaagttttgtaatgacattcattctttaatctaatgttaatacttcatt

SEQ ID NO: 100386 - DNA, 525 bp, Arabidopsis thaliana columbia
  unsure (1)..(525): unsure at all n locations
nnnnnnnnnnnnnnnnnnnnnnnnntgacgtcgactgcacgcgtacgtaagcttggatcctctagagcggccgccctttttttttttttttgattccccttcattattgttttcctcattttgggcaagacaaaataatatattcatgtccaacactaaccaacagcccccaaacttgatggttcaacggtttgcaccatctggggcgttgtggttgctcactggagcagtactagaagactgttgctgatcatctgaaagagcttctgtaggttgcaactgactgctcgaaccaccaatgggatcagccgaactctgatcaactgacaagtttccaagtcgttttgccactgcatctgccctatcaacagattggggggccggaacctgtaggggttcctccttagcacccaattttgccaattatcgcgcttccttatgaagtcaccctgcacctcaacatgaggggaattttgaagagccctccctatcgctggatattatctgaaagtcctgaaccttttt

SEQ ID NO: 100387 - DNA, 516 bp, Arabidopsis thaliana columbia
  unsure (1)..(516): unsure at all n locations
atgatttnnnnnnnnnnnnnnnnnnnnnnnnnnnnnnnnnnnnnnnnnnnnnnnnnnnnnnnnnnnnnnnnnnnnnnnnnnnccacgcgtccgaaaaaaaaggaaccatcaaagaggaagccaagaaaaaaaaacgtcggtgatgagaggaggggctttgttatgcggacaagtccaagatgagattgaacagctttcgagagagagtagtcattttagtctttctactggaattttaccttcacttggtgcaagaagtaatcgacgagttaagcttaggagattcgttgtatctccttatgatcacaaatacaggatatgggaggctttcctagtggttcttgtggtttacacagcttgggtttcgcctttcgagtttgggttcttgagaaagccaaggccaccactatctatcaccgataacattgtgaacgcattcttcgccatcgatatcatcatgacattctttgttggttacctcgataaatcgacttacctcattgttgatgaccgtaa

SEQ ID NO: 100388 - DNA, 517 bp, Arabidopsis thaliana columbia
gataaaacaaatactcatatctcatcctttggcatgtttaggagccatctctcagctggacggagacaacacagacacttgtgccagagagggaacacaatcttcccaagtcttcgaaaggtttcaaggatatatccatggcgatccagaagatcctctttgcttcacttctcatatgctcactgatccaatccatccacggggcggaaaaagtaagactcttcaaagagctggacaaaggtgcacttgatgtcaccactaaacccagccgagaaggaccaggtgttgttttggatgccggcaaggatacgttgaacattacatggacgctaagctcgattgggtctaaaagagaggctgaatttaagatcatcaaagttaagctatgctacgctccacctagccaagttgaccgaccatggcgcaaaacccatgacgagctcttcaaagacaagacctgcccacacagatcatagccaagccttatgacaaaacacttcaatcaactacttggact

SEQ ID NO: 100389 - DNA, 670 bp, Arabidopsis thaliana columbia
agccagctgatcagccataaagctgttaagagggaagaagctcaggttcaggctgatgcttgtccattaacgccatcaagttggaaggggttttgggacggagcagacagtaaagacatgggaatattttccgtgcctctgttatctccttgtccatctcttggacactctcaactcgtagttacttaagcttcagagggtcaaactggaaaaaatcaacattggattgttttcaaagcttctagattagctgattgtaaaaaaatgttttactatattcattcattcttcttaaatgcaattctttctacccttccttaaacgagctcaaacttacaaaaacttagggaggtcttaaaccaacaaacctgtcttttctagatcactatcaatgtccagcctaaagagatacagaatgttcaagacgcacagatagaagagaaaactaatgctccaccagagcttcgacttccagatgtacttgatgctaaggtcgtaacatgttcacgtcatacaacatggcaagattacgtagactatttcaagtcaccaaatcaaaggaaacaaccagagagaaatactgaagatgaaagtgtactgattgcattttagtccttcaccctgagaatgttaagacgttgattatcaaatgacaccacaaactcagtcg

SEQ ID NO: 100390 - DNA, 1026 bp, Arabidopsis thaliana columbia
cgactcactatttggaaagctggaccgcctgcaggtaccggtccggaattcccgggtcttcccacgcgtgcgcccacgcgtccgcccacgcgtccgcccacgcgccgcccacgcgtccgcccacgcgtccgctccaacataattcatcatctatggcttcttcacatcaacaacagcaagaacaagaccagtcagctttagatctcataacccaacaccttcttactgatttcccttccttagacacctttgcctccaccatccaccactgcaccacctcaactctaagccaacgcaaaccacctcttgccactatagcagttcctactactgcaccggtggttcaagagaatgatcaaaggcattacagaggcgtcaggagaagaccatggggtaagtatgcggctgagatcagagacccaaacaagaaaggtgttcgtgtctggttaggcacttttgacacagccatggaagctgcaggaggttatgacaaggcagctttgaacctgcgaggaagcaaagctattcttaacttcccacttgaagcaggaaagcatgaggacttgggagacaacaagaagactatttctttaaaagcaaagaggaagagacaggtgacggaggatgaaagccagctgatcagccgtaaagctgttaagagggaagaagctcaggttcaggctgatgcttgtccattaacgccatcaagttggaaggggttttgggacggagcagacagtaaagacatgggaatattttccgtgcctctgttatctccttgtccatctcttggacactctcaactcgtagttacttaagcttcagagggtcaaactggaaaaaatcaacattggattgttttcaaagcttctagattagctgattgtaaaaaaatgttttactatattcattcattcttcttaaatgcaattctttctacccttaaaagaaaaaaaaaaagggcgaacgctctagaggatccaagcttacgtacgcgtgcgttcgacgtcataactcttctatagt

SEQ ID NO: 100391 - DNA, 566 bp, Arabidopsis thaliana columbia
  unsure (1)..(566): unsure at all n locations
ggccgcccttttttttttttttttttttaaagaagaaaattttatatttgtattaatcaactggagacctaaacgtttttgtatagttttattcagaacaatttagaagaaagaattaatcaagaaaaatattagcagaggaagaaggagcttctcaagaacttgaccctcaattccagaattacacaaattcatcatcatcatcatcatcatctctgcagattcttggtttattctggaaccttatatgcatcatgtgtcacttcagtcaaatacaaccctggaaacaaactatcgagttttttctgaacagttttggaccgtttcttgggccgacgcggtgctcggtgacctaccatcccaatggaaatcttcttccatctccttcttcgatagcttcatagagaacataggacgcttcttctccgnttcgaccaatccggcggcggctctcaccggggatggntcttcacnaccttctccccatcacaatnccttatgngcaaacggtggntccggtcttaaaggggnggctccttcctaantcanggtacgggganancctt

SEQ ID NO: 100392 - DNA, 491 bp, Arabidopsis thaliana columbia
ccactatagaagagttatgacgtcgcctgcacgcgtacgtaagcttggatcctctagagcggtcgccctttggtttttttctttttttttttttcttttaatatacactaacaatagattattgatcctgacgacaaatgcaaattacagagataatccacataccttaaacattattacttccataaaaatgaagttaagaattcaaatatttcattaatttccggcagggaagagcttaagcatcttcatactaccatgaccatattccgaatcttcatacctcagattacgaaccacttggttttgctgcgtaatcacatgtttccccatatacgaatgctccaatggcggcatcaagtaatccgggcgccaagaattgagctggaacccggtgagctagcaaatagccgatcagtagccgaatcagagacgatgacgtgtcctccagggattccgttaccgtccccgcttgttttctccaaagaaaa

SEQ ID NO: 100393 - DNA, 824 bp, Arabidopsis thaliana columbia
  unsure (1)..(824): unsure at all n locations
tttaggacnnnnnnnnnnnnnnnctatgacgccgcatgcacgcgtacgtaagcttggatcctctagagcgggcgcccttttttttttttttttttttttatacgaaggtttatcttatttgaattttagattttagaatccccatgaatttggtttggactctaaaaaggagaagagaagttacaaaagataacaagataagagacacataatttcataattaagacttttagcaaaaatacataattaagatctaccataacaacgaaactgaaaacacgtaaagatataaattagaacttagaaaactggatttgagatggacagcttcctctaggcaaaactggacattcgataaactcagttcctgacgtatcaacacaaatatagatctgatgaagctgggcattacgctccggatctttggtacattctattcctggcggacatccaattccatcttttatcggcgtgggggatcttatccagattgtagaatccatcatccggatcatttccggagtttttgaggatttggaggaaatttgcctctttgtttgaggttaagagcatttcaaaagtactcatgtcggccccttacggattccggagatgtacccggtctctccatggcggggtcgcaaaaggtgacccttgggtgctgggaaaagagggggggggccactcgtttttgaaccatcctgacagaagcgcgatgggggtcgagcccacccggcgcctgggggacgcagcctgccgcgcctgacggacggtgtcccgtgagttgaagcgggtccccgtcggcaggggcgagccccgtaggc

SEQ ID NO: 100394 - DNA, 489 bp, Arabidopsis thaliana columbia
ctatgacgtcccatgcacgcgtacgtaagcttggatcctcttgagcggccgcccttttcctttttttttaatatttcctcgctctgaaaatacattatatacgtctaagaatctactgcttacctctttcaaaaacttcagttcaagcagtcgtatctcatacaactcataaacaaaaaggataataaattttctcacatgtgagggcgaatgagaaaacttcaaccaggaagaagagattggttccttttttagagaatcctggtaggcttttataatattccatcccgagccccagaacctggaggaatggcctgttaaggtaaattctaccagggcgaaataagtccattcctctaaaccccaaacctcttgatttttttgacctttattaaagggatgtggagaaggaaccaatttgctggaccatgaccacttcataactcaagcttcgccttggttcttcttttttaaaggggctctggaaaa

SEQ ID NO: 100395 - DNA, 487 bp, Arabidopsis thaliana columbia
  unsure (1)..(487): unsure at all n locations
cnnnnnnnnnnnnnnnnnnnnnnnnnnnnnnnnnnnnnnnnnnnnnnnnnnnnnnnnnnnnnnnnnnncttgtgtgttggttttttttttttttggggggttttttttttttttttttttttttnggaccagtaaacgattttgatactttattaacaacttgaagcctattcttgaatacatcttttcttgcagtttgcctctagacaagaccaacacattggtcccaaagggggcgtgtgaacgaacttaaaagaatcatgtactggtgatagaaattgatgcttttattcttgcgcatataggctccaggctgggcctatgaccatcatttcttctggtcttaggggtatatcggctctatggaatctgaacatctcaatggcggggggggtcaccctcgggttcccgtttatggaaaaaattgggaggttcatgcacccgcattgtaaagcaagcaaccctgggtcacataagttcctacaag

SEQ ID NO: 100396 - DNA, 526 bp, Arabidopsis thaliana columbia
gggaggtctactccaaggggtacacctagagtgtattctggtaggactccgcgtagaggtcatggtggaggagtagcgtttcagtggtttcgtagtagccggttggtttattggctgcttttgattacgctttggacgtatcttggattttatgttcagtctaggtgggcacatgataatgaaagcaaagttgagtttttacggtttggaggcagaccgagaaaggatgagttatatatggagaagattaaaggactggatccggttgctaatgagaattctgaggctttggttaatattactggtaaagatgatgctggttcgaataagaggacggatgttagtctgatcaagaaagatgatggggtttctcgacggagcttgagttccaagcagaagacgagaaaaactgtccggacttctcgtagtaagatccgtgttaagcagaaggtgattaaagaggtacttgagactaaggatttggatgatgagcaagatccacaacttccattgacaaatgctactt

SEQ ID NO: 100397 - DNA, 598 bp, Arabidopsis thaliana columbia
  unsure (1)..(598): unsure at all n locations
nnnnnnnncactatagatanactatgacgccgcatgcacgcgtacgtaagcttggatcctctagagcggccgcccttttttttttttttttttttagatttaaatcatcattttgataagattaaaaatttacaaatgtatgataaattatattttgatgacatatacaatttggtattacaaaaaaaattgatatatacaatgaaaaatatattgctgtataacataagatataaagtgaagtgtatatataattttttttcccaaaatcatttaagttgctattttttctaatttctcatatccagctccccattgtttcattctctccgaagcttgttccacctctttgttccaattggttatgtagatcatgtacaaaagtatgagagtctgaagactagtcccacatatcataccaatccatatcccctgtacgccaaggcttgttttataacctaacaaaaaccctagaggtaatccaaaagcgtagtaacaaaaaaagttaatataagccaccggtgcttgccatcctcctcctaatggaactnctgatataactgggtgaaaactggtgagaatatcggtataccgaaca

SEQ ID NO: 100398 - DNA, 555 bp, Arabidopsis thaliana columbia
  unsure (1)..(555): unsure at all n locations
tgatacttccnnnnnnnnnnnnnnnnnnnnnnnnnnnnnnnnnnnnnnnnnnnnnnnnnnnnnnnnnnnnnnnnnnnnnnnccacgcgtccgctcgattctcatcatctgcgacgaaattcatcactcgctctctctctgctcggaacgattccctcttcgctagccttatttgattcgtatttgtctgatttcgtttaatcttctagatcttttaatattcgtttcttttatcatcgcttttgtgtgttttgctctgttttcttgtttttgtttggtgataatggatgcaggtatgaacaacacttcttctcactacaagacgcaggctcgttgccctcttcaagaacactttcttcccaggaaaccttctaaggaaaacctggacaggttcataccgaacagatcagcgatgaattttgactatgctcactttgccctcactgaaggaagaaaaggtaaggatcagactgcagcggtaagttcaccatccaaagaggcctacaggaagcaattggctgagaccatgaacttgaaccacacaaggattctcgcc

SEQ ID NO: 100399 - DNA, 580 bp, Arabidopsis thaliana columbia
agctacatacgactcactctagggaaagctgcgtacgcctgcaggtaccggtccggaattcccgggtcgacccacgcgtccgctctcatcaatcatcagccaccaacaattcttcgctctctctgctctgatctctctgctcgaatttactaacgatcccttctctgcaggctcatctttatctaatttcgtttactcattatatcttctaatccgtttcgtatactatcgctattcttgttttctgtttgtttgtattttgggattttctttgtgtttagtgataatggatgcaggtttgaatcggtgcccacttcaagaacactttcttcccagaaaaaattccaaggaaaatctggacaggttcataccgaatagatcagcgatgaattttgactatgctcactttgccctcactgaagaaagaaaaggtaaggatcaatctgcaacggtaagttcaccatccaaagaggcctacaggaagcaattggctgagaccatgaacttgaaccacacaaggattctcgccttcagaaacaaacctcaggctcctgtcgaactgcttccgagcaatcactct

SEQ ID NO: 100400 - DNA, 739 bp, Arabidopsis thaliana columbia
  unsure (1)..(739): unsure at all n locations
atagagagctagacgtcgcatgcacgcgtacgtaagcttggatcctctagaccggccgccctttttttttttttttttttatcaaaaggtaaaacctttattattgttattattatacctataaagaaaggttcgcaggttaacatacgctaaaatgtaaaccagaattctaccctagaaacccgaaaaagctttgatttttatgattttcccatataggtgggctctaaagatcactccggttcttcatatgtgagcataccgcttgaaaacctgcttccccgccacaactgcaccagccgcaattccgccaaaagcaccagccacagccgcagatctcactcctcgtgctgccctaaagaccgctccagttcccagaccagcgacaacactggtccaaacatcgtccttatcagttaccgccaccacaccactctcaatccctgcgtagatcaacccaacaatcccaaccctattaccccaagtacgacctgcctgaccaagacgaattcaaaatcctggtgattttcaagcttcggcggggctccaattttcgaaactcttggtnccaggngangatccagctgaaggaccggggncaagagcgggttgantaaccggcccctgtgntgaaagtgggaattttccccatgattggnggtngttngaggcctncgggaaagaaattccggggagtnggacgtnnnntnnncnggggtttgnngggcctggnannttg

SEQ ID NO: 100401 - DNA, 495 bp, Arabidopsis thaliana columbia
catcgttgaagaagacgaagaagataccttcctctttatcttctccgatttctcaaccttcccgtctgcttgtcgtaaagaaatggcgccgagtagacgggatttacagcttactccggtcaccggaggttcttcttcccagatcagtgatatggaagaagttggtcttctcgattcgtatcacaacgaagcgaacgccgatgatattttgactaaaatcgaagaaggaagagatgtttccggtttaaggaagattcaggtcggagtcaccggtatgacttgtgctgcttgttctaattccgttgaagcagctttgatgaacgttaatggcgtcttcaaagcctctgttgctttgttacagaatcgagccgatgtcgtcttcgaccctaatttagtcaaggaagaggatattaaagaagctatagaggatgctggatttgaggctgagatattggctgaagaacagacacaagctactttggtgggtcaatttac

SEQ ID NO: 100402 - DNA, 381 bp, Arabidopsis thaliana columbia
attttatgtattttgtctgaaaatataatcaggggaaaaaaaaaacagaacaaaaacagaggaaggctatagagattgatggacaaactgtgtctagggtgcttcatcatctttgtttgtttgtaaaactcttgtcacacacactgttatgagtcattttctgctgtgtgtgttttgttttgtggtgatgtaagttaaaaacaagcgtgattctcatgtggcccatctcaatcaatggttggtgatttgtggggtttttaggcttttctattatcttatcttttggggataagataaaagcctaaaactgtatgtaactatgtatggttcttcgaataaaaaatcaccaatctctccctgtcataaataagtgttgccaag

SEQ ID NO: 100403 - DNA, 760 bp, Arabidopsis thaliana columbia
aattacatagtgagaaaatttaacgtttgattttacgattaggattggctcaggaatcagtggttagaccaagaaacaaagaaaaaacaggttacagtgagcaaaagtaaaccctaatatacataaaacactattcgactagagataattaatccctgatctgagcaattcctggttattacaggtgcagcctcaccgggcttatagaaattgggaagaagaacacacagaaagagcaagacctcatctgatcatatcctgtctctttctgaagggaaactctctgagaagctgttgtggctgagctctgttgaacactcttacagctctcttcgagctttttgatgcacacacgttaatgagagtctctgccgttgaacttatattcaaattttgtgtaccaatctcattcggattgccactgcaagctgtgtgaccttgtttggatggtagagaaccgcacagacagcaaaacagacagcgaacgtagcgattaagaacatagtttgacgggacctgaatgctaaagctgagtgcgtttttatacacgacttccttggccagtctcctatgtcatttacgttcatgacaacctctttgtttaacagaggatcagtctcttttccgccgctatctggtgaacagtctgcctgtattctctctttacaatctaatcctgcttcaggatcccggaactctatagggctttgatgctataagtgaatatcactcgccaaatccatattttcatgtagaagcc

SEQ ID NO: 100404 - DNA, 589 bp, Arabidopsis thaliana columbia
ccaattcaaaaaaagaaataacctaaacgtgttcacacagagatctcgagatgaaagataaccaaacggaagttgaatcgaggagcactgatgatagattgaaagttagagggaacaaagttggaaagaaaacaaaggatccaaacaggcctaagaaaccaccaagtcctttcttcgtcttcctggacgatttccgaaaggagtttaatctggctaaccctgacaacaaatccgtcggtaatgttggtagagcagctggaaagaaatggaaaaccatgactgaagaagaaagagcaccttttgtagcaaaatcacagagcaaaaagactgagtatgctgtgactatgcaacagtataacatggaactggctaatggaaacaagacaactggagatgatgagaaacaagagaaagctgctgatgattaggaagttggatcagtgatttgtgtatcaactatatctgttgttttatgtcaacttttagctagcttttagggagaacaattgttacattcctgttttatcctttctgtcaactgtgggattattcagatgtaactttggatttaaaaaaaaaaaaaaaaaaa

SEQ ID NO: 100405 - DNA, 844 bp, Arabidopsis thaliana columbia
  unsure (1)..(844): unsure at all n locations
tgatacgttnnnnnnnnnnnnnnnnnnnnnnnnnnnnnnnnnnnnnnnnnnnnnnnnnnnagagtttcctggngaagaagccccgcctccggctatcacggaggagctggaagacatggcagaggataatacatcatctagagcgggaaacttggttgtaccaaatttgtcttcagaggtgagtgacgtgacatcgtcctctggaccggttaagctggcagacctgcaaagaattctgaacaacctctctggtggccctgtaggtattgctggagatcaagacgaaggtttagcattaggggatatcttgaaaccggagttgataatgccattgcttgaggcgttgccggtacaagaacgactatcttcgcatttacctgagggtcattctagggcagaagatatactggagttgttgcagagccctccttttcgtcaacaagtagatgcatttacctatgtactccgcacaggacaaatagatttgactcagtttggtatagacccaagtaaatacaagttcacagtggactcattccttgaagcacttgaagactcggtttcaacgcaatcaagggatgcgatggatgagagttaatcttttcatattctcatgattttgttcgaactttgatattgaactgagaaaaacatcttcgttgtttggtggatcatttatggagttttcatgaaagtgtaaggatcatcatgggattttcctttaaaaaanaaaaaaagacncaaaagcggccgctctagaggatccaagcttacgtacgcgtgcatgcgacgtcatagtannnnnnnnnnnnnnnnnnnnnnnnnnnnnnnnnnnnnnnnnnnn

SEQ ID NO: 100406 - DNA, 656 bp, Arabidopsis thaliana columbia
  unsure (1)..(656): unsure at all n locations
aagaactccnnnnnnnnnnnnnnnnnnnnnnnnnnnnnnnnnnnnnnnnnnnnnnnnnnnnnnnnnnnnnnnnnnnnnnccacgcgtccgctgatacaagagaagctggcgcagtccccaggaacaacttcagcattggcagatgaatcgcagaaaactagcattttcaactgtgggaacaccggactatattgctcctgaagttttgctgaagaaaggatatggcatggaatgggattggtggtcattaggggcaattatggacgaaatgctcggtgggtatcctcctttttatgctgatgaccctatatcaacttgcagaaagatcggccattggagaaaccatttgaaatttcctgaggatgccaaggtttcatctgaggcaaaagatcctatctgcagggtgctgtgcaccggtgaccataggcttggtactgggaggcaggagcccagcaaattcaagggttcatccttgggttcaaggatctgtgggggggaaaagcctcttttgaaatgggggcttgggtacaaccccgacgtaaccgcggggcttggttcccaaaatttttttggggttttantnngggattnnccngncctnaanacnttgtcnaggcntnccnggngttttttttcccccaggttaagtttttggg

SEQ ID NO: 100407 - DNA, 997 bp, Arabidopsis thaliana columbia
cgactttcttagggaaacctggtacgcctgcaggtaccggtccggaattcccgggtcgagccacgcgtgcgcccacgcgtccgcttgcagaaagatcgtccattggagaaaccatttgaaatttcctgaggatgcgaagttttcatctgaggcaaaagatcttatctgcaggttgctgtgcaacgttgaccatagggcttggtactgggaggagggagcccagcaaatcaagggatcatcctttgagatcaaggatggttggggggggaaaaagctctatcgaaatgggagggtggcgtaccaaccagaaggtggaccgaccaggcttagattccacaaaatttttattgaagtttggagaaaggaaattctcctgccccctgaaaaactaaatccaggctttccaggaaaattcctttttggtcccaaagatttaaagtgttggtgggtacccataccaaaactttaaccctgaaaaaggttccgtcgttccctgggaaaggcaaaaacttggttctaaatccatccccatctgaggcatccttgtgggcttattacggggggaaccccaaaggcccaatgggtttcttcggtgggggatccatggatatttgaaaaaacccaccaaagattaaatccttccgcggggtggggtcttaagccctttaaaaaaaaaaacctgcccccgcccccagggttaaggagaaaaaaccaaaggggtgggggaaaaaaaataacaagtggcgccctctcttttttttgtgttaaaaaaaaacccccggagggggaaaaattttgggtgggggtaaggccccgggttataaaccgcccgggggggtgaaagtgccctctcttggggagtttagcaccttttttttttcttttttggggggggggggcaccctctttaatttgccccccggggtgggtgttttttaaaaaaaaagggggcgtttaaaacccatccccccccgcgcgtattttatttgccaaaaaa

SEQ ID NO: 100408 - DNA, 545 bp, Arabidopsis thaliana columbia
  unsure (1)..(545): unsure at all n locations
tacggctgcgagaagacgacagaagggggaaggagaaagtgagattaacgagaaaccccaagagagaaaatcttcatcgacaaaattcgattcagctgctgcagctattcacttcgtccatagcacgtagatggcagaaaaggcctgtataaaacgtcttcaaaaggaatatagagcactttgcaaggaaccagtctcccatgttgttgctcgtccttccccaaatgacattctcgagtggcattatgtgctggaaggcagtgagggaacaccttttgcaggtggattttactatggaaagatcaagtttcctcccgagtatccttacaagccaccaggggattacaatgactacaccaaatggtcgattcatgacacaggaggaaattttgtttatctcatgagtgatttttcatccaggaaaggntggaatncgatgtgggctgtatcaagatacnttcagggcttctcncatttatnntgggtaccagnccgcaacttgnnggngtnacctactgaaattnggacaccggtttggtaggaac

SEQ ID NO: 100409 - DNA, 699 bp, Arabidopsis thaliana columbia
  unsure (1)..(699): unsure at all n locations
gnccccctaaaancggcggcccagtgaaattgaatttaggngcccctttagaagngncttttgccgcccccatncaccgcgttccggtaagccttgggnccntctnagggcggcccccccttnnnnatgacntngtntttttttaaattncccaaatgncttttccnggatactttcgatcgtgtgttatcctaaatttcctcccttttatcggagttcacaaataaagatgggaggctgaaaaagacagacaaacaaacaaaaaaatgcaccaggatcaagagaattatgatcatttacgtacaaataaacggagaagaaattattaaataaacaaagctggtctcttattatcttcgtctgggtcgggcattaatgggagaaccagatgattgtgagcctctgtagtttctgcttggagaatccattgatcctctaaaggaagagtaggtagctttgggtaatggaggcgttgactctaatggggctgactctgcaaagcatgctgtgttcacacgagtctctccaatctcttgttgtagcaattcgtttgaacactgtttcgttagagcgaggaggtcatctgctgaaacagattgcttgtcatctgaaactgtgtcttcgctgccactagttggtctacgattatgccctggggtctcgactgcttcactgatgctctctatagctatctccaac

SEQ ID NO: 100410 - DNA, 766 bp, Arabidopsis thaliana columbia
  unsure (1)..(766): unsure at all n locations
aancccggccactttnggaggcaccgngggcctttcgattccccnttggaaggggnttcncaagcgttagtgggaccccgggttcccngnccgcgtttaaacccccgccnggaatggatttggggcccttttggagggctttacgtcccatgcacgcgtacgtaagcttggatcctctagggcggcccccccttttttttttttttttttttttttgcttaaatttccaatgcttttcagatactttgatcgtgtgatatactaattacaacccaattatctgagttcacaaataaagataagagtctgaaaaagacagacaaacaaacaaaaaaatgcaccaggaacaagagaattatgatcatttacgtacaaataaacggagaagaaattattaaataaacaaagttggtctcttattatcttcgtctgggtcgggcattaatgggagaaccagatgattgtgagcctctgtagtttctgcttggagaatccattgatcctctaaaggaagagtaggtagctttgggtaatggaggcgttgactctaatggggctgactctgcaaagcatgctgtgttcacacgagttctctccaactcttgttgtagcaattcgcttgaacactggttcgttagagcgaggaggtcatctgctgaaacagattgctggcaccgtaacaggcctcgctgcncgagttggcnacgatangcccnggggcccnntgntcnctgngcccnaagganncaaacgncctgnaagttaa

SEQ ID NO: 100411 - DNA, 705 bp, Arabidopsis thaliana columbia
  unsure (1)..(705): unsure at all n locations
ctgtgacgccgcatgcacgcgtacgtaagcttggatcctctagagcggccgcccttttttttttttttttttttttttttttttttttttttttttttttttcaaaaaaaagtatatacctctgatgttatatatactatgagacaacagctaagttatttacatatttcctcatttcaaatctgtgaacctgaagaacacaagaatgcagctcatgatcaaaattctgaaagaagcgaaacttcgccaacccaagatttaagaacagctacaccatgaatagatatttgagatcatcaactgttaatcgagttgcagagcttccaccatgatcttcaccaaaggcagacgcaaccatttttcttttctcttcctggagagccaaaattctatcctccacagtattttttatcgtaatacgagttacagtaacaggtcgagtttgtccaatacgatgtgctcgatcaatagcctgatcttcagtagttggattcccccatagatcaagaagatgacctgacatgcagcatcctattcagcccagattccagcttttaaggcattatcatcacttttaccgggttaagccaaaaaaccaaaggggggggctaccccccctaggaatggtaggaaatgttccgntggncggtaaccggcgngngntcttcagccgccnggatagncctggcncnactcggtnaactt

SEQ ID NO: 100412 - DNA, 725 bp, Arabidopsis thaliana columbia
acctatcgatgagctatgacgtcgcatgcacgcgtacgtaagcttggatcctctagagcggccgcccttttttttttttttttgattcagaaaaagtatatactctgttgttatttatactatgagacaacagctaagttatttacatatttcctcatttcaaatctgtgaacctgaagaacacaagaatgcagctcatgatcaaaattctgaaagaagcgaaacttcgccaacccaagatttaagaacagctacaccatgaatagatatttgagatcatcaactgttaatcgagttgcagagcttccaccatgatcttcaccaaaggcagacgcaaccatttttcttttctcttcctggagagccaaaattctatcctccacagtattttttatcgtaatacgagttacagtaacaggtcgagtttgtccaattcgatgtgctcgatcaatagcctgatcttcagtagttggattccaccatagatcaagaagaatgacatgacatgcagcaatcatattcagcccaagatttccagcttttaaagacattatcatcacttttacctgtttaagacaaaaaaacaaaaaaaggagggaacacatacaccaccactaagaaaattgtttagggaaaaaagggttttttcagaatattggcataccggactttaaccatcttgggaatcgctttgccttgaaaatttctttttcaacaaggctttt

SEQ ID NO: 100413 - DNA, 649 bp, Arabidopsis thaliana columbia
  unsure (1)..(649): unsure at all n locations
tatactttactatgaaaccgcatgcacgcgtacgtaagcttggatcctctagagcggccgcccttttttttttttttttcagaaatgattctaagccctattaatattcccaaatgagaggataagttaaataagtcagatgcagtcaatacatcttcaacattgggtttgttatattagatattaaaagttttacaacttaatattagatgaaatgaactacacatcttcattgtcttttggcacttctatgttgctctcttcggcgaccaatgaattcgactcaacacaagttccttcaacagtagcaacagttgtaccatcggattcaccgtcaagcctgtctgatggattctcggcatctttttcctccgtcttcgggagggatgaatttgaatctgtgtcttcagtaacaacggtttctaagtgaacgtccatacctcccactgcatctggggatggcggaaatttaacttcaggttgtgatgaacatccgggagagacatcaactaacccacatccggagttcaatggntcttcccccanggnagttgccaactgaagagccngagggccnctcagnaaatggcacagattcgccccgcatgggaaanaagggtctacctcagaacccggtcaaggnatgggc

SEQ ID NO: 100414 - DNA, 719 bp, Arabidopsis thaliana columbia
  unsure (1)..(719): unsure at all n locations
ggattgtannnnnnnnnnnnnnnnnnnnnnnnnnnnnnngcatgcacgcgtacgtaagcttggatcctctagagcggccgcccttgttttttttttttttttggcagtgaaaaacatattatctgattgggaatatagaagtgaattaaatgtgtgatcctcaattcctcatactacataaggtgcaaaatgaatttctaacataaagattataggagttttaaaaacgagggggtggccgcgaaaatagctcaagtaaaaaaaatatctggaatttagaagaatgcaaatggcttcaggacaactttaacttctagtaaggtaaactcgaggttcgggtaatcaaaggaagtgtctccccagtaacatgctcaccaccaatgacaatattgcccctttcccttttcttttccccgttaccggagaacccgaaattgctaaataaccaggggacgcactatccggggcccccggagaaaccggaaccaccggggattatcccttcctcccccgtatactattcccacccacgggaccaccacaataacacctttaaagaaatggttaaaagacacccaaggaataagcctgactccattaggttaaacaagcactattctcctccacgggggacaagtttaaattcttttaaaagggcaaacacgaatactaaaactttttagcgttaaaggcgtttattttttacccccaaaaaaatt

SEQ ID NO: 100415 - DNA, 909 bp, Arabidopsis thaliana columbia
atgactaacatgactcttcgcaagcatgttatatactttcttttcttcataagctgctctcttagcaaaccctccgatgcatccagaggtggcatagccatctattggggccaaaacggaaacgaaggtaacctctctgccacgtgtgccaccggccggtatgcttacgtcaacgtcgcctttcttgtgaaattcggaaatggccaaacaccggagctcaaccttgccggccactgcaaccctgcggcgaacacttgcacccattttggctctcaggtcaaagattgtcagtctcgtggcatcaaggttatgttgtctctcggcggcgggattggaaactactcgattgggtcgagggaggacgcaaaagttatcgctgattatctgtggaacaacttcttgggaggaaaatcatcatcacgtcccttaggtgatgctgttctagatggtatcgatttcaatatcgagcttggctctcctcaacactgggatgatctcgccaggactctctcaaagtttagccacagaggaagaaaaatatatctaacaggagctcctcaatgtccatttccagacagattaatgggaagtgctctcaacactaaacgttttgactatgtttggattcaattctacaataatccaccgtgttcatacagttcaggtaatactcaaaacctcttcgattcatggaacaagtggaccacttcaatcgcagcccaaaaattcttcttgggtctaccggcagctcctgaagctgccggaagtggctatatcccaccagatgtactgacttcacagattcttccgactttaaagaagtctaggaagtatggaggtgtaatgctttggtctaaattctgggatgataaaaatggatacagttcatctatattggctagtgtgtga

SEQ ID NO: 100416 - DNA, 837 bp, Arabidopsis thaliana columbia
  unsure (1)..(837): unsure at all n locations
atgatacttcagctctacacgactcactattgggaaagctggcacgcctgcaggtaccggtccggaattcccgggtcgacccacgcgtccgcggacgcgtggggtcaaacaaaaaaaaaaaacctaaagaaacttcgacatgaaaggcggcgaatccaaagctgaagcaacgagcactgatcagagactcaaaaccagaggtagaaaggctgggaagaagacgaagaaggatccaaatcaacctaagagacctccaagtgctttcttcgtcttccttgaggatttccgaaaagagtttaacctagcgaatcctaataacaaatccgtcgctactgttggtaaggctgctggagctagatggaaggcaatgactgatgaagataaagctccttacgtcgctaaggctgagagcagaaagactgaatatattaagaatgtgcaacagtacaacttgaaactggctagtggaaccaatagagaagaggatgactctgacaaatccaagtctgaagttgatgaagcagtaagcgaagaggaggcagaagacgacgattgaagcatctaggtcttgctattgacttgactcagatttgagaatgtaaacttgcttaggtttatgaccaaaaacttttaaaaaactcttatttatgctttgtgtttgtgatatttgaacctcatttgctacatcaatgttgttttaggtcagtctgtagggataatatcacttgactgctatatttcccctatttccttatgttttactagtattcatatgttcttcaactttgtatgagttttagtatcagttttatttctacttatgcttnnnnnnnnnnn

SEQ ID NO: 100417 - DNA, 956 bp, Arabidopsis thaliana columbia
  unsure (1)..(956): unsure at all n locations
nnnnnnnnnnnnnnnnnnnnnnnnnnnnnnnnnnnnnnnnnnnnnnnnnnnnnnnnnnnnnnnnnnnngcttggatcctctttagcggccgcccttagctttttttttttttttttttttagttggtaatcctcatgggggtttttattattattatataacaagaacaaggaggccaaaattgagtcgatgaactctataaaactcataaactacatataatcagcctttctttgatttcgaatccaatgctcaacaaaggcctacctgaatacaatcactttctctccaccaacgtccaaagcttctttactctgcttctcactttctcgccccaccgagcactggcttaaaatcgaaatggtcacctgatcgcctgccctggttcccattgatggtggagcggctgccactccaaacattgacttggaaaaccctgcttttcttaagcacccgcataggcggggtgggcccccctttgaaagaaatattcctcgctttggggtccccaccgctgcctaaatgggttaccaaccgaacatccccctaaaggcatcgggaaaaatcccttgaagaaatttcctttaacattttttccctattaccccactgttccctcccacaaatccaccttcccaggtgggttacaacaaattttttttttttccagttagaaaacaaacccgaaccttggattatcttttttaacccccttttggccttggcccccaaaactttttccacaagctttccgcaacaaaggtgccaccccaaattttcttaaaaaaaaaccatccaaccccaaaaaaaaaacctctccccacagaacccctaaaaagccaaatgtgtgatctaaccccccgaaaaacacctcccgaaagcaaaaaataaccctgaacacccaccacacccaaaatgaaaccactttttaccacccagggtaccccttatccccc

SEQ ID NO: 100418 - DNA, 592 bp, Arabidopsis thaliana columbia
  unsure (1)..(592): unsure at all n locations
atgacgtcgcatgcacgcgtacgtaagcttggatcctctagagcgtcccctttggttttgtttttagtaaaacacaatggattgactcataaaaatgaagagaacacaaacgggaaaaacaaaaagaagttcttaatatagtataaatctaggtatgagctatacaaagctcaatatccactattgtattgaaaacaaagaaaagaaacaaaactcatttaaggctcttacaaaattttaggcatacatatggaaggaaacatacttcctcacaacttggccgattcatcctctgacactcttcaacatttctattcttagttccttactaagcagggcctcaagaaacaaaatggagcttctttagcttcttcccttgcttatgtcccgaatatatgtctgtgaactggttgtgtatccaaattcttgataacctccatccatggtttctctataaccaagattgcactttttgatagatggcgggaatatagaactgggtgctttgaggttaccatttcaaacttctttctcttattactcttactctctttntgatactcctctaacctacgtttttgagcaccattcc

SEQ ID NO: 100419 - DNA, 457 bp, Arabidopsis thaliana columbia
  unsure (1)..(457): unsure at all n locations
acgtcncacgcacgcgtacgtaagcttggatcctctagagcggccgccctttttttttttttttttcttttatctatgaaagttacaggaactttctaactatagattacttgggaaggaaacaataacagataaccattaaatctacacatacgccatttacatggggacatggcactccttgttttttgaagaccggtcttttctttgaccgccaggaataccagagatttgtacacctctactaagggctgggttaaagagcattcttgtctggaactcacaccaaagggaaccccgccaaaccgcgagggggggaaacaaaaccacccctcacaatctcgaccctcgagctaggccctaagggaagaccaatccctaggtggggaaaaaaggtacccccttggcaaggaaaacatcccccacccggggcaggaaggcacccgcaaaaaaaagc

SEQ ID NO: 100420 - DNA, 494 bp, Arabidopsis thaliana columbia
  unsure (1)..(494): unsure at all n locations
atgacgtcncacgcacgcgtacgtaagcttggatcctctagagcggccgcccttttttttttttctttaaaagaaaagaagagagcatgatctctaaccaaatcaatgtacaaaacttttagggcggcttcttttctcccccttggccggctctctctacatatctcctaacacaaagcctgcgttcacaaaatgtacaaaacgcaaacgcttctgcgggccaccaaaacaccccaagaaaaaaacaccaaaatccgagcgctgtcctattctttgcccagccgcagcctagggaatgtgttaaaacttcaatccccggctttcctgttagatacaccagctttcaagggggcgaaggtatcaaacaatgttgtggctgttactcctcgccggagaataaatagatgattccacggcccattcaaacgctgtcttccctaaaattctgggcaggccgagtcactaaggtcctgtgtctgatttgaaagaattag

SEQ ID NO: 100421 - DNA, 1077 bp, Arabidopsis thaliana columbia
ggaaaaaggaaaggctgtggttgttggtggcggttacatcggtcttgaactcggtgctgctctgaaggctaacaacctcgacgttaccatggtttatccagaaccttggtgcatgcctcggcttttcaccgctggcattgcttccttctacgagggttactatgccaacaaaggaattaacattgtcaaaggcactgttgcatctggtttcactaccaactcaaatggagaggtcactgaggtgaaattgaaagacggaagaacgttagaagctgatattgtgatagtgggtgtcggtggtagaccaattatatcactcttcaaagatcaagttgaagaagagaagggtggtttgaagactgatgggttcttcaaaacaagccttccagatgtatacgccattggtgatgtagccaccttcccaatgaaactctacaatgaaatgagacgcgttgaacacgttgaccatgctcgcaaatccgctgaacaagccgtaaaggcaatcaaggcggctgaggaagggaactcaattccggaatatgactatcttccatacttttactctcgagcctttgatctctcatggcaattctacggtgacaacgttggagaaagcgtattgtttggggacaatgacccggaatcgccaaagccgaaattcgggagctactggattaaagaacggaaagtggttggagcatttttagaaggtggaagtcctgaagagaacaatgcaattgctaaacttgcacgagcacaaccttctgttgagagccttgaagtgctatctaaggaaggcctttccttcgccacaaatatataaattgcctttctaggttgtgtgttagtgtgagctttgagttcagagtggcttttatgtcactttgctattatgatagcagagtcgacatttttgttatttgtttgacccactttcttgtgattgtttggttccaaaataaaattgaaagctactcaattcacttttctgctaaaaaaaaaaaaaaaagggcggccgctctagaggatcccagcttacgtacgcgtgcatgcgacgtcatagtaaatctatagtgt

SEQ ID NO: 100422 - DNA, 418 bp, Arabidopsis thaliana columbia
  unsure (1)..(418): unsure at all n locations
tttttggaccaccttcgaagattatgacgtcgaacgcacgcgtacgtaagcttggatcctctagagcggtcgccctttngtttaattcttttttttttttttttgaccatccaaaactcagatttacgaggaagaatcaaaaacttacaaaacaaacgtcataacgaatgtacaattatggatgtgcttatataaatcttagtcctcgatgtttagatgaaagtactcttcaagaaccccggtgggtggcctaccaaatcccttggctacttcttccatttctttaagctttgtgacttcttttctaatctgatccaatctcttcagcacattcgtcatcaagctattcgcatgtgtacctgatactcgcctcgacagctttgacttctccttctggagctgcctatacagatcactc

SEQ ID NO: 100423 - DNA, 699 bp, Arabidopsis thaliana columbia
caccatagacgagctatgacgtcgcatgcacgcgtacgtaagcttggatcctctagagcggccgccctttttttttttttttttttttagaaaaaactaaattgaatataaatttaatacaccatatttttaaaaatatgaaatcctgcacgtatgtgcgggtctaattaaagcgcgaatgacatttgtagcggataaaacagaacaagtagttcacgtgattttcccgaaggaagcccctatggagaagctgagtttccatctcactctgtatcgtgatagtaggaacgaatcgcataagcggcttgcgtcatggtaagaagaataacgaaaacaacagcaaaggatgacagagcagtccatggtgactcaaagtgcgtgtgcctaaagccagcccatactccattgtacgttttggaggtgtactcgttaactccctcaaacacattccgtaagtaacttctacgtgtgtcaaatacaacatctttacatatagttttgaaaaactgtgatacctcattctcgttgccaaagtagttctctatgatccgcttgtcgttgttcaagaaagtagcatcttcctgatcgtttagaagacatcccatgaaaaccacgtagcttgttatgtcgttggtactctctgtgtaaaactgttcaaaggcaacacagttgaggaagattgagctgatgaaaccatcc

SEQ ID NO: 100424 - DNA, 660 bp, Arabidopsis thaliana columbia
atagaacagctatgacgtcgtacgcacgcgtacgtaagcttggatcctctagagcggccgcccttttgtttttttctttttttttagtaaacaatatttattgaaatgacaacaagccaacaagtgaaaatgcagaggaaaaaagtaacaatttaaagcggatgatacatatagattacataattggaaatgtaaggaaaggcttgctaatttagggttgatggtgtctagaggaggagggtgaaagaggggggattcccgggatgagaggggcccgagggattccagggataagaggcgccggagggatgcccgggagtccagggaccggggggagcggaacagggaaagagggtggggggtggccggtagtgaaggcggtttcacgatggggacgggtggaagaaccggaagaggtggaagaagtcggatttgtgggacccggtggcagagtaggagccgggggagtaggaagttaccgaattggggggagagttgggggagtagggattagtgggattggaagtacccttcggtctaatatgacatttacctcgaatcctctttctaaccttttctttctcctaatatttcgtgaaggccacccatttttgctcttctcttttatgtctcacctctcactctaaccctctcttcact

SEQ ID NO: 100425 - DNA, 556 bp, Arabidopsis thaliana columbia
cgggactttacttcgtattgtacggtaagagcgaagagaggaaatttgcagcgcttgagaaggcagcgatccagtcctccgcggagcatggtattgaacgtgcacctgtttctcgcaactccatcaagtcgtccatcacaacaccactactccatcagtcaacggacaatgtttgactactttggacaaatcactctccagctaataattacaaatgccattacccaattaaaagggaacaatggtgtgccgttgtgttttatgacttttgtgtctgctttttttcttagtgttttctcttcttttttttttctaaaaaattattaattacctaagaaaggtttttgaagaaaggaaaaaaaatggtggatgagacatcattgttcatgaggatgatgatgatgatgatagtgatgaagaagactatgtgggagctttggattgagacttttctatatataagatctggctgatatattagtgccattttttcttacatttcttgtggggtttttccttccccttatcatcaataggatggttttaatttgccttt

SEQ ID NO: 100426 - DNA, 469 bp, Arabidopsis thaliana columbia
tgacgtcgaacgcacgcgtacgtaagcttggatcctctagagcggtcgcccttttttttttttcttttttttttttttggccattttgtggaaacgtataaaggggaaatcaaaaatcatttgtatcagatcaaagcaaactgagctcactgaggaactatcaccacagcaagagagtcgccgcagagattagaacgagagatgacaatccaatggcgggagaatcagcattacccgcaggaagatttcttggtttccgtgaagtatccttccctccggagactggtgatggagacgacttcggaggaggagcatcacaagtgccaaaaggtgcgtttgacttgcaatagactaagctgtcacaaccacatgtgagacgaccgtttgcttcatctacagcttcggcagctcctccactatcactcctctgataaaaatcaacagctatgaaggtaggccaccttttacc

SEQ ID NO: 100427 - DNA, 488 bp, Arabidopsis thaliana columbia
tatagaagattcttgacgtcacctgcacgcgtacgtaagcttggatcctctagagcgtccgccctttttttttttctttttttcaccttatctcttttcacaatctggtgggtagctttaatcgtttttctattacaaactaactcggacaaggtgtaataaacaagggaatgtcaacaaataactcattagagctcacacatatatatatatgatacaacactacacaggcgcttaaagttgagcaatacccttcttcacaagcatatcataaactcgatccactttggttggatcaatcttgaaaaggctatatgcatccgacttcttcgttacattccctttgaatatctcatgtgacatcacttgttgcatctgtagataaaccggtggaaccaacttgacctcgctgcagagacgcttctcggattcagacagcagttgcgactccgtgaacccaatcaagtccaaatcattcacatagcttg

SEQ ID NO: 100428 - DNA, 518 bp, Arabidopsis thaliana columbia
tgggacacctctagaagagtttatgacgtcaacgcacgcgtacgtaagcttggatcctctagagcggtcgcccttttttttttttctttttcacagctacaagagatcacaagcggatcggagggttcattcatcaaatattctttagcctctcactcctattggcatcaaacaatcaaatttaaggcactactggatcaaaactagaaagattttagttatttgttaccactgggggagccgatgtatcccggcccttttcatcattgccctgagccaactgctggggattaccaccttttactcgattactaaacagtctctgggatattctatctttagccggtgttttcttacgccttgtggaaaaggtttgcttcttgtttttcttttcagcaaaaactctatcaaactcatcatccatagcatttcgatctagaagtggagggctttgccccaccacccaaaacttaaggaggggggtccttaacctaaccctaacaagctttgttttttcc

SEQ ID NO: 100429 - DNA, 537 bp, Arabidopsis thaliana columbia
  unsure (1)..(537): unsure at all n locations
gcaaaaatttctcgaaacttatgaatccaaaaagacagttcctttttgggtgatagcaagtacaagcattgctcataactcatgagacatacacaaaaattcgtttccacattatatataaaggatacaaaaaaattccccgccgcttctcacatttctctatatatgctatttacatcaaagaattagctgccctgcttcacttcttattgggagtataaattttagatttggggtcgtaatttagccattaagctctgcaagctctcgagtttctgcttgagctcgttggcgtggtttgctgaagattctgaatcgttgagatcagacactagagctggaacactgggcccctaactccattgaggcttcctcgagggacgaaatgggaagaccgggggttgcacggaaagaaattcccccatggatccaatgatgcagcnaagggggcttttgggctcctgcccgcttgcttngggngacacctggcaacctcactccaggngctaatggtaangcgcggcaaaagnncaantt

SEQ ID NO: 100430 - DNA, 777 bp, Arabidopsis thaliana columbia
  unsure (1)..(777): unsure at all n locations
cggtggtatgatttcgttnnnnnnnnnnnnnnnnnnnnnnnnnnnnnnnnnnnnnnnnnnnnnnnnaagcttggatcctctagagcggtcgcccttttgttttagacatacacaaaaattcgtttccacattatatataaaggatacaaaaaaattccccgccgcttctcacatttctctatatatgctatttacatcaaagaattagctgccctgcttcacttcttattgggagtataaattttagatttgggttcgtaatttagccattaagctctgcaagctctcgagtttctgcttgagctcgttggcgtgttttgctgaagattctgaatcgttgagatcagacactagagctgaacacttggcctctaactccattgaggcttcttcgatggacgaaatggtagattcgaggtttgcacgtaaagaaatttctctcattgaatctaatgatgcagcaaaaggtgagctttttggacttcctgctctgcttgcttttggagagaacatcttgtcaaaaccttcacttccaaggttgcttaattgattaagagtcgcctggccaatagattcttcaagcttcagtacacgtaaaacccctgcgactatccttcccattgcgtcaatttcagatttgcacaagaaagtcaaatgttgcagctcatcctttgttacaactgcctcaacaggttgcttaacagagaatttcagactttctgccaacccagttcaataagtcatcatgaacaagatttgtcttcaagatgccacaat

SEQ ID NO: 100431 - DNA, 544 bp, Arabidopsis thaliana columbia
  unsure (1)..(544): unsure at all n locations
nnnnnnnnnnnnnnnnnnnnnnnnntaggacacactatagaagagtctatgacgtcgcatgcacgcgtacgtaagctcggaattcgggccgccaatgagcgcgacgcagacgcagacgcatggaccgcactcgctggccttcagggtgatgcgactctgcaaaccgtctttccacgtcgatcctcccctccgcattgaccctttcgatcttctcgccggcgaggatttctccgacgatccctcttccgcctccttgttccgccgccacgtatcttctgccgacgctgtcgactccgatctcagctaccgaaatagattcctcctcaaccatcctaccgatccaatcggtctctctggtcttctgcttcttcctcagtccttcggagcgatctatctcggagaaacattctgtagctatatcagcgtcaacaatagttccacttcagaagttcgggatgttaccattaaggcagaaattcagacagagaggcagaggattctacttctggatacatccaagtcacctgttgaatcgatacggaca

SEQ ID NO: 100432 - DNA, 327 bp, Arabidopsis thaliana columbia
cccacgcgtccggtaaaacctttacttctgagcaagacaagaaaaaagaagatattgagcgattatgattcgcgcagctgccaaattctccagagaagcagcggcaacgattcgtggccgcacgatctccgttagaggaaaccttattcgatactcgacgccattgagattgattcacggtgaaatcagcgttccaaacgcgaatcatgttgctattcagatggttaattacgctctttctcacgctaggtcacaaaaatcagatgaatcttatgctcaagggatgctagtgcttgagcagtgtcttgggaatcaacctaacgatga

SEQ ID NO: 100433 - DNA, 911 bp, Arabidopsis thaliana columbia
  unsure (1)..(911): unsure at all n locations
nnnnnnnnnnnnnnnnnnnnnnnnnnnnnnnnnnnnnnnnnnnnnnnnnnnnnnnnnnnnnnnnnnnnnccacgcgtccggaaaaaaaggacgttcttaaggagaaagattctgggaaggaagaatctccgtcaccaccggcggattcttcggctccggcggcggagaagaaagctgaagacaccggtggagctgtccctgataatggcaaagttggtaaaaagagaaaaagaaagggcaaagtttggctactactaacaatcctaccgatggacctgcccgtactcaatcacttcctccgcccactgcaacagattatgaccgtccaattaatcagatcaacgaccaccatataacaaccactaataatccgccacgtcacgatctgtatccttatcctgcacaaggctattatgcgccgcaagtcatgtatggcgtaagttataacgttgctcaacctccggtgagtgtagacgctgcgtcgtattatacacctccaccaccgtattcgtatgcgtacatgcacaacggttatcaaccgtccgatcaaaacccttgtcaacctcggccgtcagattcgtttgagttattcagcgatgagaatccaaacggttgtgcgataatgtgatgtcaaattaccaaaaggaccttgaactctgcttatacgccttgtatgacttaaggatggtttcgtaatttgaagttctttcacgtgcaagttagcttaatggtgtttctagttaagtttattttaatgaatgttgtattagttttataactatgattatgattatgttaagataaaaaaaaaaaaaaaaaaaaaaaaaaaacaaagnnnnnnnnnnnnnnnnnnnnnnnnnnnnnnnnnnnnnnnnnnnnnnnnnnnnnnnnnnnnnnnnnnnnngtcctaa

SEQ ID NO: 100434 - DNA, 777 bp, Arabidopsis thaliana columbia
  unsure (1)..(777): unsure at all n locations
cgnnnnnnnnnnnnnnnnnnnnnnnnnnnnnnnnnnnnnnnnnnnnnnnnnnnnnnnnnnnnnnnnnnnnnnccacgcgtccgcgaagataagctagatgttgagccaacgatcttgttggaccctcctcttgattctgagatcatgaatgaagagatctttggtccaattctcccgattatcacggtacgtgacatccaagaaagcatagggatcattaatacaaaaccgaagccactggccatttatgcattcacaaatgacgagaaccttaaaactagaattttgtcagaaacatcctcaggaagtgttaccttcaatgacgtcatgatccagtatatgtgtgatgcgttaccttttggaggagtgggagaaagtggaatagggaggtatcacgggaaatactcatttgattgtttcagtcacgagaaagcaataatggaaggaagcttaggtatggatcttgaagctcgataccctccatggaaccaacttcaagctcaccttcatcagactcgcatttcgtgaagcttacttcaagcttatcctccttatgcttggtcttaaaagataaaagggggaaagtgagagacagagacacatacacacaaacagagacaatataagtgattgaattacatcacacttatgtttgcttatcatatcttcacctaataagtctcattccgaatgttttacatttctttcaagcttgagagattctatataaagtgatttgatatccatttctacgggatacgttcttagtaaaaaaaa

SEQ ID NO: 100435 - DNA, 2113 bp, Arabidopsis thaliana columbia
  unsure (1)..(2113): unsure at all n locations
nnnnnnnnnnnnnnnnnnnnnnnnnnnnnnnnnnnnnnnnnnnnnnnnnnnnnnnnnnnnnnncggccacgcgtccgcccacgcgtccgggcagtgattataacttcgtctccgtgtctgttcaagctcccattcttgtggccttcacgcttcaggaacaaagaccagtatctctctgaaagactacttctcggaaattttcgtctccatggcacccgtgagggggattcttggcttgcaaagggcagtgtccatttggaaggaaagtaacagactgactccagctttgagatcattcagcactcaagctgcatccacttccaccactccacagcctcctccacctcctccgcctccggaaaagactcatttcggtggtctcaaggatgaagatcggatttttactaatctctatggtctgcatgacccatttctcaaaggcgcgatgaagagaggtgattggcataggaccaaagatttggtgctcaagggtactgattggattgtcaatgaaatgaagaaatctggacttcgtggacgtggtggtgctggtttcccttctggtcttaagtggtcctttatgcctaaagtttctgatggccgtccctcctatttgggtgtcaatgctgatgagagtgagcctggaacttgtaaagatagggagatcatgcgtcatgaccctcacaaattgttggaagggtgtttgattgctggtgttggaatgagagctagtgctgcgtatatttacatcaggggtgaatatgtgaatgagcgtttgaatctagagaaggctagaagagaagcgtatgcagctggtctcttggggaagaatgcatgtggttctggttatgattttgaagtttatatccactttggtgctggtgcgtacatttttggtgaagagactgcgcttcttgaaagccttgaagggaagcaaggaaaacctaggttgaagcctccgttccctgctaatgctggtttatatggttgtcccacaactgttaccaatgtggaaacagtggctgtttcgcctaccattttaaggcgtggacctgagtggttttctagtttcggtaggaagaataacgctgggacaaagctcttttgtatatcaggccatgtaaacaagccatgcacggtggaagaggagatgagtatacctctcaaggaactgattgagaggcattgtggaggtgttaggggtggatgggacaatctacttgctatcatccctggtggttcatctgttcctctgatccctaagaacatttgcaaggatgtgctgatggatttcgatgcgctcaaggctgtccaatcagggttaggaactgcagcagtcattgtgatggataaatcaaccgatgttgtggatgcaattgcaaggctctcttacttctacaagcatgaaagctgtgggcagtgcactccttgcagagagggaacaggttggctttggatgatcatggagagaatgaaagttggcaatgcaaagctggaagagattgatatgctgcaggaggtaaccaaacagatcgaaggacacacaatctgtgcattgggtgatgcagctgcatggcctgtgcaaggtctgataagacactttaggccagagctcgagagaaggatcagggaacgcgctgaaagggagttgctacaggctgctgcttaagtaccttgttaaccagagggagtttgctattattttccatggaaataaaatttgaatgaacaactagtaacggttttgggatgcaaagctacttcagaaggagaagaaggtaatgtaatttgtttgaatggttaatgttaaaactctcttaaagttgtatcagaaagagcgcgatttgctcttttgcattactctactttctttattgtttgcctgttatgtttattcgagtatgaaagcccattttggggacaaccaaagaaacccttttcatgtttgaaataaagaatgctcctttttgggttttaaaaaaaaaaaaaaaaaagcaaaaccaaaagaaaaaaaaaaaaaaaagaaaaaaaaaagggcggcacgctctagaggatccaagcttacgtacgcgtgcatgtgacgtcatagatcttctatagtgtcgtcctaaat

SEQ ID NO: 100436 - DNA, 437 bp, Arabidopsis thaliana columbia
tttgttcatcggatctaaagcgccactcaaaagggtttatgaaaaggttagggttttaacaacaactcaaataacagagatggatttcgagaagagaaaagctgcgacacttgcttcaattcgttcatcagtgactgataaatctcccaaaggttttctcgacgaacccatcatccctctcctcgaaaccatcaatcatcacccatcttacttcactaccagttcctgctcaggtcgaatctcaatcctttctcaacccaaaccaaaatcgaatgattcaactaagaagaaagctcgtggcggttcatggctctatatcacacacgacccagctgattcggatttggtaatttctctccttttcccttccaagtcaaatcagattgacccaattgaccaacctagcgaattagtcttccgattcgagccgttgatca

SEQ ID NO: 100437 - DNA, 705 bp, Arabidopsis thaliana columbia
  unsure (1)..(705): unsure at all n locations
gcccggctnaaaggcccanaattcgaccnttttggcnaagccccncgcttttccaaggaccgtcattcnnggtctttcgggcattnnccccaccccaataccccatgattgccggaaaccggtggtanntccccttanggagtgcncccccgcaaccaatgtcncattccccccacggcaattagcccccttcagccttttcaaaccttgcatctgtaatggatgttggccggtaaattgaaagctaggacatgagtatgcccctgagaagtttgtggagaccaatgaagctaatggaccataggtatggagcaaaggactttgtgacaacccaaggagggtattatagatcttttggcaccgggaacttattatctgaaagaggttgattccttgtaccggagattctatggcaagaaaggtgaagatggatctgtagccaatggacactgattcttgaaaaggaacaaatcataaaaagtcacctgaaaatgttatgttttacttgcaccattttaatcgttttataagtttgttgttactttgatttagggacaaagaaggaatgtattctctgtttttatttactgtttgatttactctctcatgcaaatgataatttggaaaaaaaaaaaaaaaaaagggcggccgctctagaggatccaagcttacgtacgcgtgcatgcgacgtcaaagtcttgctat

SEQ ID NO: 100438 - DNA, 1820 bp, Arabidopsis thaliana columbia
catacgactcaccctaggagaagctaccacgcctgcaggtaccggtccggaattcccgggtctgacccctttcttcttcttcctctacagcttcttcataaatctctctctcttctcctctcttctcaaagatcgaacctttcgatttcagtctcttcagagttctttcgttttcatcgaaacaatggcgaagaacgttgggattttggctatggatatctatttccctcccacctgtgttcaacaggaagctttggaagcacatgatggagcaagtaaagggaaatacactattggacttggccaagattgtttagctttttgcactgagcttgaagatgttatctctatgagtttcaatgcggtgacatcactttttgagaagtataagattgaccctaaccaaatcgggcgtcttgaagtaggaagtgagactgttattgacaaaagcaagtccatcaagaccttcttgatgcagctctttgagaaatgtggaaacactgatgtcgaaggtgttgactcgaccaatgcttgctatggtggaactgcagctttgttaaactgtgtcaattgggttgagagtaactcttgggatggacgttatggcctcgtcatttgtactgacagcgcggtttatgcagaaggacccgcaaggcccactggaggagctgcagcgattgctatgttgataggacctgatgctcctatcgttttcgaaagcaaattgagagcaagccacatggctcatgtctatgacttttacaagcccaatcttgctagcgagtacccggttgttgatggtaagctttcacagacttgctacctcatggctcttgactcctgctataaacatttatgcaacaagttcgagaagatcgagggcaaagagttctccataaatgatgctgattacattgttttccattctccatacaataaacttgtacagaaaagctttgctcgtctcttgtacaacgacttcttgagaaacgcaagctccattgacgaggctgccaaagaaaagttcaccccttattcatctttgacccttgacgagagttaccaaagccgtgatcttgaaaaggtgtcacaacaaatttcgaaaccgttttatgatgctaaagtgcaaccaacgactttaataccaaaggaagtcggtaacatgtacactgcttctctctacgctgcatttgcttccctcatccacaataaacacaatgatttggcgggaaagcgggtggttatgttctcttatggaagtggctccaccgcaacaatgttctcattacgcctcaacgacaataagcctcctttcagcatttcaaacattgcatctgtaatggatgttggcggtaaattgaaagctagacatgagtatgcacctgagaagtttgtggagacaatgaagctaatggaacataggtatggagcaaaggactttgtgacaaccaaggagggtattatagatcttttggcaccgggaacttattatctgaaagaggttgattccttgtaccggagattctatggcaagaaaggtgaagatggatctgtagccaatggacactgattcttgaaaaggaacaaatcataaaaagtcacctgaaaatgttatgttttacttgcaccattttaatcgttttataagtttgttgttactttgatttagggacaaagaaggaatgtattctctgtttttatttactgtttgatttactctctcatgcaaatgataatttggaacttattggaatctctattttgtaagggcggccgctctagaggatccaagcttacgtacgcgtgcatgcgacgtcatg

SEQ ID NO: 100439 - DNA, 936 bp, Arabidopsis thaliana columbia
  unsure (1)..(936): unsure at all n locations
atacgactcactttagggaaagctcgtacgcctgcaggtaccggtccggaattcccgggtcgacccacgggtccgaattgctatgattttactctgagaatcagaagaagaaatctcggtgagcaaaatccctagttttgggatgatgtttccacgactacgattgacgaaggtcttcttctccccgatcatcgccgggaaatggatcgtctttgccgacggtagcagcggcggcggcgttggtagaaatggctactacggtggattgtggtcgtcggccgttattccttccaatgttggtttagctgtcgctgtcaccgtcatggccgtggccgtcgctttcaccgtctactctcgtagaggaagcattggatcaccgtggtcactaaggagaagaaagcgagttcttcaacctaaacaatggaatgcttttttcacagaggaagggcgactcagtgatggaggtgtcaaatttctgaagaaagttcgtagtgggggtgtacatccaagcatcagaccagaaagtttggccgttccttcttggagtgtatgacttaaagagcaacaaagaagaaagagactccattcgacagctgaaactgacggaatatgaaaacctgcggagacagtntcgcgagattcatgaacgctatgaaaatgtctgcgactcaaaggagacagctcagagcagcaacactgaagacagtcaggttcttgaatcccatgatattgaggaagtcgagagttncacaagnaccatcaccgtagatgnantcagagaaggttgaattctgaatcgnttatccagggttgggaccttttaaaagngncgttntcnccncagaagttcttctggaaatnttnaggcttanccaattcttnagaacccgggtttncctttttngnttccgggggnttgnancccaattttttccc

SEQ ID NO: 100440 - DNA, 530 bp, Arabidopsis thaliana columbia
  unsure (1)..(530): unsure at all n locations
nnnnnnnnnnnnnnnnnnnnnnnnnnnnnnnnnnnnnnnnnnnnnnnnnnnnnnnnnnnnnnnccacgcgtccgcacacagctgcaacactatcttctcagaaatggtaaccgaagctttcgaattcgtcgccgttcctttcaattccgatggctggggacctccagacgcttccgacgtttcctcctccgcctctcccaccagcgtcgccgccgctaatcttctcccgaacgttcctttcgcttccttctcccgttccgataagctcggccgtgtagctgattggactcgcaatctctctaatccatccgctcgtcctaacaccggatccaaatcagatccgtctgcagttttcgatttctccgctttcgcaatcgacgaaggcttcggtctcgcttcctccggtggtaatcccgacgaagacgcagctttccgtctcgtcgacggtaaacctccgccgcgtcctaaattcggacctaaatggcgtttcaatcctcaccacaatcggaatcagcttcctcaacggcgag

SEQ ID NO: 100441 - DNA, 612 bp, Arabidopsis thaliana columbia
atgatacgtcagctctctacgactcactattgggaaagctggtcacgcctgcaggtaccggtccggaattcccgggtcgacccacgcgtgcgattttttatgtcaaaaaaaatgttttccttttcccttaacaaaaaatctacaaagtctgaaactctcagcaatcagataaaaagattacaagaagttcttttaattaaccttttgcaatttgtcttgtgtttctcacaacacaaaaacttgtaaaagtgttaaaaaatcaagatctgaaaaatcttatcaccgcttctaggtttttcagttttttttcttccttttcctgatctaaattaacttatatttcttagggtttcacttcttgaaacatttaatcagaattaattaacctctctagggctttcatggcgaatccatggtggacaggacaagtgaacctatccggcctcgaaacgacgccgcctggttcctctcagttaaagaaaccagatctccacatctccatgaacatggccatggactcaggtcacaataatcatcaccatcaccaagaagtcgataacaacaacaacgacgacgatagagacaacttgagtggagacgaccacgagccac

SEQ ID NO: 100442 - DNA, 543 bp, Arabidopsis thaliana columbia
  unsure (1)..(543): unsure at all n locations
nnnnnnnnnnnnnnnnnnnnnnnnnnnnnnnnnnnnnnnnnnnnnnnnnnnnnnnnnnnnnnnnnnnnnnnnnnnnnnnnnnnccacgcgtccggcgacggccatggaaacccttttcagagtctcacttcgtctacttccggtttccgccgccgtgacatgtcgctcgatccgattccccgtttcaagacccggttcctcacacttactgaaccgtaagctgtataatttgcctacttcttcttcctcctctttgtcgacaaaagccggttggttattgggtcttggtgagaagaaaaagaaagtggatttaccggagatagtggcatctggtgacccggttctgcacgagaaggcccgagaagttgacccgggagaaatcgggtcggagcgtattcagaagataattgatgatatgattaaagttatgagattggctcctggagttggcctcgctgctcctcaaattggtgttcccttaaggattattgtattggaagatacaaaagagtatataagttacgcaccanaggaagagattct

SEQ ID NO: 100443 - DNA, 500 bp, Arabidopsis thaliana columbia
  unsure (1)..(500): unsure at all n locations
ccnnnnnnnnnnnnnnnnnnnnnnnnnnnnnnnnnnnnnnnnnnnnnnnnnnnnnnnnnnnnnnnnnnnnnnnccacgcgtccgcggacgcgtccgcccacgcgtccgcccacgcgtccgcggacgcgtccgcccacgcgtccgattaaaactcatctctctcatcatctttggccatggcaaaagacttggatgtgaacgagagtggaccaccggcggcgagagactacaaggatccgcctcccgcaccatttttcgacatggaggagcttaggaaatggccgctttatagagcggtcatagctgagtttgtagcaacacttctgttcctctacgtctcaatcctgactgtaatcggctacaaagctcaaaccgatgcaaccgccggaggagtggattgtggcggcgtaggaatattgggtattgcgtgggctttcggtggaatgatctttgttctcgtttactgtaccgccggtatctccggtggtcatataaatccg

SEQ ID NO: 100444 - DNA, 544 bp, Arabidopsis thaliana columbia
  unsure (1)..(544): unsure at all n locations
ctttgccgtcttcatggttcatttagcccccattcccatcaccggaaccggtatcaacccggctcgtagctttggagctgccgttatttacaacaacgaaaaggcctgggacgaccaatggattttttgggttggaccgatgatcggagcagcagcagcagcgttttaccatcagtttattttaagagcggctgcgattaaagctcttggctcatttggctcctttggctcctttaggagctttgcttaatatacatttattttaaattaaaccacaagttataaatctttgatcaaaattaaaaggatgattacaaatgaattaagtggaagttacatgtgatcttctttatatgtttctgtttttttgttctctctttcatttcatggaatttcccattcgtgtaattgtaaatgtggttttaattaatgttgctttaagataaaaaaaaaaaaaaaaaaggggcggccgcnnnnnnnnnnnnnnnnnnnnnnnnnnnnnnnnnnnnnnnnnnnnnnnnnnnnnnnnnnnnnnnnncattcg

SEQ ID NO: 100445 - DNA, 570 bp, Arabidopsis thaliana columbia
  unsure (1)..(570): unsure at all n locations
cacgcgtccgcagatatggaggtggagttcacgagctagccgttggctacaacaaaggtaccggactcggggccgagatcattggaacttcggtccttgtatacaccgtcttctcggcaaccgatcccaagcgaaatgctcgtgactctcacgtgccagttttggctccacttcccattggctttgccgtcttcatggttcatttagccaccattcccatcaccggaaccggtatcaacccggctcgtagctttggagctgccgttatttacaacaacgaaaaggcctgggacgaccaatggattttttgggttggaccgatgatcggagcagcagcagcagcgttttaccatcagtttattttaagagcggctgcgattaaagctcttggctcatttggctcctttggctcctttaggagctttgcttaatatacatttattttaaattaaaccccaagttataaatactttggtcaaattaaaaggttgttacaattcgggtttaagggggggggtaacatgtgnctccttaaaggtncggttttgtcccnntaattcatggnttgta

SEQ ID NO: 100446 - DNA, 808 bp, Arabidopsis thaliana columbia
  unsure (1)..(808): unsure at all n locations
gnnnnnnnnnnnnnnnnnnnnnnnnnnnnnnnnnnnnnnnggaccgggccggaattcccgggccgacccacgcgtccgaacattaaaactcatctctctcatcatctttggccatggcaaaagacttggatgtgaacgagagtggaccaccggcggcgagagactacaaggatccgcctcccgcaccatttttcgacatggaggagcttaggaaatggccgctttatagagcggtcatagctgagtttgtagcaacacttctgttcctctacgtctcaatcctgactgtaatcggctacaaagctcaaaccgatgcaaccgccggaggagtggattgtggcggcgtaggaatattgggtattgcgtgggctttcggtggaatgatctttgttctcgtttactgtaccgccggtatctccggtggtcatataaatccggctgtgacggtgggactattcctggctcgtaaagtgtcattggtgcggacagtgttatacattgtggctcagtgccttggtgccatctgcggttgcggtttcgtcaaagcattccaaagttcttactacaccagatatggaggtggagccaacgagctaaccgatggcttcaacaaaggtaccggactcggtgccgagaacattggaacctttgtccctggattcaccggtcttcttgggaaaccgatcccaaaacgaaaatgctccgtgacctcttaacctgcccgatttttggggtccacctttccccatttgggctttgccccgcctcttcatggagtccaattttaagcccaccccatattccccat

SEQ ID NO: 100447 - DNA, 550 bp, Arabidopsis thaliana columbia
ctcgactcctttagggaaagacggtacgcctgcaggtaccggtccggaattcccttttcgacccacgcgtccgcgaaaaagccctgactagtgaagaatccgatgtcagcgactgctctctcgagattaaacccagtttctcaatttgggtttcaaagaatcgttgctgggaaaagtaagagcttcttctccaattcgggtcaaaggagattgttttctgatagttctcggtttcgtcaagccatggctgcttctggttctttgccagtgtttggagacgcttgtttggatgatttggttactacttgttcaaatggcttagacttcactaagaagcgttctagtggtggtagcttcactattaattgtcctgtagctagcatgagacttgggaagagagggggaatgatgaagaaccgattggcttggcactattctgttgccgatccgctagaaaggagtcgcgccctctttgggacattgtctaggagtgttcatacttctcctatggcttggttcttcggttggaccggctcatgagctgtcttct

SEQ ID NO: 100448 - DNA, 2298 bp, Arabidopsis thaliana columbia
  unsure (1)..(2298): unsure at all n locations
ctataaatagagcaatcggtcgtagaaaaccaagacatcaaaaacacgaatatcgatagtacacttctacgtgcaattttctcctttctcttcctggacatctgtctgtttattacattttcttgtaatctctttttggggttttacaatatctatcccctaaagtttcggaaaattctgtttttctgttctcattcttcgtgatctttttcactttcttcaaaaaaaaaacatgtgtggaatacttgccgtgttaggatgttccgatgattctcaggccaagagagttcgtgttcttgagctttctcgcagattgaggcacagaggacctgactggagtggcttatatcagaacggagataattacttggcccatcaacgtcttgccgtcatcgatcctgcttccggtgatcaacctcttttcaacgaggacaagaccattgttgtcacggtgaacggagagatttataaccatgaggagctgagaaaacgtctgaagaatcacaagttccgtactggtagtgattgtgaagtcattgctcacttgtacgaggagtatggtgtggattttgttgatatgttggatggaatattctcctttgtgttgctcgacacacgagataactctttcatggtggctcgtgatgcgattggtgtcacttcgctctacattggttggggactagacggatctgtgtggatatcttcagagatgaaaggcctaaacgatgactgtgagcatttcgaaacgtttcctccaggtcatttttattcaagcaaattaggagggtttaagcaatggtataatcctccttggttcaatgaatctgttccttcaacgccttatgagcctcttgcgataagacgcgcctttgaaaacgctgtgattaagcggttgatgactgatgttccatttggagttttgctctctggtggtcttgattcttcccttgttgcctccatcactgcacgtcacttggccggtactaaggcggctaagcaatggggtcctcagctccattccttttgcgttggtcttgagggctcaccggacttgaaggcagggaaagaggtggcggaatatttggggacggtgcaccacgagttccacttctcggtgcaggacgggattgatgcgatagaggatgtgatttaccatgttgagacctatgatgtgacgactatcagagcgagcacaccgatgttcttgatgtcccggaaaatcaagtctctaggggtcaagatggttctctccggcgaaggtgcggacgagatctttggagggtacctctatttccacaaggcacctaacaagaaagagtttcaccaagaaacttgtcgcaagatcaaggctcttcacaagtatgactgtctaagagccaacaaatctacctctgcctttggactagaggcacgtgttcctttccttgacaaagacttcatcaacacagctatgtctctcgaccctgaatccaagatgatcaagccagaggaaggaaggatcgagaaatgggttctaaggagagcctttgacgacgaagaacgtccttatctaccaaaacacattctctacagacagaaagaacagttcagtgatggtgttggctacagttggatcgatggcctgaaagatcacgctgctcaaaatgtcaatgacaagatgatgtcgaacgcggggcatatcttccctcacaacactccaaacactaaagaagcttactactacagaatgatctttgaaaggttcttcccgcagaactctgcgagactaacggttcctggaggtgccaccgtggcttgttcgactgcaaaggcagtggagtgggatgcaagctggtccaacaatatggatccatcaggaagagccgctatcggagttcacctttcggcctacgatggcaagaacgtggcattgaccataccaccacttaaggcaattgacaacatgccgatgatgatgggtcaaggagttgtgattcagtcataacttcgaaggagaaatggatgaaatatgtgttatatcttcccaatgggtgaagtgttttgtatgattttaaaaataagaatgtgatcctttttttttcctatgaagatctgaatgtataatctatcttgtaaaaatttgtttctttgtaagatttgaatgtaccgcttttacgtagatcgatgtacatcaatcttataagtttcaattatgtattatattaaaaaaaaaaaaaaaaagnnnnnnnnnnnnnnnnnnnnnnnnnnnnnnnnnnnnnnnnnnnnnnnnnnnnnnnnnnnnnnnnnnnnnnnnnn

SEQ ID NO: 100449 - DNA, 615 bp, Arabidopsis thaliana columbia
aatcaacttccacttcttccacggaaacaagcaattcgatcaaacgtgaaagcaatatttaagatttttgtctcatactctaagcaagcaatatccaaataaacattcttatacctccactcctcctctgtctgattccttcacccaattcttgtctcgtttccatcaatccattgtctttgattccagaggttcttggtttatttggatgtggtgattatggatatggagtcttggaagttgctcagaagtgtttgtgtgctttcttttctccttggctcttgttttgtgtatcaaagccttcgtgttgttgatgctcaagaagatccaaaaccagccgtgactttgcaagtagatgcttctaatggaggtggacgacccattcctgaaacgctatttgggattttcttcgaggagatcaaccatgctggtgccggtggattatgggccgaacttgttagcaacagagggtttgaagctggtgggcaaaacacaccctctaatatttggccatggtccattgttggtgatcattcatccatatatgtagctacagaccgttcatcatgttttgaacggaataaaatcgcactgagaatggatgtgctttgtgat

SEQ ID NO: 100450 - DNA, 489 bp, Arabidopsis thaliana columbia
tgacgtcgcctgcacgcgtacgtaagcttggatcctctagagcggtcgcccttttgtttttttttttagatttttactttttcttattcccatggttacttctagagttctagtcaccatagtgatttaaagaaggaaactaagcatgaggaaatactagagagctgaaaaataaacaaggggttcttcttgaagctgattccatattccaaagggggaagaagtatttgaagttaaggtctcattattgcttttgagacgttggctttgccaaagatcccccctttaaatttctttccactggtgggaaccagtttgattctgagaaaaaaccccctccttctttgccaaaaaattaaaaatctcctggaaagggggccctttccccgggaaaagaaaaaaaccgttatgggccccggttttacaacattaatccccggggtggtcctttttattatcccatggggaatttttttttttttcccagaa

SEQ ID NO: 100451 - DNA, 488 bp, Arabidopsis thaliana columbia
atcaaaaatattcttttagttatctcattcacttatgaataggaactcaatctctattgatgtttacaaaattattctttgcataggccggtcgatatatctatgcctagcctatacatatcttggttttatttacaagaagaaaaaaaactttaattattcgctagttgttataatattacggcattttgtgagttattgtctttcaagtttactttgcttgcatcttgccggaagaagaggaagaagaggaagaggaagaagacgaagatgcagacgactcactctgagctgcaacctcaacgaattgggttgtgacttgttcccatttggtgattgtctgcttaatctgtacttgttgtgcgggtgtgcatgtcaaagaagccttgcctttgttctgactcacaatttgagcgtggatggtatctaactcttcgagagtcttcatcacttgttcttggtaagcttccatattcttctttacctct

SEQ ID NO: 100452 - DNA, 493 bp, Arabidopsis thaliana columbia
  unsure (1)..(493): unsure at all n locations
gnnnnnnnnnnnnnnnnnnnnnnnnnnnnnnnnnnnnnnnnnnnnnnnnnnnnnnnnnnnnnnnnnnnnnnnnnnnnnnnnnncttttgttttttttttttttttagaaaaaccaaattagcctgtacatttttcattatcaacgtggccaaggaacccagattaaaagatgacagtttttgaccattcacacattttatgtgcacaaaaaaaaaagtacaaatttacagaaaattcttttggagctgaaggcggacccaaactctggtttcttctcttctttaaaggctataaatatatatataaacccaatagattagaaagggcttcttcttcctatacctttctcttctccatgaccagtgcctctgatttacagattgggcaaacgttcttcacaatcagccatttctccaagcactctgcatgatactcgggcccgcaatccaaagtcgcaatcttttctttcgtcttgaagctttcctgacatata

SEQ ID NO: 100453 - DNA, 638 bp, Arabidopsis thaliana columbia
  unsure (1)..(638): unsure at all n locations
tctataatgcatttgcagtgaccngaataccccggttccnaattnccagccatctcaggacccagnggatggcctgaatgtccgccatttatgctacccggcccgaggaagatattcccctaagggagggaactggatggttggccagagcaattccccggaccggttaaaggtttggtacgtagtggaatcagctaaggaaggttgggcatacagtaccgggtttattcccgaggcgattatgcgagaacatatccctgatggattagatggctcagcccttgccatggcttgcggaccaccaccgatgattcagtttgcggttcagccgaatttggagaagatgcaatataacatcaaggaggatttcttgatattctagtctaaagccaagatatttcaaagtcaaaacgttaagtcgtcaaaaagcctagtgttatgatagattctaaataagtattgagggatttgtttgtatataatgttggttctttaaagtcttggatttggaaatataatgtgttcgttgtattcaaaaaaaaaaaaaaaaaaaaaaaaannnagcgccagctctagaggatccaagcttacgtacgcgtgcatgcgacgtcatagatcttctantagtgcgtcctaaa

SEQ ID NO: 100454 - DNA, 822 bp, Arabidopsis thaliana columbia
  unsure (1)..(822): unsure at all n locations
gggaccccccctttggggggttcccccggtttgaaggtaattcctcccgggcccaaaggggggtaagtttttcccccgggttttccaccgggtaaaaacccaaaaggttttggtctgaataaaatttgggccaatggttgggccaggttggaacccgggaataaactcccggtttcccaaattaatcccagccattctcaaggatccaaaggatgagactgaaatgtccgtcatttatgctaaccggaccgaggaagatattctcctaagggaggaactgaatggttgggcagagcaatacccggaccggttaaaggtttggtacgtagtggaatcagctaaggaaggttgggcatacagtaccgggtttatttccgaggcgattatgcgagaacatatccctgatggattagatggctcagcccttgccatggcttgcggaccaccaccgatgattcagtttgcggttcagccgaatttggagaagatgcaatataacatcaaggaggatttcttgatattctagtctaaagccaagatatttcaaagtcaaaacgttaagtcgtcaaaaagcctagtgttatgatagattctaaataagtattgagggatttgtttgtatataatgttggttctttaaagtcttggatttggaaatataatgtgttcgttgtattcacgatcgatattttttttcacaataatatacaaaaagtaatttcagaaaaaaaaaaaaaaaaaaaaagnnnnnnnnnnnnnnnnnnnnnnnnnnnnnnnnnnnnnnnnnnnnnnnnnnnnnnnnnnnnnnnnnnaaacggaatg

SEQ ID NO: 100455 - DNA, 3219 bp, Arabidopsis thaliana columbia
  unsure (1)..(3219): unsure at all n locations
nnnnnnnnnnnnnnnnnnnnnnnnnnnnnnnnnnnnnnnnnnnnnnnnnnnnnnnnnnnnnnnnnnnnnnnnnnnnnnnnnnccacgcgtccgcttttctcactgacaagagagagatagagagagaaaaaggctctgctttctacattatttacgattatacactttccaacatggcggcctctgtagataatcgccaatacgctcgtctcgagccaggtttgaacggcgtggttcgttcttacaaacctcccgttccaggccggtccgattcccctaaggcgcaccagaaccaaaccaccaaccaaaccgtgttcttgaaaccagccaaggttcatgacgatgacgaagacgtgtcgagcgaagacgagaacgagacacacaacagcaacgccgtgtactacaaggagatgataagaaaatccaacgccgagcttgaaccgtccgttttggacccgagggacgaatacacggctgatagctggatcgagcgtaacccttccatggtacgtctcacagggaaacatcccttcaactccgaggcgcctcttaaccgtttaatgcaccacgggtttatcacccctgtcccgttgcactacgttcgtaaccacggccacgtccctaaagcccaatgggccgaatggacggtcgaggtgaccggattcgtcaaacggcccatgaaattcaccatggaccagctcgtctccgagtttgcttaccgcgagttcgccgcgacgctagtctgcgcggggaaccgccgtaaggaacagaacatggtgaagaagtcaaagggattcaactggggatccgccggagtttccacctccgtgtggcgtggtgtccctctctgcgacgtactgcgtcgctgcgggatctttagccgaaaaggcggcgctctcaacgtctgcttcgaagggtcggaggatcttccgggcggtgccggaactgctggttccaaatacggaacgagcatcaagaaggaatatgccatggatccatcaagagacatcattttggcttatatgcaaaacggagagtatctaacaccagaccacggttttccggttcggatcatcatccccggtttcattggtggccggatggttaaatggttgaaacgaatcattgtcacaactaaagaatccgacaatttctaccatttcaaggacaacagagttttaccttctttggtagacgccgaactcgccgacgaagaaggttggtggtataagccagagtacataatcaacgagctaaacataaactccgtgattacgacgccatgtcacgaggagattcttcccatcaacgctttcacaacccaaagaccttatactttaaagggttacgcatattccggaggtggaaaaaaagtgacccgtgtggaggtcacggtagatggtggagagacatggaacgtatgtgcacttgaccatcaagagaagccaaacaagtatgggaagttctggtgttggtgtttttggtcacttgaggttgaggttttggacttgcttagtgccaaagagattgctgttcgtgcatgggacgagactctcaacacgcagcccgagaaaatgatatggaatctcatggggatgatgaataactgctggtttagagtgaagactaacgtgtgcaagccacacaagggagagattgggattgtgttcgagcatccaacgcttcctggtaatgaatctggtggatggatggcgaaggaacgtcacctcgaaaaatcggctgacgcgcctcctagtctaaagaagtctgtctcgacgccgtttatgaacacaactgcgaagatgtactcgatgtccgaggtcaagaagcataattcggctgactcttgctggatcattgtccatggacatatctatgattgtacacgattccttatggatcacccgggtggttcggattcaatcttgatcaatgctggtacggattgtacggaggagtttgaagccattcactcggataaagccaagaagatgcttgaggattaccgtatcggtgagctcatcaccactggttattcctctgactcttcctcgcctaacaactcggttcacggttcatccgccgtgttctcgctgttggctcccattggagaggcgactccggttaggaacctcgctttggttaatccccgggctaaagtcccggttcaactcgtcgaaaagacttccatttctcatgatgttcgtaaattccggtttgctttaccggttgaggatatggttctaggcttaccggttggtaagcacattttcctttgcgccaccatcaatgacaagctctgcctcagagcttacacaccaagcagcaccgttgatgtggttggctacttcgagctcgtggtcaagatttactttggcggtgtccacccaagattccctaacggcgggctcatgtctcagtacctagactctttgcctatagggtcaactttggagattaaaggaccattgggtcacgttgagtatctcggcaagggtagtttcacggttcacggtaaaccaaagtttgctgataaattggcaatgttggcaggtggaaccggaataactccggtttaccaaattatccaagccattctcaaggatccagaggatgagactgaaatgtacgtcatttatgctaaccggaccgaggaagatattctcctaagggaggaactggatggttgggcagagcaatacccggaccggttaaaggtttggtacgtagtggaatcagctaaggaaggttgggcatacagtaccgggtttatttccgaggcgattatgcgagaacatatccctgatggattagatggctcagcccttgccatggcttgcggaccaccaccgatgattcagtttgcggttcagccgaatttggagaagatgcaatataacatcaaggaggatttcttgatattctagtctaaagccaagatatttcaaagtcaaaacgttaagtcgtcaaaaagcctagtgttatgatagattctaaataagtattgagggatttgtttgtatataatgttggttctttaaagtcttggatttggaaatataatgtgttcgttgtattcacgatcgatattttttttcacaataatatacaaaaagtaatttcagaaaaaaaaaaaaaaaaaaaaagggcggccgctctagaggatccaagcttacgtacgcgtgcatgcgacgtcatagctcgtctagtgtgtaacgg

SEQ ID NO: 100456 - DNA, 693 bp, Arabidopsis thaliana columbia
  unsure (1)..(693): unsure at all n locations
nnnnnnnnnnnnnnnnnnnnnnnnnnnnnnnnnnnnnnnnnnnnnnnnnnnnnnnnnnnnnnnnnnnnnnnnnnnnnnnnnnncttttttttttgtttttcagacaaagaagatgatctctgcttatttcgttgaagattatggatacattacataagcgttacaaaaaaatgaagaacaaaaaaagagaaacttaatgcgtctttttaaaacaagaaaaaaattacttaagggatagacatacatacagggcggtttcatgtatatacgaataaaccatatacttttaaaaatcaattttataaaatttaaaacagttaaaaagaaaagacccaaaaaaccagaaaaataaatccgttaggtaaacgtcttgcaaatgcctctcaatcgatggaatcaacagaagaatccaaactattttggggcattaaaagtaaattttttgtaaaatttaacttaggctccagcgtaagggttaggcttaggtgtacccttcactagaccacattggaggcttgtctcaggcatgttgtattcatctctcagtgatttctctggtgacaagacactcgcgtaaagctgctgtcctaagtagcgtctctcggagttttcagatcgaacgttccacattccacagttgtcgaatgtgagcaagattgctgcccaacattttgggtagacttggactgtgtg

SEQ ID NO: 100457 - DNA, 673 bp, Arabidopsis thaliana columbia
  unsure (1)..(673): unsure at all n locations
gtgcactatagaagagcttgacgtcgcatgcacgcgtacgtaagcttggatcctctagagcggcctgccttngggtttggtgtcttttttttttttttttnnaaacctaaatccttacaattccaactttgtttgcaagaactgagttcggatcacaataaatatatgcaacagagtgcaatacaattatacaacaaacatacttaatacacatctttttgccttatgtactctcggggggggggtgtcacgggtgtgtatatatatcgattacacaacactcagcttcaactaatttgctcctccaagagaccaaccgttttgttttataaagcgacccgtcctttgctttatagagaaaaaaaaagggcaggctattcccagggtcaaaggcgactattatttttttttccctatctctccaagggttccccttgggtgcttccattctttctcatcactatttccctccattcacatcttcaggggggctttacctcttttggagagcacgggggccatgcagagtcacctggtttcncaatttcgnatcnccacaaaaatggtggccaggaanttccccaggcggccncccaaatcttggtccaggaaccaaggcgnggggttaccggggctcagagaggatttcggcaaccngaagagnggcccccnt

SEQ ID NO: 100458 - DNA, 444 bp, Arabidopsis thaliana columbia
gggggttgctcaatttcagagcgcacagactctgttaatcatctcctcctccgaaagacagagaaagagacaaatcaaattcattcatatcaaagagatagagagaaaatgtccggtgtggctattcatgcgagttcatggggcgcggctctggtgagaatctccccgtacactttctccgccatcggaatcgccatctccatcggcgtctctgttcttggtgctgcctggggaatttacattaccggaagtagtttgatcggtgccgccattgaagctcctcgaatcacttccaagaatctcatcagtgtaatcttctgtgaagccgtggctatatacggtgttattgtggcaatcatattacaaacgaagttggagagtgtaccatcatcaaagatgtatgatgctgagtctctaagagctggatatgcaatctttgcttct

SEQ ID NO: 100459 - DNA, 738 bp, Arabidopsis thaliana columbia
accggtccccaattcccgggtcgacccacgcgtccggagctcgtggggcgcggctctggtaaggatctcgccgtatactttctccgcaatcggaatcgccatctcgatcggtgtctcagtcctcggtgccgcctggggaatttacattacgggaagtagtttgatcggtgcggctatagaagctcctcgtattacttcgaagaatctcatcagtgtcatcttttgcgaagccgtggctatatatggagttattgttgcaatcatactgcaaacaaagttggagagtgtcccatcttcaaagatgtatgatgctgagtctcttagagctggatatgcaatctttgcatctggaattatagttggattcgccaaccttgtatgcgggttatgtgtaggaatcattggaagcagttgtgcattgtccgatgctcagaactccacactttttgtaaagattcttgtgatcgagatattcgggagtgctctcgggttgtttggagttattgtgggaattattatgtctgcacaagcgacatggccaacgaaatagatatatatatatccggtctgtatatgttgtggtctacttgcaaatctggaaaaacatggcttcttgattatcttcattgttatatcgttccaatgtctagacgaaaatcttgtgtgaaaactgagaaccacttttggatccccaattttttgtatttgtttaaaacttttgaataaaaccttttggag

SEQ ID NO: 100460 - DNA, 348 bp, Arabidopsis thaliana columbia
gactgatcttgttgttcatcagttgaagtgctacattgggacaccgctgagtgcaacatatttgctttgtcggggccgcgttgtggcaaactgccaaccgattatcggacttttcccgccctgtgtgtgcagctgtgcctcattaaaccttaggcgcactgtctgtggtcactgtcaagcgttcgcgtggtgtcctgggtcgaccaaattttcgattttctctcggcgttgtgctgtttgatctgagagcgagcgtcgcgagccatgcaggcggcgccgccttctgacagataccacctggtttatatttgcttcctcttacttggtctcggcttcctcctcccatgg

SEQ ID NO: 100461 - DNA, 530 bp, Arabidopsis thaliana columbia
  unsure (1)..(530): unsure at all n locations
aatgaannnnnnnnnnnnnnnnnnnnnnnnnnnnnnnnnnnnnnnnnnnnnnnnnnnnnnnnnnnnnnnnnnnnnnnncttgggggtgggggttttttttttatatttttggtggaaaacgatcctcaagatagatgtttaccttaagaagacataacaaagtttaatggattccttcttaaaagaaaacacaagaagatagggcgaagacaactcactcgtcaacaaatctacaatctttgggggctgagatagatgagaaattgcggctaaagtcaatgaaaggcaacatgattgcacgataccgccaacctgaggaagttcaatcaaccatcttaaggccttcataatctcaagaaaacagcgacaaaaacagtaaaaaggccgagacaagagtcctgttcattcactggtaacctaatcactgggtgtgattatgggggggcattcccaggaccggggggagcaaacccccccggaggcgggggctttccaggggcagggggggggggtccttttattccatgggg

SEQ ID NO: 100462 - DNA, 560 bp, Arabidopsis thaliana columbia
accacgcgtccgctagattaaaatcctaagctaaggaagaagaaggttttgatgttagtgaaaggttagattttttattccgatcttggtcagtctcctccaatcgtgatttctcttctggatccaagctgatgagctctacgtcttcctcccagatggttcagctcgtagctgacaagcatgtacgttacattctgatggcagaaaagaagaaagagagttttgagtctgtggtgatggatcatctaagaatgaatggtgcatactggggactcaccactctcgacttacttgacaagctcggctgtgtttctgaagaggaagtcatttcatggctcatgacttgccagcatgaatctggtggctttgccggtaacactggacacgatccacatatcctatatacactcagtgctgtacaaatcttggccctatttgacaaaatcaacattcttgacattgggaaagtgtcaagttatgttgctaagttgcagaatgaagatggatccttctcaggagatatgtggggagaaatagatacgaggttttcgtacatagct

SEQ ID NO: 100463 - DNA, 366 bp, Arabidopsis thaliana columbia
cccacgcgtccgcccacgcgtccgaagaaaatggttcccatcatcagagaagctctctccactctcttgtcttcccgcgatgaatcgggttcagttcgtgtggctggattggttcttgacttcttctgcgtccctatgatcgatgtaggaaacgagtttaatcctcccttcttacatttttcttgacgtgtagcgcagggttcttgggtatgatgaagtatcttccagagagacaccgcgaaatcaaatcggaattcaaccggagcttcaacgaggagttgaatctcattcctggttatgtcaactctgttcctactaaggttttgccgtcaggtctattcatgaaagagacctacgagccttggg

SEQ ID NO: 100464 - DNA, 913 bp, Arabidopsis thaliana columbia
ccacccacgcgtcgtaaaaacaatttctcattagcttacaatggcggatacacaccgtgtcgaccgtactgatagacactttcaatttcagtcgccctatgaaggcggccgaggtcaaggtcagtatgaaggtgaccgtggttacggtggtggcggttacaagagcatgatgcctgaaagtggcccatctagtacccaagtattgtccctgttgattggagtccctgtcgtcggttcgctacttgccttggctggattacttctagctggttcggtgatcggcttaatggttgctttaccactatttctcctcttcagcccggttatagtcccagcggctctaactatcgggcttgcaatgacaggctttttagcctcggggatgttcggtctaaccgggcttagctcaatctcatgggtcatgaactatcttcgtgggacaaggaggactgtgcctgagcaattggagtatgctaagaggagaatggctgatgcggttggctacgcaggacaaaagggcaaagaaatgggccagcatgtgcagaacaaggcccaagatgttaaacaatatgatatttctaagccacatgacactaccactaagggtcatgagactcaggggaggacgacggctgcatgatgagttttcagtatgaacggtagatatgtgttttcactattatgtcgttttttctgcattttcaatatgatgttatgtgttttttttgtttggctttttgttgaaccgtgtatgtgttttatgtttttgtaagcatgaaagatcgcaagtgttgtggtaatatttgaatgtaataatatgataagttgataaaaaaaaaaaaaaaagggcggccgctctagaggatccaagcttacgtacgcgtgcatgcgacgtacatagctgttggatagt

SEQ ID NO: 100465 - DNA, 496 bp, Arabidopsis thaliana columbia
  unsure (1)..(496): unsure at all n locations
tacccnntaacnccgaanccgtaaccttatttccttaaccgttcccccccttcccccttccacctccctccgccgctttncccccccgtgtgggaaacccccaatttcccgggttcgggctggtaaaccccgtaccccggtttgggttctggccgatttggaaagagtttggtaaagtaaagtaaccagcccacgtcaggagaataactaaataaaggctgcttacgtgtctgtgtgtggttggtttgtttgttgtatgggttaaaaaggattttgttgctgttttaaacgcggtgtgggcttctggggctacggtcgcgtttggctgtcgctagttttttttttttttttaagttgtttgtctgaaaattcgtgtgggtttgtgttttttagtgggagcaagtatggggaaacccaaatcgacttgttgtcccgttgcgtttgatgtaacgtttgcttatgttataattgaaataaaaaagtgcttttgggatct

SEQ ID NO: 100466 - DNA, 951 bp, Arabidopsis thaliana columbia
  unsure (1)..(951): unsure at all n locations
agaccggtaccggtaattncccggngtcgnacccacgccgtccggtaatcgcttcatcttcttcttcttcaacaaatcgagtcctttttctgataactcatttcgatttcagaaactcgccaagaactggatactctggcggaatcagagattaagaaccgagacgtggttctgaaactgtatgaagccctgagatctcgcgacgtcaaatctgtgcaccagatcttaaccccagatctggagtattggttccacggtcctccgccgcaccagtttttgatgcgcgtactcaccggaggtgtctctccgtcttcttcctccttcgaattcgtacctctctccgtcgtttccttcggatctaccgtaatcgcggaaggctgcgacgccgcgacatcgatttcttggatccacgcttggactgtagcgaatgggataatcacacaggtgagggagtactctaacacttctctcaccgtcacacggatcggtaacgttgttgctggacgacgctccgctgagattgcgcctccgtcgcattgttcctccgtgtgggaaagccaattctcgggtcgggctggtaaacccgtacccggtttggttctggcgatttgaaagagtttggtaaagtaagtaacagccacgtcaggagaataactaaataaaggctgcttacgtgtctgtgtgtggttggtttgtttgttgtatgggttaaaaaggattttgttgctgttttaaacgcggtgtgggcttctggggctacggtcgcgtttggctgtcgctagtttttttttttttttttaagttgtttgtctgaaaattcgtgtgggtttgtgttttttagtgggagcaagtatggggaaacccaaatcgacttgttgtcccgttgcgtttgatgtaacgtttgcttatgttataattgaaataaaaaagtgcttttgggatcttttgatg

SEQ ID NO: 100467 - DNA, 819 bp, Arabidopsis thaliana columbia
  unsure (1)..(819): unsure at all n locations
cnnnnnnnnnnnnnnnnnnnnnnnnnnnnnnnnnnnnaacaataatacctcacaaagaacaatatggctccacctcgcgtccccattctcatccttttctctttcgttatcgtagtctcatcctcaagctttactccaccgcgtcacccatttgatcccttaaccgagaccgaactcaaactcgtccgaaccatcatcaacaagtcgtaccccgttggtccgaatcataagttcactttccaatacgttggtctcaacgaacccaacaagtctctagtcttgtcttggtactcatcaccgaatcataccatcaaaccaccaccacgccaagcgttcgtcattgctcgagacaacggaaagaccagagagatagtccttgacttttcctctcgtgccatcgtctcggacaaaattcacgtaggaaatggttaccctatgctctcaaacgacgtgcaagaagcatccaccgagcttgttgtcaagttcaagctgtttatggacggggtcgcaaaacgtggcttaaacgtttcggagatcgtgttcacgacgtcaacgattggatggtacggtgagactaaggccgaggctgtgcgagttattagattgatgccgttttatcttgacggcaccgttaatatgtatcttagacctattgaaggaatgacgataatcgttaatcttgatgagatgaaggtatcggagtttaaggacaggtcagtggttactatgcccatagctaacggaacggagtaccgtatctcgaagcttaacccaccctttggaccgacgcttcataacgccgtccttttgcagccggat

SEQ ID NO: 100468 - DNA, 1250 bp, Arabidopsis thaliana columbia
  unsure (1)..(1250): unsure at all n locations
tgatacgtcnctgtaatctgactcactatagtgaaagctggtacgcctgcaggtaccggtccggaattcccgggtcgacccacgcgtccgatttgcatgctctcaaacccgaattaaatcgacacttttcagtttttgttttaacaagtagagtttcccaaaatattggatatatttctttttcaaatttcggaaaagaaatgagttgcaatggatgtagagttcttcgaaaaggttgcagtgaaacatgcatccttcgtccttgccttcaatggatcgaatccgccgagtcacaaggccacgccaccgtcttcgtcgctaaattctttggtcgtgctggtctcatgtctttcatctcctccgtacctgaactccaacgtcctgctttgtttcagtcgttgttgtttgaagcgtgtgggagaacggtgaatccggttaacggagcggttggtatgttgtggaccaggaactggcacgtatgccaagcggcggttgagactgttcttcgcggcggaactttacgaccgatatcagatcttcttgaatctccgtcgttgatgatctcctgtgatgagtcttcagagatttggcatcaagacgtttcaagaaaccaaacccaccattgtcgcttctccacctccagatccacgacggagatgaaagactctctggttaaccgaaaacgattgaagtccgattcggatcttgatctccaagtgaaccacggtttaaccctaaccgctccggctgtaccggttccttttcttcctccgtcgtcgttttgtaaggtggttaagggtgatcgtccgggaagtccatcggaggaatctgtaacgacgtcgtgttgggaaaatgggatgagaggagataataaacaaaaaagaaacaaaggagagaaaaagttattgaacctttttgtttaaaaccgacgacgcaaaacactcaaagattttgaggctctcttttttagggttttgagtgggaatggatatttagttaatgatttttctctatcgagaaatatgataaaattttggggatatatattttgccgatgagaataaataatctgttgagaattgtttcattgctaacatatggtgtgtatgtttttttttccaagcttaactattcaaatattataaattatcagggaaaaaaaaaaaaaaaaaaaaaaaaaaaagggcggccgctctagaggatccaagcttacgtacgcgtgcatgcgacgataatagctggtcgatagt

SEQ ID NO: 100469 - DNA, 937 bp, Arabidopsis thaliana columbia
  unsure (1)..(937): unsure at all n locations
nnnnnnnnnnnnnnnnnnnnnnnnnnnnnnnnnnnnnnnnnnnnnnnnnnnnnnnnnnnnnnnnnnnnnnnnnnnnnnnnnnnccacgcgtccggcatatggtgtatgtgcgatgccgtcctcacctcaaagagtttatggagagagtgtcccgactttttgagatcattatatttacagctagccaaagtatttatgctgagcaacttctgaacgtgcttgaccctaagagaaagctctttcgccatagagtgtaccgtgactcgtgtgttttctttgatggtaactacctcaaggatttgtcagtcctcgggcgtgatttatctcgtgttatcattgttgataactccccacaggcatttggtttccaagtggaaaatggagtcccaatagagagctggtttaatgacccatcagataaagaactccttcacttgctgccatttcttgaaagcctaattggagttgaagatgtaaggccaatgatcgccaagaaattcaatttaagggaaaaaatttatccacctgtacccccccctgaatatcctgttgaggcgggagatcctttcgaaaggtaaagtctatccccaaaacccttttaaagaaaaaatttggcccaaaaccaaaggttggagaaaaaatataagtaaaccaaggttgtttttttattagtttaaattaaaaacttggtatccaaaaaaaaacaggatatgcctgtaaaaacagtttaaggcccaaaaactgtaaaattgttttctcgtttttttcctgggccccatggttttcccnnnnnnnnnnnnnnnnnnnnnnnnnnnnnnnnnnnnnnnnnnnnnnnnnnnnnnnnnnnnnnnnnnnnnnnnnnnnnnnnnnnnnnnnnnnnnnnnnnnnnnnnnnnnnnnnnnnnnnnnnnnnnnnnnnnnnnnnnnnnnnnnnnnnn

SEQ ID NO: 100470 - DNA, 521 bp, Arabidopsis thaliana columbia
  unsure (1)..(521): unsure at all n locations
nnnnnnnnnnnnnnnnnnnnnnnnnnnnnnnnnnnnnnnnnnnnnnnnnnnnnnnnnnnnnnnnnnnnnnnnnnnnnnnnnnnccacgcgtccggggaagccatgacgcgtactttacggatgatatgcctcaagtatgtgaattcgtcacccatctttggaaaatttagagtgttttatttatctcttatttccgggttgattttggtgccagataaagcctttgaatcactctcatgatttaccagcgccggatcaaaacggagagacttatatatgtagctgcatgatttacttgcgacccacgaatggtgcaaagcttctaatgaagaaatggagtgaggaacttcagtcccaagcttggtctgagtccatccgttttaaagcaaatgatcagcctgcttttaacttggcacttaacaaaacagcccatcaagttagtttttgtgtcctccacgttccatttcttcaaaatcaacgcatagaatcttcttatatacttatgagttataaatgttgga

SEQ ID NO: 100471 - DNA, 540 bp, Arabidopsis thaliana columbia
  unsure (1)..(540): unsure at all n locations
nnnnnnnnnnnnnnnnnnnnnnnnnnnnnnnnnnnnnnnnnnnnnnnnnnnnnnnnnnnnnnnnnnnnnnnnnnnnnnnnnnnnnnnnnnnnnnnnnnnnnnnataaaaggaaactacttatactaaaagcaaagaaacaatgagggtgacccctgttcctaaataacaactggtattattgagtcacaaagggaagctatcattcttcatcgtcgaaaccgaattctcgcaacagctcgggcacttgaagttgaggtccagtgtgtgatccattcccatggttgttttggtcattggagttggaagtccccgcaagttggttcttgattggacgtaacttacctttgaacattccattaagcatacctccgatggatctgactgggtggcttattctatctttcaacatgaaaatcatggagtactcagagagctgccaaaccaatgtcaggatgatcgtagccgagagaagtacatgggttattttgttctgcttcttcacctttttgatgtctttagctatttcttctatactttct

SEQ ID NO: 100472 - DNA, 584 bp, Arabidopsis thaliana columbia
  unsure (1)..(584): unsure at all n locations
nnnnnnnnnnnnnnnnnnnnnnnnnnnnnnnnnnnnnnnnnnnnnnnnnnnnnnnnnnnnnnnnnnnnnnnnnctttttttttttttttttttttaaacaaagccttgtgcatttaaattgattttaaaaggtatatgtttaaactaaagtgaataagtggtagtatcaactttcttaatctacaaaaagttcttagctagatatatttaaacccgagaaaataatcacagagatacacagataatcatccctcgcgcgtaaacggtagtaaaaccccgtttaatgagttcaaatttgatggccaagaatgtttgacttacccgcaaaatgattccagagatcgaccggtttggaagggtaaaatggtagttttcaaattctccgatgaatttgaaaaccttgtcaagtaactgaggatttgcaaaccggacatgatttactccgtcctagccatggatcaatgcaatccttgtggaatttgtgcaaacaaggaagatggacgttgggtggctccaatcttcggagtttccagacagataacacaagtttcttgaaaattatcagtctttagcttacttgaact

SEQ ID NO: 100473 - DNA, 1031 bp, Arabidopsis thaliana columbia
acccacgcgtccgcacgatcgagcaagagagagatggatggtcgattacctgacaaaggcattctcaagagcgaggctctaaaacagtacatcatggaaacaacagcgtatccaagagaacacgaattgcttaaagaacttcgagaagctacaatccagagatatggaaatttaagcgagatgggagttccggttgatgaaagtctattttctatcgatgcttgtaaagatcatgaatgcgaaaaacactatcgagatcggtgttttcaccggttactcgcttctcactacagctcttgctttacctgaagatggccgtattaccgcgatagacattgataaagaagcttacgaagttggactagagtttattaagaaggctggtgttgatcacaagattaattttatccattccgatggtcttaaggccttagaccaattggtgaacgacaaatgtgagtttgatttcggattagcggatgctgacaaatcaagctacgtcaacttccatgagaggcttctaaaattggtgatggttgggggaatcattgcgttcgacaacaccttgtggtttggttttgtggcggaggatgaagatggagttccggagcatatgagagaatatagaacagctcttatagaattcaataagaaattggctttggatccccgagtcgagctctctcagatttccattggagatggtatcacgctctgtagacgtcttgtttgatccaaaagactacttgaagagtacgtagcagaaccaaagtcggagagtttggaataaaagtgttagatggttcaataacgacttcgtcttttgtcacaactttgcttgtaatggtgtgtttgattgatgctcactctttatcttctttctatgttgtggtttcgtcgatgttgttctgtctggcaaccaaactattagtactctaaattacttttaataataattgttgtaacattataatttttttttttctggtcgacacattattattactgttttttttctttttaagtgtttg

SEQ ID NO: 100474 - DNA, 553 bp, Arabidopsis thaliana columbia
  unsure (1)..(553): unsure at all n locations
tgatacgtcnnnnnnnnnnnnnnnnnnnnnnnnnnnnnnnnnnnnnnnnnnnnnnnnnnnnnnnnnnnnnnnnnnnnnnccacgcgtccggttttggaagctattacgacaaagaagtgcgaagatcagttccacttggaatcactagaaactcttggtgactcttttctgaaatatgctgtttgtcagcaactattccaacactgtcatactcaccatgagggtcttcttagcacgaagaaagatggaatgatttcaaatgtcatgctctgccaatttggatgtcagcagaaacttcagggatttatccgcgatgagtgttttgaacccaaaggttggatggttccaggtcaatcatctgcagcttattcacttgtaaacgatactctacccgagtctagaaacatatacgttgctagtaggaggaatctgaaacgcaagagtgtggccgatgttgtagaatcattaattggagcatatctcagcgagggaggtgaacttgcagctttgatgttcatgaattgggttggaataaaggtcgactttacaacta

SEQ ID NO: 100475 - DNA, 541 bp, Arabidopsis thaliana columbia
  unsure (1)..(541): unsure at all n locations
ntaggtgcaactatagaagagtcttgacgtcgcatgcacgcgtacgtaagcttggatcctctagagcggccgcttttttgtttttttttttttttttttttttatcaggtttgtctcgttttttattcacagaagtgaatctaaagcacaaactctaattcttaatctccgtttttttgtagacgatttgaaacgtctgtacacaaacatatgtatatcaacactgacatgtttcgtaaatccaactttgtgatcagctattagtgtattcttacccattttttctttttaagtttttctcttgttctccaatttctttcttctgatacagagagaattgagccttctaagatgcggcatttgtgggttgccagtcaagagtagagtcaaataccatttccttgttgcagacggggcaggtttcacttctctccatccattctagaatgcatgcaaggtgaaaatggtgatcacatttagctacaagtttcgggttctcgatatcgtattcttccaaacatatgggacaatcctcctcttc

SEQ ID NO: 100476 - DNA, 577 bp, Arabidopsis thaliana columbia
atgattctggctagcgctacttcgactcactatttggaaagctggaccgcctgcaggtaccggtccggaattcccgggtcgtcccacgcgtccggaaccacgttcatgacctcagttgtggcagctatggtcatccacctcatcctccgagcctccggtttctcagctagtcaagtagacaccattccaggcatcctcctcctgatcttcatatgcgtcttgatatgcccatttaacacattctaccgtccaacaaggttctgcttcatccgcatcttgcggaagattgtttgctcaccgttctacaaggttttgatggttgatttcttcatgggcgatcaacttactagccagattccattgctgagacaccttgagacaaccgggtgttacttcttggctcaaagcttcaaaactcacgaatacaatacctgcaaaaacggaagatactatagagaatttgcttacttgatttctttcttaccctacttctggcgtgccatgcaatgtgtaaggagatggtgggacgaatcaaaccctgatcacctaatcaacatgggaaaatacgtgtcagcga

SEQ ID NO: 100477 - DNA, 561 bp, Arabidopsis thaliana columbia
  unsure (1)..(561): unsure at all n locations
nnnnnnnnnnnnnnnnnnnnnnnnnnnnnnnnnnnnnnnnnnnnnnnnnnnnnnnnnnnnnnnnnnnnnnnnnnnnnnnnnnnnnnnnnnnnnnnnnnnnnnaatcaaaaatgacttttgtatataaaaatatttcagacaaaaccttcaaaccctgtgtctgtttttcttttttgtttgtattgatctgttaaagaaacacttcttgtagtgtttctgaggaatcaatgaccgaattgtctgagaaaagccataaaaccaagaccagctactaatgctgcaccagccgcaactccactataagcagcagcccaagcgtctgtctctacatactccattgattctgctgatcctgatgctcttctccttcttcttcctttgccttctcttgaatcatccaaatgtaatctcagactcttccagccaattgattttgcatgctctatggctgcttgaaggtcactatctgaagccaacaacactttatcgtggtcttcatcttcatacaaaatttgggggaagttatctggatcgacatcatcccctaccctctgaatgatc

SEQ ID NO: 100478 - DNA, 453 bp, Arabidopsis thaliana columbia
  unsure (1)..(453): unsure at all n locations
ttgctcttcgtgctttgtatcgtgatcatcgtcggtgttggtaactgcacatttcagatcaaaagaaagaagttgctagaatggatattccacatgaagcagaagctggagcttgggggattctccctggttttggtcgtcaccatcatccctccagtgatgctactttgttctccagttctttacctgttttcccccgtggaaaactgcaattgagtgataacagagatggtttctcactgatagacgatacggctgttttctcgcacaaacaagtttaacggaagtgcttgattgacttttgaaatctcattccattgggaacctgctcccttgattgaagagggatcttttgacaggggtttgatggntgatcttnaccnggggggngttaccaaatgctnatggntaataanccttttttggaagtggggggggattngnccttnacgg

SEQ ID NO: 100479 - DNA, 368 bp, Arabidopsis thaliana columbia
  unsure (1)..(368): unsure at all n locations
catgcanggttacatncgctgaaaattcatttgacgaacttctaaatcttgtcgagatgaaccatcaactagcctgtgatcccgaaaccggtgggtgtgggaaacgcaaccatatccaccatattctcaccactccaccacatgtttttactacagttttagggtggcaaaacacatgtgagactgtagaagacatagccgctactcttgcagccttgaataccgagatagacatcagcatcatgtaccgtggtctggaccctaagagcacatatagcttagtttccgtggtttgttattatggacagcattatcactgttttgcacatagtcgtgagcacggtcagtggatcatgtacgatgacaaa

SEQ ID NO: 100480 - DNA, 541 bp, Arabidopsis thaliana columbia
  unsure (1)..(541): unsure at all n locations
nnnnnnnnnnnnnnnnnnnnnnnnnnnnnnnnnnnnnnnnnnnnnnnnnnnnnnnnnnnnnnnnnnnnnnnnnnnnnnnnnnnnnnnnnnnnnnnnnnnnnnnnngggaggaagcaaacaatatataggcatgaaggagaaagattttttcactgaaagtgccacaaatatattaagagtactgacgattcgagactcgacttggcttgatcaccaagatttatcagcgccttcgtcgaattggccagatcccacaacacgaaaatcaagctgcttttgatgcttggtacgtcttctttcatcaaaatcatcatatccctcgaactggcggagaaattcaacggttatctctgtgttgtggagacctaaagttgagagctgcaaacacatcttaaataaagccgatggcagcgtcttcaatcccgggttattcagctccagcgtctttagattacgcagtttggtgaatgtctcgggaagttctgatataatattagctgaaagatcaacctccatgaggaatgaacagtttccgatactc

SEQ ID NO: 100481 - DNA, 576 bp, Arabidopsis thaliana columbia
  unsure (1)..(576): unsure at all n locations
ttaggacacactatangaagatcttgacgtcgcatgcacgcgtacgtaagcttggatcctctagagcggccgctttttttttttttttttttttttttttttgcccttcccttataaaactaagattttcaggaacaattgcggccttaaaagtgttctgcaacaaagccattgcaagggttgtatgcgcctccagagaaattgatccataactcatggcaccagtgcagaaccgcttaacaatttcactggcaggctcgacttcatctagtggaattttcacatctgcgtctttaaacttcatgagcccacgcaaattactttgcttgttcaattcattgatacgctttgagtattccttgtaggcggccacactgttggtccgggctgcctcttgtaatttggctattgcaagaggatcgttgagatgaatctctccatttttcctccagtgatagtttccagggttggtaagtgctgaagcttctgcacttcctggggcatagccacgggttggaaaggccaactcatgcaattgaagtccatctcgtgcaagcatctcaaatgttgctcctt

SEQ ID NO: 100482 - DNA, 790 bp, Arabidopsis thaliana columbia
atcaaagaatcaggaaagcaaacacaacacaactaacaatggatttaggaaggtttccaataatctcaatcctcgaagacatgcttgaagtccccgaagaccacaacaacgagaagacccgcaacaacccttcacgagtttacatgcgagacgctaaggcaatggctgctacacctgctgacgtcatcgagcaccctaacgcatatgcattcgtcgtggacatgcctggaatcaaaggagatgagatcaaggttcaggtcgagaacgacaatgtgcttgtggtgagtggagagaggcagagagagaacaaagaaaacgaaggtgtgaagtatgtgaggatggagagaagaatgggtaagttcatgaggaagtttcagttgcctgaaaatgcagatttggacaagatctctgctgtttgtcatgacggtgtgttgaaggttactgttcagaaacttcctcctccggaaccaaagaaaccaaagacaattcaagttcaagttgcttgagtttgttttgtgattgtgtgttggatttatctattttgttttgatttatggatttgatgaatgtaatcggaatgcgtgagggatatggtgttttgttctaagatgaaataaaagtttgttctgttccaaagaaaaaaatctaaaaaaaaaaggcgggccggtctagaggaacccaggttacgtaccgcctgcatgcgaagtcatagcttcttttatagggggaccctaaaattcaaattcaattgggcccggcggttttaccaacggtcgtgaactggggaaaa

SEQ ID NO: 100483 - DNA, 542 bp, Arabidopsis thaliana columbia
  unsure (1)..(542): unsure at all n locations
nnnnnnnnnnnnnnnnnnnnnnnnnnnnnnnnnnnnnnnnnnnnnnnnnnnnnnnnnnnnnnnnnnnnnnnnnnctttggtttttttttttttttttttttaaaggaaaataatatttattattgccattgaaaaagactcatttgatcgagagagaaaaagaatcatttgaaccaaaagcatctttttctatcttttcaaatgcttacttccttcaaatcctctagctcctcctccgaagatgccaccgctaccaccaccgagaatcctcctcctttgtgcatcgcctcctcctgggccgaaacctccgcctcacatcacctccgtcgtcttcttttcaccgctgcgaatttcgtctcccagtcaaacttcaccgccgctcaaaacttactctcaatcctctcccttaactcttctcctcacggggactccaccgagcgacttgtacacctcttcactaaagccttgtccgtacgaatcaaccgtcagcaacaagatcagacggctgaaacggttgccacgtggacgacgaacgaaatgac

SEQ ID NO: 100484 - DNA, 533 bp, Arabidopsis thaliana columbia
  unsure (1)..(533): unsure at all n locations
nnnnnnnnnnnnnnnnnnnnnnnnnnnnnnnnnnnnnnnnnnnnnnnnnnnnnnnnnnnnnnnnnnnnnctgaccctctcgttctgtgttacttcagagacaaagctagagacacactctcctttctgacgcaaaatttatctgacttcataaaattttcttgattaccgtgaggtgactccacatgtcttctaatcaaaggtctgaggatgcacgagaatgtctaatacattctctgagggcggatcttcagcctttatgatatgaggagcatgatcgctgtaaacctactgtcactggttggatctcttacttaatgggacaccagtatttccattcgatcccccctacgacttcctgttggtgcctctactcatgatcctaccttctccggttctcatggcggcagggatacatggtacgagcctaattgtactgcgacttctatagatgaactgaaaggccaactctgagcgcgcttgagatattcggaattttaggaatcacctacaggacatgatgaacctgctgag

SEQ ID NO: 100485 - DNA, 533 bp, Arabidopsis thaliana columbia
  unsure (1)..(533): unsure at all n locations
nnnnnnnnnnnnnnnnnnnnnnnnnnnnnnnnnnnnnnnnnnnnnnnnnnnnnnnnnnnnnnnnnnnnnnnnnnnnnnnnnnnnnnnnnnnnnnnnnnnnnnnnnnnnnnnnnnnnnnnnnnnnnnnnnggacaaaaatagggcactaaatatatattatcctagaaataaataaacagaaaaggacattcacatgattcaacttccatcaagatccacaacgttcctctctcgtctttatctcccctccctctatttcctccaatcaaaaagaaagataaagcaaaagcttttcaaaaagaaaagaataaaaaagtgcagtgcgggcccactctggcgttgactaatctggatagggggcacacacagacagttcccctcaaactcgagaaactaaagagttttgtcatgattcatcggcggcggctcgagaaccaaagcatgggtggggtctccttcgtacgtcacgattagcatcatcgcattatttagggcacgctccacatgcttacgcgccggacaacctcttacat

SEQ ID NO: 100486 - DNA, 666 bp, Arabidopsis thaliana columbia
  unsure (1)..(666): unsure at all n locations
cnnnggattctnnnnnnnnnnnnnnnnnnnnnnnnnnnnnnnnnnnnnnnnnnnnnnnnnnnnnnnnnnnnnnnnnnnnnnnnnnnncttttttttttttcggcatcctcgagtgttcatctattattaaataatacctctggagagtggagacattacaattaaaagttaaaatatactcatatatattggaatactgatatgtccattaatataaggaccgtaagaatgaaacaattcatcggaaaaataagcatttcaattttttctctacctatatgcttaatccggccaagaacgaaactccggtcgatggcaaccacgaggaaccgtatataaattctgccacagtgaaccggtttgcctcggccgtcgaattgatgacccgataacccggccagctcacacgttgcccgagacccgacccaggtccactgttcaaatactctccataatacaaagtatctaaagcaaatgttgtgttccactcgagccaacctctcgtgtgtacatgaccaccgatatacgacatcatatacactgtcctagagaatagcttcaaggtcggcctaagatacgntgnggaataccgtttgtcgctggagtcggtgctgaagancctagcgctgattgaatcccggggttggtcgnnttcngtttagcggt

SEQ ID NO: 100487 - DNA, 536 bp, Arabidopsis thaliana columbia
attctatttaggtcgcactactagaagatcttgacgtcgcatgcacgcgtacgtaagcttggatcctctagagcggccgcccttttttttttttttttttttttcaaatatattaaaattaaatctatagaaacaattgatgagcgtcacagcaaagagaatgttacaagtccctccggattaaccccaaaagaattaagaattacgttttttggttttggctgtacaatcaaatgattacaattacagacactgaacaaaacaaacacgagaaccatttcggatttttttgttcctcctcattgcttctgaggatatgaagttcttctatgtgattgcagatgtttcaatctggttatgagtgagtcaatatatgttctgagtcgataccttactgagtttgtgagtgttaaaggtggattgagaatcagcgtctgcgcctccactgcaaggaagactaacaaacgcaccgtttttgagtaaaggtttcctgcgttctctgggtctcccatcactagatctactcctccacttat

SEQ ID NO: 100488 - DNA, 517 bp, Arabidopsis thaliana columbia
  unsure (1)..(517): unsure at all n locations
nnnnnnnnnnnnnnnnnnnnnnnnnnnnnnnnnnnnnnnnnnnnnnnnnnnnnnnnnnnnnnnnnnnnnnnnnnctttttttttttttttaaaaaaatataggttatttccataaaagtgtgtatacatatatatatggagatgagtatatgaataaatcacaaatattggtatggtttatgtacacccatcaatcctttttctcttgttttcttccttgagaccttgaaaaaaatggttgatcaaagctcaattttcatgtgttgagattcattgttggggttttctgccactcccattcctactatgctttgtaaatcttcttcgctaaacatttgatactgaaaacacaaaagaaaaaaaaaaaacttgttatataaaacttgagattgaagaagaaaattaaaagagtattttaaacctgagaaattgacgcactaaattgggtaagtgttggtaagtgaatgaaactttctgctaaggtaaaggtttccaaaaaagttcttaggaaactgga

SEQ ID NO: 100489 - DNA, 575 bp, Arabidopsis thaliana columbia
  unsure (1)..(575): unsure at all n locations
gaagaagcaaaagaaaaaaaaaagattgaaatggagaagaagctaccgagaagattggaaggcaaagtcgcgattgtgacggcttcgacgcaagggattggtttcggaatcactgagcgtttcggtctcgaaggcgcttccgtcgtcgtctcttcccgcaaacaggcaaatgttgatgaggcagtagcaaaactcaaatccaaagggattgatgcatatggaatcgtctgtcatgtttccaatgctcaacatcgccgcaatcttgtcgaaaagacggttcagaaatatgggaagatagatatcgttgtctgtaacgctgctgccaatccatctacagacccaatcttgtctagcaaagaagctgttcttgacaagctttgggaaatcaatgtcaaatcctctatacttctcctgcaaggatatggctcctcaccttgagnaggggttcttctgttatcttcataacttcctatttgctggntttcaccacaaggnnctattngctatgtatngngcactaaaactncnttntnngnctaactaagngnttcttcctagatgccccgatcanggtc

SEQ ID NO: 100490 - DNA, 566 bp, Arabidopsis thaliana columbia
  unsure (1)..(566): unsure at all n locations
nnnnnnnnnnnnnnnnnnnnnnnnnnnnnnnnnnnnnnnnnnnnnnnnnnnnnnnnnnnnnnnnnnnnnnnnnnnctttttttttttttttaggtggtaatttgactaatctgctgtatgattgaatcagaacaaaatttaccatgaatattattacacgacttcaaccacttcaccttctttgcaaactgcaacactaatctccaaagtattgttcttctttgatttcaccctacaacaagggcttctaggagacctgtcccaaagatgagggtccggtttcttgtaaacaatgactgtcttaatgtcgctgggattagccatcttccaccgacactcgggatgagccacgcggtggatttcataacggctcactgtcatatttgtcacccgatgaactctggttgatgtcatatagaacacaaacgggttctggcacggatgacgactcacgggtcgggtggtgaaagcgtttgccgggtaatccgcccggcgataccaatttaagaaagttctcgacggcatttcaatctctcgagccgaaaagattccgcggaaaatctgaa

SEQ ID NO: 100491 - DNA, 543 bp, Arabidopsis thaliana columbia
  unsure (1)..(543): unsure at all n locations
nnnnnnnnnnnnnnnnnnnnnnnnnnnnnnnnnnnnnnnnnnnnnnnnnnnnnnnnnnnnnnnnnnnnnnnnncttttttttttttttttcgaatcaaaaaacaaatattataatttttccggatatccgcttcgtgtccaggcagtatgatcttttacacacacatgagtagtactatgttcataaatcgtaacaaaataatatggtttaaatatccatattgagctaataaaaacgaataacagttttaaataaatcgaaaacataaaataaaaatatcatggagatccacaacaacatatgttcatagatgtatacacagctttgtgactttgtcacataatctttaatgatatccaataggagccggagcttccttgagttcatgtcctttgaattgtatatccgaagcatagtggttaatatcacggtggtgagcttcgtcagctcgtataacataaaccacatccctaagcgttgcatctttaggcaaccgccagtaatcaattgcgatggctggaactgacaagttttcaaatttt

SEQ ID NO: 100492 - DNA, 518 bp, Arabidopsis thaliana columbia
  unsure (1)..(518): unsure at all n locations
nnnnnnnnnnnnnnnnnnnnnnnnnnnnnnnnnnnnnnnnnnnnnnnnnnnnnnnnnnnnnnnnnnnnnnnnnccacgggtccgggaagaggaggaagaggaggaggaagaggagacggtgattgaacggaaaccactggtggaggaaagaccgaagagagtagaggaagtgacgattgaattggaaaaagttactaatttgagagggatgaagaagagtaaagggatagggattcccggagagaggagaggaatgcgaatgccggtgactgcgacgcatttggcgaatgtattcattgagcttgatgataatttcttgaaagcttctgaaagtgctcatgatgtttctaagatgcttgaagctactaggctccattaccattctaattttgcagataaccgaggacatattgatcactctgctagagtgatgcgtgtaattacatggaatagatcatttagaggaataccaaatgctgatgatgggaaagatgatgttgatttggaagagaatgaaa

SEQ ID NO: 100493 - DNA, 533 bp, Arabidopsis thaliana columbia
ttaggacacactactagaagatcttgacgtcgcatgcacgcgtacgtaagcttggatcctctagagcggccgcccttttttttttttttttactcaaacgtccaaatatttcatgatatcaagaaaatagttgtctaagattttgtaccgctagctatcttttactctaacctctttagctaaaatccatacaccatatgcaatatgcggtttacacgtttaaaaaaaaaaactactcttcacaaacatttccaagcaaagatagattaagaacaatataatttccgtaacgcctagaaatataaccacccaaaaaaaagccggggagattgtttttactcttatgaatgtttatcatttaagtatctctcagccacggcggcatgaaccgcggctccaacgggtaaactatcttcatcgatcatgaaatgtggtgaatgagcaatgtggactgatccgagttcttcatttcttatgccaatgaagtagaaagcggctgggatgatttctgagtagaaggcgaaatcttcggc

SEQ ID NO: 100494 - DNA, 711 bp, Arabidopsis thaliana columbia
tctttccacaacattcatacgcaactcccttaaatcttgaaacgaccaatttcttcaaaacaatagtttgtttgcgatggcgacagaacaagaagctgaagttggaacagagacatcctctgtttccggaaggtttttgaggaacagagatttatatctcttcttgccttttctcttaggcttctctgatcaagaatcatcaaacggagatgatgatgatgttgcttcatcgcgtgagagaatcattttagtcaacccttttacacaaggaatgattgtgctcgaaggctcatcaggaatgaatcctctgcttcgtagcttactggagtcacgtgaggaaggtcgtcctcctgcgtccaaggcttccgtcgatgcgatgccgatcgttgagattgatggctgtgaaggagagtgtgtgatctgtttggaggagtggaagtccgaggagacggtgaaggagatgccgtgtaagcataggtttcacggtggatgtatagagaaatggttagggtttcatgggtcgtgtcctgtttgtaggtacgagatgcctgttgatggagatgagattgggaagaaaagaaacgatgggaatgagatttgggttaggttcagtttcaacgatggtcggagaattagagatttttctgcgcaggacggtggaaacagtgatggtgttgagtccgagaattaggatttacataagaagctttt

SEQ ID NO: 100495 - DNA, 498 bp, Arabidopsis thaliana columbia
  unsure (1)..(498): unsure at all n locations
aggtgacacttagaagagctttgacgtcgcatgcacgcgtcntaagcttggatcctctagagcggccgctttggggtgggggtttttatttttttgaaaccaaagaaacgactttttagtaatagcaacagtgaccaaaccaagcatgtcacagactcacagtattcaaaatccttcattcacaaagaagagacgtttatttcctttagtttctttggtcccttctctaggccgggggcttaaaatattggtacgcccgtgaaatcagcgattcattatgcaatgcatattgccactaagagatacgaccaatgatcctttattctttgatcctagaagggtctccgaccgtgttctccattcgagaataccattcacctatgcgggtgttgtccaccatatccttacccgatcgaaggtgccttattggcctcagaacaccgaatacggcgagatcgcccaggtttggttttgacccaccaagggttggacgctctt

SEQ ID NO: 100496 - DNA, 580 bp, Arabidopsis thaliana columbia
tctacaagagtttgacgtcgcatcgccgcgtacgtaagcttggatcctctagagcggcctgcttatgtggtttgggctctctttcttactgtgaacaaactaaacaagtactgttaaaacttcattctaagtaccgacccaaataacaatctgagtacacaaagtctaaagctttttacaaaaaaagtctcaaaaggataatgagaatccttacagtagttattatcatcaagatgatgcgtcttccttcaacctatacaacgtgatttcttgctgcttgaagtatcggcgatcctcttcatctaccagtacaagattcagataatacttgacgctgaatttgttgttgatgttgcgatgcgttggtgtaagatcatatggggccagaaacagtcttacaggtatcgattcacctctaactggagttccatccatcaactcaaattttgcaagagtttctgtctcgacatgagtattagcacctgcacctgttgattcccgccgtctgatctcaagatccatattcttcatcttgattctcacaagaaggaaatatattttcccaaggatgacatctttt

SEQ ID NO: 100497 - DNA, 1443 bp, Arabidopsis thaliana columbia
atgatactccagctctctacgactcactattgggaaagctggtcacgcctgcaggtaccggtccggaattcccgggtcgctcaagcttttcacagaaaaccaccacccttctctctctactgcctttttaccacagagaagagagaggatccgtcggtgtgctagtctcactgacactacatccgatcgtcgccggtgacattttataagtgtggagtttacttcagctttattattcaggaattgatggatcagtacgagaaagttgagaagattggtgaaggaacttacggtgtggtttataaggcacgtgacaaagtgactaatgagacaattgctttgaagaagatcaggctagagcaggaggatgaaggtgttcctagcacagcaatcagagaaatctccctcttgaaagaaatgcagcacagcaacattgtcaaattgcaggatgtggtgcacagcgagaaacgtttgtatctggtttttgagtatcttgacttggatctcaaaaagcacatggattctactcctgatttctccaaggatctacatatgatcaaaacatatctttaccagattctccgtggaattgcgtattgccactctcatagggttctccatcgtgatctgaagccacagaatttgttgattgatcgccgcacaaactcactgaagcttgctgattttggactggccagagcattcggtatccctgtcaggacatttactcatgaggttgttactctctggtaccgagcaccagagatactcctaggatctcatcattactctacacctgttgatatttggtctgtggggtgcatatttgctgagatgatcagccaaaagcccttatttcctggagactccgagattgatcaactcttcaagattttcagaatcatgggaactccgtacgaggatacatggcgtggggtaacttctctaccggattataaatctgctttccctaaatggaaaccaacggacctagaaacttttgtccccaatctagatcccgatggagtcgatctcctttctaaaatgctgttaatggatccgaccaaaagaatcaacgcaagagccgccctggagcatgaatacttcaaggatcttggaggcatgccttagaaaggcataaaaccagtaatctccttcattctatatataattatcaatcctaagaaaatgaagaacaatattaatgggttttgtttattctttttctgagttcgtttcctacttatattctattacgaaaaaaaagaaagaagaagatttcgagtgtgtgtgtttttttacttctaagcttttgagatcagtttcttgtatcttattttacccagaatatagtatttccctatatgaaatatggtttttgttttgcaaaatgaccatattatgcaacttctcagcttcttgattaaaaaaaaaaaaaaaaaa

SEQ ID NO: 100498 - DNA, 541 bp, Arabidopsis thaliana columbia
  unsure (1)..(541): unsure at all n locations
aactgtataaaacattatcctttgttttaaattttgtaaagtgtctgatgtattgagccaccattgacttgtacaaatagatagaagcaaagtaaatgtatagaaccatttagttaataagagagtagctatgtgaagcttttattttatgatcttccatctgattttatacttgttcaagttgagaaatgatcctgacgaagacatcaaagccttggcacatgtctgtgagaaggcagtattcgttctttgcatgatatgtcgccatgagaccggatcctgaagtttgcacatcaaaaccttcatcctggaggtctcgggattagaggnaaagtaccagtgatcgagtaaggctccccgngtccaacaactcctccgggtgccttgcatagaccgggnaanccgggggatncaggttacccgnaanccagcggngngtccaccaagctacggggggctnccccgnaatcccaccgggaanccnttttgaanaggcncgggttccggntncccaaggaacggtnnggggaaaaacctggaa

SEQ ID NO: 100499 - DNA, 553 bp, Arabidopsis thaliana columbia
  unsure (1)..(553): unsure at all n locations
nnnnnnnnnnnnnnaagattatgacgtggcctgcacgcgtacgtaagcttggatcctctagagcgttcgcccttttgttgtgtttttggttcaatctcctctaaaaaaagatggcaaagtgccctctctctcacaagtgcctcaaacgtaaaaagattctcacaaagtgcctaataatgtcacattccctaaaataatacattccctaaaataatatcgaaattaagaagtaatcaaagggagcagaaccaaactgtatggtagtaatataaagcatcaaagctcatcaaaggatttgagaggatccttagggtcaacatcttctataaggggaagatccaccccttactcctcagctccaatgccttcttctttaagcttcttggctacttcttcaaacactgcgttgttacccgcccgactcaaatggaaccccgccctaaaatctcacgaaaccacaaaacttctgttgattgacttattacccttccaatataaagaggccccctggactaggtgtgtaaataagacttagtgtatgaccatagacatt

SEQ ID NO: 100500 - DNA, 1055 bp, Arabidopsis thaliana columbia
cccacgcgtccgcccacgcgtccgaaaagaacaatgcatcgggaaacaaaagaggcttttctgacacaatggatcagtttgctgaagctaaaagttcagtgtatactgagaaaaactggatgttccctgaagcagcagccacccagtctgtaacaaagaaagatgtgccacaaaacatacccaaaggacagtctagcactacaaacaatagctctagtccacctgcagccaaggcacaaattgtcggttggcctccagtgagatcctacaggaagaacacattggccactacttgtaagaacagtgacgaagttgatgggaggccaggttctggggctctcttcgtgaaggtcagtatggatggtgctccttatctgaggaaagttgacctgaggagctacactaactacggggagctttcttcagccttggagaaaatgttcaccactttcactcttggtcaatgtggatctaatggagctgctgggaaggatatgcttagtgagaccaagctcaaggatcttttgaatggaaaagactatgtgctcacttatgaggataaggatggtgactggatgcttgttggagatgttccgtgggagatgtttattgatgtctgcaagaagctgaagataatgaaagggtgtgatgctattgggttagctgcagctccgagagcaatggagaaatcgaagatgagagcttaaaagatggaacatgacaaagctttctaattatacaaaatatgtgcgatctcttttggtggtgtttttaaatttcaaaacatcaatatctctagtttctgagatttttaaaagaagtaagtaagcccccgaatgtaaggaaatgaagaagaattaaaaatgatctatttttgttgtttgtttgttgctttagtcagtaaactggtcgttgttttatgttttgtgtttgaccttggatgtgtggttgacttctaaaaaaaaaaaaaaaaaaaaaaaaaaaaagggcggccgctctagaggatccaagcttacgtacgggtgcatgtcgacgtcaagctcgtctgagtatac

SEQ ID NO: 100501 - DNA, 490 bp, Arabidopsis thaliana columbia
acgtggcatccacgcgtacgtaagcttggatcctctagagcggtctgccctttgggggtgtgttcttttttggcacagtaatatgacattctatataaatgctaaaacaacaggagacttttcttatttacataaaaaattatgattttgcatttcattaagcggtttgcaaactaggtgcaccagtgcctgaacctatgctagctgtctcggccgcagcctcagcctctgaggcttgatcgtctgaggacaactcgaattggctcaggttccggacaaagactgtgaaagcatggaaatgctctggagagaagaaaagggctcccattctctggtcagtgaacagatcaattcctacattctcatccttcagattctcaacgatcctctgaaaccaaccaggaaccgggggggatgagttttgccctgagctaatctctcctctattgtgggaaactttctctcgctggtggcctggatcttaatacgc

SEQ ID NO: 100502 - DNA, 520 bp, Arabidopsis thaliana columbia
atttagggaaagcacgtacgcctgcaggtcccggtccggaattcccgggttgacccacgcgggcggccacgcgtccggttcaactaataacgcaaaaatcagtttctctttgagtaagtgtttattacaattaaactaactcaggcaagtctatgatcatggcttcttctgctgctgcatcgatctctatgataactctaaggaacctctctcgcaatcatcaatctcaccaaagcacttttctcggtttctctagatccttccataaccaaaggatctcatctaacagtccaggtctctccacacgagcaagatccaccacttcctccactggaggtttcttcagaaccatttgcagcagcagtagcaatgactactccagaccaactaagatccaagagcttaacgtctacgagtgtcaacggaggtggatcgaaacaggtccagcgggttttaaaacttaggggaaaaaccacatcagctttgtcccggagatcttgtgcccctcacaaacaaactc

SEQ ID NO: 100503 - DNA, 530 bp, Arabidopsis thaliana columbia
  unsure (1)..(530): unsure at all n locations
nnnnnnnnnnnnnnnnnnnnnnnnnnnnnnnnnnnnnnnnnnnnnnnnnnnnnnnnnnnnnnnnnnnnnnnnctttggggtttttttttgccttaatcattgtatgggatttctagtaaaagcaatccaaattttggtaacatgtccagaagaaaaaagaaaagtcgtattacttacaaaacatcatcttcctgaggatataaggtaccgtcatcaaggggtagagaaggaggggttcctggaggaatgctagcagcaccattttcaccagcttctatgcaaagtgcttcggcatctctgactgttgaatcgagatcaatatgcccagacagctcattgatgaactttaagagagtgtcaaaatccatctgttctcccattatcttgctgcggcatcgcttcaagaccgccacacaaacatataggtgaaaatgttccgagaggtagtgggtccacatcacctcccacagctgcattgtcttctcatactcaaattcccttttaaactgaatcagaatccagcggaaaca

SEQ ID NO: 100504 - DNA, 595 bp, Arabidopsis thaliana columbia
  unsure (1)..(595): unsure at all n locations
gattgtnnnnnnnnnnnnnnnnnnnnnnnnnnnnnnnnnnnnnnnnnnnnnnnnnnnnnnnnnnnnnnnnnnnnnnnnnnccttggggtttttttttttaatcatgaaccatctttcttcttgctattcagacattagtacacaagatagagaattatcaacttctctgctatttcatatcaagaactccaaactgtaagtaaactcgagacattagaagacatgtttttaaaactgtgtttcatacttcaaaatacacaatttgatcaaaatcagttgcttctttcaggcctgatctcaattccctgaataatcaaaccactcttccaatttccattctgagtctccattatactaatctcaatctcatcactaccatcatcaccacaacctccattgttaatgtaaaactttccaagctccacttcactccacccatctactctctcctttggccccaccacattcataccacgctccctttctccttcaacttcttcttcttcttctctctgaacctgcatccacggacgcctcatcctaaacgctctagaaaccatcgcatacgaaatccccgagtaatgggaagtagcgc

SEQ ID NO: 100505 - DNA, 525 bp, Arabidopsis thaliana columbia
acgtggcacgcacgcgtacgtaagcttggatcctctagagcggtctccctttgtgtttgtgttctaaccggataatcaatctattcgtctttcaaaatagcgggctctaataaaatatgaaaagtgaaataaatatatacacaagaagacaacttttaaaaccactctagctcgaccgtttgctcaaactgtatttcgcaggtgctttcatggggcgtgtttggccggccgaggcttaaccggaatcaatgatgacgtggacaaacagaggttgtgggcagctgacgtggagggctgtgctgctgaagtggcaacacgttcacaagaagggcacatagtgagagtagtggccggaagttgcatgtaaaagggtgtggaagtcttcaaggttctcaattctttaacctttttttgaagcctacggttttctcaaggtagagactcacatgatctctttagggatacacaggccacttccgtttgctggaggtttggccttgatcattgatcaatcacataaccccc

SEQ ID NO: 100506 - DNA, 523 bp, Arabidopsis thaliana columbia
acgtcgcatcgccgcgtacgtaagcttggatcctctagagcggcctccctatgtgtttggtttttttgactctttttcaaacgaatcttgaaaaatcaaagaaagccaacagacaaatacataattcttacaatccaatcaaagaaattttatgaacaagataaagtttaggaattcaatcaaagaacaaaagaacactttaattttctacagaaggggctgaaaatctctggaagaaatgggatttgggctggtcaaagctgcatgtcaatggggttgctcagtaaagcttgattctggtctggatcggcgcacgacaaataggacacactctaagatctggtccgcattcacaacaagtctgatggccacaaccaaacgccatgtttttcgggttgctcagacatatcggacatagctgaatatcgtctgactactcattagcttgctctcaaatggataaggaggtccactcggctcaaaattcggtatccgggaactagagaatgatgatccactctgg

SEQ ID NO: 100507 - DNA, 775 bp, Arabidopsis thaliana columbia
ctatcacgtcgcatgcacgcgtacgtaagcttggatcctctagagcggccgccctttttttttttttttttttttagatgtaaagcaacataactttaaggatcgcagtaaatgttatatcagaagaaaatatgattgcaatttgttcggaacacaacgtcagtaaacatgggaaatcagccggtcacaaatctagaattgttgcagattgcaaagatataagagaaaaaatgaatctgccaaaacggatattcgatgtttcaactcttctgagtttatttcatctggacgatcccagcgctaataagcttttgaatcttgttcataaccattggattttgcatgtgcttctgtgctgcgcttggattctcttgaagatcagacagtacctgtctcattacaggatctgtgaggatgttctggatttctgggtcttgcattccctttgcctgtctctctttcaattccctcaggagtaaggtctccgcgattagccttgttgatttgttgtacacatcttttaacaccgtcaagaagttcctgattactaggatcatgctcgagacccgcttggtatgtttccatcgcgttgtcgtactctttgaggaagaattggactgcagcttttctgctgtatcctttagagaaggttggatcgagctcaatacacttttctgcatcctttagtccttcaggcattgcacctagcttagtgtaactagcagctcggttgctatatgctttatggtcatttgggttccttttgaattcttcg

SEQ ID NO: 100508 - DNA, 542 bp, Arabidopsis thaliana columbia
  unsure (1)..(542): unsure at all n locations
nnnnnnnnnnnnnnnnnnnnnnnnnnnnnnnnnnnnnnnnnnnnnnnnnnnnnnnnnnnnnnnnnnnnnnnncttttgtttgttttttaacatcgataattcgtatgtgtggcggccctttgaaagagtcatagcacaatgcatacgcaataacatcgatcattttgttgcaaaaatataaagtgcacaagaacagcgcacgctcaataatcttgactccaccttcatatctaataggcgggcaaatccctcgctcctaaatcacaacattcataacgcagcagcaacaacaacaaaaccggcgcaggctaatgatctcctgggtacttttagccgggcataagtccctaacagtaatcagaatgagaatcatcggagtaatcgataccagaagaaggggacatgacttcttgctcaagcaactgagccacctggttcatagccgggctgtgttccgggttaacatctgaacatcttttagctatctggagcaatgccttaaaagactcttgggggacatgggggcatttcttgggtattac

SEQ ID NO: 100509 - DNA, 2428 bp, Arabidopsis thaliana columbia
gcttctttttcatctatcgtaattgtgcttgtttcgcctagaatctctcggcccccaaatatctcactcgccgtcgcaggcttcgccgccggcaatttcttaccctatttcatcttccctctcctctgatatacccataaaaacacaaaaaaaacgaaaagataaaaactttggctttagttttgttgattttgtcattcgattcgatttctttttcttctttcaaattctagggttttcgatttggtttcagtctaataacgagaggggagggaagagtaactaaaaccccaaaaaaagtcaaaaaagtttcgaaaatccaaaaaaagataatggcgcaggttcaacttcagggtcagactccgaatggttcgaccgcggcggtcacttctgctccggcgacgtcaggtggagcaacggcgacccagtttggtaacacgtcgctttatgtgggggatctcgatttcaatgtgacggactcgcagcttttcgatgcgtttggccaaatgggtactgtggtcaccgttcgtgtctgtagggatttggtcactcgccgatctcttggctatggatacgttaacttcaccaatccccaagacgctgcaagagcgatccaagaactgaattacatacctctttatggaaaacctattagggttatgtattctcatcgtgatcctagtgttcgccgaagtggcgctggcaacatttttattaagaatttggacgagtccatcgaccacaaagcactgcatgatactttttcatcgtttggaaacattgtgtcgtgcaaggtagctgtcgattcttcaggccagtcaaaaggctatgggtttgtgcaatacgccaatgaagaatctgcccagaaagctatagagaaactgaacggcatgttgctcaatgacaagcaagtgtatgtgggtcctttcctgaggagacaagaaagagactccactgctaacaaaacgaaattcaccaatgtgtatgtgaagaatctcgcggaaagtactaccgatgatgacttgaagaatgcttttggcgagtatggaaagataacaagtgctgtcgtgatgaaagatggagaagggaagtccaagggctttgggtttgtcaactttgaaaatgctgatgatgctgctagggctgtggagtctctcaatgggcacaaatttgatgataaggagtggtatgttggtagagcccagaagaagtcagagagggaaacagaattaagggtccgttatgaacagaatttgaaggaagctgcagacaagtttcaaagttcaaacttgtatgttaagaatttggatcctagcatttcagatgagaaacttaaagagatcttttctccttttggtaccgttacatctagcaaggtgatgcgggatcctaatggaacaagcaaaggctcaggttttgttgctttcgcaactcccgaagaagcaactgaagctatgtcacagttgagcggtaaaatgatcgaaagcaagccactctatgtggctattgcacagcggaaggaagacagaagggtcagactacaggctcagttttcccaagtgaggccagttgcaatgcagccgtctgttggtccccgcatgccagtgtatcccccgggtggtcctggtattggacaacaaatgttctatggtcaggcccctcctgccatgattcctccccagcctgggtatggataccaacagcagcttgttcctggaatgagacctggtgggggtcctgtacccagtttcttcatgcctatggttcagccacagcagcagcgtcctggaggaggaagacgtcctgggggaatccaacactcccagcagcaaaatcccatgatgcagcaacagatgcatccaaggggtcggatgttccggtatccccaagggcgtggtggtagtggtgatgtgcctccatatgatatgggcaacaacatgccattgactattggagctttggcttcaaatctgtctaatgctactccagagcaacagaggacgatgctgggtgaggtgctgtacccgttggtggagcaggttgaggcagagtctgcagccaaagtgactgggatgcttttggagatggaccagactgaagtgctccatctgttggagtcaccagaagctctcaaggccaaagttgcagaggctatggatgttctcaggagtgtcgctgctggtggtgcaaccgagcagctcgcttccttgaacctctcttaaattgctttttatcatttgatctttggcttttgtctctcccatacaattggagttgtttctttgctattcgttttctccctgggaatttggattcctccacataactgcgtttgtgttattttaaaccttcgtttttaaaccacaaaggaaaaacctatctgctttgttcttttgatttagttgcgtgttctagcttgttcgatcta

SEQ ID NO: 100510 - DNA, 534 bp, Arabidopsis thaliana columbia
aggtacaacttagaagactatgacgtcgcacgcacgcgtacgtaagcttggatcctctagagcggccgctttttgtgtgcggggttttttttatttttttgcaaatctcacttgctactattaattaatggaaacagagaaacaaccatttcatacaatctcaaccctacaatataaatgatcattagttagcgcccactagagagaaacgattccgccatgaccaaggaaacggggcggctcgcttccatagactcagtcgttacacctaagggatcaaatccttcattgattatccgagaattcacaagggctagcaagttatgaggaagagtggctacaccgtctaaaaattggatcacgcttgacatgcttggtctaggggctgccactggatgccagcaaagcaatcccagtttcaaaaccaaagttacttgttccgcaagatacctgggccctagtttctcatcaactacctgcaggatgtctccactgtcccaacagtctagtacccaatcagtcaaaaccatctcg

SEQ ID NO: 100511 - DNA, 535 bp, Arabidopsis thaliana columbia
aggtacactatagaagactatgacgtcgcatcgccgcgtacgtaagcttggatcctctagagcggccgctctttgggtttggtttttttttttttttttgcaagaaacgaaagccatgttattagtagatactatttcttcctctttgttgttttcttaaaaaggaagttgaacaaaagaagaatcatacaaaataacagcgatacggttacacacaagcaagtatttctcttttgtttgggtgacttgtattttcgcaacaatagccactttttttgccattcgagagaatgcatgcaaggttgatcaaaatcattggagagttgatgctacactgtacgacttcttaatcactcattaaccacatgctccctatcttctacccactggggattggattctgccaaggcatgttccaatattttccctctcttcacatcttgagttcttcttcgggttgattcaagtgttatgagcagagctgttttgtccggcaggactgactcccccccctttggttgcctgccccatcgag

SEQ ID NO: 100512 - DNA, 825 bp, Arabidopsis thaliana columbia
tggccgttcgcagtaccggaccggaattcccgggtcgacccacgcgtccgaaagaacagaatgagttctaagtttgatatcggctccttaagcatagtaatgactctgcttatttgcttcttattattatctttggctccaaaacttgaggctgagctcgcaacggtccaacatgctccaaaccccgatggctctatcagttttctggtgattggagattggggtaggcatggactctacaaccaatcccaagttgccctccagatggggagaatcggggaggagatggatatcaattttgtggtatcgacgggtgataacatctacgataacgggatgaaaagtatcgatgatcccgcctttcaactctcctttagtaatatctacacttctcctagcctgcaaaagccttggtaccttgtattggggaatcacgactatagaggagatgttgaggcacaattgagtcctatcctcagatctatggatagccgttggatttgcatgagatccttcatcgttgacgctgagatcgcagagctcttctttgtcgacacaactccttttggagatgcttatttcctcagtccacaagaccaaacttacgactggagcggcgtatcaccgcgaaaatcctaccttcagaccattttaacggagttggagatgggtctaagagaatcaagtgccaaaaggaaaaattggggggggtcacccatgctataaaaaagtggcttcctttctggggaaatacccaaaaagacttgaaatcttttccctttttaccccatcccttggagccaaaataaaggttgatcttttttt

SEQ ID NO: 100513 - DNA, 593 bp, Arabidopsis thaliana columbia
tttaggtgacactatagaagaactatgacgtcgcatggccgccttccttagcttggattcttttgagcgggcggccctttttttttttttttttttttttttttttgggaccttcgatttttttattccaattaaggaaagatttcctccctcgaaagggtttatttggtatgcagtattcaacaatctgagtgaacaagattttatgtactataagctgaggaatagcagtttacgagttctcaccgagatgagatgaccccgaggccgatgcggttgacgaagaggatgaagagaataatccgctgaacggccatggaaaagagaaccttctctcgctcacattactgttccttgcatcatcttccacattctcattacttacgttgatctctagagttcttgttctcggtcttacaggattaaccttggtctcatcatcaggagggagttcatatcggcacacgggacatgaactgtgaagctcgagccacggtactatacaccggatgtgaaacttgtgcttacacggcatctctttagcttcacttcctttggcaaaatcatccaaacaaatcgagcactgcaatgat

SEQ ID NO: 100514 - DNA, 769 bp, Arabidopsis thaliana columbia
  unsure (1)..(769): unsure at all n locations
agcaaggtttgaagattgtgaataattctaaggagcatagcaacaccacttgggtggtgttttataactcattggggggggttccacagaagactatatcggagaagaaagccaagcaaacccagaaacaggtaagcgaggagaaggtaaccgatgaaaagaaggaatctgcaactgcagagtcagcgagcaaggaatttcctgcatctgttcaaacgtccagtgatgtaaaggttgctgagaatgggtctgttgctaaaccagtcacaggcgatgtggtggcaaatggttgctaactaagaggatggtgtctctcacggcatgggcataaaactgcactagagatgaagatatgaacaatcccgtttaacgtttctcttgagaagaagattgccgtgagccttgaagcatggaaggagctttagtacctgagacggatccgtttctttgcccttagaagtttaaatcccagttatttttttttcaatcttttcttgttttcatttttccttttcttcaccatcgcagtctcgttacaagtttatgttgggtttctttttcattttctgttgttcctaccctgtaaaaatgcgcataggacctactaaatcgtgggaagaattagagaaaaggagataaaagcaaaaaaaaaaaaaaaaggnnnnnnnnnnnnnnnnnnnnnnnnnnnnnnnnnnnnnnnnnnnnnnnnnnnnnnnnnnnnnnnnnnnnnnnnnnnnnnnnnnnnnnnnnnnnnnnnnnnnnatatcat

SEQ ID NO: 100515 - DNA, 1745 bp, Arabidopsis thaliana columbia
taggtgacactatagaagatctatgacgtcgcatcgcacgcgtacgtaagctcggaattcggctcgagctaccgctcaaattctcactacacgagcgtgcaccagccttcatcagtgactggctatggtacagctcaggggtactacaacaggatgtatcagaacaagttatatggtcagtatggtagcacagggagatctgctttgggttatggttcatctgggtatgattcaagaacaaatggaagaggatgggcggccacagacaacaaatacagaagctggggcaggggtaacagttactattacggaaatgagaacaatgtagatggtttgaatgaacttaacaggggacctagagctaagggcacaaagaaccagaagggaaatctagatgatagcttagaggttaaggagcagactggagaatcaaatgtaactgaggttggggaggcggataacacatgtgttgttcctgacagagaacagtacaataaagaagatttcccagtggattatgcaaatgccatgttctttatcatcaagtcatacagtgaagatgatgtgcacaagagcattaaatataatgtttgggctagcacaccaaatggaaacaagaagcttgctgcagcataccaggaagctcaacagaaagctggcggctgtcccatctttctgtttttctcggtcaatgcaagtggacaatttgttggtcttgctgaaatgacaggaccagttgatttcaacacaaatgtggagtactggcagcaagataagtggaccggctctttccccctcaagtggcatattgtgaaggatgtgccaaacagtttactgaagcatattactttagagaacaatgagaacaaacctgttaccaacagcagagacacacaagaggttaagttggagcaaggtttgaagattgtgaaaattttcaaggagcatagcagcaagacttgcattttggatgatttctcattctacgaggttcgacagaagactatcttggagaagaaagccaagcaaacccagaaacaggtaagcgaggagaaggtaaccgatgaaaagaaggaatctgcaactgcagagtcagcgagcaaggaatctcctgcagctgttcaaacgtccagtgatgttaaggttgctgagaatgggtctgttgctaaaccagtcacaggcgatgtggtggcaaatggttgctaactaagaggatggtgtcgctcacggcatgggcataaaactgactagagatgaagatatgaacaatcccgtttaacgtttctcttgagaagaagattgccgtgagccttgaagcatggaaggagctttagtacctgagacggatccgtttctttgcccttagaagtttaaatcccagttatttttttttcaatcttttcttgttttcatttttccttttcttcaaaatcgcagtctcgttacaagtttatgttgggtttctttttcattttctgttgttcctaccctgtaaaaatgcgcataggacctactaaatcgtgggaagaattagagaaaaggagataaaagcagggtgggattttgttttttcatgtctgttggatttttaggcagagttttcttttcttttggtttcttgctttggtttcagacttgactctcttgagtcgtttagaatttgagatggtcttttgcctctctcgtcttgtttctgtcattctccaaagttatctgaatcaatccatgttttaagaaaaaaaaaa

SEQ ID NO: 100516 - DNA, 523 bp, Arabidopsis thaliana columbia
ctatagaagagttatgacgtcgcctgcacgcgtacgtaagcttggatcctctagagcggccgccctttgggtttttttttttaaggagaacggtagagctcaaacattacaaatttaagatattatgaacaaggaaaagtaaaaagggttcacacacactttgcataaagttcatcggcgaaaagcacacacacgcctttgttaataatgtaacttatagtatacgtaggtcgaaagcaaatgaatctatggggttccaatgcttgtctaacttggagatatcttatcaaactgtcccttcattcttgcgtgagtgagtccgacgcaggcatcgacaaaatctccttcaatgaaatcagtggacaaaatctggaacttatctccatatcccttggaagcacactgtgatataaaaagcctagcgtgttttctgatccgatcagtaacctgtgtaacccacacaaccggattatctgcttgcggcgtaaccgtgttctcaacccggtagaagaatttcctagaa

SEQ ID NO: 100517 - DNA, 513 bp, Arabidopsis thaliana columbia
cattgaacaaaagtattcttccgattagtttaccaaatatattatttggttcgtttgaaatctcttatatcacggtttaataacgccgtggtattcactgttacgactagctcgccggagaagaagaagaatgaaggaggagaagaaagacgacggagtaatggctgaggagaagccttacatgttctggatttggactttggcttctacgattttccgattattcctgatcttttccccggcaaatatcaacctatcttcccgtccggaggtctccacccctcacaccagccttcgccgccttgctgaaggttactggttgaagcagtcatcactgtcgccatacgcaggatcaatgtatcatggctctccattgctactctccattctcggtcctctcacagttcagaggatcgaagggcaatcgagtcatcatttgtgcagatttacttagtgcactgcttcttcgagctattggtcagaagctccagaagtcttatagaatgaatttga

SEQ ID NO: 100518 - DNA, 509 bp, Arabidopsis thaliana columbia
  unsure (1)..(509): unsure at all n locations
nnnnnnnnnnnnnnnnnnnnnnnnnnnnnnnnnnnnnnnnnnnnnnnnnnnnnnnnnnnnnnnnnnnnnnnnnctttgggtttgttttttttttttatcaatcaacttctagtaagattgatgagcaaattcatgttcatggcaaatacatagtttttttttaacagaggcactgaagctttttataaaaggattcaaagcttgtgttaacgacgacaaaagaaacaagcaagtgtacaatctcgacaacagtatgagataataaaggtaaacagagcaaaacagaggatctgaatcagtagtcgtctcccttggagagaacttctttgcaagtaggtcgcagtaaaatggtgtgttcaaactgtgatacatagcttcctttcacatcacacagaggaggatacggctgaacaatgccagagtcacaaagattctttagagccattaagtatttggtttcaccaatgcggtccaaataacgtctgcagaaggcgagagtcgagaaattc

SEQ ID NO: 100519 - DNA, 518 bp, Arabidopsis thaliana columbia
actatagaagactatgacgtcgcacgcacgcgtacgtaagcttggatcctctagagcggtcgccctttgggttttttttttaatcttaaacgagtttatattttgaactacatccaatccttttaaaccgaacttaaaatcgagagataacagagtaaatagcagaggttttatcttttatcaatcgaaaaagaacaaagtaaaaacaacacatcttaatcgcatagtaggcaggtcttttgagtgtgatcacttctcatttgcgcccttcgactttcttagcgtctcttgcggctttttcctcttctcgcttcttggcagcttcttctctctgttggcgaatcagagccaaacgatccaagtccttccttgcttgttcggttttgccttgctcttgcaacctcatgtatcgctcatgagctcgctgcttctctagctcctctctttcacgccttgagagttcagtggttttactagcatcgaggtcttttgctttcaagggcttttgtcttactctg

SEQ ID NO: 100520 - DNA, 534 bp, Arabidopsis thaliana columbia
  unsure (1)..(534): unsure at all n locations
taggacannnnnnnnnnnnnnnnnnnnnnnnnnnnnnnnnnnnnnnnnnnnnnnnnnnnnnnnnnnnnnnnnctttttttttttttttttaatttaaactatcaccttccattgttggaaggcatttgtcagtttcttacatactattttttttcatatgttcaaataagaggttctgatagaacaatgcagctaaatttctcggatgtgcacaaagataatgttatcgaatcctcggcttatcctcatcttctcatctgtgtacagaatttttagctcgatattgtttgttatatcgaccggatatccaaatgcaccgcctataattgctgcgtcgtccatcttcaagtcatatgtactgctttctgattgtatgaatttgcctttcatggagaatctaaatgccggaatgatgttaacttcaaactttatcctcccatccttctcaatgatctgtcttcccataagaccatttgctgcattttcaatccaactatctgtatacatctgtgaactccaaatcatttgccaact

SEQ ID NO: 100521 - DNA, 541 bp, Arabidopsis thaliana columbia
taggtacaactatagaagagttatgacgtcgcctgcacgcgtacgtaagcttggatcctctagagcggtcgccctttgtgtttgtttttgtgactaaagatttttaattgcgttcatttcattgtgtaaaaagaacaaaatgccccctgttttcatttgctttactctctatatcttcaatccgataagtagctctctgttttcgcatcacggcatctaatgacgtaatgtccaaaactgaaaaaccttaaccaagaaaaaaaatcaaaagtgtttatttgtataatagatattaggttttgaagtgattaacgtaaaagtgaagaaacgggaggggaaactggagaagggcaaggcctggtttttaggctaattgatctcgatgtcaaaactccgattatggctccgatcaccggagctggcatgtaaatcccataattttcaaaatcccatgcccccaccgccggtccaagtgatcgagcttgggtcattcattcctcctgaatccggcccgggataaccccttcaagggaaatggctg

SEQ ID NO: 100522 - DNA, 548 bp, Arabidopsis thaliana columbia
  unsure (1)..(548): unsure at all n locations
ctatagaagacnatgacgtcgcacgcacgcgtacgtaagcttggatcctctagagcggtcgccctttgtgttttttttttcgtgcgtttgtgcttctttttgaagattttagagatattccacaatcgaaccttatcccaaaagtaaatactctaaaaacaccccaagaaatgaaattgttcaaattaacccaacctaaatcacactgtacataattggatttatttattactatttagggttcttttttctaacagtacaacgctctccaatttttaaaatttcttgtttcttctaataacgaatgcaagattacacatatttagactttttgaaaacgttaaaatctaatggtgtgttgtttttaataaacgtattgtttgaggtctaattaaaagtgaaaagaatctcgatcggggaataataatcatgaccgagaaaccgactcagcaagtttcccgattcgttggacaagttcaggagatagcttcttcaccggtttcttctccttctccggtcgaaaatcaaaaccaagtgcatccgatact

SEQ ID NO: 100523 - DNA, 756 bp, Arabidopsis thaliana columbia
  unsure (1)..(756): unsure at all n locations
nnnnnnnnnnnnnnnnnnnnnnnnnnnnnnnnnnnnnnnnnnnnnnnnnnnnnnnnnnnnnnnnnnnnnnnnnnnnactctagaagacnatgacgtcgcacgcacgcgtacgtaagcttggatcctctagagcggtcgccctttttttttttttttgggcccaaggattttcttttaaatgcaatcttccattgttcttttgtacagcacaatgaagctaaagaacaacatcgagggaaatcggtgctttgtcctgtacagaaataaattgcatagactactaatcttctttttttctttggggaggaacaatggtctctccgctgagtttagtattgatctgccaaagctcgtttcttacattggctttgtaccacactcagtaagaaatcagcgaatacatgctcatactctggcattttcccgtaccctgggaaatagttgatgtcgatcacataaaaccgatctcttgtcccgtgctctctaattatgtctaaattgaacagccttagacccaatccacgacggagttcctctgccagtctctccaacagaggacgtgggggaagctcggcaatgctcgggtccaaatttgcatcattagctgaagctgcaacacaaaaaacccgggggaagcggaatacacccgcttatttggggaagtttcgtttaaagacatcagggtgggaaaaaccccggacaacttttaaagcccccccaaacatggaaaccttgaaaaaaaaccctccctgggtc

SEQ ID NO: 100524 - DNA, 1190 bp, Arabidopsis thaliana columbia
  unsure (1)..(1190): unsure at all n locations
atgcctccacaaaaagaaaaccatagaacattgaacaaaatgaagactaatctttttctctttctcatcttttcacttctcctatcattatcctcggccgagcaatgtggtcgccaagctggaggagcactctgccccaacggtctatgctgcagcgagttcggctggtgcggtaacaccgaaccatactgtaagcagcctggctgccaaagccagtgcactcccggtggtactcctcctggacccaccggcgatctttcgggcatcatttcaagttctcagttcgatgatatgcttaagcataggaatgatgccgcttgtcctgctagaggtttctacacttacaacgcctttatcaccgctgcaaagtccttccccggttttggcaccaccggagacaccgccacgaggaagaaggaggtggccgccttcttcggccagacttcccatgaaactacaggtggatgggctacagcaccagacggaccatattcatggggctactgtttcaagcaagaacagaatcctgcttcagactactgtgaaccgagcgccacgtggccatgcgcatctggcaaacgctactacggaagaggaccaatgcaactgtcgtggaactacaattacggtctatgcggtagagcaataggagttgacttactcaacaaccctgaccttgttgccaacgacgcagtgatcgctttcaaagccgcgatttggttctggatgactgctcagcctcccaaaccgtcttgccatgccgtgatagccggccagtggcagccttcagacgccgaccgtgccgccgggagattaccgggttatggagtgattacgaacatcattaacggtggattggagtgtggacgtggccaagacgggagagtcgccgatcgtatagggttttatcagaggtattgtaacatatttggtgttaatcctggtggtaatcttgattgttacaaccaaagatccttcgttaacggcctcctcgaagctgctatttagtaacgagagtattattattataatataatacgcagctttgtattatcaaaacaataatatcaggctaataaaactctttcccatgaaaaaaaaaaaaaaaaaagnnnnnnnnnnnnnnnnnnnnnnnnnnnnnnnnnnnnnnnnnnnnnnnnnnnnnnnnnnnnnnnnnnnnnnnnnnncat

SEQ ID NO: 100525 - DNA, 1277 bp, Arabidopsis thaliana columbia
tgagctactagtactaagctacaccacggggtttaatttgtgaaatccgaaactagggagactaaatccgaatagatatagatagcctaagggattcggggctgcaacaaaatcactcccactcactgcgaacgtcgactatggcggcgacgtcgctggttctgacgtgcgcatcccctctattcagcagccctcgggttatttctgctacgaagaagctgactacagagttgtcgatttctacagctaaattccgaagaagatgctcgggaaacaatgatgaagtgcttctagaaggaatgccaccggagtattacgatgatgaatggcaagctcgacagagagagaagaccaaagaactgcggcggatgcagcgggaggaagaagaagaagaggagagaaagattgaagaataccgtgaaattggcacgaggttgaaggaatttcccgagcaagacttaaggaaagccagaaagctcgtctccagcttcatcagagctgccgaggaagtcgaagagagaattgaagaagcagccgagaaaggagaacttgacgagcttgtcctcatgatcatatggaaccggcttgaccttgctaggcgcgatgatgagaaggacgccatcagaagtcttgatcttttgtatagaagagtcgagacagagatcttaaaacggcaagcaagtcctgcaatgaaactgctgaatgatcttctaaatatgcatgatggctttgaagacgatgcttggctcaaggactgcagaaaacgaatggctgagaccttcccccgagaagaccccttcagcattctaatgccaccgggattcgacattgatatgcatcaaggacagttgcgaccgcccattgagactgagacagacaacacccttctgagagtagactttgtaagagaagtggatgcactgctacaggaagtgaggatagaggaagacgctacaactggtagcaaaggagaagggcttgatcctgaagctatagcacttaagtttaagcaacaggagaagcaacgaaccatccgccaaattgaagccattcttgatttagccctcaacttgaagtggtaggcagttaactagaatatcaatctatacgccataataatttttttaagatagaccctagagttagattgattcaggcgtttttgtttagaaatgaatggagtctaaataataggttttggctaaaaattccaaatccaaatgttgctgactatctctctgctcatagtctccaccacaatcatctcttcctctttc

SEQ ID NO: 100526 - DNA, 500 bp, Arabidopsis thaliana columbia
gtcgtatgcacgcgtacgtaagcttggatcctctagagcggtcgcttttttgtttttttttttttttttttttttttttttttttttttaactgaaccattattcttatatatttttttttattgaagcaacccgttaaaccagattttcacatttaaaccggttaaaggggagattggcggcttacaactacatgatcatggtctgggatggtggtgtacttataagatactccatgactagtaactaccccaaatttaccaaacccatcaccattcaaaatctgccttctcatttcaacactaccacaataatctaccacgtacttagttgcgtctttgaagtagttgtaaaatgcaacacttactgctccccaatgagtgactaagagcaagttcttagaaagatacttctccgcaagaatcttcactgtcttataatatcgatcctcaaaggcttgtgcagattctccccattctggcacctctttataaaccata

SEQ ID NO: 100527 - DNA, 541 bp, Arabidopsis thaliana columbia
cgcattaatctctctctctgtatcttctcttgagtggagcgaatatccaaaagagttccgagtttctttcatccttcacgagcttatactttttcttctccattcgtttgtttttaacgatcaaaaacaacggcgaaggtattggaaataagacagaagctgttagctctgtttctccatggtgtcaagatcttgtgctaattttctagacttatcatcttgggaccttttagattttcctcaaactccacgaactcttccacgcgtcatgactgttccgggaatcatcaccgacgtagacggtgatacaacctccgaagtaacttctacctccggtggttcacgtgagaggaagatcattgtagctaacatgttaccactccaatctaaaagagatgcagaaactggtaaatggtgttttaactgggacgaagactctctccagttacaacttagagatgggttctcttcagaaacagagtttctctacgttggatcacttaacgtagacatcgaaactaacgaacaagaagaagtttca

SEQ ID NO: 100528 - DNA, 568 bp, Arabidopsis thaliana columbia
  unsure (1)..(568): unsure at all n locations
caaagaagaagaagacattattttaagtgagtnctctctctgtcacactcacaaagctttatactttctggctactgcaagctcatcactgaaaagagcttaaaccagagagatctgataagagaaattttagagtctctctgcttcaacaagatctacatcgaccaggagattagaaagaatcatgggttctaagcataacccaccagggaataacagatcgagaagtacactatctctactcgttgtggttggtttatgttgtttcttctatcttcttggagcatggcaaaagagtgggtttggtaaaggagatagcatagctatggagattacaaagcaagcgcagtgtactgacattgtcactgatcttgattttgaacctcatcacaacacagtgaagatcccacataaagctgatcccaaacctgtttctttcaaaccgtgtgatgtgaagctcaaggattacacgccttgtcaagagcaagaccgagctatgaagttcccgagagagaacatgatttacagagagagacattgtcctcctgataatgagaagctgcgttgt

SEQ ID NO: 100529 - DNA, 534 bp, Arabidopsis thaliana columbia
taggtgcaacttagaagatctatgacgtcgcactgcacgcgtacgtaagcttggatcctctagagcggtcgccctttggttttgttttttttttaaaaaaaactgcaatgtttatatataacaccaagtttattcgcaaaacaaaatgatcaatatttctaagtaacggggacaaaactggtgtctcgtctgatatctctggaaacagcttaagacaacacaatccttaattaatccgggggtaagatacaacattcgttaaaaggcatgtgccatactactaagtatgacgttggttgagcaactgtatttttagtacctctcgaacttgcttttacccgccgggtctaccaccaccacgacctctgttaaacttattaaccgggtttctcttacttctgtaccctactcgatctatcttaagagcaactttgggaggatctgagaaaccaaacgaaagcccaacctcccgtgagatagagttgggaacattaaaaacatctttcatagagggggaattatatcctgaaatgt

SEQ ID NO: 100530 - DNA, 475 bp, Arabidopsis thaliana columbia
cggacgcgtgggttctccttcctcatcatcgttactctcgtgtttatctctccgacgtaaccatggatagcgatactctctcaggattattggaaaacgtcgccaaaaaattccccgatcgccgagctctctccgtttctggaaaattcaatctcactcacgcgcgtcttcacgatctaatcgaacgcgccgcttcacgccttgtctccgacgctggaatcaaacccggcgatgtcgttgctctcaccttccctaacaccgtcgagtttgttataatgtttttagcggtgataagagctagagccacggcggcgccgttgaacgcagcgtacacggcggaggaatttgagttttacctctccgattcagattcaaagctattgttaacctctaaagaaggaaacgcaccggctcaagaagcagcttcaaagctgaaaatctctcacgtcaccgctacgctgcttgacgctggctc

SEQ ID NO: 100531 - DNA, 723 bp, Arabidopsis thaliana columbia
cccacgcgtccggaaaacccgagtgaaccagaacctgaaaagtcacctgcttgggttgagtggcgagagacctctgagtccaccgcaccaccttcttccaacccagaggagactaccatattgtccaatggtgatgttcaaattgagaaagaggataatgatgatgatgatgatactgataacaaaagtgcagtgaaaacaccaggtgtacctggcgatgaaaccacagagaagttaccagatgagagtggtgttgaacccactgagaactcaccaaaagctagtggcattgaacccacagagagctcaccaaaagcgagtggagctgaagtaactggaaacttgagagattccgatcctgctgaatctcatgcggatgctaaaagctctgaacctgaaagccctcatgggacaaaagaaacagaggttgcagcagaagcagataccaaagagaccgaagaggctgtgaaggaaccagagaaggtagtgtgagctttttacttaaccgggggtctctttgactgataaaacaaaatttcttctggtttagtttgattaagggctttgtctgttttgggtacaatttattattctatttttttcttttccttgtttgtttacttcattgtatcatctccaaatccggtattttttattcaacattattgtcgaccaaaatttgttactagcttttcatattttattagtataatcttttacctc

SEQ ID NO: 100532 - DNA, 543 bp, Arabidopsis thaliana columbia
  unsure (1)..(543): unsure at all n locations
attgtannnnnnnnnnnnnnnnnnnnnnnnnnnnnnnnnnnnnnnnnnnnnnnnnnnnnnnnnnnnnnnnnnnnnnnnnnnctttgggtttttttttttttttttttttgattaaaaaaatcgggaagtttatatcatcatatccagaagaaactcgaatcaattactccataacttcaagcagcctaaaactaatgtttattgatgtagagaaatacaacattgaaaagctgagcattgaacatatctcgcattatttcttagaaagattttctcctttggctttttgtatgatgaatgtacacttgtttttgaacaaccaacactgatgcacttgaaggatattcatgtgatgctaataaatctccaatagggcccaattcattgaactctgtccattcactaattccgctagtagcctcagttcctattccgctgccgcttccaacgataaacaagtcataatcatttgccattgctcgtaagattcttgaggtctcagatccatcagaaaccgccttatcgatatatgtcaccttggca

SEQ ID NO: 100533 - DNA, 796 bp, Arabidopsis thaliana columbia
actatagaagagttatgacgtcgcctgcacgcgtacgtaagcttggatcctctagagcggtcgccctttgggtttttttttttttttgtttaacaaataatactctcatttcatgcttacaatatgcggccgccccaaatgtaaattataacaattaggaagaggtgaggctgcggatgagaaggccttcgaaggtgattccaggtccgaaagctaagccaagtccccactcttgtgctgcgtcacctttcttcttcagctcatctctcatatactccatcacatacagtatcgtgttgctgctcacgttcccgtaatccaccaacgcccttctgctgctctccagcttctctttctccagcttcagttttgtctccagacggttcagaatcgcaggtcctcctggatgaacagcccagaacatgtcattgaactccatcgactcatcgccagcctttcccatcagcttcttgcagaactcttctatgttctcctctatcttctgcgggaggtctcgtccaagcttgaagtttatgccttcctcagtcaacctcccctcgatcacgttctgtgtccccggcaagaactgctgaaccgcatagtgcagctccatgaaaggagcttcacactctctcgggtcagctccgatgatcacagcagctgcaccatctccaaacagagcagctccaactaggtcgtacggacgcgctttgtttggtggccgaaatccgagaatggtggtttcagaggttgtgagcagaacacggcttccggggttgttctcagcaatgtcttg

SEQ ID NO: 100534 - DNA, 528 bp, Arabidopsis thaliana columbia
ctatagaagagttatgacgtcgcacgcacgcgtacgtaagcttggatcctctagagcggtcgccctttgggtttgtttttttagtgcaccaatctgttttgaacttggttttacaacaagaacatagccaaaaccatgtcttactttttcctacattctctgaaaccacaaaagaaatcccaacaaaaaaaacaaaaaatacagagataatatagttcttgcagccacagggtggtaacaatggctcctccaaactgattcatcatagaagatttgtcattatcatcatctcatcttcattcccattggagaagaatccattataccacactaaaaccagacaacaaacttcaaatcttccatatgatcattagctcttccacgaggcttcttcttatgtacaacatttttcaatcgattccttcttttcttccgttttcgtttttcggttactgctctttccagattcgtacagtcactctcaacttgagttcttggctataacctccagagaagtagagtgcgagg

SEQ ID NO: 100535 - DNA, 523 bp, Arabidopsis thaliana columbia
gcctgcaggaaccggcccggaattcccgggtcgacccacgcgtccgttctttctcagaccacaatagcagaacccgataaagagctacagcggtttgcaatctggaaatactcattcctcaaaacctgtgaagctgttgatctggagcttgagcatcaccgaaagatagattctttcaacagcggtacgaccgctctaaccattgtgagacagggtgatgttatttatatagcaaacgtcggggattcacgtgcggtattggccacagtttcagacgaaggaagcttggtcgcggttcagctcaccgtagatttcaagccaaacctgcctcaggaggaagagcggataatcggatgcaacgggagagtattttgccttcaagatgagccaggggtccaccgtgtatggcaaccagtagatgaatctccggggctcgcaatgtcaagagcattcggagactattgtatcaaagattacggattggtctcagtgcctgaagtcactcagaggcatatatccatta

SEQ ID NO: 100536 - DNA, 530 bp, Arabidopsis thaliana columbia
taggagcaacttagaagagttatgacgtcgcatgcacgcgtacgtaagcttggatcctctagagcggccgccctttttttttttttttcttacgaagcatatattatgacaaaaattgctgttccacaattgttacgtaaactgcaattctgtaaacttaacgatgacaatggcggaatgtaaaaatgcaattcggggatgaatgtgttctttcagtatattctaaagtgccacgatgtgataacattatacagaatacaaggaaacggtcgttgaatttgaaaaactctaattattttttagtgtcaccttcttcttcttcgtcatcagatttagcgaagatggtcttaggctgggtctgagagtaagcaggtgcaataaactttggatctttaacagcaacctctgcgtatttcaatattgcttctcttggatcttcttccatccacgtctcttttatcatcccaccttgcttgagaagatattgtgttaataagccactaccaggagtcccaactcttccaccatga

SEQ ID NO: 100537 - DNA, 2202 bp, Arabidopsis thaliana columbia
ctgaaaaccaaacaagaccatatgggcactcgaatactccattttgttatcggctacttccactagcctcctccttcgctgcgtctcctgtttctctacttcacgattactcgctagattcattgaagcagttgtgagttaagttggagaaaatggttgtgtttgggaatgtttctgcggcgaatttgccttatcaaaacgggtttttggaggcactttcatctggaggttgtgaactaatgggacatagctttagggttcccacttctcaagcgcttaagacaagaacaaggaggaggagtactgctggtcctttgcaggtagtttgtgtggatattccaaggccagagctagagaacactgtcaatttcttggaagctgctagtttatctgcatccttccgtagtgctcctcgtcctgctaagcctttgaaagttgtaattgctggtgctggattggctggattgtcaactgcaaagtacctggctgatgcaggccacaaacctctgttgcttgaagcaagagatgttcttggtggaaagatagctgcatggaaggatgaagatggggactggtatgagactggtttacatattttcttcggtgcttatccgaatgtgcagaatttatttggagaacttgggatcaatgatcggttgcagtggaaggaacactccatgatttttgctatgccaagtaaacctggagaatttagtagatttgacttcccagatgtcctaccagcacccttaaatggtatttgggctattttgcggaacaacgagatgctgacatggccagagaaaataaagtttgctattggacttttgccagccatggtcggcggtcaggcttatgttgaggcccaagatggtttatcagtcaaagaatggatggaaaagcagggagtacctgagcgcgtgaccgacgaggtgtttattgccatgtcaaaggcgctaaactttataaaccctgatgaactgtcaatgcaatgcattttgatagctttgaaccggtttcttcaggaaaaacatggttccaagatggcattcttggatggtaatcctccggaaaggctttgtatgccagtagtggatcatattcgatcactaggtggggaagtgcaacttaattctaggataaagaaaattgagctcaatgacgatggcacggttaagagtttcttactcactaatggaagcactgtcgaaggagacgcttatgtgtttgccgctccagtcgatatcctgaagctccttttaccagatccctggaaagaaataccgtacttcaagaaattggataaattagttggagtaccagttattaatgttcatatatggtttgatcgaaaactgaagaacacatatgatcacctactctttagcagaagtaaccttctgagcgtgtatgccgacatgtccttaacttgtaaggaatattacgatcctaaccggtcaatgctggagctagtatttgcaccagcagaggaatggatatcacggactgattctgacatcatagatgcaacaatgaaagaacttgagaaactcttccctgatgaaatctcagctgaccaaagcaaagctaaaattctgaagtaccatgtcgttaagactccaagatctgtgtacaagaccatcccaaactgtgaaccatgtcgtcctctacaaagatcacctattgaaggattctacttagctggagattacacaaaacagaagtacttagcttccatggaaggcgctgtcctctctggcaaattctgctctcagtctattgttcaggattacgagctactggctgcgtctggaccaagaaagttgtcggaggcaacagtatcatcatcatgagaagaggacaaaacttaaagatgatttgcttgtaagcattattatttgtgtataaatctcattgcaatccaaacttaaccttactctcttcagtaaatgaatctcacagatttgacatctcacgtttctgtcaattttataatttttaaaaagtaattactgtcgaccttttgtaatcatagtgatttatcattatgtctctcattttaaaaccttttctggtacaaattataaaaggtcgatcatcattgattgatcaaggggtaaaaacaaatgttcatgaccaataaaaagcaccacaaaaaaggaagacgattgttttcaaccacaaaaatttcatttgttttgt

SEQ ID NO: 100538 - DNA, 333 bp, Arabidopsis thaliana columbia
aagagtaagattcttttattcagatattttaattatatggcggaatgcgatgttcgaaagtgaagagtaaaagtaaaaggattatgaattgctacaaagtgtgatgtatgtaccacataagggaaatccacaaataataaattcttctctcagacattaaaagtttaattatgggttaaccttttctgaagtccagcacttctctccagttccagtagccatggaagaaaagaaaagcctctgattagttttcagattcaagtaatcaaccttttctggctctagaagcagcaggcagtattcaggaactggaccacttgaaggctcgtgccg

SEQ ID NO: 100539 - DNA, 434 bp, Arabidopsis thaliana columbia
  unsure (1)..(434): unsure at all n locations
nnnnnnnnnnnnnnnnnnnnnnnnnnnnnnnnnnnnnnnnnnnnnnnnnnnnnnnnnnnnnnnnnnnnnnntttttgggttttttttttttttttttggataggaaacaggtaacaatctacttaagaacacttaacaatcagaatagatgagaaggtgaatcttacataagctcagagataccctaaaaaacaaagattacacaccttcctcgattacacgatgttttgatttgtcatcagaaaatttatttacagaggaaaaacaagaaaaacaaaccaatcaatcgaataaacacacttcctcttcgctgtcaaatcaaacccttgttaaagatcaattactgctgctaaagccaccacctttcatcatctgaagaaactctttgtaattgactctaccatcaccgtctgcatcaacttgcataatcatct

SEQ ID NO: 100540 - DNA, 520 bp, Arabidopsis thaliana columbia
  unsure (1)..(520): unsure at all n locations
nnnnnnnnnnnnnnnnnnnnnnnnnnnnnnnnnnnnnnnnnnnnnnnnnnnnnnnnnnnnnnnnnnnnnnnnnnnnnnnnnnnnnnnnnnnnnnnnnnnnnnnnnccgacctgaaagacgttaaatcccttgataggcaaaatatacaacactgtaaaattaattcgtaaccgagacacttggtgaaacctcaagacacataaacgatgaaatcagaggtaaagaaaaattgagctatctttcccaattagaatttccgtcaagctcatcgcaggacatcgttggggtatttctatcttttgaacttatactactccagacggtagcccgagaacaagctggcctccgaaaacgcttttgacgtagtagtaacagaaatctgccaagatgaaagtttgaacaatttctgagatcagaaccattgatggccacaatccataacccaatgctacaagcaaccgtccccgcgtgtccacaacctgtaaaacccagtgggcacagctgaggaaccttgctactc

SEQ ID NO: 100541 - DNA, 484 bp, Arabidopsis thaliana columbia
aggtgcaacttagaagactatgacgtcgcctgcacgcgtacgtaagcttggatcctctagagcggtcgccctttgtttttttttttattttcactaatttttcctcgggaaaggtaaataaattcaatataaccttctaataaggaaaaaggggaagaaaaaacatccaaatttattttcttaaattttttaaaaaaatgattagggaaggaactcagaatccttcccataccttatatatgcacacgcagaagaagtcatttctgatacatcggaacatcaatcactcgtcttcgtttcccacgagagtgaaagtgaaaggagcaaacttgtaaccatcgccttcggagaacttgttctggtactccacccagtgaagacccaccgcgtgaaggaatgcactcaatgtctccatcacaagaggcactcccacaagcgcaaattttgaagacgagaattcccacgatccagatgaagacattgt

SEQ ID NO: 100542 - DNA, 439 bp, Arabidopsis thaliana columbia
cttcttgtttccttcgctcgattctcttctcttctcctactaaccttcgttcaaatcaccatctccccactttcttccccaagaattatctcatttgctctcattccacttcttctcgcttcgaatcgctctcggtttcatcgatcggaactggatctaccaagaaatcatccgatactcggagaaaggtaaagagcatggctacgacaaatataggaaaggaggagaagaaaagagtcgagatttatgatctcgaagagaatttagtgattgatttggctaaattcacagcagatctctccgataagttttgtaaagagagaggcgctttcaccgtcgttgtctccggtggctctctcatcaaatcactccggaaattagtagaatctccttacgttgattctatagattgggcaaggtggcattttttctgggttga

SEQ ID NO: 100543 - DNA, 586 bp, Arabidopsis thaliana columbia
  unsure (1)..(586): unsure at all n locations
atgtnnnnnnnnnnnnnnnnnnnnnnnnnnnnnnnnnnnnnnnnnnnnnnnnnnnnnnnnnnnnnnnnnnnnnnnnnnctttttttttttttttttgtgaaaccgccaactaaacaatggccaagaacttagattatggaagactgaatcacatgaatctaggaacaacatcattaacaattgctttagaatcttaatcaaaaactaatcgtttaatattcaatgtacatgtatctagggtaacaacattatgagattcacttgcccgtgatgaatgggtgagctaatgcctgtgacactgtaattctcttctgaggatcaagtatgaaaattctgtctagaagatccctgaaatgaaccaacaacttgctatcttcatccttataacgttgtttaattactgaaccaaattcttttggctttatgtttaccatcattctctttgttgtctttctagtaacactatcctcctctgtagcatagaagcataagtccttatcaaagtgctgatcgataaatgctcccttgcgaagcatctttttagggaaggcacctttcagttccatatgcaggcgtaacatttcat

SEQ ID NO: 100544 - DNA, 591 bp, Arabidopsis thaliana columbia
  unsure (1)..(591): unsure at all n locations
cnnnnnnnnnnnnnnnnnnnnnnnnnnnnnnnnnnnnnnnnnnnnnnnnnnnnnnnnnnnnnnnnnttcttcccacgcgtccgcttcttgtgggacaaaccctaattattttacttcgatatctctccacttttcccgctcaatcatctgatctttccctctctcagcaatgcatgatcttcgattttctatcagtgttcaaagctgaaaaaaatcgaactgggtctgttgatttcttcaggtctaaaatcagattagattagagaagaagaagaagaatgctggaagctgtagatagctcaggagtggtgaatggaggattcccgcagattcagagcttttacggcgattgcagtagtgaagaagagttatcggtattgccacgtcatacaaaagtggtggtcaccggaaacaacccggacgaaatcggtgcttgttggtcttcaaggtgttgtcaaaaaagctgtcggtctcggtggttggcattggctggttttgaccaatgggattgaaggaaaagttccanaggaatccnttagngnccttnaccncctnctggaaccnngnagccggtncccttgttncggaacc

SEQ ID NO: 100545 - DNA, 577 bp, Arabidopsis thaliana columbia
acgactcactattgggaaagctggcacgcctgcaggtaccggtccggaattcccgggtcgtacccacgcgtgcgccgcaaacgattctcattgtgaactctgataatatctaagacgacgaaatgttggagctacgtcttgttcagggctcgttgttgaagaaggttctagaatcaatcaaagatctggtgaacgatgcgaatttcgactgctccagcactgggttctcactccaagctatggattcgagtcacgttgctctggtgtctctcttgctaagatccgaaggcttcgaacactacagatgcgacaggaatctctccatggggatgaatctcggcaacatgtcgaagatgctcaaatgcgccggaaatgatgacatcatcaccatcaaggctgatgacggcggcgacaccgttaccttcatgtttgagagccccacgcaagacaagattgctgattttgagatgaagttgatggatatagacagtgaacatctgggaatacctgatgctgagtaccactcaatcgtgaggatgccttccaatgagttttccaggatttgcaaagatctcag

SEQ ID NO: 100546 - DNA, 627 bp, Arabidopsis thaliana columbia
  unsure (1)..(627): unsure at all n locations
nnnnnnnnnnnnnnnnnnnnnnnnnnnnnnnnnnnnnnnnnnnnnnnnnnnnnnnnnnnnnnnnnnnnnnnnnnnnnnnnnnnccacgcgtccgaaaaaaaaaaaccgaagtggtttcttaccaaaaaatcaaccaatctccttcacgaatttccatctgagaagaatttgaatcggtggagatggaaccgccggagaatagtttagattccgatggttcgaacttagagacagcggagaggataatactccggtgggactcagcagcgactgatggagcaagagggaagatgattttccaaagcgatcgtgatgaggtggatcggtttcttcgagccgttgatgaaatccaacggtccttatcttctgtctctttctcttcttcttcctcctccgccgccacctccgccgccaccgtagtcgatgaacacgaggtcaaagccaacttcagctattcaaatcgctatggctagactcgaagacgagttccgtaacattcttctctcccacacaactactttcgagcctgattnacttttcctcgngganccatcagtctctcccgtntttaaccgtcgaagttggagaagataccacccgtaactcncnggaggaagaagatttaaa

SEQ ID NO: 100547 - DNA, 2073 bp, Arabidopsis thaliana columbia
  unsure (1)..(2073): unsure at all n locations
nnnnnnnnnnnnnnnnnnnnnnnnnnnnnnnnnnnnnnnnnnnnnnnnnnnnnnnnnnnnnnnnnnnnnnnnnnnnnnnnnnnnnnnnnnnnnnncggccgcaaatttgagtgggtgagaattttttacgatagaggaagagacagcatcatctacttcttccgaccgtgtacatatattacagtaagcgttgcaacacaacttcttgaggatcttctcacattaatgggtcaaaccttttgctcttccttttgattaatttagtgtttgacaatctcctcctccttctccttcttcttcaaagttttgtcgcagtatctattgttcttacagagagaaaggaaagctttagtcttttaccagtttgatccaattctgggtttcactgaaaaaaagttgggagtttgattcttctaactgtagaagaaacagagtcaacagaagaaaactaaaaaagttgagatttttctctcacgcgctcaagaacttgagtatgtcttcttctgtagcagtgttatgggttgctacttcttctctaaatccagacccaatgaacaattgtgggttggtaagggttctagaatcttctagactgttctctccttgtcagaatcagagactaaacaaaggtaagaagaagcagataccaacttggagttcttcttttgtaaggaaccgaagtagaagaattggtgttgtgtcttcaagcttagtagcaagtccttctggagagatagctctttcatctgaagagaaggtttacaatgttgtgttgaaacaagctgctttggtgaacaaacagctaaggtcttcttcttatgaccttgatgtgaagaaaccacaagatgttgttcttcctgggagtttgagtttgttggtgggtgaagcttatgatcgatgcggtgaagtttgcgctgaatatcctaagacgttttatcttggaactttgcttatgacacccgaaaggcgaaaggcgatttgggcaatctacgtttggtgtagaagaactgatgaacttgtggatgggccaaatgcttcacatataactcccatggctttagatagatgggaagcaaggttagaagatcttttccgtggtcgtcctttcgatatgcttgatgctgctctcgctgatacagttgctagatacccggtcgatattcagccatttcgagacatgatcgaaggaatgagaatggacttgaagaaatcgagataccagaacttcgatgatctatacctttactgctactacgtcgctggaaccgtcggattgatgagcgttccggttatgggaatcgatcctaagtcgaaagcaacaaccgaaagtgtttacaacgctgccttggcccttggtatagccaatcagcttactaacatactcagagacgtaggcgaagatgcgagaagaggaagggtttatctgcctcaggatgaattggctcaggctggtctttcagatgaagacatattcgccggaaaagtaactgataaatggagaaacttcatgaaaatgcagcttaaacgagcaagaatgttcttcgacgaagctgagaaaggcgtcaccgagctcagtgccgctagcagatggcctgtatgggcttcattgctattgtacaggagaatactggacgagattgaagcgaatgattacaacaattttactaagagagcttatgtggggaaagtcaagaaaattgcagctttgccattggcttatgctaaatcagtactaaagacttcaagttcaagactatcgatatgagagcgagaggaaagtggaacaaaaacaacctaagagcgctttttgtgattaagaaaaaacttaggctcgaatttcttatgttaactaatatatacatattaatggggaagcaaattcttataatgttacattatctttctgaatgtaaaaaagtatttttttttttaattttattttagttatggttnnnnnnnnnnnnnnnnnnnnnnnnnnnnnnnnnnnnnnnnnnnnnnnnnnnnnnnnnnnnnnnnnnnnnnnnnnnnnnnnnnnnnnnnnnnnnnnnnnnnnnnnnnnnnnnnnnnnnnnnn

SEQ ID NO: 100548 - DNA, 718 bp, Arabidopsis thaliana columbia
  unsure (1)..(718): unsure at all n locations
cagcgaacacggagttccggcatcatttaaggttccaactggagttgtcataccttttggatcgatggaattagctttaaagcaaaataattcggaagaaaagtttgcgtctttgctagaaaaactagagaccgccagacctgagggtggtgagctacacgacatatgtgaccagatccatgaactgatgaaaacgttgcaagtgcctaaagaaacaatcaacagcataagcaaagcgtttctcaaagatgctcgtctcattgttcgttcaagtgctaacgtcgaggacttagccggaatgtcagctgcaggactctatgaatcaatccctaacgtgagtccctcggatcctttggtgttttcagattcggtttgccaagtttgggcttctctctacacaagaagagctgttctaagccgtagagctgctggtgtctctcaaagagaagcttcaatggctgttctcgttcaagaaatgctttcgccggacttatcattcgttctgcacacagtgagtccagctgatccggacaagtaacccttgttggaagcccgagatccgcccctgggtttaagggtgagaccttttagccttccaggaccaagagggacacccatggggggcttcgntttcggggaaagctcgncgggggtttttcaaaaccttagntttnngaaanttnagngngggggtntttttttnaggaacaggncncct

SEQ ID NO: 100549 - DNA, 500 bp, Arabidopsis thaliana columbia
  unsure (1)..(500): unsure at all n locations
cgtgaaagaagactaatattatttatgggacaaggccaagccacaaggacataccaaagaaaaaaacaagagaaggtgataaaaggggcaaaaaaaaaaccaaacaaacaaacaaagaagatcacaaagagtagtaaaagaaatatttacaaaacagttaaaaaaacaaacaaacaaaaccccttttcttcacctcgtcgcttgtcataagccaaaccttccaaaagtaactactagttttttactaccatagaactgaagaagaagtcttcagttttttactccatacgggctcttttaacttctcgagttttactttttactatacggctctcaaaactggcctgaagtgccaagtctctggcccttacccaacgttgcggttgggcgttttgcgaaacgggccaaggaacccttggccccccggggggagaacccacgcgtcttcttcaggctggacttccaaggtgaccnctggacngcgtggnttngcacnggnt

SEQ ID NO: 100550 - DNA, 1006 bp, Arabidopsis thaliana columbia
  unsure (1)..(1006): unsure at all n locations
tcctataataactataacttgactgcacgcgtccctaagcttggatcctctagagcggccgccctttttttttttttctttttttttttttgggaaagaagactaatattatttatgggacaaggccaagccacaaggacataccaaagaaaaaaacaagagaaggtgataaaaggggcaaaaaaaaaaccaaacaaacaaccaaagaagatcacaaagagtagtaaaagaaatatttacaaaacagttaaaaaaacaaacaaacaaaaccccttttcttcacctcgtcgcttgtcataagccaaaccttccaaaagtaactactagttttttactaccatagaactgaagaagaagtcttcagttttttactccatactgtctcttttaacttctcgagttttactttttactatacgactctcaaaactggcatgaagtgccaagtctctgtctcttactcaacgttgcggttttgcgttttgcgaaagccggtccaagtaactcttggaacctctcgaggaagagaacccactcgtcttctttcatgtctgctactttcacaaagcttgcactcactggaagctgttcgtttgcgcttttgtgaccagacgatgtgttctcggatttgcctctggttaagggttttgggtttttacgtgccgtgtcactaagatgtgtgtccttcattgaagtggaaagctttgaaagagatggagccttgtcatgaaaagcagctgaactaaaaaaactgtctttcataatgatcatagggacagtattttcagttttgtcctcttcttcttcttcatcttcttcttcttccttgatgctttcttcaagcttcccgagcgaagaacgtccatttgaaaaagggtttttggtgaaatagtcatcggttagttgtatcttagaactgtagactgactccaaatcatcacagtctagatcaaactgaaactctgcttctcctactacatctgaccttggagagaaaacatnctcg

SEQ ID NO: 100551 - DNA, 466 bp, Arabidopsis thaliana columbia
  unsure (1)..(466): unsure at all n locations
atgtnnnnnnnnnnnnnnnnnnnnnnnnnnnnnnnnnnnnnnnnnnnnnnnnnnnnnnnnnnnnnnnnnnnnnnnnnnctttttttttttttttttaaaaagtagaatatatgaaagttaagtatattgaataactatgacatagattatcatccaaattttttttgaatatatgatgccaagtttagctatttaaatatgacaaaagtctgttgattcgctttggcatttgtgtgtttgtattccctgtttaccggaatagagttgggacctcctcatagtttcaacgacccgtaaagaggttgagactttctgaaacagacaatgtcttcgatttctatggatgttgatggaatcttgtctttgtcatttcgcatttccttcaaatgttgggtttcccgtaaacgcatatgctcaacgatttcttatttgctgcgctcaacctttatgtattcccgtcaaagaa

SEQ ID NO: 100552 - DNA, 581 bp, Arabidopsis thaliana columbia
cccgaacaaagcaaaccctagatcatccatcggcgagtgagacggcagctcctcgtcggtaattccttccaccggcggcgaccactcaccctcagatctctcaatcccactcatctctgtaacattctgtacgctttctctctctctttcttcgcttttgtgatctattacggctcggtctctgtgcctcccagctctattttggagcactgcttcgtctctgtgtttatttggctcctttgtgtgtttctctatctctgctttttcttttgtattgctctgtttccgattttatatccatatgtctctggttatttgggttatatctatgtgtgattcttttgttcctttctttccattgaacttcaactagcctggcttaagatcctctgccttttaatcttcaaatagttgctcaatcttttcgctttcgtaacataatttagtttcttgttgatgtttttgatatctaccaatctcttttcaatttatgtctatatgttgctaaatatctggttcaatgactgatttcttaaactcagggtggaaattctgccatggcggagcatttggcttcaatc

SEQ ID NO: 100553 - DNA, 500 bp, Arabidopsis thaliana columbia
ggggaaggccctgcccccggcgggtcccggcccggaattccgggttggccccacgcgtccgttctgtctttcggcctttctcccccaactcgcgaacaaagcaaaccctagatcatccatcggcgagtgagacggcagctcctcgtcggtaattccttccaccggcggcgaccactcaccctcagatctctcaatcccactcatctctgtaacattctggtggaaattctgccatggcggagcatttggcttcaatctttggtactgagaaagacagagtgaattgccctttctacttcaagattggcgcttgccgtcatggtgaccggtgctcgcgtcttcacaaccgtcctaccatctccccaacactccttctttcaaacatgtaccaaaggcctgacatgattacccctggtgttgacgctcagggccaaccactcgacccgcgtaagattcaggagcactttgaggatttctttgaggatctttttgaggagctt

SEQ ID NO: 100554 - DNA, 404 bp, Arabidopsis thaliana columbia
  unsure (1)..(404): unsure at all n locations
ctatgacgtcgcatgcacgcgtacgtaagctcggaattcggctcgagctcgagccgattcggctcgagcggctcgagcccaattgcatcagcagtctctgattcgaccccctcatgggctgccaatgcccaactctcttcagcaacccctgcaatatcctaactttaatacccctcctccacctactgggtcatcatctttgcaggggtcaagcttgccagaagcaccctcttcattgtttccttttagtaccagttctcagatgttagctcctagttcattgcctttccctggtctaccacctgtgacgctctcgtctagcctgcagtctacactgcaatcagcaccatctccttcactagcttcagagatggcacctccgttgctgtcanacaaagctccta

SEQ ID NO: 100555 - DNA, 1154 bp, Arabidopsis thaliana columbia
  unsure (1)..(1154): unsure at all n locations
ccgnnncggaanncccgaggaggccgactcatacgtattctaccccctcatgttctgccaattcctctactctcttcagcaacccctacaatataagaactttaataaaggtaagaagcctactaantcatcatctttgcaagggtcaagcttgccagaagcaccctcttcattgtttccttttagtaccagttctcaaatgttagctcctagttcattgcctttccctggtctaccacctgtgacgctctcgtctagcctgcagtctacactgcaatcagcaccatctccttcactagcttcagagatggcacctccgttgctgtcaaacaaagctcctattactgctcctcctaccctacctcaggatactaatttgctttcgttttctctatctactacgagagccacagaagcaagtactggccttccactgtctaacaagcctagtgtagtaactggtccaatttctccgccgcagacaacaccattaacatctgctcctgttgcgggagtttctagttccattagccaagataagccaaaacctttgttggttactcctggtcaactgctgcagtctggatcttctgcagttctttgtcccaccctcgacaaatgctggtaaagatgttgagggggttcaagtatcgtcatcagctgggttggaacaatctgttccagttacatccgaagcccaacctccaatactgccattgccttcctctgcaagaccaactcagaagccaaacgggcattctttcccaaatcataatggttacaggggacgtggaagaggacgaggaagaggagcagggagatcacaccaagtaatgaaattcactgaagattttgatttcacagcaatgaacgaaaagttcaataaggatgaagtatggggtcatcttgggaagagtactaccttagatggtgatgaagatgatgattccccgactgtagatgaggctgagcttcctaagatcgaggccaaacctgtttacaacaaagatgactttttcgatagcctatcatcaaacaccattgaccgagagtcccaaaattcaaggcctaggttctcagagcaacggaaactagatactgagacatttggtgaattctcgagattccgaggaggtcgaggagggcgtggtggt

SEQ ID NO: 100556 - DNA, 597 bp, Arabidopsis thaliana columbia
  unsure (1)..(597): unsure at all n locations
atttaggaccactatagaagagtctatgacgtcgcatgcacgcgtacgtaagctcggaattcggctcgagatggaatctgaaagactcgaatcacatcttctgaataagcaagaagaagaagcttcttccttcacttctggtcttcttctcagcacatccgtcgttgtcgctggatccttctgttatggctgcgccatgtcatattcgtcgcctgctcagtccaaaatcatggaagaactgggactttccgttgcagattattcgtttttcacttcggtaatgacattaggaggaatgattaccgccgtgttcagcggtaaaatctctgctctcgttggtcgtcgacagacaatgtggatctcagatgtttgctgtatttttggttggctcgctgtagcctttgcacatgatattataatgcttaatactggacgactcttcttggggtttggggttggtctcattagttatgtgaaattacacccaaaacatttcgtggaggattttcttattccaatcagcttctacaatgtcttgggatttcactcatgttcttcaccggaaactntttccattggcgaacatttagctctttt

SEQ ID NO: 100557 - DNA, 608 bp, Arabidopsis thaliana columbia
  unsure (1)..(608): unsure at all n locations
ttaggtcnnnnnnnnnnnnnnnnnnnnnnnnnnnnnnnnnnnnnnnnnnnnnnnnnnnnnnnnnctttttttgcttttttttttgttttttttttggggcaacaatatatagagggacactatacaattattaactctgacaaaaacaataaaaataataaagagagaagaatgacaacaatcacatgtttcacgacaagacaaagacgaacagcgagataattgtacactacagctaagtgctagccaaacatctcttggaaagaaactgttgccttacgggtttaatccaatttgatgccatttttctctacttcttgcttttttggagctgccggaaaatatttgatcccggtaaggtcacctgctttgcttataacctgtagggcttttataagatcttctcttgagtgagatgcggatatgcaaatacgngccctgggctagcaatagggggtgtagnctgggaaccgncggccaccaccggccaagttttttnggaanattcccttgngatcctgggatttttccttgnttgaaagcattattgnatgcttgngnatcattgctcnagncttnaaccccacnttttnaannagcctgaaagt

SEQ ID NO: 100558 - DNA, 523 bp, Arabidopsis thaliana columbia
  unsure (1)..(523): unsure at all n locations
atttctctcgctctctatctctctcaaacactatggaatcccaaacaacgttcgagtatgaaagtcttgcgttcacaaagttgtctcactctcaatggactgattacttcctctctgttcccatcgatgattcggagctagacgctattacaagagagattgacatactcaagccggaagttagggagctcctatcttcccagggtgacgatgagacatcgaagaggaaagtgcttttgatccaatcgcttcttagccttggcctcgcatttcattttgaaaatgagatcaaaaatatactagaacatgcttttcgaaagatagatgatataactggtgatgaaaacgacttgtctacaatctccatcatgttccgcgtcttcagaacatacggacacaatttaccatcaagtaagacaattgtttagtcggtggcaacaaatctaagaatgtttttatcattntattttgtaacagattacctgcaataccatcacaattagcaatagatttcgactaaagg

SEQ ID NO: 100559 - DNA, 671 bp, Arabidopsis thaliana columbia
  unsure (1)..(671): unsure at all n locations
ttaggtccaacttagaagatctatgacgtcgcctgcacgcgtacgtaagcttggatcctctagagcggccgccccttggttttttttttttttttgtaaaacacattcatattgatttacgtatgtaaatgataaattctaaaattgaagggtcaaaaagagagtaaatcaaaactctgagatactatgacatttttcaatataagtccctgtggtttctttgtgttctaaaaagttttaagtagttcttcaagaagtagctttttgcctcatccatttagtagcagaccacttttctccagacagaacttcacatcctccatgtatgctcctaggatctgactgtccgtcgagtcccatgctccagaagagaactgcgtctcctttggtgggtttaacagagatgcctttcatgattttgccaccacaggtgcaatcaccatcaccagccaaagggaaataagtttctcctccttcgacgtcatcagttagatacataagcatagttgctacgcgctgaccaccacgctntagattgaaagtgtcagcaaagtaatcgtgatgtggtttgaaaactgctgcggctatatctagaacttgaataagttccattttcgctggtcttgaaaagactgaattcgcttcaattgctgatattgatactcttttca

SEQ ID NO: 100560 - DNA, 418 bp, Arabidopsis thaliana columbia
aggtagcactatagaagagtatgacgtcgcacgcacgcgtacgtaagcttggatcctctagagcggccgccctttggtttttttttttgagtataacattggtctgaattttatacaaaagaagtgataagttgctacaaaaaagaagaaggaaaaagaaatagagacaaaagctgaaaatatacacaccctccaatcaaacccagattcaaacgaatgggttaaaacaagtaaaagaacatgaagataaacatccccaagcctcgtcaactatcaaagcacacaatgccaacaagcacaaaccctctctctaacatccatgaaatggatttgttaacaaattagaaggaaatatcggacctcaagatgcaatttcctcattcctcgtgaataaatatacaaatagagatttatattc

SEQ ID NO: 100561 - DNA, 678 bp, Arabidopsis thaliana columbia
  unsure (1)..(678): unsure at all n locations
gaatgnnnnnnnnnnnnnnnnnnnnnnnnnnnnnnnnnnnnnnnnnnnnnnnnnnnnnnnnnnnnnnnnnnnnnnnnnnnnctttttttttttttttttttaaaagaagtaaaatattacaaacaaaaaaacacattatatccaattttatgaaactcgaaccacaaaactctcacaaaggatcagtaataaaaagaaaaaactctcacttacaagtaatagttcatgcccactttgatcaaacaaatgtgaggaatattcaacatcacgcctgggctccggcaattcttcctcaagaacgagtacgctacgtttaccaccagctgttttacaaacactgagttccgctttgccttcacgtgaccgtgtccgacaatgtaagccacttcagcgtccttagcattcaccagatcaaacagctcttccttcacctgcggttgcctgaacttggtgtccattggtctgaactgaaacatccttctcatgctcagcctcggaagctcttgctcatactctgctctcagtttaagtagagccggagacttgctggttgctactggtggctgggatctcgagctgcctgcgatggttggctcgggtttaggcggggaggcttgnccaaactggttgngggttnanaaangggcggccggaatgaaggnngngttggcncangct

SEQ ID NO: 100562 - DNA, 509 bp, Arabidopsis thaliana columbia
  unsure (1)..(509): unsure at all n locations
nnnnnnnnnnnnnnnnnnnnnnnnnnnnnnnnnnnnnnnnnnnnnnnnnnnnnnnnnnnnnnnnnnnnnnnnnnnnnnnnnnnnnnnnnnnnnnnnnatggaattcatctcttttatacaaaaatctgctagggcaatacaggagaccagttactactgccacttccaaaatgttgttcagggaactggaaatatgtttatacaggattcccatgctgaaaaggtaagtgagatttctacaaaagctaaaaaaatcagtagaatcttcctggtgctttgcagttacaaaacttcgtttaatgtttttcaggaaagaccagtgttgccaaaagaaccacttagcttgacttgagaagcttcgttcagacttattttaattgtgtgggtctgtgttaatctatatatgtcaatgcattccacgagatccgcttcacatgtcagaagaacccactccttatcatcatccaggtacttaaggtcaaaccaggaaatgtcatctatgttgaaac

SEQ ID NO: 100563 - DNA, 867 bp, Arabidopsis thaliana columbia
  unsure (1)..(867): unsure at all n locations
nnnnnnnnnnnnnnnnnnnnnnnnnnnnnnnnnnnnnnnnnnnnnnnnnnnnnnnnnnnnnnnnnnnnnnnncttttttttttttttttgataccaaaagatgtcatatatatattgcataatatatgaatatgaaacaaacaagtttattggagtttctggaatcaactacatgttctgagagaaaagtagcagaaatcacagacatagaagagctagatacgaaaggaaaaaaggttcacatgatagttattgaaccaactacatagaggagttatgagtaaaaagctcataagcaactacataaatggtttataagttaaacagcgaaaattgagaactcgaatgagttaaagggtagtaccatcttcagcttcaggtgatcacttgagagaagcagcataagcaacagaagcagccatgaggagagaagtaacagatgaaacaagggtccaaaagctcttcttcttatgtgcatcttccacagaatgcttcattttcgccagttccttcttcatttcctcgaccatgctttctttgtttttgaacgctttcttgatagcttctagctgcacagagtaggaatccattcctttcccacgcttcttctcatcttttttgttttctattccacatactagagaggacaccctcttcagcattgttagactttgttttgcattggttccagcagattctagctctgttttcaaaacacccgtagcacttttcagctctacgatatccttttgaaggatagccttttcgtttctcaatgactcagatcgattctccaattctttcttctctttaatccggacgcgtgggtcgacccggaaattccggaccggtactgcagacggccag

SEQ ID NO: 100564 - DNA, 686 bp, Arabidopsis thaliana columbia
  unsure (1)..(686): unsure at all n locations
nnnnnnnnnnnnnnnnnnnnnnnnnnnnnnnnnnnnnnnnnnnnnnnnnnnnnnnnnnnnnnnnnnnnnnnctttttttttttttttctaagaaaagtagtaaccataaaaccaaagcatacaacttatacaacataagttgtctaagtcatgacaaatacaaagggacaaaacataaacaaaccatcaacagagagaccagtgactagtgttacttaacaagtagaagtaacctttgccagtgtcctcttaccttattcaagacgcacactgaaccagacagaaagacacacacaagacgcagaccaaattttgaaccacacaaagaaaaagaaacacagcatcactcttcctcggactcagactcagcattctggagccactcgatgaacggagtcacgttcttcaaaaccggggagcttttgacacctttattgtaccattcaacaatcacatcctcatccaaaatgtcttcatcgtaaagacctttgataacaagagcaccttctttgggagcctctgcgcttgccttcatgcaaaaggattcaattccattaagcaaaccctttgggaggggacctggttcttcttggncnnntcaggnaagnggattctcttctgntncccnttggggncctgnctgggcccaanggggggntaggggcnttccnggggtctggttagga

SEQ ID NO: 100565 - DNA, 783 bp, Arabidopsis thaliana columbia
  unsure (1)..(783): unsure at all n locations
gaatgnnnnnnnnnnnnnnnnnnnnnnnnnnnnnnnnnnnnnnnnnnnnnnnnnnnnnnnnnnnnnnnnnnnnnnnnnnncttttttttttttttttttttgcagagttgatcaatctctatatataaagggaatgatgtgataattttgttaaaactaagcttacaacattttttctatcgcatttgacagtttcattttcacatctctcgctatatattagtaatataaactatttcaaaaaacaaagaatcaacaagaatccacagatgtaagaaagaaaaatcacagccaaataacttttttatttatttggccgttagataaaactaccttcagaatttcatgcatctagccggtaaacctgtctgatgattgacggcgacaatctcagagacattgttgcaacgaagaacatcttgaccaagcttagctcctgcagctttaagacctttaagcgaaaccggcatgttgaagagattgagtgatggaagcttagaaagcggagggagtttctggttcggtaagaagtttctgaaatcatccataagcaatggaacctccgaaatcggttttggttgtgttcaccacattgtctttagctgcgatgtggagccccnggttccatgggggttggttanaanctgattgggtagggaagtttggggatagccaacgancccccaggacacanggcgtaagattcnccagncggtgcaccgtggcctgatcngaccgacnggactcggcccggaccagnngngaaaaccccagctnggnaag

SEQ ID NO: 100566 - DNA, 519 bp, Arabidopsis thaliana columbia
  unsure (1)..(519): unsure at all n locations
aatgnnnnnnnnnnnnnnnnnnnnnnnnnnnnnnnnnnnnnnnnnnnnnnnnnnnnnnnnnnnnnnnnnnnnnnnnnnncttttttttttttttttttaagcttaaattatatatcaattgataaacaatatcaatgtataaaacagtattgtgatccctcctgtacaaacaacacaatagtgatgaagatactcttcttttgatcaaatatttatctcgtttcttctctaaccatttgtgcgaaaactttgctcattgagacccctgcaatatctcccactccattcacactaaactgcatggtcgagccaacgacactcgcctctggcttatcatccaccattgctgctttctcatcttttgcttgcacctgaagcatgaactctaggttccacaacaaatctcccattgctggcctctcaattccgttttgggacaaacacttctctgttacctcacagtactttttcacctcttcaagctttacttttcctacaagaaatgggtctatgatatct

SEQ ID NO: 100567 - DNA, 674 bp, Arabidopsis thaliana columbia
gggttccacttcatacaagcctcttgcaaagccacaacatacccaaccgtatgcgtcaactctctcaccggttacgccaactccatccaaacaagccctcgacgtctagccgagaccgcactcaatgtgaccgtgactcaggcccagtccaccaaggtcttcgtctggcgcttggggcgtttcactagtctcaagaaacgagagattcaagccgttaaggactgcatcgaggagatccatgatgccgttgaccgtttgaccatgtcgatccatgaagtgaagatgtgtggtagtgctaaaggtcgtgaccagttttggttccacatgagcaatgctcaaacgtggaccagcgctgctttgactaatgcaaacacttgctccgatgggtttgcgggtcgggtcatggatgggcgggtaaagaactcagtaagggcacggatcttgaatttgggaagaggaactagtaacgctttagccttgatcaatgctttcgctaaaaaatactaaataatgtaatacattttctttttgttcttaattctgtaatttgagctacgaatgtgtggatcagctcgagggaaattttatttcttaaaatgtttcatgcataatccgatgtaattctggataaattttgattaaaaatgaatgtacaagtataacattgttaagtt

SEQ ID NO: 100568 - DNA, 565 bp, Arabidopsis thaliana columbia
  unsure (1)..(565): unsure at all n locations
nnnnnnnnnnnnnnnnnnnnnnnnnnnnnnnnnnnnnnnnnnnnnnnngtaggaagatatatattctttttgacccaatagaaaacagagatgcagattttgtaatgataaccaatcatgtgttttcttttctttggcccttataagagaggacaagatatacaaagagcaaccaacacccacaaacatggggttgattgacaataataaaacatcgatcgctgaaaatcagtttttgtccattgttacttgctctggttcttttccctctataatgttcctcaaattgggaaatcggatttatttcgaaaagctttatgttaatagcactgttgggggagtacctgcagggcacctatgtcgccttggtcttctggttgcatttccccaccctgtaaggctcctatcttccagtcccaccatttgtacactactgttattcattggctgtgccaaagaggagcaaaccggagctctggcaatgtgccggcaagccgttcttcccgggttgngcctncgggaanccggtccattaaccgggggtcaaaagccccaaaanccgtnt

SEQ ID NO: 100569 - DNA, 625 bp, Arabidopsis thaliana columbia
  unsure (1)..(625): unsure at all n locations
nnnnnnnnnnnnnnnnnnnnnnnnnnnnnnnnnnnnnnnnnnnnnnnnnnnnnnnnnnnnnnnnnnnnnnnnnnnnnnnnnnnnnnnnnnnnnnnnnnnnnnngggaatttgtttttgtcatccctcgcactcaagtttggtgtgattctacaacattcttctcatatttttacttgccttttccttttaaaatgccaaatggtaacaaggttgcaagcttacacacatgaaaataagaaggggttacattagccagtgaagaacctcgtggataactagttaccaagaatctacttgactacattaacagttcacatatcctaaacacacaaaaatcaccaaacatgacttcacttcctttcttgtttcgcatcagcattactcgtcacaacttccattttctccatcttcttatacccaaactccttggtcttgatcccacattcctcctgcatcaccatcgcaagattgttccttttgaaagctgcatatatatgcatcatggcaaagaacacaagccctgttgatccaaaggtcatgacgaagcaagtgacaacctcccacatcctatcacttgtcctcttcttcgcagcctcctcttttctaagttgttcctcttttcta

SEQ ID NO: 100570 - DNA, 602 bp, Arabidopsis thaliana columbia
  unsure (1)..(602): unsure at all n locations
nnnnnnnnnnnnnnnnnnngacnnnnnnnnnnnnnnnnnnnnnnnnnnnnnnnnnnnnnnnnnnnnnnnnnnnnnnnnnnnnnnnnctttttttttttttttaatcggccctgattattgcatttagggcaaaaaaattactacaatattggtgatgtttattacactcttgtctaagaaaggagattagagtgattgaatttgaatgaatagagttacaacatatatagattattaggcagtgcaagagagttgaggaagactattttttttacggacaagctcgtgcatatcatgcactatcttgaacactgcttctggtttagccagcctcaatgcattctgtgacattatctccaactctttcgatgccggtccaaaccaatccgctacaatcttcgatatctctttcggtgattttgagaatttcccacatccgttttccaccacgtacggtacattccctgcctcttgaccagcgatgtaaccgtttaagattatcggtaaccctcttatcatagcttcagctatagtgcctggaccagcctttgttatgatgcagtcacaggcacccatacattcctccattttcgttataaacc

SEQ ID NO: 100571 - DNA, 519 bp, Arabidopsis thaliana columbia
  unsure (1)..(519): unsure at all n locations
gaatgnnnnnnnnnnnnnnnnnnnnnnnnnnnnnnnnnnnnnnnnnnnnnnnnnnnnnnnnnnnnnnnnnnnnnnnnnnnctttttttttttttttttttttttgaaaagaacattgtattaaaacctcaaagattcttcctacagagtcatatgttcaaaaactgtgctgttcgaaaacacaaagctacctgggattagttagtggcattgtttgaaaaagatttgatttgatgaaaacaaagaaactcgggaagatttctatttcagtcggggagacgatatgatcgacctctgaatgctgcgtttgaactctcgggtggggcacgagcgcttgaataagctcctcctcctcctactcctcctccagctccgggtcctgctgctcctacaccacctgcttgtcgaacacttgcaactggagctccaattcgccatcttgctacgattttattaacccattttggggttttcaggtagttttttccggtagcaagaggatgaaggactgttaggaagt

SEQ ID NO: 100572 - DNA, 579 bp, Arabidopsis thaliana columbia
  unsure (1)..(579): unsure at all n locations
nnnnnnnnnnnnnnnnnnnnnnnnnnnnnnnnnnnnnnnnnnnnnnnnnnnnnnnnnnnnnnnnnnnnnnnnnnnnnnnnnnnnccacgcgtccgcccacgcgtccgcccacgcgtccgattttgatttggttttgtagcctacgaattcgaatcatcagcatcatcttcaacaccagcttaacgaaaatggagtataataagtggccacggactagtactctctcaccaacttccacctctccaagcaaaccctaaccctaaccaccaccatgtcgctacctctgctggtcttccgtcaaggatgggtggatcgatggcggagagagcaaggcaggccaacattcctccactagcgggacccctaaagtgtcctcgatgcgactccagcaacactaagttctgttactacaacaactataacctcactcagcctcgtcacttctgcaaaggttgccgtcgctactggacacaagggggcgccctgagaaacgtccctgtaggtggaggctgccggaggaataacaagaagggcaaaaatggaaatttaaaatcttcttcttcttcgtccaaacagtct

SEQ ID NO: 100573 - DNA, 523 bp, Arabidopsis thaliana columbia
  unsure (1)..(523): unsure at all n locations
nnnnnnnnnnnnnnnnnnnnnnnnnnnnnnnnnnnnnnnnnnnnnnnnnnnnnnnnnnnnnnnnnnnnnnnnnnnnnnnnctttttttttttttttactgcacaaattattacatttttttctgtttgaattctggtcactatagttgtaactaatcggaacaaattgaagcaaaccagaaagaaaatgtaaagtcaaaaaaaaaaaaagactgttaattaattccaaagaatacattttccaccaaatctgagaaactatgtgcaaaccaaataacattaaacactaaagactgatctcaaacgatcccatcagttctcctctgttcaagtaaacctgtctcagatagtgagccttagtttagttaaccgatgaattgttcgaacttgagtctggtgatgatccattactagccatagaagcattactgatatcttcattgttatcatcggttctcgatgtttctgcatcagtctttggctcatcatcatctcctgtaggaagcagatatctgcaaacaggg

SEQ ID NO: 100574 - DNA, 603 bp, Arabidopsis thaliana columbia
  unsure (1)..(603): unsure at all n locations
nnnnnnnnnnnnnnnnnnnnnnnnnnnnnnnnnnnnnnnnnnnnnnnnnnnnnnnnnnnnnnnnnnnnnnnnnnnnnnnnnnnnnnnnnnnnnnnnnnnnnnnnnnnnnnagtaaaaacccaaacgaaataaatctttatttctattttttgcctgcttttttcctttttttctcttttttttttgatgaatgaatagagagagttacacgaaaaaaaaagattacaaagaaacagtccatggaaatcgagagactgttgataatgaacattacatttacaagcatttacagaaacagatgataaaagaaattgattttaaatgttattttttcagggtattaaagatcatcagtgagtaaaagttgcagcaaacgggattagtatgtgaccccttctccattagagctttctttggccatagtttaactaaactcaaccttcttcggagaaagcgaaaacaccaccaagcatgtcatcgtcctcatcatcatcgagttttccatcagatggagcatccttatgctcagtttctgtaacagtttcattggagaccacctcctcgaaaaactgctcgaagtttggggagccgtcaatgggtcct

SEQ ID NO: 100575 - DNA, 858 bp, Arabidopsis thaliana columbia
  unsure (1)..(858): unsure at all n locations
nnnnnnnnnnnnnnnnnnnnnnnnnnnnnnnnnnnnnnnnnnnnnnnnnnnnnnnnnnnnnnnnnnnnnnnnnnnnnnnnnnnnccacgcgtccgcttttttaaccatgaagtgaccgtcttccttgtcttttttctctccctgttgagatctctgagaaaaaaaaaatccatccgatcttcaaaaaaagtcaccccctttaacattcttctccaatctctctacaaaccctaatctcagccatggatctcgctgcagaagagcttcaatttctcaacattcaaggcatattacgtgaatccacaacaatccccaaattttccccaaaaaccttctacctcataaccctaaccctaattttccctctctccttcgcaatcctcgctcattccctctttacccaaccaatcttagctcagctagatgcaactcctccttcagatcaatctaaaaccaatcacgaatggacccttcttctcatttatcaattcatctacgtcatcttcctcttcgccttctctcttctctcaacagccgccgtcgtcttcaccgtcgcttcgctttacacgggaaagccagtttctttctcttcaacaatgtcagcgattcctctggttttgaagcgtttgttcattaccttcctttgggtttctttaatgatgcttgtgtacaactctgtcttcttgttgtttctcgttgttttgatcgtagctatcgatttacaaagcgtgattctcgctgtcttctcgatgggtgtgatgtttcgtctgtttttgggtgttcatgtttacatgactgcttggtggcatttagctagtgtagtctctgttcttgaaccgatttacggtatcgccgcga

SEQ ID NO: 100576 - DNA, 517 bp, Arabidopsis thaliana columbia
  unsure (1)..(517): unsure at all n locations
gaatgnnnnnnnnnnnnnnnnnnnnnnnnnnnnnnnnnnnnnnnnnnnnnnnnnnnnnnnnnnnnnnnnnnnnnnnnnnnnctttttttttttttttttaaaaagctcatttgctgagaaagtaatttatagctgtgtgaatacaaaatgaagttacatattacacaatgaatctgtagctcatatgtagcataaccagccaaaaatctcacaaaaaataataaatacacatggaatctccattgttggatagtatctctgcaacatctgtatgccatttcacgacttaggtatcttactccagttcactaacaaggtccttaagagagggaaccttcatggccagagttttgtagagtctagagtagcgagctcttgtgccatcagctgttctagctaaagccagcaaacttagagcttcgggtaattgcacaaacatttgtttcatttcctctaagctcatgtttactagcacagaaggtcttgggacaactctgacaatttcacctcctttggg

SEQ ID NO: 100577 - DNA, 741 bp, Arabidopsis thaliana columbia
  unsure (1)..(741): unsure at all n locations
nnnnnnnnnnnnnnnnnnnnnnnnnnnnnnnnnnnnnnatataccattttgaatgcacgcgtacgtaagcttggatcctctagagcggccgcccttactttttttttcacgatggaataagcgatagaccgaataaaaggaccaatgttgtgagacaaagtaataacataaactaaaagagtaaacgctagtaatagagaaaccgatatggtctcaaaacagaacactccaaaacatacatagattaaccctaataaaaaccattaatcaatttcatacagccaaatctagctggtgaaaaaagattcaggtttttttttacgcactagagaagaacaaaacgaacagtacggcactgagtacagttgtgaacgaggtcggaatcaaagaagatccatcgttccctgaagaaggatttggagctagaaatccggctgtctcaggtccagcagcagctactcctggagcaagacctggagcagtacttggagcaacagacaatccacaagtagcgatagaaggagcgtgaagcttgcatgcggccccaagagtagaagccttatttgatattcaaagaaacttcaagagaaacactgctcttaaacgctttacatagacactttgagtcatttttatgccccgtcttaaagaccagatcaacatgtacctttccggtttcgccaccgttccttcgttgaaactaatgattcacttcccccatgtgagtttataagtcgacat

SEQ ID NO: 100578 - DNA, 516 bp, Arabidopsis thaliana columbia
gctcgatgtccttttgagcaagtgaccaagattctgactctttttatgaaaacattcatcaaatcccgagaggagaatgaaaaacaagccgaggctgagaagaagaaactggagaaagaagcaattaaagagaagtcagcgacaaagaaagatggcgtcgataacgacaacgatcttatccagcagatccatagacatagaacatgaacaaacatcggtcttgaacggaagacccgaggttttcagatcgatcgataaaagctttgttttataggactcaatgttgcacatacggaacaagagcagagatctttcctagatcttagacaaagtagtcaacgtctatgatgtttagatggaagtgttttatctctgatcacttcattgatgtaaaatcagaggttcgtatttatgtcctagaaaatatttgaacttacatagaacccagaagttatattatcttcactgtgcagacaaaaacatttttttttccaagaataataaatcttctcaaaa

SEQ ID NO: 100579 - DNA, 624 bp, Arabidopsis thaliana columbia
ctagaagagttatgacgtcgcacgcacgcgtacgtaagcttggatcctctagagcggccgccctttttttttttttttttttttttttttttttttttttttttaacggcccctttttgttgttttttccagggaagtcacttcctttacatcttacacagcagtttaaaatgtttgtagaaatcagataatcggtggaataaaaaaacaataatcagtgattttattaggtaacaatcacaataacataaagattaaaacttttgacataacaaacaaacaaaaagactagcctagccctgcgctttcgtcttggcgaggagcgtcttctttgatgcgcggtggtctaacaatcttatcaataagtccatactcgattgcttcctctgcattgaaccttttcacccggctcaagtctttgaagaccctttccgcaggctggcctgtattcttggctagttcattgaagaggtagtctcttatccttgaaagctcttttgcttcattttggatatcatcagcctgaccacgggctgcaccagctggtgactggagggcgattcttgataatggcatcgcaaatcggtgacccttttctccagccgcaagaggaaaacctgcaag

SEQ ID NO: 100580 - DNA, 509 bp, Arabidopsis thaliana columbia
  unsure (1)..(509): unsure at all n locations
ccatttagtttctttttattcatccaatattttaaatccctgtgaactaataattacatctcaaagttactaagaaaaataactttttaaaaataatttttaatctatgttattatcatacaaaccaagaaaactaagctttgtatgttaaaataaagattatacaaagtaagtattcatcatcttaattttaatgactatggtttacttggtcctgaggttgttgtgcatctatctttatcaagagaggctcacttaaatccgtcgaagcatcatcagtaacgggtcagctccggcaaggctgcaaccgcttcgttcatgtcccctccgggctctgctaaagcttttcctagggcggccttcgccacctttggtacacacaccattaatatcccggggattacaaggctcgaaatcaagaacgcccggcgacctggcgggaacccgcccccctggggggttacaccagaaagggcttttaggttgtccataaactaacgagggnatnt

SEQ ID NO: 100581 - DNA, 509 bp, Arabidopsis thaliana columbia
ccctcgcgtccgtgttactatagatgaagaaattacggatgagaaacaagaagaggttactgtagttgaaaaagcagagtgttctgatgctaaagatgtagctgtggacagtgatgaacctgcggatagagaagatgatgaagggttggtagttgcagaaaatgttcatgttcaaagtgaaggtatagattgtgattctccagttagcggtggcagtaactctgattcaccacccgtaccagctccaccaccaaaaccttcttccactgtcaatcctggtagtaacagatcggttttgggaagttttggcgctttacgaattggaccaacacgaagagctgctgggcctcgctctcttgtttccagtaggagttcgccaactggatcacatccttcttctccaagatcacacagtgagaacgagggctataatagttctgatgagcatatgccatgctatgtgccctctcatcctggctctggcttggaaagagaacaccagtttgaag

SEQ ID NO: 100582 - DNA, 515 bp, Arabidopsis thaliana columbia
  unsure (1)..(515): unsure at all n locations
gaatgnnnnnnnnnnnnnnnnnnnnnnnnnnnnnnnnnnnnnnnnnnnnnnnnnnnnnnnnnnnnnnnnnnnnnnnnnnnctttttttttttttttcagaataaaatttgtctttcattgggaggactctgtttctattttctgtcatacttcatcataataacagaacatatcttaaaactcggaagaacaaataaaacccaaccaaaaagactctactaagaaactgatacttacatgcataatttgtatcgatgtttcacacaggaatattgacctttttgaatgagtttgagacggttcttgggctctctctatgcttctctcagacggtgtaagcttgttgaatggtttcaatgtcgagaccttttagtctgacaacagattcaacatgacccttaagtgtgtgaagctcccgcaacctggcgatctcggctcttctcttagcttcttcggccatttgggaaagctcgttgaaatgggttcgctccgggaacatcttagcatctggtgct

SEQ ID NO: 100583 - DNA, 515 bp, Arabidopsis thaliana columbia
  unsure (1)..(515): unsure at all n locations
gaatgaannnnnnnnnnnnnnnnnnnnnnnnnnnnnnnnnnnnnnnnnnnnnnnnnnnnnnnnnnnnnnnnnnnnnnnnnctttttgttttttttttatgtcgatattaaatcttctgatgaaattatacttgccgagcaatttcagcaaaaactgattatttgttacactgaatttctcagataattattatctaaatacagatagaaattgtaggaaatttaacaatttatttgtacaaaagattgaaagcaggcaagtctgtgatgcttgaaacatcatccagtgccagctcacgttccaattgtgctctcgtcgatttcaggacgtcattgaattccatgtaagaagctcgtctagcaagccattgtgcatccatcatttggaaagctatacagtagagattatcgaatgccatttcgtcttcttccagaaatcccaagaatcttatcccggctattgttgatggtttacctgattgaagatctaacatttgtgccagcatgaatgagata

SEQ ID NO: 100584 - DNA, 658 bp, Arabidopsis thaliana columbia
  unsure (1)..(658): unsure at all n locations
nnnnnnnnnnnnnnnnnnnnnnnnnnnnnnnnnnnnnnnnnnnnnnnnnnnnnnnnnnnnnnnnnnnnncttttttttttttttttttaattaataacccgattagcaaaatattagttcacatttctgggagaaatttggtttgtttcctaaactgctccatgagagtaaaaatatagcgcaagaacaaaaacataactttagatgtcaaagtagagcatagagaccaaaacaaaaagttacaactatatctctgatttcttattgtgcggggtaatgatatgagtcacttcacaagccaatcatcatggcttcattgcccgtgaaagcaaatgggtaaggcaaacacacaagcaaggagagaaacaaaaccaggattccaagagacacatacttatcatcaggcaccgtgatttcttcagccagcggcgcaatcggtccacgctgcaggaagaatatcagaaccacccagtagaatgccacgtcgctgaacaacgccgataagcccaaaagcgctatggatgcacccgtgagccgtgttgcggtctttcttccccaaatggagaaagctattttgcccccatcgagctcccccgcagggatactgttaatgccattgatgagaagtccagcccatgcccagatcacaagtgggtta

SEQ ID NO: 100585 - DNA, 821 bp, Arabidopsis thaliana columbia
gtctgagccggcgaagcttgccgtttccgccgttggaggagagtttttactgttgctgtcctgttgacattttgagacatgaaatgatcttgggttgatgtttgtatggtagcagaggaatagtagtcatgaagcttatttcacttgttagaaacgttcgttctcgccaatgtcaaccggaagtaatctggtctgtgcaagttcgtttcttgcagcaagactctgtctcgaaagctaaacccaagaaatacaaatacccgtcagtttatgatccgtatggtcctagaccccagccttcaagcaaaatcatggagctagctgagcgtatagctgctttatctccagaagaaagaaaacagattggtcctgcactcaatgaacacctgaggcttccaaaacaacagatgatttcatcggacggcattggagcaaaacaggataccggagctgggaatgtagaggagaagaaggagaagacggctttcgatgtgaagttggagaagtttaatgcatctgataagatcaaagtgataaaagaagtgagaacgttcacaagtttgggtctgaaggaagcgaaagagcttgtggagaaagtcccggctattcttaaacaaggtgtgacaaaggaagaagctaatgaaatcatagccaagatcaaagctgttggtggaatcgcagttatggagtaggtgacttttgacacttcgattgtttttttgtttgattcactatttggtattgtgatcacatcttggtacttaaggtagatgttttgtaataacaaatcgattacttgacattgagttttcaagaactttggt

SEQ ID NO: 100586 - DNA, 521 bp, Arabidopsis thaliana columbia
  unsure (1)..(521): unsure at all n locations
agaatgaannnnnnnnnnnnnnnnnnnnnnnnnnnnnnnnnnnnnnnnnnnnnnnnnnnnnnnnnnnnnnnnnnnnnnnnnnctttttttttttttttgatttgatcttcgatcgaagtcagagagaatgaaaggattctctcgaaataataagacaaagaatgagtttgaagcgattccactcctttccttcatgaaaactctacataattactatgcttatgataaaaaaaaattagatgattattaacattctcaataatcgatgataggttaacagatagaagaatgactgaatggagatgttgagaaagaaagcaccttcaggatgtggatgttgaagagggtcgttgcttcttacggaagatgtagtttaggagcatcccaagtaaagggaaacttgtaaccatgcctatgtaaccaagccaccataccgactgttttgcctgcctacacagctctttaaagcttttctttgttacataatcctcaggctttcgccctctctgcttaagagaggt

SEQ ID NO: 100587 - DNA, 489 bp, Arabidopsis thaliana columbia
acgtcgcatccacgcgtacgtaagcttggatcctctagagcggtcgcccttttttttttttctttttttttgaaaatgaatttctctagtttgtttggtcaacaacattctatacaggatggtcaagtaaaggtgcttacaatttaatctacaactacaccgaccaaacttcaattttaaatttcgaaacaaaaatctttcggctatacataagggctagagtgttggtgattaaagcctttgtttgagccgtgttctagtgagggtttggccattccataacataaccagcgtctctctatgcattggagccgcacgtcttcccagcgagcatctatcagacttgcatctactgatcttgactatgcttagactacgaccttcttctttctcctctgggacatcaaaaccgccttcctttgcatcacacatgtccagagataccagccggagcatcggaaacttcaaagtagcatcaagaaggaagct

SEQ ID NO: 100588 - DNA, 550 bp, Arabidopsis thaliana columbia
  unsure (1)..(550): unsure at all n locations
gaatgnnnnnnnnnnnnnnnnnnnnnnnnnnnnnnnnnnnnnnnnnnnnnnnnnnnnnnnnnnnnnnnnnnnnnnnnnnnctttttttttttttttttttgtgggaaagagagacattaagattggtgactgttttaattcacaatgatgatgatgatggtttgatactacaagacactaacttggaacaagactacggtctcaaagccaaataacttatctttaaaaataacaaggtgaaataaatatggatactgataagctaaataagctagagaaagatggatcttagtttaagcctaagccggaccctgagcctgaacctgtggaagacctaaccatcgggtgactaaacgaaggctggttgatcgatgctgctccagctgctgcagggttatttagttggttgttgccaaacatgacgtttggtgaagctgttgatcctgcattggtctgtattgcattgagaggtaatctcgggccaaacgagaaagcttgctgttgttgttgttgttgttgttgttgttgttgttgttgacgtgccatgaaa

SEQ ID NO: 100589 - DNA, 756 bp, Arabidopsis thaliana columbia
catgacgtcgcatgcacgcgtacgtaagcttggatcctctagagcggccgcccttgccgtccttcttttttagggtgaagttttatgcaaactctaatagaatgtaaaaatagattacaatcaaatcaaaattttccaaactgaagtatgatctttgtttacatatggcattgtgatgatttagtaacaaaacttgtcctaatctccactttcctatgcaggtataatgataattccaaccaaaaattctcgctcacttcttgcttgatacaagactaatcttctttccctccacaacaaacttgccacttcgctccagcttaagtttcaagtaagcaatagcatcttttcttgaagaaaactctgaaagaactgatggtgcttgttcatcgatcagagattttagctgtttcagcttcatgaatccacctttaccagcatcctttttaacaatctgcttgcacaggttctttaacttgattttgggttcaatgatttcatcgtgcttccttttcgcgggaagagaactttcaattacagagtccttgtcatcatcatctgcttcactctcgacttcatcttcctcttggacttcttcgtcatcatcatcatcatcatcactgttatcaaaagaggttttctttcctttgtaacgaacaccagctattttctttggccggtctttgatacccagtccttgttttcccgctgtggctttatcctgaaccatgttgtaaagattctcttgatcattca

SEQ ID NO: 100590 - DNA, 519 bp, Arabidopsis thaliana columbia
  unsure (1)..(519): unsure at all n locations
nnnnnnnnnnnnnnnnnnnnnnnnnnnnnnnnnnnnnnnnnnnnnnnnnnnnnnnnnnnnnnnnnnnnnnnnnnnnnnnnctttttttttttttttttaacccaaattcattcattcatatagcattttacataacgttttctttgaacaaaatcaaaatattgcatacatcaaaaacatatacatacgaaaaggtttatcatttattttattttggttatattcttatgagatctatatgatatatatcgactttggagctgcgtggatgtggagatgcctttataaaggcaggtagcgtctatgcgaacggtataaggacttagggaacaggacaagcctcaatgttccaaatctctttggcatactgagctattgtacggtcactgctgaactttcctgacccggctgtgctcaatatcgacattttcagccaccccttccggtccttataagcttcgtcaactttggcctgagcgtccatgtagctggggaagtcatacccaaccaggaagtaat

SEQ ID NO: 100591 - DNA, 547 bp, Arabidopsis thaliana columbia
actatagaagatttatgacgtcgcatgcacgcgtacgtaagcttggatcctctagagcggccgcccttttttttttttttttagctggaggcccaaatccattagatctgattagaaaacaacagtagtagtctagtagagttacaacaaacaacaaaagctccatgtctcctactacaaaggttcttcaaacacacaacagagaaagaaagagagtgaatttacaagtggagtagagagagagagagagagaagtcaaggaacggtcaagcgatcagaaccaagaggcttcaatgaagatatgagacgaaggagatgaagtctttctacaaatggctccaacacagcttcttcttcaggaggagcaaatgccatacatatgctcagctcttgcaccgcctctccatattgcctgtcgtagcacagcatcataccaagggctctgcgaagtgcccaggtatgaggttgcaaaatcaacaacctttctgcagccgcaatagccaacctaagatcttgaggccgcaacaatgggaaattagaactactg

SEQ ID NO: 100592 - DNA, 522 bp, Arabidopsis thaliana columbia
  unsure (1)..(522): unsure at all n locations
atgnnnnnnnnnnnnnnnnnnnnnnnnnnnnnnnnnnnnnnnnnnnnnnnnnnnnnnnnnnnnnnnnnnnnnnnnnnnctttttttttttttttttaactgaaacttataatcatcttattcacaaagcaccaaatacatagaaatatggttgtgattacaaactctgcatttcaaataattgatcattcaggaaaactctagttctcaaaatcggtgctttgcatccgatcagtaccaacaagagacagcttgttatcatatacatcgatatatccaaacgaatacgtacctgggggacactccaaggcagcttccaaggatctatggtgaaccccatgagaatcaacaaagtatcctcctttatgatcatgtccggacaaacaaactttaacagagtcatacttgtgtataatgttcatcacttcatcaaaattccataacaaagctgctttggatgccacaccagggctcataggcacatgcccacatacgataactctctggtttgaattcgatgcat

SEQ ID NO: 100593 - DNA, 516 bp, Arabidopsis thaliana columbia
  unsure (1)..(516): unsure at all n locations
nnnnnnnnnnnnnnnnnnnnnnnnnnnnnnnnnnnnnnnnnnnnnnnnnnnnnnnnnnnnnnnnnnnnnnnnnnnnnnnnnnnnnnnnnnnnnnnnnnnnnnnnnnnaaaaaaaaacagaaaggaatcattagcacaaaacttgatggtctactcaattcaatacacagtcaaaatgatcgctttaaccaaaattctctgatggtaaaacttctgaaagccattgttactaaaagagatggaattggagacaacatttcatcaatcagacatagcaacatccatattcctccaacgggcaggtacgttctgaccacaattctccaggacattcaccaatggtccagcttgataagaagcagcatccttttctgttatatagctgtgaagtacgccgtgagcactctctctagccatacttgtcagaatctgagtgtaaatttcgattgatgggaaaaagtctggaagtagaacggtttcagagtccctcataactgtagtatccaactgttcaaaa

SEQ ID NO: 100594 - DNA, 508 bp, Arabidopsis thaliana columbia
  unsure (1)..(508): unsure at all n locations
atgnnnnnnnnnnnnnnnnnnnnnnnnnnnnnnnnnnnnnnnnnnnnnnnnnnnnnnnnnnnnnnnnnnnnnnnnnnnnctttttttttttttttaccaaaggagattatcttaaataatttcgacttggggctttccatgtccttacaaaagttttggttccatggaagaagattttaatctccgatacaaaaaccaaacaagacctaagttactataagaattaaaccctcactcttgatctattaaagctagaggcgtggttacaatatataacgacatagataaaagactaaaaatggctactacggaaccaaatcttggaagctttagaaaaactcaaagtctagaaatttaccaccagatttcgtgtctgctgctgctgctgatactgctgggtggtcccatcatccttttgctattactaccaaacccaaccggatcaatcggtccatactttggtggcggttcggtctccatctgtctcggtacttcaggtggagtgcta

SEQ ID NO: 100595 - DNA, 1604 bp, Arabidopsis thaliana columbia
ctctgcttaaaaactagggttaggctacgattctgtttacaccaaaaaagcttttcgtcatcgccgtttggctttctgaaacaaatcacaccgtttaagattttctctggttctgagattatggagatggagcgtgtgcatgaattccctcatactcacatggatcgtcgtcccagaaagagagcgcgtctcggttgggatgtgttgcctcaggcaaccaaggctcaggtaggaatgttttgtgggcaagagattggaaatatatcaagctttgcatcttccggagctccttcagacaatagtagctctctttgtgttaagggtgtggctcgaaatggttctcccccatggcgagaagatgataaggatggacattacatatttgaactgggagatgacttaactccacgctataaaatttatagcaaaatgggggaaggtacttttggtcaagtgctagaatgttgggatagggagaggaaggaaatggtggcagtaaaaattgtccgtggtgtgaagaaataccgtgaggctgctatgattgaaattgaaatgctgcaacagcttggtaaacatgacaaaggtggcaatcgttgtgtacaaattcggaactggtttgactatcgtaaccatatctgtattgtatttgagaagcttggatcgagtttatacgattttcttcggaaaaacaattatcgctcctttcccattgatcttgtccgtgagattggctggcaactcttggaatgtgtagcatttatgcatgacttgcgcatgattcatacggaccttaaaccagaaaatattctgttagtctcctcagactatgtgaagattcccgagtacaaggggtcccgattacaaagggatgtatgctataaaagagtgcctaaatcaagtgcaataaaggtgattgattttggtagcacaacttatgagcgccaggaccaaacctacattgtatcaaccagacattatagggcaccagaagtcattttaggtcttggctggagttatccgtgtgatgtttggagcgttggatgtatcatagtggagttgtgcacgggtgaagcattgttccaaacacatgaaaacctggagcatctagcgatgatggagcgtgttcttgggccgtttcctcaacaaatgctgaagaaagtggaccggcactcagagaaatatgtgagaagaggtcgtttggattggccagatggggcaacctcaagagatagcctgaaggcagtattgaagcttcctcggcttcagaatttaataatgcaacatgtggaccactcagccggggagttaataaatatggtgcaaggacttctgcgatttgatccgtcagagagaataaccgctcgtgaagctctgaggcatccgtttttcgcaaggagaagatagcgggacttgaatttgacgagtgtaaatagggatgaaatatgtatgatttgtagcaagtctttaccccacaaccccacgaattctgatataaattaacaaatatgctaagatcactctttttttaaccgtgataggcgattgtttgtctatctttgtaaactggatcgtttcaattcaaaagagttttagttttggattct

SEQ ID NO: 100596 - DNA, 517 bp, Arabidopsis thaliana columbia
  unsure (1)..(517): unsure at all n locations
aatgaannnnnnnnnnnnnnnnnnnnnnnnnnnnnnnnnnnnnnnnnnnnnnnnnnnnnnnnnnnnnnnnnnnnnnnnctttttttttttttttcataaataatctcagagaggtttgtttgataataacaatgacacaaaccatttaataatatgccaaataaatgataaaaaaacacaaaaaaaaaaaacttgacaattcaaaatgactaaacacattaaactctcaattaaatgataatgaacataaagctttgattatgaaatatatctaaaagatatacactctgttgtcttcgttttgggatcttctgggaaaacttggtttagccattcaggaaatcaaaatctattggctggcttcttattggagggaaattggttactcgtctctcggttgctgcattctctgttggttacactgctggtgtcgnaacagtttcaggcggcgctgttgaaataggttaaggtggcgctgttgtacactttcaggcgttgttgttgtttggctagtatt

SEQ ID NO: 100597 - DNA, 674 bp, Arabidopsis thaliana columbia
  unsure (1)..(674): unsure at all n locations
gttnnnnnnnnnnnnnnngacgtcgcacgcacgcgtacgtaagcttggatcctctagagcggccgcccttctggtttttttttttttctgtttctatctcatatatatgtttatagtgttcttcattgtcgtgtatacacagcttaaaatgcagagtaatctcctttgtggcaaaatattgaagattgttattcttcagttgatatctgtgacccatcccttgttatcttcaatcaatcctgtctggatacctacgaggactgaacgcagtttctggcagacagattcatccccggttttatactctactcttttttcctgatatgtgatagtgcccacgggagcaactactacagcagttccggtgcaaaaaacttcatctgcatccattacttcatccacatgaactgccttctctactacctgataaccttgatcacttgcgatctccatcacacttttccgcgtaatcccttcaagaattgttccattagttgcaggagttgagattgtccgacccttgacaacaaagacgttgcaagaagaagcctcctctaagtacttcttcttgacagagtcgagataaagaacgtctgaaaacccccgactcttggctctgctcagtgctttcaaaacttgcgcataatttgtgatgctctttgacgcctccagct

SEQ ID NO: 100598 - DNA, 501 bp, Arabidopsis thaliana columbia
  unsure (1)..(501): unsure at all n locations
nnnnnnnnnnnnnnnnnnnnnnnnnnnnnnnnnnnnnnnnnnnnnnnnnnnnnnnnnnnnnnnnnnnnncccacgcgtccgaatcagctttttggagaagaaaccaaagaaaacattcgaaaccctaaaatctccattagaattcgaaaatgacaaagaagagaaagctcgaaggagaagaatctaacgaagctgaagaaccgtcgcagaagctgaagcagacgccggaggaggagcagcagcttgtaattaaaaatcaggataatcaaggagacgttgaagaagttgaatacgaggaagtagaggaagagcaagaagaagaagtagaagatgatgacgatgaagatgatggtgatgagaatgaggatcagacggatgggaatcgtatagaggcggcggcgacgtctggatctggcaatcaagaagatgatgacgatgaaccaattcaggatctgttggaaccattttcaaaggagcaagttttgagtcttcttaaggaag

SEQ ID NO: 100599 - DNA, 880 bp, Arabidopsis thaliana columbia
tatacgacttactatagggacagctggtacgcctgcaggtaccggtccggaattcccgggtcgacaaagaaaacattcgaaaccctaaaatctccattagaattcgaaaatgacaaagaagagaaagctcgaaggagaagaatctaacgaagctgaagaaccgtcgcagaagctgaagcagacgccggaggaggagcagcagcttgtaattaaaaatcaggataatcaaggagacgttgaagaagttgaatacgaggaagtagaggaagagcaagaagaagaagtagaagatgatgacgatgaagatgatggtgatgagaatgaggatcagacggatgggaatcgtatagaggcggcggcgacgtctggatctggcaatcaagaagatgatgacgatgaaccaattcaggatctgttggaaccattttcaaaggagcaagttttgagtcttcttaaggaagcagcggagaagcatgttgatgtagccaatcgaattagggaagtagctgatgaggaccctgttcatcggaagatctttgtgcacggtcttggttgggaacgaaaacagaacgcttattggagttttaagcagccggagagatccaaattgcaggttggtttgatagatctaggaaactaaggtttgggttatttgacaagttcgtcagggctcgacccctcaacggcttaaaaaaatggagtcgttgacggctccaatggttttaagacctgcttggggactcttgctgtgaagtgttaacccgctagtttgactgggctctcaaaaaattttttttatgggggcaaactgcccaaagggtggtgtttcaattggaaaaaaaagccttggctgtaattctgaaaacaagttgttttttta

SEQ ID NO: 100600 - DNA, 780 bp, Arabidopsis thaliana columbia
  unsure (1)..(780): unsure at all n locations
attcnnnnnnnnnnngaatgaacnnnnnnnnnnnnnnnnnnnnnnnnnnnnnnnnnnnnnnnnnnnnnnnnnnnnctttttttttttttttttttcctttcgcgctttttcttatcatatttgtaacttttacatatgtgaagtcatgtatttatttacaagaaaccttgtttaaagccaaacaatcaccatgtttattttcactacatagcagtatttagtatactatatactataaaggatccattcacacatggcacacaacccaaaagctatctgcaacttctactcatacttgccggtttgatccttcatcacttctaccatgaacttctccagtttgttgcccctctctagcttcagcagcagttcgaatttcacacgctcttcaaccacctttgccctggctaggattatatctatgagtttataggggaacagtgagtttgatttctgttgaagtgatttcatggcgtgcttcgctgcttcttggacttcagggttatttgttgatactgatctccagtcaaatccattgccatctggtttgaagccaaggtcagagatagtgaaggaggggataatattcttgaacttctgaagctgcttaaagtttatccatgggttcaccccaactttaactttataaaattttttctcaccagcttcaattacttcaagagtaaaaacgtttaacttgccagcaccaacctgcttggtggcttcatactttagcagctaaaaacagcattctttgctggtggctttgaaccgcaaaaa

SEQ ID NO: 100601 - DNA, 508 bp, Arabidopsis thaliana columbia
  unsure (1)..(508): unsure at all n locations
nnnnnnnnnnnnnnnnnnnnnnnnnnnnnnnnnnnnnnnnnnnnnnnnnnnnnnnnnnnnnnnnnnnnnnnnctttttttttttttttaatcaaaggctgtttttttataatttgcgaattcgaatgaataaaatgtgtcttcatcttttgcatcaaaagctatacactcgaatcactcgatgatgaaacagatcatataccatcctcatttacttcccaacaattgggtatgtaacaaaacttaataatatttctaattttttgctgcatttgattctttctcttcctcaacatcagagttgccaatcttgtcaaagtcatcatcacccaggcttcctccatcatcaccatcaccatcatcaggagcttcgtcactgtcttctagatctcccagcaggaatgtatcgagatcttgctcagacgatgcagtagatattctgttcttttcagctgattctgtccttccaagccctggactcttnttagcttcttcatctttactctctg

SEQ ID NO: 100602 - DNA, 273 bp, Arabidopsis thaliana columbia
  unsure (1)..(273): unsure at all n locations
ccgtaagcngggancctctagagcggttgccctgnggggttgaggcttaataaagaaaagttaccattctataagggggagttttacacacaacgggggatgctcttgcattccccataaagctatacaatatcttggatacaatttaactttaaccgaggactaatcaaaaaatgggtttaacaatgatctagaaggagaatccagagccaaagcaactaaagcttcttgcttttgatagatttcttcaatttggatgatgtgctcggggtc

SEQ ID NO: 100603 - DNA, 470 bp, Arabidopsis thaliana columbia
aaaatctttaattcttaatccaaacccagaaacttcctctgaaaccacttcatcatccatgaaagagatcggctcaaaaccaagaaagttacttcctttatgcttcatcatcttcctctgtttttgttcctctgttatggctgcagatgaagacgacataagatgcttaagaggactcaaagcatctctcacagatcctcaaaacgcgttgaaatcatggaacttcgacaacacaactcttgggtttctctgtaacttcgttggtgtgtcttgttggaacaatcaggagaatagggttatcaatcttgagcttcgtgatatgggtttatctggtaaaatcccagattctcttcaatactgtgcgagtttacaaaaacttgatctttctagtaatcgattgtctggtaatatccctacagagttgtgtaattggttaccttttttggtatctcttgatttgtcaaacaatg

SEQ ID NO: 100604 - DNA, 398 bp, Arabidopsis thaliana columbia
cggacgcgtgggcggacgcgtgggtgaaaacatactgacgacaactccttctctctcttaaaacaaattttttttttctctctacaaagctccgccgccgcctagggttaccggttccggtggctttttcagcaccggaaccggatttctttgttttagtgtctctagtttcgatttcttgtgggtttaatgtgatctgaatcctattttcttctaacggtttcttttctaaattctcagatctaaatctgtaaagtctaaatcttttcctcttccggttttgttgcttgtttgtctccttcgtctgcagtttcaattctggccgttccaactatggcagaggcacgtttttttctatccttcaacgcctcagatgcagatctctctccattgaagat

SEQ ID NO: 100605 - DNA, 390 bp, Arabidopsis thaliana columbia
agaggctttagggtttataagacccaaacaaaaaacattcatcagtctcaattcaaaatcctccatcaatggagaaatacgagaagctcgaaaaggtcggtgaaggaacctatggaaaagtctacaaagcaatggagaaaaccaccggaaaactcgtcgctctgaagaaaactaggctcgaaatggacgaagaaggtataccaccaacggctctccgtgagatctctcttctccaaatgctttctcaatcaatctacatcgttcgtctcctctgcgtcgaacatgttattcaatcgagagattcgactgtttctcactctcccaaatccaatctctatctcgtttttgagtatctcgacactgatctcaagaaatttatagattctcata

SEQ ID NO: 100606 - DNA, 694 bp, Arabidopsis thaliana columbia
  unsure (1)..(694): unsure at all n locations
gctactacagaggagctcatgggatcattgtcacttatgatgtcacagacctagagagcttcaacaacgtcaaacaatggctgaatgaaattgaccgttacgctagcgaaaatgtgaacaagctactggttgggaacaagtgcgatctcacttcacagaaagttgtatccactgagacagctaaggcttttgcagatgaacttgggatcccattcttggaaacaagtgctaaaaatgcaaccaatgtggaagaagctttcatggctatgactgctgcaattaagacaagaatggctagccaaccagctggaggtgccaagccaccaacggtccagatccgtggacagccagtgaaccagcaatcaggctgttgttcttcttgattcaattagtcaccactcctctttcgatcatcacaccattatgatcatttgtttgcattgcatgttagacttctccaaattaacaactctttggatccttttgcttgtttttcatttgctttcttttgatccgattcttttctgatgtacgttgaagtttgaaacccataacttctatatagtaaaaggtcttttatgccggnnnnnnnnnnnnnnnnnnnnnnnnnnnnnnnnnnnnnnnnnnnnnnnnnnnnnnnnnnnnnnnnnnnnnnnnnnnnnnnnnnnnnnnnnnnnnnnnnnnnnnnnnnnnn

SEQ ID NO: 100607 - DNA, 781 bp, Arabidopsis thaliana columbia
  unsure (1)..(781): unsure at all n locations
aatgannnnnnnnnnnnnnnnnnnnnnnnnnnnnnnnnnnnnnnnncccacgcgaccacgatcgtgttacgtctctctctctctcagtctctcatcaccgacgaagatcacggctcttttctctgtttaatcggcggaatctctcttcttattttatttttcttccggtagatcgatccagctccgagatcaatcatgaatcctgaatatgactatttgttcaagcttttgctcattggtgattctggtgttggaaagtcgtgcttgcttctaaggtttgctgatgattcctacctggatagctacatcagcaccattggtgtcgactttaaaatccgaacagtcgaacaagatggaaagaccatcaaactccagatttgggatacggcaggccaggaacgtttcagaacgattactagcagttactacagaggagctcatggaattattgtgacttatgatgtaacagatctagaaagcttcaacaacgtcaagcaatggctaaatgaaatcgaccgctatgctagcgagaatgtgaacaagctactggttggggacaagtgcgatctcacttcacagaaagttgtatccactgagacagctaaggctttcgctgatgaacctgggggcccattcttgggaacaagtgctaagatgcacccatggncgaagagcttcatggcatgctgcggnancagncngatgggngcaccngcnggggnttagcnccaaggccaatccgggggacngtnaccagatnggngggccctaatcgttgggc

SEQ ID NO: 100608 - DNA, 608 bp, Arabidopsis thaliana columbia
  unsure (1)..(608): unsure at all n locations
taggtgcaactatagaagagccttgacgtcgcatgcacgcgtacgtaagctcggaattcggctcgagcttgttaacattctcacttcacagaaagttgtatccactgagacagctaaggctttcgctgatgaacttgggatcccattcttggaaacaagtgctaagaatgctaccaatgtcgaagaagctttcatggccatgactgctgcaatcaagaccagaatggcgagccaacctgcaggaggatctaagccaccaacggtccagatccgaggacaacctgttaaccagcaatcaggctgctgctcctcttaattcgctttggtaacacttaaccatattatgtcattcgtttgcatgtaagaaatctaaacaacgttgcttcttaaatcttttgtatttggtttttcaatttttcacttgtgtccaaaagcttttaaattctttgtaatgggacttggattattaataaacttctttagtaaaaaaaaaaaaaaaagggccggccgccgactagtgagctcgtcaacccgggannnnnnnnnnnnnnnnnnnnnnnnnnnnnnnnnnnnnnnnnnnnnnnnnnnnnnngtagctgnnaaatcat

SEQ ID NO: 100609 - DNA, 649 bp, Arabidopsis thaliana columbia
  unsure (1)..(649): unsure at all n locations
tgatacgtccgctctccacgactcactatatggaaagctggtcacgcctgcaggtaccggtccggaattcccgggtcgacccacgcgtccggaaaaaaaaaagaacattcacgtctctctcgtttttttggccgacgacgatcgctgaattgactgccggagattcctttaatcgtcagattctcgttgagggataatgaatcctgaatatgactatctgttcaagcttctgcttattggtgattctggtgttggaaaatcatgcttgcttctaagatttgctgatgattcttacctggatagctacataagcaccattggtgttgactttaaaattcgcacagttgagcaggacggaaagaccatcaaactccagatctgggacacagcaggccaagaacgtttcaggacaatcactagcagctactacagaggagctcatgggatcattgtcacttatgatgtcacagacctagagagcttcaacaacgtcaaacaatggctgaatgaaattgaccgttacgctagcgaaaatgtgaacaagctactggttgggaacaagaacgattcacttcacagaaagtgtaccnngngaagcaaggnttcagtgantnggncctcttggaaaggcnaangcncctgggggttc

SEQ ID NO: 100610 - DNA, 1736 bp, Arabidopsis thaliana columbia
gttaaatattttctcctgagatttttttcttcaattccaattcagtgagcatttttattgtttctccgatctgaattccggcgatcaaattacgacagcgactaattcaacgttttaaattactctgtgtgagagaaatttgcgctctggatttgcatttttctaatcctttatgcaaagcagtgtgtatcgtgataaagctagctcgatcgcgatgatcttagaaactcagaggaatgttgaattccctcatcggatcgttgataagcgtcccaggaaacgtccccgattgacttgggatgctgctccgcctcttcttcctcctcctcctccacccacggtatttcaacctccgttgtactatggtccggagtttgcgagtggtttagttcccaattttgtttacccaaacatgttctataatggccttcctcgtcagggctctcctccctggagaccagatgataaagacggccattatgtctttgttgttggggatactttgactccacgatatcaaatgctcagcaaaatgggtgaaggtacatttggacaagtattggaatgctttgataataaaaacaaagaagtcgtggcaatcaaagttatacggtccataaacaagtatcgtgaagctgccatgatcgaaattgacgtgctgcagaggcttacaaggcatgatgtcggtggttctcgttgtgtgcaaatacggaattggtttgactatcgtaatcatatttgtattgtatttgagaagcttggaccaagcttatatgattttctccgcaaaaacagctaccgttcatttcccattgatcttgttcgggagcttggcagacaacttttggagtctgttgcatatatgcatgatttacggctgatccacacggatttgaagccggagaacattcttttggtatcgtctgaatatatcaaaatacctgattataagtttctatcccgacccacaaaagatgggtcatacttcaagaatctgcccaagtcaagtgccatcaagctcattgatttcggaagtacaacatttgaacatcaagaccataactacattgtatccacaagacattaccgcgcaccagaagttatcctaggggttggatggaactatccatgtgatctgtggagtattggttgcatacttgttgaactttgttcgggagaggcgcttttccaaacgcatgaaaacttggaacatttggccatgatggaaagggtcctaggacctttaccacctcatatggtgctcagagccgaccggcgctctgagaaatacttcagacgaggtgcgaagttagactggcctgaaggtgcgacatcaagagacagcttaaaagcagtatggaaacttccccggctaccgaacctgataatgcagcatgtggatcactcagccggtgatctgatagacctattacaaggtctgcttcgatatgatccaacagagaggttcaaggcaagagaagcactgaaccatcccttcttcacaagaagccgggaacagagtataccacccttcaacccaaaccctcatccatttttatacaaccaaaagaactaaaaaagaaaagaaaaaagaaacagcagataatgtttggatacatctgcagtttctgtgtatccttcagtttcctgtgtttttgtagcattttattatatatatgattatcatgtatagaaatgaaagaaagagagaaaggtttgccccgacgttgctcgag

SEQ ID NO: 100611 - DNA, 486 bp, Arabidopsis thaliana columbia
  unsure (1)..(486): unsure at all n locations
tgacgtcgcctgcacgcgtacgtaagcttggatcctctagagcgggcccccttttgttttttttttgaaaccaaagacatctgatatggtatttgatttgaggttcggttacggtttctataatacatgtgatggtgaaaagataaattcatagagaagaccatctgattctacaaagatttctatcttctgattcttatcacagtatttagggagcacctaacacattagaattatccccattggcaagagaaaccatggaagtgtgttcttcaacacttgcagcttcagtgtttaagttgttagcagcatcagcaacactcccaccatcatccggtttcattaaagccaactgattctcttctgttttctttgagagatccctcaatgtacccctgttagcccaaaaaagtccacaggcattgcaggagagtcctggggccggagngacggtncgcatcattgggtgtacatttgggaactaat

SEQ ID NO: 100612 - DNA, 659 bp, Arabidopsis thaliana columbia
ccggcactatacgactcttatagggaaagctggtacgcctgcaggtaccggtccggaattcccgggtcgacccaggcgtgcgcccacgcgtccgtacggctgcgagaagacgacagaagggtacggctgcgagaagacgacagaagggtacggctgcgagaagacgacagaagggtacggctgcgagaagacgacagaagggtacggctgcgagaaagtaaagagaaaaaccctaatcttcatcttcatcttctcccgccgtcggccgtaagaggtttcgaagaagcaaagtgagcaacaatggcgggaggcaagatcaggaaggagaagcccaaggcttcgaatagagcaccatcgaaccattaccaaggaggaatatcgttccacaaatcgaaagggcaacatatccttaagaaccctctgcttgtggattcgatcgttcagaaagctggtatcaagagtaccgatgtgattctcgagatcggtcccggtactggaaacttgaccaagaagcttctagaagctggcaaagaagttatcgccgtcgaacttgactctcgtatggttctcgagcttcagcgccgttttcaaggaactcccttctctaaccgcttgaaggtaattcaaggggatgtgctcaagacggagcttcccaggtt

SEQ ID NO: 100613 - DNA, 902 bp, Arabidopsis thaliana columbia
agctatgatttcgcatgcacgcgtacgtaagcttggatcctctagagcggccgccctttttttttttttataatttaatgggactatttgtcgaatagaataatgttttttgttacatttgcaggtgaacacgagtacctgctttaaagagggatatgatgtacatatatatgatctatgaatcttatgcttctttatcttctagcttgtgttgaacagtttccacaagttggagtaacattgctccaatgaagtaccatgtaactcctgctaacaatatctgctgtcatggactgttaactatggattaagccaacgagccgccgatttggtcgtagatcacagaagcggatctgtaacttgcttggtactgaaccaacaatactgctactatggttgtcccaattggaaatttctctatcccgaactggtttgtatcccctcttctactagactggccacttctcctaaaggaaaattggtttaccaatctaacttagcggcattccgaagactaatcttttgaaacctcgtttgttttgtttttccaaaaatgaagggataaaataaacaaccccgttttacgacatggtaactacccaatacaaattttcttcttcttatcaaaaggcctaaggttataaagccttggaaaaccctatttatcatatctattgaggagttacgctatatcacggacgattctcggggattcgtcggcatttatgggctctacaattattcggcctcgtgcccaaccaaaaacaaacactttctaagataactatttattatgtatggtaatcgtttgcctgggaaatattcaaaccacgcctatttattcttattcaattttcttttggccataaaaaagggtttttattacacttctaattgtctat

SEQ ID NO: 100614 - DNA, 477 bp, Arabidopsis thaliana columbia
  unsure (1)..(477): unsure at all n locations
cnnnnnnnnnnnnnnnnnnnnnnnnnnnnnnnnnnnnnnnnnnnnnnnnnnnnnnnnnnnnnnnnnnnnnnnnnnnnnnnnnnnnnnnnnnnnnncctttttttttttttttgtttttaaaaaaaagtgtatgtgtatattttccagtttccacactagtacaagcgcttttgacacctaaagagattgctttgtaagaaggcaactggatctccattctaatagtacaagataatgaagcaacataggctcccaagaaagtaaatagctttagacaatcacgcacacatgtaactcaagaccaagtttgtacttacctatgcttgtgtgagattgtcgaatcaacaaacatcatagttcgtctctagacctcactggaggagccactccttacgagagaagcttgtggggttacttctcacaatcacgtctttcaagcgcgagagaggttcaaggtacttctggcccagtttcttc

SEQ ID NO: 100615 - DNA, 442 bp, Arabidopsis thaliana columbia
cgttttttttttgtcaaaactcactccccctaaaatttcaacagaatctttctatctctctatagcactaaaatataatctgtccctttttctctggcagagcctcaccaaatatccccactaaaaagagaataaacctaccaatggtggtaccccaatggggggggggatgtgttcatactgctcttgcaggagaagccagatagtcctatctcccgttactccttttctccagctatgttccctttatattggccagcagaaccccatcaacctcaaaatgtccacacaaaagtttcctttcgttttgggtaaagaaggtgcagcgtcaacataaaagtctgggaaccgagaaacttcgacacccttttcaaacaatatgtatgtgggaagctgagacattccaccagcaagagatattccaaactttgccgcagtatta

SEQ ID NO: 100616 - DNA, 691 bp, Arabidopsis thaliana columbia
  unsure (1)..(691): unsure at all n locations
ccnnnnnnnnnnnnnnnnnnnnnnnnnnnnnnnnnnnnnnnnnnnnnnnnnnnnnnnnnnnnnnnnnnnnnnnccacgcgtccgcccacgcgtccgcgttcatgtcttttctccggccaccgaaacgatgccatctgtttagtgcgcctttataattcaacgaccctttgtacttttccgattcctctttctctataacttcatctctcccattctcttcactcttctcaaaaattcgatctttttagggtttttcttttatcctcttatcgctaatctggagctctatagagactataaagggtttttgattgattcgggagctcgagatttgacttcttttagctgattcggcaagtttgtatctagaaaggatcgattggtgaggtcaatagtggttggtgggttttagtaatggaagacggtgagcttgatttctccaatcaggaagtgttttcgagttcggagatgggtgaattaccacctagcaattgttcgatggatagtttctttgatgggcttttaatggatactaatgctgcttgtacccacactcacacctgtaaccccactgggccagngaacactcatactcacacgggcttccatgtccaccacgagtttctcccgggtgagagcgatgnaaaaggtttctactgntggtacagctgngtcttntggggagaagggt

SEQ ID NO: 100617 - DNA, 546 bp, Arabidopsis thaliana columbia
  unsure (1)..(546): unsure at all n locations
tgannnnnnnnnnnnnnnnnnnnnnnnnnnnnnnnnnnnnnnnnnnnnnnnnnnnnnnnnnnnnnnnnnnnnnnnnnnnnnccacgcggtgcggggtgtcgtctaattaatatattgttccaaagaaaaatatgtagctacgtcttgcctctaacacctctttttcacatcacaagcatcttaaaatttcttaaatcactcttttcgcgatgagacatgtctttgtcgaggtgttggttctgatctctggggtcatcttggggttgagctatgcgtttgcaccaatctcatcgtatcaatgggtcgtctcgtattctcaacgtttcattcttggaggcaacaagcaggttatagtgatcaacgacatgttccctggaccgatccttaatgcaacagcaaacgatatcattggcgttaacattttcaacaatttgccccaacccttcctcatgacttggaatggattgcaattgcggaagaactcgtggcaagatggagttcgagggacaaactgtcccatactaccggtgacaaattggacgtacc

SEQ ID NO: 100618 - DNA, 548 bp, Arabidopsis thaliana columbia
  unsure (1)..(548): unsure at all n locations
tgtnnnnnnnnnnnnnnnnnnnnnnnnnnnnnnnnnnnnnnnnnnnnnnnnnnnnnnnnnnnnnnnnnnnnnnnnnnnncttttgttttgggttttatcaagtaaaattgcacccaaaactttaattagttaaaataagatgtcctgtccacctccaggggtaattctcgtattagcaaatacaaaagccaaccaaagaaaaacgttgtgttgaaagagaagtatactatcaagtaacaatagacgccgggtgagactgagctaaaggaattacccaagacacggcaaaaataaacttggcctgacagtttcagacactaagatgtttctctttttcattcacaatccttgagcaactggttttgtgcaatggacatatattcttcaattgggaatgaccgactatccgactgaatgttggatagttcccaccaagggaccgaaaactaggcctttatcgctacatgaccaaatcatgaggagagtagtagtcccgataaaacggtacatgtggatggattggggcctcccgggtctggtataagaga

SEQ ID NO: 100619 - DNA, 515 bp, Arabidopsis thaliana columbia
  unsure (1)..(515): unsure at all n locations
nnnnnnnnnnnnnnnnnnnnnnnnnnnnnnnnnnnnnnnnnnnnnnnnnnnnnnnnnnnnnnnnnnnnnnnnnnncttttgttttgggttttttttttaacttggaataaacggacaacctcataattcattgtaggagaagtgtgacacttcatacatgaattaggaaaaaaataacgatccaaatgatctgaattttatacagactccaatggtactagaatgtcttgatttaaaacagatcaaaaaaaaaaaactcgaaattcatcgtcgagtatcgggaaaaattacaagagataaatgagagctatagaaacccataatggaaaaaagaaaaaagaaagaaacaaagatttttttgttttgattgataactagaaggaaaacataataaaattatgattagaaattatgaagagaggaggatgatgaggaagtacttgaggtgtaattaggtgtaagtgtaaaagatttgcttctcttcttcctcttctccaagaaccttttcacagatc

SEQ ID NO: 100620 - DNA, 522 bp, Arabidopsis thaliana columbia
  unsure (1)..(522): unsure at all n locations
ttaggtgccactctagnaagatcttgacgtcgcctgcacgcgtacgtaagcttggatcctctagagcggccgccctttagttttgtttttgatgctaaatgaaaagttttttctttcattaaaagcttttttttttttgagatagagatagtgtggtgcagcaacttacaaaggaaatcaaaatcaattgaataaggggagcaacacacaaacaaatacagaggctcattatcattcagcggcgaattaatttgctgctttacagttttcaatgatgtgtggtgcttctcctcagggctgcaaatataccccctcctagtcctgttgaccactttttcttctcctctccctcttctcctacctccttggctatctcttgaagctgctctatgatctctgagaaggctggtctctgcgtanaatcatgctcccacaatctctccaatagctctggcaatttcggatgccgtgtcttttggattgggggccttaatccctttaggacaacccctactggtgcct

SEQ ID NO: 100621 - DNA, 717 bp, Arabidopsis thaliana columbia
  unsure (1)..(717): unsure at all n locations
attgagtctctntacatcntaccctcgcaccaaaaccaccacccttgattcctacatgcatagccatgtctctctcctaattgtatattttcaccggcttctcgtatgcgtgtcggttctgatttgcagcataagcccttttaggagcattatcaatgtgctccaacccaagatactgctcccacgcaccgtatacatctcttctctgaaagcgattataaacaacatctgtgtccagcaagtaatcaggacgtcccattgaaaacgatgcaaacttccacttggcaaagtcctcatcagggacatggagtttcttttggatacgggtcttgatttcttctaaagtttcaccttcgtggattaccaaaaagaagggttccccaaaattttgaacttgctgattttgtccggcctctttagtaaaatgatatacgtgaattaacctatcattgggaccaatattcttctcttcttcaggtatctcctctgctcgtaaagtccagtactggtcattgatgttttcaattcgttcagtagatggaaagatcttgtagatcttgtggaaaaagacctcaagtaacctcagttctgcatcttgatgcgaaagctccacctttgtgcggccgnnnnnnnnnnnnnnnnnnnnnnnnnnnnnnnnnnnnnnnnnnnnnnnnnnnnnnnnnnnnnnnnnnnnnnnnnnnnnnnnnnnnnnnnnnn

SEQ ID NO: 100622 - DNA, 666 bp, Arabidopsis thaliana columbia
  unsure (1)..(666): unsure at all n locations
ccccccctcgaggtcgacggtatcgataagcttgatatcgaattcgcggccgcctcgacgaaatcaatcctaattgagaaccaaaaaagccaacgacctctcaaatccaagaacggggcttttgtcttcaaaatgaaaagtttgcagagaaaaagggggagagggagagagtctcagacaataccatattaacaccaaagaacgagtttttggaagcaaaagagaccaaccacacttactactgtcagggccaaaatcaaaacccttacctggaaaagatatatatccattttagttatcaaatctaaaattgagtctctctacatcctaccctcgcaccaaaaccaccacccttgattcctacatgcatagccatgtctctctcctaattgtatattttcaccggcttctcgtatgcgtgtcggttctgatttgcagcataagcccttttaggagcattatcaatgtgctccaacccaagatactgctcccacgcaccgtatacatctcttctctgaaagcgattataaacaacatctgtgtccagcaagtaatcaggacgtcccattgaaaacgatgcaaactcccttgggaagccccttcgggggtggggtnntttgganggggntggttttnnaaggtcccncnggggtccaaagnggggcc

SEQ ID NO: 100623 - DNA, 510 bp, Arabidopsis thaliana columbia
  unsure (1)..(510): unsure at all n locations
atgacgtcgcctgcacgcgtacctaagcttggatcctctagagcgggcncccttgcgttttgggtttttaaataacattatttttgtaatatagtaaaataatttctaacaacctattatagaatatcaccatagaggcaatttacatagccgcaccaaacattctttctccttacattcaacaatatcatgtagagggatcaaagggggtctaggggcgaggatagcgagagcgccctttcttctttaagaactctgggatctctatggagctgccttcagggaatgatgatgaaggaccgcttggggcccccattgatgcatccgcttgggtcccctgaaggggcctcccttctccttcttcttggcgtttgaagcccgctgctataagggtaatacttatttgaccactataagagggtccaccacagcaccaaatttaagattccctggtggatcaacgagggtcaaaaatacttggtgagcaggatttacctgaaacaggggtaa

SEQ ID NO: 100624 - DNA, 391 bp, Arabidopsis thaliana columbia
acgcgtccgaccacacgtccgcggacgcgtggggttcgaccccaagggatttggccggtaaaattattgggagttgtctttctcttgcactctctctagttccaaaccctagcaattcctctgttttcaccattttcggagattatcaccttctccccgattcgccgccttgtgattacatctacgtaaagagtttctggtagaaattttccctcttttagctgcagattggcatcagattccgttctggatgtgtcggtgatcgattttccgcgtcggtgatgatagctaacggattcgagaggtatggataaagaacgagtcaggaaacgtcctcgtatgacctgggacgaggccccagctgaaccagaggctaaaagggctgtgatta

SEQ ID NO: 100625 - DNA, 1683 bp, Arabidopsis thaliana columbia
gccccgcccctttgaatgcactggcccctcctcgaggtcgacggtatcgataagctagatatcgaattcgcggccgcttgcactctctctagttccaaaccctagcaattcctctgttttcaccattttcggagattatcaccttctccccgattcgccgccttgtgattacatctacgtaaagagtttctggtagaaattttccctcttttagctgcagattggcatcagattccgttctggatgtgtcggtgatcgattttccgcgtcggtgatgatagctaacggattcgagagtatggataaagaacgagtcaggaaacgtcctcgtatgacctgggacgaggccccagctgaaccagaggctaaaagggctgtgattaaaggacatggaagcgatgggaggattttgtcaccaccattaagggacgatgatcgtgatggtcattatgttttcagtttgagggacaatctcactcctagatataaaatacttagcaagatgggtgaaggcacatttggtcgggttttggaatgttgggatcgtgatacaaaagaatatgtggcaataaagataattcgaagcattaagaaataccgggatgcagcaatgattgaaattgatgtacttcagaaacttgttaagagtgataaaggccgcacacgctgtgtacagatgaagaactggtttgattaccgaaatcatatttgcattgtgttcgagaagcttgggccaagtttgtttgactttctaaagagaaataaatactccgcatttcctctggcccttgttcgggattttggatgccagcttttggaatctgtagcatatatgcacgagttacagttagttcacaccgacctcaagcctgagaacattctgttggtgtcttctgaaaatgtaaagcttcctgacaataagaggagtgctgcaaatgagacacatttcaggtgcttaccaaagtcaagcgccattaaactgattgattttggcagtactgtttgtgataaccggattcatcactccattgtccaaacaagacattacagatcccccgaggtcattttaggtctaggatggagttaccagtgtgacttatggagtataggttgtatactatttgaactatgcacgggtgaggctctctttcagacgcatgataacctagaacatctagctatgatggagagggcgcttggacctttacctgaacatatgactcgaaaagccagccggggtgctgagaaatatttcaggagagggtgtcggttgaattggccagaaggagccaactctagagaaagtattagggctgtaaaaagacttgatcgtctcaaggatatggtatcgaaacatgttgacaacacgagatctagatttgcagatctattgtatggtttattggcatatgatccatctgagcgtctcacagcaaacgaagctcttgaccatcctttctttaagagctcaagttgagaagaagcaaaatcagaaccataaaatgtagaattttacttggtaacaagtttttttgttagattcctctaaagctcccgttctcagtagcaccaaacagtagtattcctatttcagttacgagtttggctacgtttattctggaaaatacctctgttgtacattgtgttgttgagaatataaaacttgcatcatattttgaaact

SEQ ID NO: 100626 - DNA, 676 bp, Arabidopsis thaliana columbia
  unsure (1)..(676): unsure at all n locations
taggtgcactctacaagagcttgacgtcgcatgcacgcgtacgtaagcttggatcctctagagcgggcgcccttttgtatttgggtttacaaactcatgtcttctcctcagattgaaacttttataaatccttataacaatcttcgaaaacttgtccaaaagaaacgcaacaacattatgtctcaaatgaaaaaactcttggtaacatgaaacttaaaaggttctaaagcaaacacacttaaaagagaaaggaacagtcgatccaatagtatacatgctacaatgcctgcaagccgtggccatgagccatcaaagttaaggagactcacttcctctaggggaagtgcggtttggctcgtaatcatcatcaacagggctccggtcctctttcgaactgtcaccaccggctcctacaacaggactgacaacagagtttctgccattgtcttgggggctaccaccgtcacggtcagatccgacttccttttgaagctttggtgatggtggtgggctcccgtctatgatctttgggctgccttcatcatcaagaaccggactacgatctctggctcttggcgatagagagtcatccatccgctttgatgcgcgacgtgggcnccgggatccgacggactgnagggacagttcccanaggggngataagntgggaacatgt

SEQ ID NO: 100627 - DNA, 542 bp, Arabidopsis thaliana columbia
  unsure (1)..(542): unsure at all n locations
nnnnnnnnnnnnnnnnnnnnnnnnnnnnnnnnnnnnnnnnnnnnnnnnnnnnnnnnnnnnnnnnnnnnnnnncttttgttttgggtttattaaatttgggttttaattaataattaatctaatcgtctttgacaagtatataataacaagaaaaatgcttatgaaacgaaaatgaaatatttatgaggaaattttgtagctgacgatagaaaagcctcctagatcgatgtcttattatctcaagccagtagctgataatgccattagctacgccgtccaaaatccaaataatcaatgtgcggtttaagcgctgaaggcgaataaagtatgtcaataccttatacgaggcaaacaacctaattctttggcatattttcgtatgaactatgaatcttttttattttgggggattcttaaaaacaaaataggagttccggtgttttcagggaatggaagtttaagaccccttcgaaatttataaatgtataaattttgttaagggcgggcagttgagaaattgaccttacaaactgggtcccggg

SEQ ID NO: 100628 - DNA, 563 bp, Arabidopsis thaliana columbia
taggtgcactctagtaagatcttgacgtcgcctgcacgcctacctaagcttggatcctctagagcggcccccctttagttttgttttttttatataaaaacttgaattctcaaagcctttgaccacatgaatgcacaaaatcttggcttatgtaagaatggttttacatttgatttcaattacatcgaccaaagctcctatgaactctattcgggaaccaattaacaacacttaggggggcggctcaattcaccatgactcagaaaagctcatcatcactatcatcatcactactatcactcaacacaaagtctccttcatccctccacccattcatcttccgaaaacgccgatacattaaacctcccaaacccatcactctccacccgtcatctccgccttctcatcctcatcatacgacaacgaaaaccactcatcattcccaccaaatcccacctcatcctcctcaaaccttgggtctcttccccggaatcaaatcgcttctcaccaatctttcccttctcaacaccactccaaggcacccacaaatcagcatgccttcc

SEQ ID NO: 100629 - DNA, 887 bp, Arabidopsis thaliana columbia
ggcgaaccaagtttagaaaggctatgaacaaagctgattttgatgctagcacaagggccattgattctctgataaattatgagactggcaaatattttaacaatgaaggttatgaggctgaaaagtatgaccagttcctgaaaaaatatgaagatgctgccctgcaaactcaaagaagtcttgcttcctcgcgcccgggacaaagtatcatatttagtacagctttatcaacagcaatggtgttgtgctctcagggtatcatgaatggccagatgacagtcggtgatttggttatggtgaatggacttctctttcagctgtctcttcctctaaattttttgggtagtgtttaccgtgaaacaattcagagccttgtggacatgaaatcaatgttccagttgctagaggagaaatctgacatcacaaatacaagtgacgcaaagcctcttgtactgaaaggtggaaacattgagtttgaaaatgtacacttcagttaccttccagagagaaaaatattagatggaatttcctttgtcgtaccggcaggaaaaagtgtggcaatcgttggtactagcgggagcggcaagtcaacaattcttaggatgctattcagattcttcgacacagattccggaaatataagggtttgacgggcaaggatataaaggaagtgaggctaggatagcctcccgaggctccctcaggagtttgtgccccaagatactggtccttcttcaatgccacaatttttcaccaacatccattatgggcggctctcagctacagaagaagaggtgtatgaggctgctcggcgtgctgcaattcatgaaacaatcagtaatttccctgataaatattccacgatcgttggggaaagggggctcaag

SEQ ID NO: 100630 - DNA, 895 bp, Arabidopsis thaliana columbia
ccaacgcgtccggttcgagttctgtagctccagcatgaaggaagtcctagagaggcataacttgcagtcaaagaacttggagaagcttgatcagccatctcttgagttacagctggttgagaacagtgatcacgcccgaatgagtaaagaaattgcggacaagagccaccgactaaggcaaatgagaggagaggaacttcaaggacttgacattgaagagcttcagcagctagagaaggcccttgaaactggtttgacgcgtgtgattgaaacaaagagtgacaagattatgagtgagatcagcgaacttcagaaaaagggaatgcaattgatggatgagaacaagcggttgaggcagcaaggaacgcaactaacggaagagaacgagcgacttggcatgcaaatatgtaacaatgtgcatgcacacggtggtgctgaatcggagaacgctgctgtgtacgaggaaggacagtcgtcggagtctattactaacgccggaaactctaccggagcgcctgttgactccgagagctccgacacttcccttaggctcggcttcccgtatggtggttagagatggaacaattcaaagaagttgatgcagtgaggagagtaatgtaaatctttttaactcggtagtaacaagaggcaatgtctaagtagtgaactctcaaatgtttgtgtccgccctacaaagaaaaaaggctttcatttttatgattttccctatgtatgatctctcttcactgcatttctggttagtaacgcttgtcgccgataaactttctcgttatggaaagttagaatatacactattgtagaattttggttgtataaaaaaaaaggtttccacaccccgagcgaaccgctctagaggatccaagcttacgcacgc

SEQ ID NO: 100631 - DNA, 656 bp, Arabidopsis thaliana columbia
  unsure (1)..(656): unsure at all n locations
atcaacccgtgccccctanccccaattgcaattcttgctngagacttantgatatgtttcccntgatttngcngggaccgcatctngcggaagagaccgngcgacttggcatgcaaatatgtaacaatgtgcatgcacacggtggtgctgaatcggagaacgctgctgtgtacgaggaaggacagtcgtcggagtctattactaacgccggaaactctaccggagcgcctgttgactccgagagctccgacacttcccttaggctcggcttaccgtatggtggttagagatggaacaattcaaagaagttgatggagtgaggagagtaatgtaaatctttttaactcggtagtaacaagagacaatgtctaagtagtgaattctcaaatgtttgtgtaagtttctgcctatggaagaggctttcatttttatgattttcactatgtatgatctctcttcactgcatttctggttagtaacgcttgtcaccgataaactttctcgttatggaaagttagaatataaaatattgtagaattttgattaacgaaaaaaaaaaaaaacgaacccataaagcgaccgctctagaggatccaagcttacgtacgcgtgcaggcgacgtcataactcttctatagnnnnnnnnnnnnnnnnna

SEQ ID NO: 100632 - DNA, 705 bp, Arabidopsis thaliana columbia
ttctcatgtcttcttctctcctcgacctttgagggtttttttgttcgttgtgatggcgagagaaaagattcagatcaggaagatcgacaacgcaacggcgagacaagtgacgttttcgaaacgaagaagagggcttttcaagaaagctgaagaactctccgttctctgcgacgccgatgtcgctctcatcatcttctcttccaccggaaaactgttcgagttctgtagctccagcatgaaggaagtcctagagaggcataacttgcagtcaaagaacttggagaagcttgatcagccatctcttgagttacagctggttgagaacagtgatcacgcccgaatgagtaaagaaattgcggacaagagccaccgactaaggcaaatgagaggagaggaacttcaaggacttgacattgaagagcttcagcagctagagaaggcccttgaaactggtttgacgcgtgtgattgaaacaaagagtgacaagattatgagtgagatcagcgaacttcagaaaaagggaatgcaattgatggatgagaacaagcggttgagggcagcaagtatgtgtcttacccctctctgttgataacaaatccccttttcttttggtctacccatttaccgtgcacactccctaaatttaatccccagttgtctaccaacacatatgttttgaccatacctgggggggaaattgattaa

SEQ ID NO: 100633 - DNA, 480 bp, Arabidopsis thaliana columbia
  unsure (1)..(480): unsure at all n locations
atgannnnnnnnnnnnnnnnnnnnnnnnnnnnnnnnnnnnnnnnnnnnnnnnnnnnnnnnnnnnnnnnnnnnnnnnnnnnnnccacgggtccgcgaaagagaccatcaccgtgagaaagagaagaagaacaaaaaaagttagccatggcatcaagaagagtttcttcgctgctctctcgctctttcatgtcctcctcacgttctatcttctctcttagaggcatgaacagaggagctcaaagatacagtaacctcgctgctgctgtcgaaaacactattactccaccagtgaaagttgaacacacacagcttctaatcggtggaagattcgttgatgcagtgtcaggaaaaactttccctactttggatccaagaaatggagaagtgattgctcaagtgtctgaaggtgatgcagaagacgtgaaccgcgcggctgcagctgcacgaaaggcttttgatgaaagaccatggcctaaaatg

SEQ ID NO: 100634 - DNA, 481 bp, Arabidopsis thaliana columbia
  unsure (1)..(481): unsure at all n locations
ttttaggttgcggagaagtgcagagaacggttgcatgatatagtgaagaaggaagttgaagttatggcttccgacgagtggacagagacgatggttaagagttttcaaaaaatggataaagaagttagccaacgagagtntaacttagttgttaatggtgctactcggagtatgaaaaattcttgtagatgtgaattgcagtctcctcagtgtgacgccgtcggatccaccgctgttgtatcggttgtcacgccggagaagatcattgtttctaattgcggtgattcacgggctgtgctttgtcgtaacggtgtagccattccctctctccgtagatcaccaaggtagttaaaattaatgccttattatagattttccgggttttggtagtattgattccaagattggcatgggtcctaaggcgntttttttttttttgatngacaaaccggtncgtccccccttaaantttttcgggncc

SEQ ID NO: 100635 - DNA, 1785 bp, Arabidopsis thaliana columbia
  unsure (1)..(1785): unsure at all n locations
taatacgactcctatagggaaagctggtacgcctgcaggtaccggtccggaattcccgtgtcgacccacgcgtccacaaaatctctctctactaatatctctctctctctctctctattgttgaagaagactcataatcggagattgtttgtttttggtttgctctgtaaattggagaagttttgttagagatcaaatggctgggatttgttgcggtgttgttggagagactgaaccggcggcaccggttgattcaacttctcgagcttctcttagacggaggttagatctacttccgtcgatcaaaattgttgctgactccgccgttgctcctccgcttgaaaactgccgtaaacggcagaagcgtgagacagtagtgctctcgacgttaccgggaaatctagatctggattcgaatgtgaggagtgagaataagaaggctagatcagcggttacgaattcaaattctgttacggaagcagagagtttcttttccgatgtacctaagatcggtacgacgtcggtttgtggtagaagacgagacatggaagacgctgtctcgattcatccttcgtttcttcaacggaactctgagaatcatcatttctacggtgtctttgacggccatggctgctctcatgttgcggagaagtgcagagaacggttgcatgatatagtgaagaaggaagttgaagttatggcttccgacgagtggacagagacgatggttaagagttttcaaaaaatggataaagaagttagccaacgagagtgtaacttagttgttaatggtgctactcggagtatgaaaaattcttgtagatgtgaattgcagtctcctcagtgtgacgccgtcggatccaccgctgttgtatcggttgtcacgccggagaagatcattgtttctaattgcggtgattcacgggctgtgctttgtcgtaacggtgtagccattcctctctccgtagatcacaagccggatcgacccgatgaattgattcggatccaacaagctggtgggcgagttatatattgggatggagctagggttcttggagttcttgccatgtctagagcaattggtgataattacttgaaaccgtatgtgattccggatccggaggtaacagtgacggatcgaactgatgaggatgagtgtttgatcttggcgagtgatggactatgggatgttgtaccaaacgagacggcgtgtggcgtggctcgcatgtgccttcgaggtgctggtgcgggtgacgactcagatgcggcgcacaatgcgtgctccgatgcggcgttgctcttaacaaagttggctctagcaagacagagctccgataacgtgagcgtcgttgtggttgacttgaggaagaggaggaataatcaagcgtcgtcttaataattagtgttataattagtagtagtattagaataattgttacatagcctaattgtaattgtattctttttatttttctattttagtttttctcattttaaggtgttttttcttttctattttagttagctcttaattcaggctggggaagaaaaagagctgattaaatagtttgagtatttttcttatttttctattcaggtaatattatacatgtattcttttagtatggtcgttggaaatgtaataatctaattcagaggggaaaaatgttaaaatgaaagaacagattatgcgtatttaccaaaaaaaaaaaaaaaaagnnnnnnnnnnnnnnnnnnnnnnnnnnnnnnnnnnnnnnnnnnnnnnnnnnnnnnnnnnnnnnnnnt

SEQ ID NO: 100636 - DNA, 624 bp, Arabidopsis thaliana columbia
acccacgcgtccgcccacgcgtccgcccacgcgtccgcccacgcgtccgcttcctccttcaatctctctcgttcgtatcatctgctctgcgatttcaatggcgagccgttggttgagacctgaggtgtatcctttgttcgctgctaccggagttgccgttgggatctgtgcgttttccttgatcagaaacatcaccggaaaccctgaagtcagatgcaccaaggagaacagggctgctggaattttggataaccatgcagagggagagaagtataaggaaaatttcctgaggaagtttgttcgcaacaagaaacctgaaatcatgcctggactcaacaagttcttcactgatcctacatactgaaaccatctttgcacaccgctttgtcgtattgattctggaattgaatctctttgtgatataaaaccgcatttgtcaatttcacattgttgatgtatcctccagctgaagacacttgttaatgctgggcttatgttgtcacttttaagcagaaaattgtatgacttgcttatggcagcatactcttttaatgaccatctcatgcggccgcgaattcgatatcaagcttatcgataccgtcgacatcgagggggggcgcggca

SEQ ID NO: 100637 - DNA, 618 bp, Arabidopsis thaliana columbia
  unsure (1)..(618): unsure at all n locations
aaatataaagtgaggtcttttctacgtctcttcaacattctcagagaagccgtcttcttcctccttcaatctctctcgttcgtatcatctgctctgcgatttcaatggcgagccgttggttgagacctgaggtgtatcctttgttcgctgctaccggagttgccgttgggatctgtgcgttttccttgatcagaaacatcaccggaaaccctgaagtcagatgcaccaaggagaacagggctgctggaattttggataaccatgcagagggagagaagtataaggaaaatttcctgaggaagtttgttcgcaacaagaaacctgaaatcatgcctggactcaacaagttcttcactgatcctacatactggaaccatctttgcacaccgctttggcgtattggttcctgggattgaatccctttgtggtataaaaccgcatttggcaattccccatggtgtaggaacccccagctgaanancttgtaaagctggggtatgtggcccctttaagcngaattgnnnactcctntggggaaccctttanggcnncccccgngnaaaaacgggcggatccnggggncaaacgaaangtnaaagccaacccccccnttggggg

SEQ ID NO: 100638 - DNA, 714 bp, Arabidopsis thaliana columbia
  unsure (1)..(714): unsure at all n locations
atgatacttcnnccgncgnaatgnnaacccaaccggcnntgnnancgggggtaacccccattttcccctacaaggccgtcttcttcctccttcaatctctctcgttcgtatcatctgctctgcgatttcaatggcgagccgttggttgagacctgaggtgtatcctttgttcgctgctaccggagttgccgttgggatctgtgcgttttccttgatcagaaacatcaccggaaaccctgaagtcagatgcaccaaggagaacagggctgctggaattttggataaccatgcagagggagagaagtataaggaaaatttcctgaggaagtttgttcgcaacaagaaacctgaaatcatgcctggactcaacaagttcttcactgatcctacatactgaaaccatctttgcacaccgctttgtcgtattgtttctggaattgaatctctttgtgatataaaaccgcatttgtcaatttcacattgttgatgtatcctccagctgaagacacttgttaatgctgggcttatgttgtcacttttaagcagaaaattgtatgacttgcttatggcagcatactcttttaatgaccatctcatctgagagtaataagcacttgataaaaaaaaaaaaaaaaagnnnnnnnnnnnnnnnnnnnnnnnnnnnnnnnnnnnnnnnnnnnnnnnnnnnnnnnnnnnnnnnnnnnnnnnnnnnca

SEQ ID NO: 100639 - DNA, 963 bp, Arabidopsis thaliana columbia
accaagaacaattgggttcttgttgaaataagcatctctttctagcgactttgagagagctgcgacgttgtggactcttgatccaccagagagagatgcttatttggctaacgaatccaccttgatgttcaccaagacaatgggtctgttgaatgctgcacaggctgctctgagctatcaggtctgcaagcttccaagctcgatcaagaaatcaatcgaggaagatgtcgcgcaacacacatctggtgaccttcgtaagctcttgcttcctcttgtgagcactttcaggtatgaaggagatgatgtgaacatgatgcttgcaagatctgaagctaagatacttcacgagaaggtctcagagaaatcttacagtgacgatgacttcatcagaatcttgcaacaagaagcaaagcacagctcggtgcaacactcaaccactacaacaacgagtatggaaacgccattaacaagaacttgaaggaagagtcggacgacaatgactacatgaaactactaagagctgtaatcacatgtttgacataccctgagaagcattttgagaaggttcttcgtctatcaatcaacaaaatgggaacagacgaatggggactaacccgagtcgtgactacacgaactgaagttgacatggaacgcatcaaagaggaatatcagcgaagaaacagcattcctttggaccgtgctatcgccaaagacacttctggtgactatgaggacatgcttgttgctcttctcggacatggcgatgcttgaaactgtttcaactttcgagttcctcctttctcttactgcatggtttgttttaaataaaagagttgtgaaactggttctgcaactatttatcaatgatcgtttgagtttgttaaaaaaaaaaaaaaagggcggccgctctagaggatccaagcttacgtacgcgtgcatgcgacgtcaagatcttctatagtg

SEQ ID NO: 100640 - DNA, 966 bp, Arabidopsis thaliana columbia
tacgactcctatagggaaagacggcacgcctgcaggtaccggtccggaattcccgggtcgacccacgcgtccgcccacgcgtccgcacaaacagaggcagagatcttaagagttaaagactaatcccaacaatggcgtctctcaaagtcccaagcaatgttcctcttcccgaagatgacgccgagcaactccacaaggctttttcaggatggggtaccaacgagaagctgatcatatcaatactagctcacaggaacgcagcacaacgcagcttgatccgcagcgtttatgcagctacctacaatgaggatcttctcaaagcattagacaaagagctttctagcgactttgagagagctgtgatgttgtggactcttgatccaccagagagagatgcttatttggctaaagaatccaccaagatgttcaccaagaacaattgggttcttgttgaaatcgcttgcacaaggcctgctcttgagcttatcaaggtcaagcaagcttaccaagctcgatacaagaaatcaatcgaggaagatgtcgcgcaacacacatctggtgaccttcgtaagctcttgcttcctcttgtgagcactttcaggtatgaaagagatgatgtgaacatgatgcttgcaagatctgaagctaagatacttcacgagaaggtctcagagaaatcttacagtgacgatgacttcatcagattcttgacgacaagatgcatagcacagctcggtgctacactcaaccactacatcaacgagtatggaaacgccattaacagatcttgaaggaagagcggacgacatgactacatgaactactagagctgtatcacatgttgactaccctgagagcattcgagaaggtcttcgctatcatcacaaatgggacagacaatgggacctaccgagcgtgctccgactgagtgcatgacgctcaaagattcacgagaacggttcttga

SEQ ID NO: 100641 - DNA, 1140 bp, Arabidopsis thaliana columbia
  unsure (1)..(1140): unsure at all n locations
caactgttgtggacgaggttgaaatgtctgaggtatctcctgttttccctaaaacagaagagactaatccttgtgacgtcgcagagtcttctcttgtaatccccagcgaatgtcgtagtggatactctgtccctgaggttacaaccaccgggcttgacgatatcgattggctctcgtttatggagtttgattccccgaagctgttctctccgttgcactctcaggtgcaatctgagctcggttcctctttcaatggcttacaatctgagtctagtgaattgttcaaaaaccacaatgaggattacattcagactcagtacggtacaaatgatgcggatgaatatatgtccaagttcttggattcttttcttgacattccctatgagccagaacagatcccatatgagccacagaatcttagctcatgcaacaagatcaatgatgaatctgagagaggagttaagattagagctcgacgagcacaagccccgggttgtgctgagcagtttgtaatgcagggcgatgcctcaagaaggctgcgtcttcaggttaaccttaacagccacaagtcagaaactgacagtacacaacttcaatttatcaagaaagaggttaaggacacaacaacggaaactatgacgaaaggatgtggaaatttcacaagatcaaagagcaggactagtttcatattcaagaaaattgcagccatgggatgttcatacagagggcttttcagagtcggtgtggtagcggttgtgtgtgtgatgtcggtctgcagtctagtcgcataaatccgctgaatgtgatgtttgttccgatcaattcatatagtaagaataaagaaagtggtttttacgggtggagagagcgcggatttgtgtgtataacaggggttttggcctggttctgcatctgttgttattgttgttgtttttgtcggcttaagcttaaccatggtcggtttaggagtgtagtagacttgtagttaacatgtacgacgactcataatattcagatggtaatgtttggaaatttttttaaaaaaaaaaaaaaaaaaaagnnnnnnnnnnnnnnnnnnnnnnnnnnnnnnnnnnnnnnnnnnnnnnnnnnnnnnnnnnnnnnnnnnnnnnnnnnnnnntt

SEQ ID NO: 100642 - DNA, 556 bp, Arabidopsis thaliana columbia
tatacaagagctatgacgtcgcatcgcacgcgtacgtaagcttggatcctctagagcggccgcccttttttttttttttttaaccccaaagtagtcatgtattttgcgagaatagaagaacaaaatgaaagcaaaagatgagattatttttcctgaaaacagcaacaacaaaaaaattaaaaaaagcataacttttttccggtcgatgcttttacgcgttcggattccagggcctccaaaaattggaatggaacaaacccaacacggtccggtaataccttcctcgccaaccctttgtgtcccgtcacattactcgccgccgccggaaaaaccaccaccgtcgattcttcttcttgtccatcttcttcaacaacaatctcatcctccggttctccttctgccacctcagcttcactcaatctaactggtgacgacacgtggctactctcggaaacagtggtctcgttcattggctccacgacgggtttagaatccttatcaccattatccgtgacccgaagagccggtttactatccgaatcagtgacccgacgac

SEQ ID NO: 100643 - DNA, 942 bp, Arabidopsis thaliana columbia
  unsure (1)..(942): unsure at all n locations
nnnnnnnnnnnnnnnnnnnnnnnnnnnnnnnnnnnnnnnnnnnnnnnnnnnnnnnnnnnnnnnnnnnnnnnnnnnnnnnnnnccacgcgtccgataatccgtacactaatgagggatattttgatcggagtcaattacttgcacagccatggtctggctcacacagaactgagattggaaaatgtgcatattagccctgtggatagacatatcaaagtagggattctcggaaatgctgctgactttaacggggatgttccaagtactagcaacgcttacagtaccatggacagacgacaaatgatgatagcatttgacatgagatgtgttggattcatgatggcaaaaatggtacttcaagaattgatggatccattaatctttgcgaaattgaagtctttcctggcaaaggggaatgatccttcctcgctgcgggagttttttgtgacgacgctcaatacaaactctgaatctggaaataccggagtgcaaatacttgatagaaactggggagcaggttggcaccttttatctttgttaattgctaccagaccttctgaaagaataagttgcttggatgctcttaagcatccctttctatgtggaccaagatggcgtgttgccccatcaatggatatcatcagatggggtcttggatcaaccgcagtaaagatttcagaagaatacatttaccgcatgcctcagcgccaaagacttgcccacttcattggactgatggagatgctaaatccttatccaaagccaaacgtatgaattaccacctctcatgattcttgagctttgatatatgtattgcttattctagtgtggtatgtgtgaaaacaaaattgttttaatctcttgtttaacacagtgttggttggagctcttaccgggaagatggcgtcttttatactcaactggaaagcacataggtctaac

SEQ ID NO: 100644 - DNA, 1269 bp, Arabidopsis thaliana columbia
atgatttgccgagcactaatacgactcacttagggaaagacggtacgcctgcaggtaccggtccggaattcccggttcgacccacgcgtccgcggacgcgtgggcggacgcgtgggcaaatccttgatagaaactggggagcaggtgggcaccttttatctttgttaattgctaccagaccttctgaaagaataagttgcttggatgctcttaagcatccctttctatgtggaccaagatggcgtgttgccccatcaatggatatcatcagatggggtcttggatcaaccgcagtaaagatttcagaagaatacatttaccgcatgcctcagcgccaaagacttgcccacttcattggactgatggagatgctaaatccttatccaaagccaaactgttggttggagcttttaccgggaagatggcgtcttttatactcaactggaaagcacataggtctaactctgcgtcagccttccacacgtgccttaataggcaacgttcacttaacgataactcgagcttcagaatccataaacaacacttcactttcctttacctctgatatacgcttcactgccataaccagcaaagactggccacacaacaaaatcggagctgctgggaaattacaaacgctctctccattcagactaatagctggaaaaagcctttcctcaaaaaaagaaaaaagaccattggtaagttctcaatgggtgacccagatgctaaagaaggtttacccgaaaagcttgaaacccgagaaatggaaaaagttcgtgcccttcaaggagtttccgttgagtcttcctgtagcaaaactcgtctctggagaaatcgaagtgccgatgaacatgaatgatcatatagattcacctgggagtgtgattggagaagttagaaagcaaattcccccggaaatgttcgatctttctaagcttgtgtgtgggacttatatagacagtaggttacttgtacttaggtgtgtaaatggttcagcattgttgttcccaaggtccagcttggaccataagtctatgtagccatttggctcacgttcttatgtatatagcaaatgaatcattctttttggggctaacccgttgtagtctctgtgtatgttgtggtaatgtatgcttttggcttttaggtcgtaataacggctttttagtaaaagctttatactaaaaaaaaaaaaaaaaaagggcggccgctctagaggatccaagcttacgtacgcgtgcatgcggcgtcatagtctaactatag

SEQ ID NO: 100645 - DNA, 902 bp, Arabidopsis thaliana columbia
  unsure (1)..(902): unsure at all n locations
ctttccagctacccaaaatgccctctggctagaaagtatccttcaagccacgataatccacttcatgtcctagcttaaaaggatcctatcagtggttagtggaaccaaatgtttatctctgttaccaagttggtgggctttccgcaaaatggtctttatctcactggaagccttagtctactttggtcaccttccaccgtgccttaataggcacgttcactaacgataaccgagcttcaaatccataacaacacttcatttcctttcctctgatatcgcttccctccataaccagcaaagactgccacacaacaaaatcggagctgctgggaaattacaaacgctctctcaattcagactaatagctggaaaaagactttccctcaaagaagagaaaaagaacattggtaagttctcaatgggtgaaccagatgctgaagaaggtttagccgagaagcttgaaaccgagaaatggaaaaaagtcgtgcccttcaaggagtttccgtcgagtcttcctgtagcaaaactcgtctctggagaaatcgaagtgacgatgaacatgaatgatcatatagattcacctgggagtgtgattggagaagttagaaagcaaattccgccggaaatgttcgatctttctaagcttgtgtgtgggacttatatagacagtaggttacttgtacttaggtgtgtaaatggttcagcattgttgttcacaaggtccagcttggaccataagtctatgtagccatttggctcaggttcttatgtatataacaaatgaatcattctttttgggactaaaacaaaaaaaaaaaaaaagnnaagnnnnnnnnnnnnnnnnnnnnnnnnnnnnnnnnnnnnnnnnnnnnnnnnnnnnnnnnnnnnnnnnnnnnnnnnnn

SEQ ID NO: 100646 - DNA, 761 bp, Arabidopsis thaliana columbia
  unsure (1)..(761): unsure at all n locations
tatacaagagttatgacgtcgcacgcacgcgtacataagcttggatcctctagagcggtcgccctttggtttttgttttttttttttacctttttttttttttttaaagaggaattctctcagatgtatttgaattttgtaccaactgtatcattaaaaattaaatctaaaaagtaatggtaaaaactgataacagcgtttttggaaatagtcatggagaaaaagattctaacacaattcacatttaaaaaagaagactaaattgaccgttaagagtgtttctctaaactttaaaatggattagaggagtttctgagttctgcaatgttttgaataaattccctctaacgatatctatataacaaaaaacaaaaaaaagaagaccgaagatgaataaattcttcagaacgtcttctttctagcaacagcttttcgaggttctctcttggcagatgtagtgaacccgggagacgaaattccaaccgtggcttggtagatgtctttcaacctgggggatgctgaggaatagagcaattgccgnaactcccaataacccagtggcaatatagctgcagggtgtcacttcctggctctgatgactgccacaatgctgtatcgagtgggccnctatggntttgggattgggctcgaatnaacttcaatnatcccccggttnnctttntgggggncaaagncggcttgnnttnaggttcacaaaggggtncccttgggannctttttcttggnagagttgngggtgg

SEQ ID NO: 100647 - DNA, 580 bp, Arabidopsis thaliana columbia
  unsure (1)..(580): unsure at all n locations
gaatgnnnnnnnnnnnnnnnnnnnnnnnnnnnnnnnnnnnnnnnnnnnnnnnnnnnnnnnnnnnnnnnnnnnnnnnnnnctttttttttttttttaactttaaatcactctttatataaaagaaaatttaagacagctagattctaaaaggcttccatttactttacaatcaacatccaacaaaaccaacgaagagcatgaaaaaaagagaagcatgatttcatctgaaactagtttagtaagaacaacacaacacgatttaagaggtgttcatggcatcagcgtgatagctctcaagatctttgtcaagatcagcagctgacttctccactggcttctttccatttcctcttccaccaccacgaccacggccaccattaccacgccctctagcacgaaacccgcctcttcctcctctcatccctcctccctgctggttatgaattggaaggcgggcgaactgacagtaggagctgggcctcttcctcctctcccacctctaactcttcctctccctcctcctccttgttggataacaaccgtcctcttcagccttccattgagtccagtgacattcaca

SEQ ID NO: 100648 - DNA, 669 bp, Arabidopsis thaliana columbia
gacgtcgcacgcacgcgtacgtaagcttggatcctctagagcggtcgcccttttgtttttttctttttttttttttttgggcaacaacacgtggttttttaatacatagcaaatgattaaagtttacaacacaatcaattaatcaaacccactaatctagagaagacttttacatgccccagattcctctagctgaagcaactctgctattagagcgggcagggagttcatacaaaatcctagcaaatgaatcagaatacttaccctcttgaaaaagcagctcagcgaaagcattctcatacgcgagtagcaatcctctgttttgaggctccgagacaaggttctcaaggatcattgcagctttcctacatacttctggaaccggatgcggagtctttatcactttcagcaacctatcaaccgcccatctctcacttgctagctttaatctgcaatccatgttaacttccacgagattgtagagtgctccaacagctgcagcttgtgcatcaacggcttgtatgctcaaaagatcgactagtcgcttgtgtatctgcggaattaaaggactaatgaaaggttcattgtccggattgattatcaaacgccctagcaactcagcagcagcacaattccaagctttgacagaagaatcgaggattccgacca

SEQ ID NO: 100649 - DNA, 532 bp, Arabidopsis thaliana columbia
  unsure (1)..(532): unsure at all n locations
nnnaggtgcactatagaagagtcttgacgtcgcctgcacgcgtacgtaagcttggatcctctagagcggccgccctttttttttttttttttttttttttagagacaaatattgaatcctcttaagattttgaaagttgattccactgtaagatacagctcagaagattcggaatcctcttaaacttttacatttcagtacgaatacttcctcctagaaaaatgactacaaaatcttgaatttggattccagaataattctccaaccttgctttatcccgagaccattcgtcgtttcggtagagctcacatcaaactatccacagtattgcaacaaatgatctcacaagaagaagaaagtccttgaacttgatcatccacaatagtttctgatgacataaaagtatgcataccatagatcacatcttaggattatgccctgtaaccttatacttcacgaatacaatttatcgacaaaaagactgaaactctagctaaacttcatcctcctaattgaaatcaaatatctccta

SEQ ID NO: 100650 - DNA, 553 bp, Arabidopsis thaliana columbia
  unsure (1)..(553): unsure at all n locations
cgattgtnnnnnnnnnnnnnnnnnnnnnnnnnnnnnnnnnnnnnnnnnnnnnnnnnnnnnnnnnnnnnnnnnnnnnnnnnnctttttttttttttttttttaaaaagtttctttgcatttttcacatattctgattttctaacttgggccaaaatactagtcagttgtcactgttctaatcaatgcagcgttttcacagaactcaaaaggttgctgaaaaaacatcaaagaatcattcattcccctaacttgtttcttaaatctgccgacattatcatatggcaaaagagacaccaaaccatcaagctggtttaagacgatggaggattcacgtctggctctgggttatcggcatccatttcatcttcaccgggtagagtccctgtccgtagttgcgccaccacgacatgagtaaccatgaagagggttatcancangggcacggtcggattcaaaggngnggttcccncccaantgggggggttttggcctngtccccaggnaatttcgggggggggnnaaaacngtttacggggggggngngnaaaanngg

SEQ ID NO: 100651 - DNA, 1771 bp, Arabidopsis thaliana columbia
  unsure (1)..(1771): unsure at all n locations
gtgttccgccgctctctacgactcactattagggaaagctggtacgcctgcaggtaccggtccggaattcccgggtcgacccacgcgtccgcggacgcgtgggtctaaaacgaaaaaaaagaaaagaagagaagcttttttagttctctctgcccaatggagaaaagaagaaccagagattgccaaatcatcttctgcaaaagcacccatcaaagaaattacttgtaaatagaaaacaaatcatcaaatctggaagacaaatcattaaaaaaggcgacaactttttttggttcagattttgaaaatttgattttttatttttcttatcttggcgatcgaatcctatccgaaagattgaaacttgggaggtgggtaagtgagtgaatggcgcaacaagggcagggaagcatggaccctgctgttctcgacgacatcattcgtcgtttacttgattaccgaaaccctaaagctgggaccaaacaagctatgctcaacgattctgagatccgacagctttgctttgtctctagagagatatttcttcaacagccttgtcttcttgagctcgctgcccctgttaagatctgcggtgatattcatggtcaatactcagatttattgaggcttttcgagtatggaggtttccctcctgcagcaaactacttattcttaggagattacgttgaccgcggaaagcagagtttggagactatttgtcttctgcttgcttacaagatcaaataccctgaaaacttttttctcttaagaggaaaccatgagtgtgcatctattaacagaatttacggattctatgacgaatgtaaacgaagattcaacgtgaagctctggaaagtgtttaccgatacttttaactgtctccctgtggctgctgtcatagatgaaaagatactttgtatgcatggtggactatctcctgagttgatcaatgtggaacaaattaagaacatagagcgtccaactgatgttccagacgctggtttgctctgtgaccttctttggtctgatcctagtaaagatgtcaaaggctgggggatgaatgatcgtggtgtctcctacacttttggtgctgacaaagttgctgagtttttaataaagaatgatatggatttagtctgtcgtgcccaccaggttgtagaggatgggtatgagttctttgctgatagacagcttgtgactatgttttctgctccaaactactgtggtgaatttgacaatgcgggtgcattgatgagtgtcgacgaaagtttaatgtgctctttccaaattcttaagcctgtggatcggaggtcgcggttcttttgaagagaaagagtccttcttaagttataaccctgattcaaatcttatgggaagaatgggaggagaaaaagcgacgacggatgttggtggcggataattctgaacctccacgagtagtctccgaagttgcaaaagcaacaatatatatatttacatggttatatcatctctgccacttcttttgaatatgatcttgtttcttcaactcaattttttgctctgtttccttctctgttctttcacatgtcagagatacaaatcctctaagtgtatataatactttatatgtatgtatcagaacctcactgcaggatgcttcagttcatgattcttattaaaacagagggttctctagacaaaaaaaaaaaaaaacaaagnnnnnnnnnnnnnnnnnnnnnnnnnnnnnnnnnnnnnnnnnnnnnnnnnnnnnnnnnnnnnnnnnnnnnnnnnn

SEQ ID NO: 100652 - DNA, 1492 bp, Arabidopsis thaliana columbia
  unsure (1)..(1492): unsure at all n locations
cggtggcggccgctctagaactagtggatcccccgggctgcaggaattccctttttaggtccaaagatcgagagagaagagaagattttgaattttttttgttttataaagtttcgtcttaagcgatcgattttttgtgcgaaagattgaaactttttggtaagataattgtgttgtgtggttggatcgtggaggtgggtcttctttcgaatggcgcaacaagggcagggaagcatggaccctgccgctctcgatgatatcattcgtcgtttgttggattacagaaaccctaagcctggtaccaaacaggctatgctcaacgagtctgagatccgtcagctttgcatcgtctctagagagatttttcttcaacagcctaaccttcttgagctcgaagctcctatcaagatctgcggtgatattcatggacaatactcagatctattgaggctgtttgagtatggaggcttcccacctacagctaactatttattcttaggagattacgtagacaggggcaagcagagtttggagactatttgtcttctgcttgcttacaaaatcaaataccctgagaacttttttcttctaagaggaaaccacgaatgtgcttctattaacagaatctatggattctatgatgaatgtaaacgtcgattcagtgtgagactctggaaagtgtttacagattcttttaactgtctccctgttgctgctgttatagacgataagatattatgtatgcacggtggcctttctcccgatttgaccaacgtggaacagattaagaacattaagcgacctactgatgttcctgactctggtttgctctgtgatctgctttggtctgatccaagcaaagatgtcaaaggttgggggatgaatgaccgtggagtctcttacacgtttggccctgacaaagtcgcggagtttctaataaagaatgatatggatctcatctgccgtgcccaccaggttgtagaggatggatatgagtttttcgccgatagacagcttgttacgatattttctgctcccaactactgtggtgaatttgacaatgctggtgctatgatgagtgttgatgaaagtttaatgtgctctttccaaattcttaagcctgctgatcgaaagccccggttcttatgaagtaaagagttgaaacctcgcgggaaagaagaggaaaaaggcgatacgaaagcgggagagacatttgaagctccctgagactttgtccggaggccttgcaaaggcaaaaaaacataatttacatgttatatcatcttatttgaactcttgccatttcttttctcaaaacactttatgttcttatgatcttctcctctgactctatatagacagtaaaaaaaagtctgcaaattttcattctttttcaacaaaaaaaaaaaggaattcgatatcaagcttatcgataccnnnnnnnnnnnnnnnnnnnnnnnnnnnnnnnnnnnnnnnnnnnnnnnnnnnnnnn

SEQ ID NO: 100653 - DNA, 563 bp, Arabidopsis thaliana columbia
  unsure (1)..(563): unsure at all n locations
ctatagaagagtatgacgtcgcacgcacgcgtacgtaagcttggatcctctagagcggccgcccttgaaatttatgaaatggatcacaaaaagaaaagaaaagccaaactcaagataaattacaacaagcccactaattttctacacaaactatttacagtttccttttccccctttttttttctggttgtttgtatacaccctcgcattaacagtaaaagacgaagaaggagggtggtaaaaaaagataaataagaaaagctcacatcagagttgggacgatgatctagcaccaccattactaagggatcttggttgccttagaagctcaatcaacgcctcagccttttgcttagctcgacttgttcctgccgccctgggaaacgagcccctaagcgggggtaccgccccttctttagccccattgttntntaaaaaaactnnccccaaaaagngggnnaatttggaaanggcacctttttngncccggggcccccccaaaattncccaaggnngggncccccttcccaaaangggggtttnttcgggcnggnttaaaggnc

SEQ ID NO: 100654 - DNA, 699 bp, Arabidopsis thaliana columbia
  unsure (1)..(699): unsure at all n locations
nnnnnnnnnnnnctatacaagagttatgacgtcgcacgcacgcgtacgtaagcttggatcctctagagcgggcgcgcttttttttttttttttgttttaagaataaaccataagaagaaggttttacaaagaagagacgagccaaatgcttacacaatctgatcaatcacattcactcgagatacacaccacacactcaagaagaaacaaagaagtaagaaaagaaaaggaaaacaacaggggaacgtgacacgtgtgtatgttttcaggggacgaccgagggagatgcggtggtggagcagcatttattaggttggacgagacgagagattgacgcggcggagatgatgagcataaggattacgccggcgaatgcggcgattaatgctccggcgccgggatcacagtaagtggcgaatctgtcacagattttgtcccatctcgcgtgtttgttcccgttctttcctacctcccgccatgaacgccgcccgtgttgctgccgccccattttggagaccatctcagtatgtgaggattgggccccagagagaagacgaccaacccggggcattcccgttttccctctccaaaaaattggaaaaaaacaatttctttacccaatgtttgggggaaggctccgccccctgttggcctatctgctctgacccaccgggagaaatatcccactgcgacatggct

SEQ ID NO: 100655 - DNA, 504 bp, Arabidopsis thaliana columbia
  unsure (1)..(504): unsure at all n locations
ggaagaaacgtaagtatgcagacgggaatataagggaagatcgactggacggatgcaaccaaataagaacgctgtttctcataaaggagcaaaatcagtggaagtgaacagaaagatgcacaaagtaacggtgagtggctacgttgatcccaagaaagtgctgaagacagtgcagagcactgggaaaaagaaagctgagctgtggccgtatgttccatacacaaatgggtggcttactccatatgcccgcccggagcttacgacaagagagccccgccgggttttgtggggaagtcggagcaggctcaggcgcagccgggaagtactgacgataagctcatgtccctctttagcgacgagaaccctaacgcctgcaccgttatgtgaataagtatagatngcatgagccgatgttataatttgtaatgtataacgttttatgaagttaaagtactggaaccttttttgttactgtattatgtgagaagcaacgcaanatatagt

SEQ ID NO: 100656 - DNA, 535 bp, Arabidopsis thaliana columbia
  unsure (1)..(535): unsure at all n locations
atctccctctccatctctctgctcgcttgtgacagtaaacatgggagctctcaattatctttctgagtatttctctaaccatttctacgtctcaatacgaaaacggaagaaacgtaaagtcatgcagacggtgaatattaaggtgaagatcgactgtgacggatgcgaacgcaaaatcaagaacgctgtttcctccatcaaaggagcaaaatcagtggaagtgaacagaaagatgcacaaagtaacggtgagtggctacgttgatcccaagaaagtgctgaagacagtncagagcactggggaaaaaggaagctgagctgtggccgtatgttccatacacaatggtggcttatccatatgccgccgggagctttcggcaaagagggcccccgccggggtttttttaaggaaagttcgggagcaggctcaaggcgnaccgtggaaagtccttccgggttaagcctcatggcccctcctcttttgcgncgggnaccccttaacggcttccccgttttttgntnagtttggttgcatt

SEQ ID NO: 100657 - DNA, 481 bp, Arabidopsis thaliana columbia
  unsure (1)..(481): unsure at all n locations
annnnnnnnnnnnnnnnnnnnnnnnncgtcccatgcacccgtacgtaagcttggatcctctagagcggccgcccttttgttttgttgttttaaccaaaaaggtattacattacaattttacaacaatgttcaactacgttcacaactctacagagatacaataaacacacaggagaaaacagcttcagtaaaatagcaacagcttgttgtgttaagcaactaaaaactgtaattaagggagaatgggaaattaacatagtgcaaggaataaaacataattagccaaatatataaaaactttggggtggttgggttgaagctatgtctgctctgacctgaaccagtttctctgtactctctggctcaccaaagaccagtgagtgattccatctctgcaatgtccaaggatccacatgtctttgggttttctcactatgcctctcattctcagtttccttcatcgcacttttttttttccttt

SEQ ID NO: 100658 - DNA, 473 bp, Arabidopsis thaliana columbia
  unsure (1)..(473): unsure at all n locations
tnnnnnnnnnnnnnnnnnnnnnnnnnnnnnnnnnnnnnnnnnnnnnnnnnnnnnnnnnnnnnnnnnnnnnnnnncctttttttttttttttctatccctgaattacatgatagttactcattatcatggattttacaaattaatacggttaatctaataaaagttactcgaaaatgacatgatcattagcaaacaataattcacaactaggtgtaaagtttaagtatcttcctcttacgttgctattaaagacgtttccttagtgttcttgagacgttgaagcatcagttcgtagagagcgaatccgccatgatggcaacctggcattctcgatgtcatcatcttcagctcatccaatgagacagtgtggagctgtgttgactcgaaccatcttcagcgctagagtataatctttggatgtcatctgaatgatgactacacttgaggtagaaaaacatagcttggtcttacat

SEQ ID NO: 100659 - DNA, 452 bp, Arabidopsis thaliana columbia
  unsure (1)..(452): unsure at all n locations
nnnnnnnnnnnnnnnagagttatgacgtcgcatgcagcgcgtacgtaagcttggatcctctagagcggccgccctttttttttttttttttttttaaaccgggaaaattcactttattatttctctattttttttcccctgaaaaatcaatcacatgaatgtgtcttcacactactacatatacaacaaacatacacacagagagagaaacaaacttatgtaatttccacaaagaaagagagagttttaggaaaaaatatcaagaggacgagctggcctctatgctagtagtagacatctcttggaacatggaagtttcttcaacatgccacttgagaatctctctcgcatacctcagggcattggccacagtatcactctccaagctcacttgacaaacaaacaattttggcttaaagctccttccacgcatatttacgggttccaagatt

SEQ ID NO: 100660 - DNA, 683 bp, Arabidopsis thaliana columbia
  unsure (1)..(683): unsure at all n locations
atttnnnnnnnnnnnnnnnnnnnnnnnnnnnnnnnnnnnnnnnnnnnnnnnnnnnnnnnnnnnnnnnnnnntttttttcttttttttttttcgtttttgcatgagagaaactaataaaaacccaaaaatcaaaagggtgttcaagttgggcatgaatcctaaaggagcttatgttaaatggtatacacaaacaaagctgcttatcttaaaactactacttctcagcgtcgtcctccctccgactccaaaagtttttttagaaaaaaaaatatatcttgcttgtagtacaattccagactaaacaaccaacaaattacattctctgatatatttgcctaatgaccaaggctaggcaatcgaggaggcacccttgacgattagctagtaagtcaactagattcatgtcctttgtgattaagctttaacctcctctccaccacccgatcctttagctttctctttctcttcttcttcctcatgctcagcatcctcttcttctccttcctcatcctcggcttcatctgctagcttagttagctcatcttgggatcancgctttaaagatgaattttttgaggcgagactgatgtggactaagcannagncgctgaggangcagtgaaagnggccgngtgaaagccncccttcaagaacaaaatgnggtnaatctcacggagggcntt

SEQ ID NO: 100661 - DNA, 467 bp, Arabidopsis thaliana columbia
  unsure (1)..(467): unsure at all n locations
gatatgnnnnnnnnnnnnnnnnnnnagagttttgacgtcgcatgcacgcgtacgtaagcttggatcctctagagcggccgccctttttttttttttttataatcaagatctttctttctattcaaatgcaagcaaataagtttgactcaacaatatatatcatttacatatatataattggacaatatgcacttttcttgtcactacaattcatgaagaatgagtcagatgcaaaaaaaatgaatagggggcatctgtatcaggggtttccttggccgtcagtcttcacagcttcaacgaatacgattcacgtgagaaaatggctcggaaactgcttttggagcagcttttttggcgggctctggtactccaaaaacattccagaacctcagagtctcatctcctgctgctgaagctacggtacaaccatctggactctgggccatatatagaactcttgatgtatg

SEQ ID NO: 100662 - DNA, 455 bp, Arabidopsis thaliana columbia
  unsure (1)..(455): unsure at all n locations
annnnnnnnnnnnnnnnnnnnnnngacgtcgaacgcacgcgtacgtaagcttggatcctctagagcggccgcccttttttttttttttttgagaattggagcagaaatattaaagctaccgctaaattttggataataacaatcatacaataaattcatgtagcagcagagtcaacctacatggctacataccaacactaatgttcatcaaataactgaaaatgccagattctagtccaggggaaacatcatgtaatttatttattttagaaagaaaaactatctcagaattctctctcttactcttcagccatttagccactaggattatcaagtccttcaggaaccttcccaggataggtttgtggtctctgcagagtcagtccccaggttccctccatccacgataaccattgagcgaagctcacagttgctcaaatgtatagacaactctt

SEQ ID NO: 100663 - DNA, 463 bp, Arabidopsis thaliana columbia
  unsure (1)..(463): unsure at all n locations
nnnnnnnnnnnnnaggcgannnnnnnnnnnnnnnnnnnnnnnnnnnnnnnnnnnnnnnnnnnnnnnnnnnnnnnnnnnnnnnnnctttttttttttttttgagttttgattgcttgaaaagaaagataaaagagataaagtgcacaagtttgatacattcttcataaacacattttagagaagctaactcaaagctaacaaagttaaactgaaagccatatactgattctgttttgccattcacaaaatgcagagccaaagttaaactcaaagtcgtattcattcattgagagcattgagagcaaagcgtgaagcttcctgagaacattgaccttgtccctgaggtaataaaggttggctcttcttactttcttcttggtcaccaccttaatcttcctaaggtttggagaatacttgtcaccaaacaccaccagttacatcagtattttcaatgaccaaggca

SEQ ID NO: 100664 - DNA, 480 bp, Arabidopsis thaliana columbia
  unsure (1)..(480): unsure at all n locations
nnnnnnnnnnnnnnnnnnnnnnnnnnnnnnnnnnnnnnnnnnnnnnnnnnnnnnnnnnnnnnnnngcggccgccctttttttttttttttgaaaaataaggtgtcccgttttatgcctcgagttcccagattttgtagcctgtttacatctgaatagtttgtagcaatgcatttttacacaaaagaaattgagttgtctcagtgacccacaacactacaaggctgcaacttttcttcaaaagcgggttcagctttgcctccacaagagctcctttgactcaagggttgattctactaagtgtattcccctatgtatagcttgaaaacgaaacaaaaagctttcgaaaccaaacccacgggcttaaaggttgtgcccttgctttgaagcttttccaaggctgctcgtttatgatgattaccttgctcggatgtattttggcggataaaattgacagccaaatgtcgacaggtccacagtac

SEQ ID NO: 100665 - DNA, 488 bp, Arabidopsis thaliana columbia
  unsure (1)..(488): unsure at all n locations
gatttnnnnnnnnnnnnnnnnnnnnnnnnnnnnnnnnnnnnnnnnnnnnnnnnnnnnnnnnnnnnnnnnnnnnnnnnnnctttttttttttttttaaaaaacaaattctttattttgtattcatcaccatttgtaattttgtattattacaaaagaaatacaagtaagctggagtttaatgtaaagtctttgaaaccagaaataaaagaggcaagaaaagggagataaagacaagttttcaaaacattgctctccatgaataccacttgagtttaaactgaaacaagagtggaggaacaccaagaactcctctttgaatcctgggatcaaacacatcgaattgtactttatttaacgaatccagaagaacttgtaccggcacagaatgaagcagtaccggtttagcttctgcaggaacctttcccgccagttcacgggctttcagggagatgtgcattggcaaacagatgcaatcttcaaaacacggc

SEQ ID NO: 100666 - DNA, 293 bp, Arabidopsis thaliana columbia
gccttttttattcttatttcaagagataattttgttcatgttttgaagttgtcctctctctcactcttcatttcaaaagcggtaacagtaccaaattagcaattaatgcgtttttcttttctgagtgacttgttcctacagaaccttctctatggaatcacagggacaaaaataaacctcctgcaatctcataatcccaatttcctacacagaacagtcccaccggaatcaatgtgacaagatgagaagatgagaagacattttttgtttgttggcccttcaactcaaatctg

SEQ ID NO: 100667 - DNA, 794 bp, Arabidopsis thaliana columbia
ccaacctctaagttccttcaagcacagagcaaagtggttgctattgcttggattggatttgtggctctttcccttcacgttattatgctctggttgtttataatcgagtttggttgggggacaaatggtgctgctttggcgtttaatattacaaactggggaactgcaattgctcaaattgtttatgtgattggttggtgtaatgaaggctggactggtttatcttggttggcttttaaagagatttgggctttcgttagactctccattgcatctgctgttatgctttgtcttgagatctggtatatgatgagtatcattgttcttactggccgtcttgacaatgcagttatcgctgttgattccctttctatatgcatgaatatcaacggcttggaggctatgttattcatcggaataaatgcagctataagtgtccgtgtatccaatgagcttggcctaggccgtccacgagcagctaagtactcttgtctatgtcacggtcttccagtctctcctcattggtcttgtctttatggtggctatcatcatagccagagaccattttgctatcatcttcacaagcagtaaagtacttcagcgtgcagtgtctaagctagcttatcttcttggtataaccatggttctcaacagtgtgcagccggttgtttctggtgtggctgttggaggcggttggcaaggcttagtggcctatatcaacttgggctgttactacatttttggccttccctttggatatcttcttggttacattgcaaactttggagtgatgg

SEQ ID NO: 100668 - DNA, 661 bp, Arabidopsis thaliana columbia
ggtcaagtcaatatgttaggagtttatatgcagagatcttggattatctgggtcgtttcttgtttgttggtcgttcctatttacatctttgccacgccggttctgagactactcggtcaagcagaggagatcgctgttccagctggacagttcactcttctaaccataccacagctcttctcactggcctttaatttcccaacctctaagttccttcaagcacagagcaaagtggttgctattgcttggattggatttgtggctctttcccttcacgttattatgccctggttgtttataatcgagtttggttgggggacaaatggtgctgctttggcgtttaatattacaaactggggaactgcaattgctcaaattgtttatgtgattggttggtgtaatgaaggctggtctggtttatcttggttggcttttaaagagatttggcccataaaagattttaaaacttcaaaaacagaggtgttgttatgcttcttctcttgtgcattaaggccgtttatgatggtatcctagaatctacatatttgccatatcttattcgttaataaagatattttctttggtgcaaaaaataaaaaaaaaaaaaacccaaaagagcgaccgctctagaggatccaagcttacgtacgcgtgcgtgcga

SEQ ID NO: 100669 - DNA, 1521 bp, Arabidopsis thaliana columbia
ggagccgcacgtgtgctttccttttttctccttccccgttctctagccgattctctctgtctagggctcctccgtcttcttcttctcataccttcacataccacaaaacctctcttctctctctattgattctctacgaagaggaaagtgattttgaaccatcttgatcggaaacggcgtttcgaaactggaggtcgaagacgaaaaaaactcttatctcatcgctccggtgtaccgaattcgagaggtttttgttaggtttcgtagtgattgattgattttgatggaagatagtgtggtggatgatgttataaagaggttactaggagcgaaaaacgggaagacgacgaagcaggttcagttgacggaggctgagattaaacatctttgttctaccgctaagcagatctttctcactcaacctaatcttcttgaactcgaggctcctattaagatttgtggagatactcatggtcagttctcagatcttttgagattgttcgagtatggtggctacccaccagctgcaaactatttgtttcttggggattatgtagatcgtggaaagcagagtgtagagaccatatgccttcttcttgcctacaagatcaaatacaaagagaatttctttcttctacgtgggaaccatgagtgtgcttctataaaccgtatatacggattctatgacgagtgcaagaagagatatagcgttcgagtgtggaagatatttactgactgctttaattgtctacctgttgctgctcttattgatgaaaagatcctctgtatgcatggtgggctatcgcctgagttgaagcacttggatgagatcaggaacattcctcgtcctgctgacattcctgatcatggactactgtgtgatctgttgtggtctgatcctgacaaagacattgaaggatggggagagaatgacaggggtgtctcgtacacttttggggctgataaagtcgaggagtttcttcaaacgcatgaccttgacttaatttgtagagctcatcaggttgtggaagacgggtatgaattctttgcaaatagacagctagtaacgatattctcggccccaaactactgcggagagtttgataacgcaggagcaatgatgagtgtggatgattccttgacgtgctcatttcagatccttaaagcatctgagaagaaaggaaacttcgggtttggcaaaaatgcaggaaggcgaggaaccccgcctcgcaagggtggtggaaaaggctgaagacaaatcccataaactctgttttgtgtattccatgtttcttggttcaagacacttgcttgatcagctgaacttatcaaactgtcttcttcttcttcttcctctgctctggatcactttggcaaggggtacttctgtcttttcccttgactactctggatcacttggtgtctttgacctctgtgaatctgagatattattctctgtgagatacactttatgtcgttttttgttaaaacatttaaatgaaaatcataatgttcctcgtc

SEQ ID NO: 100670 - DNA, 591 bp, Arabidopsis thaliana columbia
ctgtgccgtcctgtggaaaacatcgttctttcaccaacaatggcgaagaagcgagatcgaattgtcaacactcaaccttttatctccgatgacgcctccgtcgcttcttccaggaaacgatcaaaggttccaaaaacccatcagaaacaggaaaagttgattgaagctggtatgagcgagaagatcatgaaacaagctcttgcccaacaaaaggaagttgctgatgaagagaacgccgagagaaaccctagtagcgccgcttttgctgttgccggcgctgcgactgctggagaggagcagaaaattctggaggaggaagaagatgatattgatgattttgatggaacctttgaaaaccagagccaattcgataagcaagaggagattaatgaggatgatgagaagttgtttgagtcattcttaaataagaatgctcctcctcaacgtacgcttactgatatcattatcaagaagctcaaagataaggatgctgacttagctgaagaagagcgtcccgatcctaaaatggaccctgcaataactaagttatataaaggtgttggcaagtttatgagtgagtatcgtgggaaa

SEQ ID NO: 100671 - DNA, 662 bp, Arabidopsis thaliana columbia
tctactacgactcactatatggaaagctggtccgcctgcaggtaccggtccggaattcccgggtcgacccacgcgtccgcggacgcgtggggtctcaaaaacactcggcataaaattcagctctttaagaaaaaaattcagaggaaaattaaaaaaagtggatataatagagaaaaaggtaaaggaaaggaatagtgagagagagagagggagagatggtcttcttgtttagaacatgttgtttccaattattctaagaatggcgttttaggtaaatgatcacagcttattacagatggaagagaagctgactcaatttgtggtttagatttgtcaaagaggatcgtgtggaatctgaaagttttcaattttcactaaaaataggattagagttaaaaaggaggaagaagaaatggggaaacacaaatctttcagaagcaaagcagtgcactttgtcaccgatctcaccgctggtcttcttaatcccatctctgataaaccctcctccgctcatcctcctcctcctcttccggatgaggaagatgagtctaagagaaatcagctagagtctacaactgctgagcagcctaaggatttggttgacgaaccagacacttcttctttctctgcattccttggttcactgttatcttcagatccca

SEQ ID NO: 100672 - DNA, 1243 bp, Arabidopsis thaliana columbia
tcgcatttattaacatttttatctctctccctattaaattattttattctctcttagcaacattcatcaaccagagcagattcactatcatcatcttataacacatcttcttcctctaaagtttattttcttaaacttattacaaaaaacatgatcttcaaaagttgatttaatctctttttatccatcttcttcttcatttctcaatatcaaacttttctttttttgtaagcttaacataaaccctaatattttcttgatttttttcaagaaaataaaaacataaagatgcttgaagttagatcaatggatatgactccaaaatcaccagaacccgaatccgaaactccgacccggatccaaccagctaaaccaatctctttcagtaacggaatcatcaaacgccaccaccaccaccaccacaacaacaacaaagtcacttacaaagaatgtctcaagaaccacgcggcggcgattggtggtcacgcgcttgacggttgcggcgaatttatgccgtctccttcgtcaacaccttccgatccaacttctctcaagtgtgcagcttgtggttgtcaccgtaacttccaccgttctcagatctaaacttcgccgccgcggctaaccatctctccgccacgcctggctcgaggaagcgattcaggacgaagtttagctcaaatcagaaagagaagatgcatgaattcgccgatcgaatcggttggaagattcagaaacgtgacgaagacgaagttcgtgatttttgccgtgagatcggagttgataaaggtgttctcaaagtttggatgcataataacaaaaactccttcaaattctccggcggaggagcaaccaccgtgcagagaaacgataacggtatcggcggcgagaacagtaacgatgatggagttcgcggtttagctaacgacggtgacggtggtggtgggagatttgagagtgatagtggaggagctgatggtggcggaaacgtaaacgcctcgtcgtctccgtcgtgaagaagaaaacatcatgtcgttttgcagggaaagagttataataatggaagcttaagctttgtttttagctttagatcatagagagtaagcactggtattattatcgttaatacgttttattcatattaattaaactcttttagctctttaaaaaaaaaaaaaaaagggaggccgctctagaggatccaagcttacgtacgcgtgcatgcgacgtcatagttcttctatag

SEQ ID NO: 100673 - DNA, 877 bp, Arabidopsis thaliana columbia
  unsure (1)..(877): unsure at all n locations
cccaaacgtccggaaacatgagaccaactcaagttggttgttcgtgtaataaataaaaattgaatctttcgactaaaacaaagtttatcttcttcatcatcttatgtgacaagaacgaacaatcctccattgacccaaatttcgaaaatgtcaacgaatcttcttcgtcttattctcctagtcatcactttatctatcacttcatctctgtcaactccgtcgccggctgattctcctccttatctatggccgttaccggcggagttttcgttcggaaacgaaacgctctcggtggatcccaccgtgactctaatcgtagctggaaatggcggtggatctctgattattagagctgcgtttgataggtatatgggtataagctttaaacacgcttctggtagaggttctctattgtcgaggattagatttctgaaaatggttgagtatgatatcacttctttgaagatccgttgttcattctgattctgaggagcttcaattgggtgtggatgagagttatacattgatggtgtcgaagaagaacgagcaatcgattgttggagcagccacgatcgaggctaatacagtttatggtgcacttagaggattggagacatttagccagtttgtgtgcctttaattatataaccaaatctgtgcaaatatataaagcaccatggtatattcaagataaacctagatttggataccgcggtctgctgatagatacatcaaggcattaatttaccaattgatgttattaagcaaataatcggatccatgtcctttgccaaaccttaatgtcctgcattggacattgtagncgggnaannatttnccnttnaaacncctncatnncccnaatttttgggaagng

SEQ ID NO: 100674 - DNA, 1591 bp, Arabidopsis thaliana columbia
gacttcaattcaatttactttcgattttgtcctcttccaaaaacccttccgcttaaaccctaattcacttcgccggccatgtcgacactcgagggatggatttccggcggataagctcttcgctcaaggatactcttacacctacgacgacgtcatctttcttcctcacttcatcgatttctccacagacgctgtttctctatccacgcgccttagccggcgcgtgcctctctccataccttgcgtttcgtctccgatggatactgtttcggaatctcacatggctgctgctatggcttctcttggtgggattggaatcgtccactataactgtggcatcgccgctcaagcatcgattattcgccaagctaagtcgcttaaacatccgattgcttccgacgccggtgtgaagttcccggagtatgagattacttctttagatgcttttggtccttcttccttcgtttttgtcgagcaaacaggaacaatgacgactcctaaattgttaggctatgtaacgaaatcgcagtggaagagaatgaattacgaacaaagggagatgaagatatacgattacatgaagagctgtgatagcagtgactattgtgtaccatgggaaattgattttgaaaagttggagtttgttttagaagataagcaaaagggctttgtggttcttgagagggatggtgagactgtgaacgtggtgacgaaagatgatatacagagggttaaaggatatcccaagtctggaccagggactgtgggcccagacggtgagtggatggttggtgcagcgataggtacgagggagtctgataaggagaggcttgagcatttggttaatgttggggtcaatgctgtagtgttggatagttcgcaagggaactctatttaccagcttgagatgatcaagtatgtgaaaaagacttaccctgaattggatgtgattggtggcaatgttgtgacaatgtaccaggcacagaatttgatccaagcaggagttgatgggttgagagttggtatgggatctggttcgatatgtaccacacaagaggtttgtgcagttggtcgtggacaggctactgctgtgtacaaggtttgttcgatcgctgctcagagcgggattccagttatagcggatggtggtatctcaaattcagggcacattgtaaaggctctcgtccttggagcatcaactgttatgatgggtagctttttagctggaagtactgaggctcccgggggttacgagtatacgaacggtaagaggatcaagaagtaccgtggaatgggatcgctagaagcaatgactaaaggaagtgaccaaagatacttaggagatcaaacaaaactcaagattgctcaaggagtggttggagcagtcgcggataaaggctcagtgttgaagctgataccttacacaatgcacgccgtgaaacaaggtttccaagaccttggtgcttcttccttgcaatctgctcatggtctgttgagatcaaacatccttaggcttgaggctcgaactggtgctgcacaggtcgaaggaggagttcacgggctggtttcttatgaaaagaaatcgttttaa

SEQ ID NO: 100675 - DNA, 565 bp, Arabidopsis thaliana columbia
  unsure (1)..(565): unsure at all n locations
tgtttagtacacaacagcaacatcaaactctaataaacccaagttggtgtatactataatggtgatggctggtgcttcttctttggatgagatcagacaggctcagagagctgatggacctgcaggcatcttggctattggcactgctaaccctgagaaccatgtgcttcaggcggagtatcctgactactacttccgcatcaccaacagtgaacacatgaccgacctcaaggagaagttcaagcgcatgtgcgacaagtcgacaattcggaaacgtcacatgcatctgacgggaggaattcctcaaggaaaacccacacatgtgtgcttacatggctccttctctggacancagacagggcatcgtggtggtcgaagtccctaagctaggcaaagangcggcagttaagggccatcaagggagttgggccagcccagtcaaaggtcactcatgtcggtttttgaactacctccggggttggcatgccttggtgctgctttccagttaccaggttnttggcttcggcttccgtaggggttatgtttccaaaggttntttncggng

SEQ ID NO: 100676 - DNA, 1531 bp, Arabidopsis thaliana columbia
  unsure (1)..(1531): unsure at all n locations
nnnnnnnnnnnnnnnnnnnnnnnnnnnnnnnnnnnnnnnnnnnnnnnnnnnnnnnnnncgggggggagccacgcgtccgcacaacagcaacatcaaactctaataaacccaagttggtgtatactataatggtgatggctggtgcttcttctttggatgagatcagacaggctcagagagctgatggacctgcaggcatcttggctattggcactgctaaccctgagaaccatgtgcttcaggcggagtatcctgactactacttccgcatcaccaacagtgaacacatgaccgacctcaaggagaagttcaagcgcatgtgcgacaagtcgacaattcggaaacgtcacatgcatctgacggaggaattcctcaaggaaaacccacacatgtgtgcttacatggctccttctctggacaccagacaggacatcgtggtggtcgaagtccctaagctaggcaaagaagcggcagtgaaggccatcaaggagtggggccagcccaagtcaaagatcactcatgtcgtcttctgcactacctccggcgtcgacatgcctggtgctgactaccagctcaccaagcttcttggtctccgtccttccgtcaagcgtctcatgatgtaccagcaaggttgcttcgccggcggtactgtcctccgtatcgctaaggatctcgccgagaacaaccgtggagcacgtgtcctcgttgtctgctctgagatcacagccgttaccttccgtggtccctctgacacccaccttgactccctcgtcggtcaggctcttttcagtgatggcgccgccgcactcattgtggggtcggaccctgacacatctgtcggagagaaacccatctttgagatggtgtctgccgctcagaccatccttccagactctgatggtgccatagacggacatttgagggaagttggtctcaccttccatctcctcaaggatgttcccggcctcatctccaagaacattgtgaagagtctagacgaagcgtttaaacctttggggataagtgactggaactccctcttctggatagcccaccctggaggtccagcgatcctagaccaggtggagataaagctaggactaaaggaagagaagatgagggcgacacgtcacgtgttgagcgagtatggaaacatgtcgagcgcgtgcgttctcttcatactagacgagatgaggaggaagtcagctaaggatggtgtggccacgacaggagaagggttggagtggggtgtcttgtttggtttcggaccaggtctcactgttgagacagtcgtcttgcacagcgttcctctctaaacagaacgcttgccttctatctgcctacctacctacgcaaaactttaatcctgtcttatgttttatataatataatcattatatgtttacgcaataattaaggaagaattcatttgatgtgatatgtgatatgtgctggacaggtctattcgactgtttttgtactctcttttttgtgtctttttacaatattaaatctatgggtcttgaatgac

SEQ ID NO: 100677 - DNA, 1458 bp, Arabidopsis thaliana columbia
ttcgtccccatctccgtttctgatactttaattaatactcattgaaaaaatcaattcgaactaaaaaaaatctcgaagagtgtgggcgcgtaattttcttctttattttgttctcactgattattttgcattagctcttttcttttttggggtcgaaaaaattaggtttttttttgggattctgttgatggcgacgacgacgacgacgcaggggcagcaaacggcgattgactcggcggttctcgatgatataatcaggcgactcacggaggtccggttagctagaccaggaaagcaagtccagctctctgaagctgagatcaaacagctctgtactacagctagagatattttccttcagcaacccaatttacttgagcttgaggctcccatcaaaatctgtggtgacatacatgggcaatatagtgatttgttgaggctatttgagtatggtggcttccctcctagtgccaattatctatttcttggggactatgtggacagaggcaaacagagtcttgaaacaatatgtctcttactagcttacaagatcaaataccctggcaacttttttctactaaggggaaaccacgaatgtgcttctatcaataggatatatggattttatgatgagtgtaaaaggaggttcaatgtgagagtatggaaggtttttactgattgttttaactgccttcctgttgcggcgcttatagatgacaaaatattgtgtatgcacggtggactttcgccggatcttgaccatttggatgagattagaaacttgccgagaccaactatgattccggataccgggcttctctgtgatttgctctggtctgatcctgggaaagatgttaaaggatggggaatgaatgatagaggtgtttcatacacctttggtccagataaagtttccgagtttcttacgaaacatgatttagatcttgtgtgtcgtgcccatcaggtcgtggaggatgggtatgagttctttgctgatagacaacttgtgacggtgttttcagctcctaactactgtggtgaatttgataatgctggtgcgatgatgagcgtggacgagaaccttatgtgctcgtttcagattttgaagcccgctgagaagaagaccaagttcatgatgtccacaaagatttgatactttcattgagatggatttggtctttcttgagaaattgattgaaaccattgaagatttggctgtgaagtgtgtacttatggtagtgagaactcttggaaaggagcaagaccttcttagtcttctaatctctttcttcccccaaattcactttcagcattttttttctatcttcttttatgggttttacatgattttcatctgcctgttgggatcacatagttggtgtgtacatgcatatggtcgtttcttggattttaggacaccaaatgaaaatgatgttataaaaaaggtttagtatgatg

SEQ ID NO: 100678 - DNA, 390 bp, Arabidopsis thaliana columbia
cttaaaacttcaaacacttgagaaaaaagcttttgatttcacatcttaatctaacaagtcaaacacttttcaaaccacaaaattcgtcaaagctctgaaacaaataaacattttttaatttctccctttttaatggaaatctcttctttcccatttccatacctacaagacgacgagtgttcccatttccttggtctatttcaagacatggactcttctccttctactttcggattagaaggttttaatagcaacgacaataatactaatcaaaagaaacgcccaagaaaagacgacgaaggcggtggtggtggcggcggaggaacagaagttctaggagctgttaatggtaataataaggctgcttttggagatatactcgcgacgctt

SEQ ID NO: 100679 - DNA, 698 bp, Arabidopsis thaliana columbia
  unsure (1)..(698): unsure at all n locations
aattttagcttcattccttcttttgctctgatcaaagtcttctccttcccttctctctctctttcctcctctgcacatttctgggttcttctcttcttatgctctgtttcttttaagacacagaagaaacagtacagagttgagattttcttaaacaaaagtgaaaagagaagaaacaagtgacagctcaaacggacaaaaaccactcttgggtctttcttgcttctgattctttctcttctctaatagaagaaaacatctagaagctaaaaaaatgtcggaaggagtagaagcgatagtagcaaatgacaacggaacagatcaggtaaacggaaaccgtaccgggaaagataacgaagaacacgacggctccaccggttctaacctaagcaatttcctatggcacggtggctctgtctgggacgcttggttcagctgcgcatctaaccaagtggctcaagtgttattgacattaccgtactcgtttagtcaactaggaatgttatcaggaataggacttcagatcttctatggtttactaggaagctggactgctgatctcatctctgttctcttacgtcgaatacagagctcgtaaagaataacgaaggcagaagctttcaaaaaccacgtcattcaggggtttgaaatgcccttgatgggacttncntnggtcntacctggtaagaccnaggnct

SEQ ID NO: 100680 - DNA, 862 bp, Arabidopsis thaliana columbia
gcacgcgtacgtaagcttggatcctttagagcgggcgcgctttcttttttttttttttaacaataaagaattttaaataaaaactgatgttttaaactcctgaaaaccaaaactccatgaataaaaaaggtttttacgtgtaatgcaacaacactctctcttggacagggtaactttttaaccttcgcgtggggttttgaaataccaaacctctagatagttcagttaacagcagagggggggattttttgaatcccacacagctgcctcgtaaagagacaaagcgcgtatagggggttgttgttgctgctgctgctgctgctttgcacccccttgggttggttcgaaacttcttattaaaaaacgcttttagtaactcctaaaatggtggagttctaagcttttaatggactcaaggttgggatggcaattggtttttttttgcggggaacataggggttcacccctactatttctaagaaaactttcccctgtttcctgggcctttaggctgggagggggaccctttttacttattaagtctcacagatgggaagacatgggtggcccctttacctcctttttatcaattcaatgattgccgaggaagagggggcttttttttccccataaaaacttaaagggggtgaacccgggccaaaatgaggaagggtgtttttttggcctcctcccccttttacggggggccaaaagacccctttgtttttttaaagggaaaggaggtttgagcctccccttggggcgcctatgtgggttctcaaaaaggaaagaactttgtggagttttccccttaactggaagcgcccggggggggtttctttccaggaacccctctttatgg

SEQ ID NO: 100681 - DNA, 637 bp, Arabidopsis thaliana columbia
  unsure (1)..(637): unsure at all n locations
acgtaagcttggatcctctagagcggcggcctttttttttttctttgccggtttttgcatttttaaactgtttaaatttaatacacaaaaacactacaaacaaccactagcaagtagcaatgcttataagggatcactcaagtggattgaggttgtatataccaataagtagacacacgaaatatagctccggtaagctggaaaattgagcaaaccaaactgtatggttaatgtcagtcatctccccaagcatcttcccgttgtttctgtctcgagacaatccggtttttccgggcagcttcttggtctcgctctttagacccgaatccagaagccggtagcttcaatcccatgctgtgagcaatcaaccgttgagctgttttcgctgatgtctttggtctttgagacggcggttccaaatcttttccagaaattgagcccaaaaggggatcgttatcatcgagtacacgtattgtgaatgaccattggacatgcttgcaagcctctttgngcagcttnagggggnttttaggntncaagtgctnttgnttatttgcccangggtgtnaatccccatnttttnaggctttaaaaaggtntccattcaggaggtntnaactttgggngaanccncang

SEQ ID NO: 100682 - DNA, 600 bp, Arabidopsis thaliana columbia
  unsure (1)..(600): unsure at all n locations
cnnnnnnnnnnnnnnnnnnnnnnnnnnnnnnnnnnnnnnnnnnnnnnnnnnnnnnnnnnnnnnncaacaatcccacgcgacgtagtctcaaaggtcacagcagcagcagcaacaatcagagcaacaatggagtctgctaaatcaaaaaatcccgatagctaccaaaatatcttgatgatgcgtcacggtgatcgcattgacaaaatcgatccactctggcttgatacagctgcgagaccttgggatcctcctctcgttcaagacggtatggttcgtgcgtttcaaactggtcaacggattcgatctcagatccaatttccgattcaccgtgtcttcgtctctccttttatccgatgtatacagactgcttccgaagtcatcgctgctctctccgccgtcgatttcgatcctaacgctacttcgtccaaagacgtcacttcaatcgataaatataagcttaaggtttccattgaatttggtttgagtgagatgctgaattcaattgctattaagcctgagattgctcccaaagatgggaaattcgatttcatgatttcagaacttgaagcgatttttcctgatggaatggttgatcatagt

SEQ ID NO: 100683 - DNA, 433 bp, Arabidopsis thaliana columbia
ctatgacaccgcatgcacgcgtacgtaagcttggatcctctagagcggccggcctttttttttttttttttgtaacagaaatttaattaatattgagcgggaaagtgttacagttacatggggcatataaatacatggctatcgcacgttattgatttaggtttcgattccctatccgaaggggtagagagggtcttaggtcgtgtccccaacgttcatcgggagctgggtaacatgcttcatccacgtgcgaggcaacgtgccggtgaagggatgatcaccaaacaagacatcagcaactccttgtccttcggttccgggaagccttgcgactgcaagagcatcgagcatatcaatgtaagggtcgatcacgagcggacgtccagtgactaggatcactagagcacttatcccactaccacacgtgtggctg

SEQ ID NO: 100684 - DNA, 582 bp, Arabidopsis thaliana columbia
gcacgcgtacgtaagcttggatcctctagagcgggcggcctttttttttttttttttaatttaatctagttctagttatgaagacttttgaaacatgtgttgcttaactaacgtttttccataagagacttatacatacattgacttcgacaagaagatgttatacataacgtggctttatttcagccgggggatgttcttaaatcacttgcaatatactttcagaaacaatcactctttagcaacccgaacaacctgtttaccgatatttttcccggaaaacagcccaacaagtgcagcgggagcgagggcgaggccctcagatatatcttcgacgtagacaatcttgccttctttggaatatctcttgacattttcaagaaactgggggaagatatgaagggaatcgctctgcaagaacccttctaacccttaacgtttgtagatagcgctgtataggttcttgattccttgggatgaaagtgagaggctttccaaagaccccattcacacaggaggcgattcttcccgttcctttatgtgggggagcgctgcttaagcatggatcccccccgttttcga

SEQ ID NO: 100685 - DNA, 618 bp, Arabidopsis thaliana columbia
ctatgacctcgcatgcacgcgtacgtaagcttggatcctctagagcggccgcgcttttttttttttttttctatcaaaaaaacatttattcaaaaaatgtgatggttacaagaatcaaagaatagtatacatgtgagtataaagaaaaaaaattaaccttacaaacatgttatataggttccgtttcaaaaaataaatgggggggttatgcatatcaaaattagacaatctgaatccattctccaacggctagggacacctattgtagacgggcaaagagaagataataaccgaggaggagcaaggtttccactaggaggagcaacggcttggatttgatgattttcgccaccaacattcttcacatggttaatacccaacataagcaccctcatgttcattggtacactatggggaagaaatggtgggggccaacattggcaccattaccttctccttggttacgtgttggtgggtaagctcgatctttacgaaaaacatttggccatacttaatctggtttggggggtgcggggtttacgattcttgggctcatatgggctaaagctggatcagggaaggggggaagaatttttccagggcggaagtcggtgggga

SEQ ID NO: 100686 - DNA, 523 bp, Arabidopsis thaliana columbia
catgcacgcgtacgtaagcttggatcctctagagcggccgcccttgtcttttttttttttttttttttttttttactcaaagctcatacctcttataatcggcggggaataaacaagcgttgcaaagtttcttcaaaaaccaaactacttgctaattgcaaaaaaaaaaaatcaaataaatacctccttttggcgcgaccattttgcccctctctctcaatcaattcggcaccgcaacttaaaaacatcggcccattttgtctttctcgacacaacaacttaggaaataatgggtcacgtttgggccttaattttgggtcacttacggaaaacggtttcggttgccgggagatcaacatccaacccgaattcattggtaaataacctttatccctacggaaaacgggtcggttagctggagatcaacatcctcctaaaactgaaggatctgacaatttcctaagggggccactgttattggacccaacaagttttttcttaacaccgcgggcaaaaccagggg

SEQ ID NO: 100687 - DNA, 607 bp, Arabidopsis thaliana columbia
ggcttgattgaaccgacctatattagagctatgacgtcgcatgcacgcgtacgtaagcttggatcctctagagcggccgccctttttttttttttttatgcaattagtattatgtatattatcaccggatgatgaactctactatatacaatacaacacttgtagctagcttgttctaagaaaggttactaacaaaattaactaataaaacacagcagaactattcagccggagcttctcgtgctctttgtactttcaggtcatcaagataattctggtagatataaaacccgaaccccatgaaggcaatgagcatcgcgaccatcttaacctcagtcagcttgtcgtggaacaccgcaatggctgcaagaggcgtaacaatgagtgagagtgtaccaataaggttcgaaaacagcgaagaaaccagaaatataagcgccacggctcctacagaacccaattgccacgaaaccgcggtcccaaccaaagtcaaaacataaatgacttgaccctcgggaaatctttcatctcccactaaacacatccattccccggtcggaacaacccgataaccgaacaacagaagccaaagcgacgtatagatttg

SEQ ID NO: 100688 - DNA, 637 bp, Arabidopsis thaliana columbia
  unsure (1)..(637): unsure at all n locations
ctatactagagctatgacctcgcatgcacgcgtacgtaagcttggatcctctagagcgggcgccctggnttttttttttttttttttttttttttttttttgtttattcttctcgggtttgagaaacaaatattaaggcacattttccagtaggttgataataccctcacaacaaaacctctgtttatcatcacgtttcactatacctaagaacacctttctttccccacgcacaaccgatttaaagggaagaaaacaaatcttttccatcaccaaatgaatgagtcatgcgtgcaatcacaatttgaatttacatatgaagccgtccgttcccattagtttctggccttgatcttcttgggcccgggaactcctcatgtttcgcttctgaaccaattttgtaacctctctcgaccgattcagcttctaacggcagctcggctaacgtcccattagccctgctgaagaatgcgaagagtctcttgcggggcgtttcctctttatcgctaactcatcggggctctttcaacaggtcttcaatataagtcctcccttgaaaggttcttgataagaaacattgggcagctcacgtttcggggtatttaccagaaaatgcatgattggttttgggaccaag

SEQ ID NO: 100689 - DNA, 569 bp, Arabidopsis thaliana columbia
atgatactccagctctctacgactcactattgggaaagctggtccgcctgcaggtaccggtccggaattcccgggtcgacccacgcgtccgcgggtcaattcacatacttgtttaacggcaacaaaaacctaccgataaatgctaaactaacgaaatcggatcatagctcgacgaagtctcgatcttttctattctctctttctgggtattcgtgggttttacccagatttcgaaattgaatggcggacgaactggaattgtcgccgttggttccaccgtcgccgatggtcgagccttccgagatcgatctcgaagctggaggacctggtgaacaaattcagtgccgaatctgccttgaaactgatggtagggatttcattgccccatgcaaatgcaaaggaacatcaaagtatgtacatcgtgattgcttggatcattggagagctataaaggaaggtttcgcgtttgcgcactgcacaacttgcaaggctccatattatctgagagttcacagtgctggagataggaaatggcggacattgaagtttcgcttctttgttactcgaga

SEQ ID NO: 100690 - DNA, 874 bp, Arabidopsis thaliana columbia
ctatgacgccgcatgcacgcgtacgtaagcttggatcctctagagcgggcgcccttttttttttttttttttgtcttcaagttataatattttattaaatgaaaatctttcaatccattaccaaacccgaaaaaagaaccctctttccgacaaagtttcatctttgaaattatttgagtcaagctcaatctagaagaggtgtgaggaagaatcaaaacagaagattacaacttttgttgaagaatctgtcattgagggccgagcttagggcagccctcagctaaaggcaagtccaagttgtcgactgtcctaaaagggcgggtaccatcttatcaacgtaaagattaccatccaaatgatcacactcatgttgcaaatcctagcttgccaacctgaagcattcacttcaatcctctttccttgacgatcggagcccgcactaccacctcaagggatctctccaccggaggtctgaatccatcaacactaaagcttccttcaaagaaaagagctttcttggtgcttctctccttgagaaccggtttcccatcaccttgagatcaaatggacgctttcctgagcaggaatctcttcctttggggcggaacttatatactctttggttctccatacaatattcttaagggacaccattggaggagggggggggccactccaggaggcaccccataaccttaacatatcacataatttttggaaaccctccgaccggattctcccgggaacctttcgggcctttcgggagaaccgggaaccgaagccatatctcggggaaccattttttttttttaccaaaccaatacaccggtttgggcaaggggggagaaaaaggccaattccctccggaaagggg

SEQ ID NO: 100691 - DNA, 714 bp, Arabidopsis thaliana columbia
  unsure (1)..(714): unsure at all n locations
cactatattagagctatgacctcgcatgcacgcgtacgtaagcttggatcctctagagcggccgccctttttttttttttttgccaagaacgttaatttttttgtgttcatttataggacactaacttagagagagaatttacaaaacaaagagaatctcgcaagctcagacatgctacatatgagtatattatgatgcaagaacagagccttcggtgattttccaccctgacttggaccagaaaacttcgtatcttgttgtgtaggttctgacatcagtagcattgttttctggatgaaccaaatcagatagacaagcagactcctccagagttgcttccaccagagcacgggttccatctgctgagactgtcacactgtcaacagatagtttcaacagtgtataatcataaaccaacccaagctgcgcagtttcagctgctctgtcagtccaaatcttcagcattcgcccatccaaaacctctggtaacatttctatgcggngatcaggcccaaaagccagagacttaatcttctgccacttggatactatattctctgcagtcctagcatccattctgggaagggcttctgaattcgcagctctgactgaccctatggtagcgacatcagattccatagaagaaaccttatccttgccgtgaaaaaagagctgcttttaaaaaaaacttctggctgaacagngaaatcagg

SEQ ID NO: 100692 - DNA, 656 bp, Arabidopsis thaliana columbia
ctatactagagctatgacctcgcatgcacgcgtacgtaagcttggatcctctagagcggccgccctttttttttttttttaaaaaatatagcaattcttggggagcaaagccgcaagatatttacatcgtaatgtgaagaataagacctaaaagtaagccattgctttacataaataaaacagcaaggcttcaccttttacacaaccaaaaggagatttttgatttaagccagttgggatccaaaatacatttatttactgacttaaatctaaaaccctctattttatttacaaattatttgcaaaatatatataacaggaaccatcttgagatgctttgcttagttaggctgtacaaatagctctcggtcatcaacttgtacctcttctcaggttgtgttataagttaagaagcttgaggttttacttactcagagatggttatggaggtggtgttcgcggcaagagagacgagagtccgattcttctctctccaggagtgataagcttctcaacccgggcaacgatgtgtttcccatatgtggatctcttcaaggattcaagtgtactttgatgcgaaaaagatgagtgcaagactttgatcatacatgttcaagaacctctgactacatattcccaaaggggcctcatcatcg

SEQ ID NO: 100693 - DNA, 524 bp, Arabidopsis thaliana columbia
tcatacgactcactttagggaaagctgctacgcctgcaggtaccggtccggaattcccgggtcgacccacgcgtccgcttccttcgtgtggaacagccatggctatggagtttctgaggagcagtagaagaatattggaatcttctggatgcgcgatcgctttgatttttctgctcttcatccatggagctcactcattctatctcccaggtgttgctcctcaggatttcgagaagggtgatgagctgaaggtgaaagtgaataaattaacttccataaagactcagcttccatactcgtattactcccttcctttttgtcgccctagcaagattgtggacagtactgagaatcttggagaagtgcttcggggtgaccggattgagaatgccccatactcgtttaaaatgcgggaggcacaaatgtgcaatattctcggccgggtcactcttgatgccaagacagctaaagcgtttaaagaaaagatcgatgatgagtaccgcgtcaacatgatcctctacaac

SEQ ID NO: 100694 - DNA, 559 bp, Arabidopsis thaliana columbia
  unsure (1)..(559): unsure at all n locations
nnnnnnnnnnnnnnnnnnnnnnnnnnnnnnnnnnnnnnnnnnnnnnnnnnnnnnnnnnnnnnnnnnnnnnnnnnnccacgcgtgcgcccacgcgtncgcccacgcgtncgagtactgagaatcttggagaagtgcttcggggtgaccggattgagaatgccccatactcgtttaaaatgcgggaggcacatatgtgcaatattctcggccgggtcactcttgatgccaagacagctaaagcgtttaaagaaaagatcgatgatgagtaccgggtcaacatgatcctcgacaaccttcctctggttgttccaattgaaagagtcgaccagggttctccctctgttgtttatcagcttgggtatcatgttggtcttaaaggccagtacgaggggagcacagagcagaagttctttatgcacaatcacttggcatttacagcccgctatcacagagatatcccaactgatgctgcaagaatcgtgggatttgagggtaaacctttcgtgtgaacctgagtttgagggagagtggagggagaagacccgtctgacaacttggg

SEQ ID NO: 100695 - DNA, 850 bp, Arabidopsis thaliana columbia
cttgacaacgcatgcacgcgtacgtaagcttggatcctctagagcgggcgcgcttttctttttttttttttttttttataaaaaaaaaaaacatatctttcaaatgattagtcaataacatgttcaatacatcacactggcctaaccaagataaatatgggtgcaagacaataaagagagatcatttaattaaaaggtgcgggggggaagaacctttttaacttctaatccaaataaccggcaaggccaagaccgcgaccgcaaaaccgtaaccacctttccaactatgttcagctttaaccaaatgaataccggaaaaaatgtaaaaatagccagtttgaccaaaagtcttcctatgtatgaagaaacccattccatatttttctggtattcgatggcttatcccggcccagctagcaatgcccagcatttgaagaacgccctgaaaagtgtggttatcccgaggcctttgggctggaaaacatattggccctaggccggttttaagaaccaacccgaatggcccctttaaccgagggaaaaaccggggttgggaaggtttggggataaaccaggggggcccatggtttatgggagccctttggcccacataatatttttccccccaactttttttacccagggtttttttattaaggggggaaatttaccccttggaacctgttttaatggggggggggacaaaggggcttttaaccaaatcggaaaaggaaaaaccgcggcccaccgtaaaaatctgcggggggggcccattatattttgagaccgccgctttttttttaagcgggagtggtaattttgggagtaccctggaattcccaggggggtt

SEQ ID NO: 100696 - DNA, 384 bp, Arabidopsis thaliana columbia
tttccgctcatttccccttctctgttgttacagaagtcgacggcgagtagcttcaaccaaaaagaaacaccagtatctgtctcagcaatggaatttttccagaaagcaaaagctattcgaatgcgtaacagtcacaacaagtatctaacagcagacgacgatgaagaaaccgtaactcaaaaccgtaacggatctaccaaaaacgctcgatggaccgtcgaaccggttcgtgattctttccatgttattcgtcttaaaagctgttacggtaagtacttaaccgcttctaacgagcggttcttgctcggggctacggggaagaaagtgattcagttgaaactgagtcgggttgattcgtctgttgagtgggaaccgcttagagaa

SEQ ID NO: 100697 - DNA, 769 bp, Arabidopsis thaliana columbia
atacgactcactttagggaaagctcgtacgcctgcaggtaccggtccggaattcccgggtcgacccacgcggttcgaagctattcgaatgcgtaacagtcacaacaagtatctaacagcagacgacgatgaagaaaccgtaactcaaaaccgtaacggatctaccaaaaacgctcgatggaccgtcgaaccggttcgtgattctttccatgttattcgtcttaaaagctggtacggtaagtacttaaccgcttctaacgagcggttcttgctcggggctacggggaagaaagtgattcagttgaaactgagtcgggttgattcgtctgttgagtgggaaccgcttagagaagggtctaagattaagcttaggactagatctggtaactatttacgaggtaatggtggtcttcctccttggagaaactcggtcacacacgacgttcctcatttgtctgctactcaggattcgatttcttgggatgttgatgttgttgagatcttgactgattccgaattcaagacggagtctgcgaaagcgccgccaccgaagacgacgtctccaccgccgcatcggagaccgacgagttcgccgttgtcggctgagtctccaaggacttcgtcttctctttcagacagatccgattcagattcggttgagtcttcgcctaaatctgatggacgaaccatatattaccatgtcgctgactaggaaggacacgtggaagatgaaacaactgttggatatgctttcacgtttaaaggaaata

SEQ ID NO: 100698 - DNA, 575 bp, Arabidopsis thaliana columbia
gtacgtaagcttggatcctctagagcgggcgcgtaatgaatccaggacgaaccattgttggatatggagaaggataccggagaagccctgcataaacaaaaacaagtctctacaaattcatcagtagatgtttacattggaataccctgaacaactgcattggcataaatcaagagtatcaagaagcagtaaataaaaatcattttgtattgttaccacaaactagagcaaattagatatgcacaccagaggcagtacaaataccacccagctgaacagagatcctgaaggacacattgagaagatagcaccaggatcgtagtcattattaccacattaagtagtcatacctcacagggcaacttggaaataggggaaaaatctataatcattcggttgaatttgaaatttaagaattattggaacttcccatcatttcatgcccatttagaacttataaaaacttattattacccatcataaatgctttatttccaacctttagccgcttgacccacaggaggggatagaaaaaagaaccttggcaaaaatgtgacgggaggtgtgaatttaaa

SEQ ID NO: 100699 - DNA, 815 bp, Arabidopsis thaliana columbia
ctatgacctcgcatgcacgcgtacgtaagcttggatcctctagagcggccgccctttttttttttttttagaaacttcactatatacaatcacgcgtatatatctgtatgataaacattttagttaataaattcaaaaatggaacaaaaaatcaatgcataattttagtatctacaaaaacattatgtataaaaccggggggcgaagcaaataaaatatatatccttagaatttcttgtcacggccacacttgacttgtaccgcaagcttcttctcgactttgggacatgaatcctttttggcttgctcgaacgtactcttgttcaccggaatacacactctggtttacccaacagtactttttacgactttcttagaaacggagcattacaacttccaagagtgaaagtgcccaagccccttaggattccaaagcttggaattccacaggggaaatttctttgggccggaactttgaaatagccgggaaatgccgtcttcatggatggcctgacttggtcttcttccggggcaggggcggcacttggggggtggtttcctcaatataaaacccacgatttttttggcgagacaaagccaaaagcctgctccaattgggtcttcctaaattaacacaaaattttcttggcttcaaataacctagggtgggttctcgtttggggggcgggctaaggcgatgaacaaatccatttgccacccttttcgtacccaaaaaccttcccatccgtatctaatgggcggacttggtttcgggaaaaaaaaggtggacctggttcccggttttcctaactttc

SEQ ID NO: 100700 - DNA, 1819 bp, Arabidopsis thaliana columbia
taggtacacactatagaagagtctatgacgtcgcctgcacgcgtacgtaagctcggaattcggctcgagaaattccgaattctctgcgatttccatggagttatctcttctccgtccgacgactcaatcgcttcttccgtcgttttcgaagcccaatctccgattaaatgtttataagcctcttagactccgttgttcagtggccggtggaccaaccgtcggatcttcaaaaatcgaaggcggaggaggcaccaccatcacgacggattgtgtgattgtcggcggaggtattagtggtctttgcatcgctcaggcgcttgctactaagcatcctgatgctgctccgaatttaattgtgaccgaggctaaggatcgtgttggaggcaacattatcactcgtgaagagaatggttttctctgggaagaaggtcccaatagttttcaaccgtctgatcctatgctcactatggtggtagatagtggtttgaaggatgatttggtgttgggagatcctactgcgccaaggtttgtgttgtggaatgggaaattgaggccggttccatcgaagctaacagacttaccgttctttgatttgatgagtattggtgggaagattagagctggttttggtgcacttggcattcgaccgtcacctccaggtcgtgaagaatctgtggaggagtttgtacggcgtaacctcggtgatgaggtttttgagcgcctgattgaaccgttttgttcaggtgtttatgctggtgatccttcaaaactgagcatgaaagcagcgtttgggaaggtttggaaactagagcaaaatggtggaagcataataggtggtacttttaaggcaattcaggagaggaaaaacgctcccaaggcagaacgagacccgcgcctgccaaaaccacagggccaaacagttggttctttcaggaagggacttcgaatgttgccagaagcaatatctgcaagattaggtagcaaagttaagttgtcttggaagctctcaggtatcactaagctggagagcggaggatacaacttaacatatgagactccagatggtttagtttccgtgcagagcaaaagtgttgtaatgacggtgccatctcatgttgcaagtggtctcttgcgccctctttctgaatctgctgcaaatgcactctcaaaactatattacccaccagttgcagcagtatctatctcgtacccgaaagaagcaatccgaacagaatgtttgatagatggtgaactaaagggttttgggcaattgcatccacgcacgcaaggagttgaaacattaggaactatctacagctcctcactctttccaaatcgcgcaccgcccggaagaattttgctgttgaactacattggcgggtctacaaacaccggaattctgtccaagtctgaaggtgagttagtggaagcagttgacagagatttgaggaaaatgctaattaagcctaattcgaccgatccacttaaattaggagttagggtatggcctcaagccattcctcagtttctagttggtcactttgatatccttgacacggctaaatcatctctaacgtcttcgggctacgaagggctatttttgggtggcaattacgtcgctggtgtagccttaggccggtgtgtagaaggcgcatatgaaaccgcgattgaggtcaacaacttcatgtcacggtacgcttacaagtaaatgtaaaacattaaaatctcccagcttgcgtgaggttttattaaatattttgagatgtcaaactttcaatttcattttgatcccaaaaaaaaaaaaaaagggcggccaaaa

SEQ ID NO: 100701 - DNA, 635 bp, Arabidopsis thaliana columbia
  unsure (1)..(635): unsure at all n locations
nnnnnnnnnnnnnnnnnnnnnnnnnnnnnnnnnnnnnnnnnnnnnnnnnnnnnnnnnnnnnnccacgcgtccgatttctagcaaaacaattctctcttttgtcttgaagataagtttcacaaaaaggtctgcttcgcctcttctacgacgttgcagaaactaagaagagatgggtcttctctccaacagaatcgatagatcgagtctgaaacctggagatcatatctactcctggaggactgcttacatctatgcccatcacggcatctatgttggagatgatagagtcatccatttcactagacgaggccaagaagttggaaccgggactgttctagatctcatactagtcagctcaggtccatcccgaaaccacacccactgtccaacctgtgttccacctaacgaaggtcacggtgttgtttcctcatgccttaactgtttcctagccggtggtgtcttgtaccggtttgagtactcagtcaacgctgctcacttcctcgtcaaagccagaggaggaacttgcacactcgctgtcgctgaccctaatgagattgttgttcaccgggccaaacacctccttcaaaacggatttggatgttatgacggtttcaagaacaactgtgaggatttcg

SEQ ID NO: 100702 - DNA, 537 bp, Arabidopsis thaliana columbia
  unsure (1)..(537): unsure at all n locations
nnnnnnnnnnnnnnnnnnnnnatcttggttgaaagatagagacgaaattggaagcgtcgatgaacaaccacgagggagactgatgaacgagcgggccggtttatgcgacacccctcctcgcgatgtctggtccacgagaaaaactcatctatgttgctgccatatacactggaaccgggcaagcgaagccagattacttagctactgtggatgtggaaccgagttcatccacatactcgagtgttatccacagattaccaatgccttaccttgaagatgaacttcatcactcaggctggaactcatgtagctcttgctatggtgattcttcttgcgagagacgttatctcatcttgccttctcttctgtctggtcgtatttacgtgatcgatacgaaaacaaacccgagggaaccatctttgcacaaattcgtggaccctgcagaggttttggagaagacggggttggcttatccgcatcagcctcattgcttagcttccggagacgttcttgtgtcttgtcttggagacgaagatg

SEQ ID NO: 100703 - DNA, 797 bp, Arabidopsis thaliana columbia
ggccccccctcgaggtcgacggtatcgataagcttgatatcgaattcgcggccccgggcaagcgaagccagcattacttagctactgtggatgtggaaccgagttcatccacatactcgagtgttatccacagattaccaatgccttaccttgaagatgaacttcatcactcaggctggaactcatgtagctcttgctatggtgattcttcttgcgagagacgttatctcatcttgccttctcttctgtctggtcgtatttacgtgatcgatacgaaaacaaacccgagggaaccatctttgcacaaattcgtggaccctgcagaggttttggagaagacggggttggcttatccgcatcagcctcattgcttagcttccggagacgttcttgtgtcttgtcttggagacgaagatggaaacgcagaaggcagtgggtttctcttacttgattccgagtttaacatcaaaggaaggtgggagaaggatggaaacagtcctttgtatgggtatgatttctggtaccaacctcggcataagacgatgatcagtacctcatggggagccccggccgcgtttaccaaaggatttgacctcaaagacgtctctgatggcttatatggaaagcatctacatgtctatagctggccccaaggagaattgaaacagattcttgaccttggtgataccggacttttacccttagaggtaagattcttgcatgagccggataaagctacgggatttgcagggtgtgcgttgtcgaatactgcaataaaatttttcaagaaccattat

SEQ ID NO: 100704 - DNA, 493 bp, Arabidopsis thaliana columbia
gcgtacgtaagcttggatcctctagagcggccgccctatgcgggcgatttccttttgtttaatttttggggaagacaacaaattctattgtataatattcataccaaacaacagcagcggcgttttcacacgactccaatttccgaccgcgtttaagattaacatggtacacaattctctgatctgaccatacgtaagactctttgcaaaaaaaaaaacatttttttctccctacaaaaagctaaagacaatgtgacatttttgatagaaccaaagacgtgagctttttcaacccgtcattcctgggaagaagctgcgatatcttgttgaacacatccattacctctttgccgttttggcacttcatgatgttcattgggttctctgagcattccattaacgctgcttggactctaggattctggaatgccatggcaacatccagggttctccatgatcttagatatgacctcttctggagttagtcctattt

SEQ ID NO: 100705 - DNA, 513 bp, Arabidopsis thaliana columbia
  unsure (1)..(513): unsure at all n locations
caacaaaaaaaattgaggttttttcaagcaaattttgaatacatgaagtttattttggaaattttcccttaaaaataataatttgctcttcagtgtcttcatagacgtcttcaatagacttttttttggtaagacaacaaattctattgtataatattcataccaaacaacagcagcggcgttttcacacgactccaattcccgaccgcgttttaagattaacaatggatacacaattcctctgatctgaccaaacctgaagacccttttgcaaaattaaaaacatctttttctccctacagtaagctaaagacaatgtgacatttttgataganccaaagacgngngctttttcaacccgtcatcctggggaangctggggaatcttnntggaaccatccataccccttgggggtttggggcnccaggggtcctgggggccnnggggntccatacngggntgggcccanggttccgggnanncctgggaaaanggggcccaggttannaagc

SEQ ID NO: 100706 - DNA, 539 bp, Arabidopsis thaliana columbia
gcttgagcttatcatctgatggtgttgccctttcaccgggatcatgggaaggccatagactcagcaatatggtggagcagtgcgaaacaagtaatgaagaaactgtatgtgggccaagacagcgaaggactgttgactatacacagttgtactatgaaatgtttggaaaggatgcagttttgcaagagcaaggtagtgaagatgaagactggggtccgaatgacagaaggaagagaaaaagggaatctgatgcaggaagcacacttgtaactatgtgtgaaagcagtaagaaagatcaagatgttgtagaaacgctagaacagagtgagagagattctgtctctgtggaaaataaaggaggtcgaaggcggatgttcagactcccaagaaatgcagttgaggtttgcaattgcttcgtcccggttttagtgtcttatatatgtgtagtttaccataagggaaaaaaaaaaaaaaagggcggccgctctagaggatccaagcttacgtacgcgtgcatgcgacgtcatagtcttctatag

SEQ ID NO: 100707 - DNA, 2812 bp, Arabidopsis thaliana columbia
cccgaccgttgaaagcactctttcaagtcgccgccggtaactctaaacccgccgtaccaatatttcagtaccctccattaaccctcatcggaaaagatcttcactttgccttcatctttctcaattcctcaatccttactctcttccagggtaagatcttatatgaaatgatttgctaagaggactataagtctcggtgatcggggaattcgatatggaggagagtgaaacaaaggggagaatcagtcaagaaactgataaggcttgtgtttcagttgagagaattgggtctactttactctcatcatttgtgaagaaaggtaaagaagtatcaaataagagaaattctaagcagaataagcgaaaagcggaagaagaactctgttcgaaatcaagaaccaagaagtactctcggggatgggtccgttgtgaggaaatggaggaggagaaggttaagaaaacaagaaagaggaaaagtaagagacagcaaaaggataataaggttgaggttgatgattctttaaggttgcaaaggaggacaaggtatttgctcattaagatgaagatgcagcagaatcttatcgatgcatacgcaactgaaggttggaaaggtcagagccgggaaaagataagaccagacaaggagcttgagagagcccggaaagagatcttaaactgcaagcttggactacgcgacgccattcgccaactggatctgcttagttctgtgggaagcatggaagagaaagtgatagcttcagatggatctattcatcatgatcatatattttgtgcagaatgcaattctcgagaagcttttccagacaatgatataatactttgtgatggaacgtgtaatcgagcatttcaccagaaatgccttgaccctcctttggaaacagaaagcatacctcccggagatcagggctggttttgcaaattttgtgattgcaaaattgaaattatcgacacaatgaatgcacaaattggaactcatttccctgtggacagcaactggcaggatatcttcaatgaagaagctagtcttcctattggatctgaagctacagttaacaatgaagcagattggccttcggatgactccaaggatgatgattatgaccctgaaatgagggaaaacggtggaggaaacagcagcaacgttagtggtgatggtggtggtgataacgatgaagaaagcatttcaactagcttgagcttatcatctgatggtgttgccctttcaacgggatcatgggaaggccatagactcagcaatatggtggagcagtgcgaaacaagtaatgaagaaactgtatgtgggccaagacagcgaaggactgttgactatacacagttgtactatgaaatgtttggaaaggatgcagttttgcaagagcaaggtagtgaagatgaagactggggtccgaatgacagaaggaagagaaaaagggaatctgatgcaggaagcacacttgtaactatgtgtgaaagcagtaagaaagatcaagatgttgtagaaacgctagaacagagtgagagagattctgtctctgtggaaaataaaggaggtcgaaggcggatgttcagactcccaagaaatgcagttgagaagctacgtcaagtatttgcagagactgagcttccctcaaaagctgtgagggatcgtcttgcaaaagagctgagtcttgatccagagaaggtcaataaatggtttaaaaatactcggtatatggcactgcggaataggaagactgagagcgtgaaacaacctggggattctaagacagtctctggaggagattctggaccagaagcagtcatggagaacaacactgaaacaaatgaagttcaagatactttggatgacactgttccacccggatttgacgctacaaatcaaaacatactctccccatgtaataacaaccaggaggaatttcaacaggaaaatgtctcttttccttcacccacagatgaaagtcaacagtatctggaacaaaacgattcttctttcgttctagtgccacatgaaaagcaaagcagcgaaattagcttaaagacggctgtagaggagaatgagacagaaagcaagatgatgaaagagccacatgaagagctaagcagtgaaatgagcctaaagacggctgctgaggagaaggagacagagagcaagatgatagaagagccacatgaagagctaagcagagaaatgagcttaaagacggctgtagaggagaaggagacagagagcaagatgatggaagagccacatgatgagctaaacagcgaaatgagcttaagtacagcggtagaggagaaggagacagggagcaagatgacggaagagtcacatgaagagctaagcaacgaaatgagcttagaagagaaggagacggggagaaagatgacggaagaggaagaattggaagcagtaatggagatgctttgtagaacagaaaacaagttactggacgtgacgcagaggcttgatagatttaaaacaccaaaaggccgaaaaaagttaggcaattcttcttctcctttacttgaagaagactcagtagtgtatgttccaatagcagagatcaaggagaaaaggtaacaatatatatatatatatcaagaaaagaaaaaagtcctttgcagaagttttggtattgttagattcttttggaacgtagtctaagagagtacctaatgtagttttgtgtattattcagtttgtatgtgtcatttaaacttcagataaaatcccccataaaaaaataaaactgggattttttttttaatggaactttttagctctctt

SEQ ID NO: 100708 - DNA, 483 bp, Arabidopsis thaliana columbia
gtggacttctacaggtgacccctatgctaatgttggtgactctgctcttgcttttgattctgaagaagctgctaagtcttttgctgagcgtcatggttgggattataaggtcaagaagcccaacacaccattattgaaggtcaagtcttactcggacaacttcaagtggaaaggcaatcctcaaccagaaaactgatgttacaccttcttccaattcttctcgagcaaaagaagaaacctcatttgatattaattctcatgtttctttgttattttagcatctgtgagctttttggttgaaaagaaccattatccatggctatgtttacttattccaataatatgatgatgatgatgaaacacactcctttgatttttcttcatagtttaaaaaaaaaaaaccaacgcggccgctctagaggatccaagcttacgtacgcgtgcatgcgaggtcatagtctagtatagttcagttaaatcaag

SEQ ID NO: 100709 - DNA, 668 bp, Arabidopsis thaliana columbia
cgggtcgacacaagcctctatactgatgcgagatgacgacagaagtagaagaaaccaaagcgaaatcaaaaagctcagcaattttccagatttctctaattgacgatggcgctttgtgctactactcaaaggactatccgtatagcggcgacgctccggcgtgttgctcgacctttcgctactgacgcggtggttgagtcggattacaagcgtggtgagatcggtaaggtctccggaatcccagaggagcatctttctcgcaaggtgataatatactcacctgctagaacagctacccagtcaggatctggaaaactcggaaaatggaagattaacttcgtctccaccttaaagtgggagaatccgttgatgggatggacttctacaggtgacccctatgctaatgttggtgactctgctcttgcttttgattctgaagaagctgctaagtcttttgctgagcgtcatggttgggattataaggtcaagaagcccaacacaccattattgaaggtcaagttcttactcggacaactttcaagtggaaaggcaatcctcaaccagaaaactgatgttacaccttcttccaattccctctctttctcactcttgcttataaaatttcatcagaagaaatctaattttgttttaacgtgctctgtttctga

SEQ ID NO: 100710 - DNA, 462 bp, Arabidopsis thaliana columbia
agcccaagcgtccgcaaaatccatggcttcagtgaattctcgaagtggtttctgcaactcaaactcaacattctacagcaaacgaacaccaatcccactcccgccaaatccatcactcgacgtcactactttcatttcttcacaagctcatcgtggccgtatcgccttcatcgacgcttccacaggtcaaaacctcaccttcaccgagctatggcgtgccgtggaatccgtcgccgattgtctctccgagatagggattcgcaaaggccacgtcgtcctcctcctctccccaaactcaattttattccccgtcgtttgtctctccgtcatgtcactaggcgcaatcatcaccaccacgaatccactcaacacttcaaacgagatcgctaaacagattaaggattcaaatccagtcctcgccttcaccacatcgcagcttctcccgaaaatctccgccgccgc

SEQ ID NO: 100711 - DNA, 591 bp, Arabidopsis thaliana columbia
  unsure (1)..(591): unsure at all n locations
cgtgcgtaagcttggatcctctagagcggcctctccacgtgtgggtaattctttttttttatgcacgacagcgcaactttgtggtggaagagaaattacccttttcatgagttcgttaacataaaaacctttctattgaagggaaaccaaatcccaaatgtgtcacatgactcagacgaccggaggcagaagtggtgccccagaagggggcgcttccaagctacccacgacaagatcggccatggcattccgtgtttccacagggccactcccaacgtgagggaggagaactacattctcaaggccaaagagctcctcgggcacgtgaggctcctgctcaaacacatcaagggcagccccacctaggcggccttctgttagagctttaataagctcttgctcatcaacatgtggcccccggccaatgtttatgaggacgcccttagctcctaatgcatccatgacctgccggtccacaatgtgtctggtctgctcggtcaacgggcatgcgacgacgaggatgttgagttttgagaaggnnaccaccgcgggnanacttganggggancaggntaatggtcttagaagatt

SEQ ID NO: 100712 - DNA, 401 bp, Arabidopsis thaliana columbia
atatataaaaaaaaaaaagtgagagagagagcaaatctgtgtgatggaagttgctcttgagtttgggattatttatcttttcaatatcatttgatgaagaaggatggtgagatgggaagaagtgatgtcaggaggagtaggagatgaaagagagacaacgttggagtggtgaagaagatgcattgttacgtgcttacgttagacagttcggtccgagagaatggcatcttgtgtctgagcgtatgaacaaacctttgaaccgtgacgccaagtcttgtttagagagatggaagaattatcttaagccagggatcaagaaagggtctttgacagaggaagagcagaggcttgtgatccgtcttcaggagaaacacggcaacaagtggaagaagattgctgct

SEQ ID NO: 100713 - DNA, 255 bp, Arabidopsis thaliana columbia
  unsure (1)..(255): unsure at all n locations
gaattatcctaggccttcaattatgtaacaatcctaggcgagctatttaccgggttttaaagatgtatagactctttaccttccgtctgtttagatattatgttgtttggtagaaacaaaagagctggcaatgtaagggagagaaggtcactccctagctgtaaacttaggttctcttccaccgttcccatgttatctcccacccccaacgttatcagggggttttnnnnnnnnnnnnnnnnnnnnnnnnnnnnn

SEQ ID NO: 100714 - DNA, 692 bp, Arabidopsis thaliana columbia
  unsure (1)..(692): unsure at all n locations
acgatgaacagaggaagatgaggaagaagacaaagtccaatagggcgtacccaaaaactgagagagaaagagagaggaaagagctccaaaaaaaaaaacatctttncttttcattttcaattagtttcattattatcacaaaagacttttcttctccgagagaacaaaagattatagagctgagtgactgattggtggtttcttggagttttaatgggaggttgtttcagcaatcggattaaaacagatattgcttccagtacatggctaagttcgaaattcttgagtagagatgggagcaagggctcgtcgaccgcttccttctcttatatgcctcgaacagaaggcgagatcttgcaaaatgcttattctcaagaactttagtctcagtggacctgaaatctgcaaccttaggaatttccggcctgataagtgtggttgggtaaagggtggttttggttccgttttcaaaggctgggtccgtgaggcccctctcgctccttctaaaccgggggccgggattgtcattgctgtgaaaagacttancaagaagggttcaaaggcatcgagagtggctggctgagatcaattatttaggcantggatcatccaaccttgtganctnattgntactncttgaanagngncaggttctgttacngttntncncgnggagctnnaccctntcannc

SEQ ID NO: 100715 - DNA, 1658 bp, Arabidopsis thaliana columbia
agtgtacttaaggttaggctttattgattactagccagctcaattttctttctttctttctttctttctctgggagtttgggattttcttaagggtctttttcaattctcgctccattttgtacgcatagaactgggtttgtgtttacacacataaagctcttatcttttttcttctttcaatcgagaagattatagagctgagtgactgattggtggtttcttggagttttaatgggaggttgtttcagcaatcggattaaaacagatattgcttccagtacatggctaagttcgaaattcttgagtagagatgggagcaagggctcgtcgaccgcttccttctcttatatgcctcgaacagaaggcgagatcttgcaaaatgctaatctcaagaactttagtctcagtgaactgaaatctgcaactaggaatttccggcctgatagtgtggttggtgaaggtggatttggttgcgttttcaaaggctggatcgatgagtcctctctcgctccttctaaaccggggaccgggattgtcattgctgtgaaaagacttaaccaagaagggtttcaaggtcatcgagagtggctggctgagatcaattatttaggccagctggatcatcctaaccttgtgaaactgattggatactgcttggaagaggagcacaggcttcttgtttacgagtttatgactcgtggtagtcttgagaatcacttattcagaagaggaacattctatcagccactttcatggaacacgcgggttcgtatggctcttggtgcagctagaggacttgcttttcttcacaatgctcaaccgcaagttatataccgagacttcaaagcatctaacatcttgctagattcgaactacaacgcaaagctttcggatttcggtttggctagagatggtccaatgggtgacaacagccatgtttctaccagagtcatgggaactcagggatacgctgctccagaatatctagctacaggtcatttatcggtgaagagcgatgtatacagttttggggttgtgttactggagttgttatcaggaagacgagcaattgacaagaatcaaccagtagtagaacacaatctcgtggattgggcaagaccctacttaacaaacaagagaagacttctgcgagtgatggatcctcgtctccaaggtcaatactcactaacccgagctttgaaaattgcagttcttgcactcgattgcatatctatagatgccaagagtagaccgaccatgaacgaaatcgtcaagacaatggaagaacttcatatccagaaggaagcatcaaaagagcagcagaatcctcaaatcagcattgacaacatcatcaacaaatctccacaagctgtgaattatcctaggccttcaattatgtaacaatcctaggcgagctatttacccgggttttagagatgtatagactctttaccttctgtctgtttagatatgttgtttggtagtaacaaaagagctggcaatgtaagggagagaaggaaacttactagttgtaaacttaggttctcttacaacgttcacatgttatctcaaaaaaaagggcggccgctctagaggatccaagcttacgtacgcgtgcatgcgacgtcatagtcttactatagtgcagttaaatca

SEQ ID NO: 100716 - DNA, 681 bp, Arabidopsis thaliana columbia
  unsure (1)..(681): unsure at all n locations
ctacaagagcgtggacggggcgagcacgcgtacgtaagcttggatcctctagagcggtctgcccttttttttttttttcgaaaacaaatgaaataacattgcgacaaatatttacatgctcaaaagagagactttagattagattctcggaaaaaaaaagacacacaaaacaggatgctgaccaaagtttaggacaactagtctcctgaaaatagcttaaaatggtaaaataccaaacaagcagatgacggaaaacacgaaacacaaatacattacatctcccatagctttatatgagccactacgtcccttctccattctatttgctactagtagtcggtactattatcttttgtttttttttcccttcccttataaaactaagattttcaggaacaattgcggccttaaaagtgttctgtaacaaagcttggagaagcaacatagccctgcgccaaggtgtccctaaagtcccttcttaaattctcacaaatgttttcacttgctaaaggncatcctccgagtacctacgaggctgcttgcttggaanggtgctttgccgtnctgaaaccccattctctgnaccncaggattttccaggggttggcagggcatnanggggattgggcaacggccttgctggngaanccnaaaggaagggaanccngggtnttngnttgg

SEQ ID NO: 100717 - DNA, 441 bp, Arabidopsis thaliana columbia
  unsure (1)..(441): unsure at all n locations
aaaaagtaatatcacaaatcaaaaactaaacattgagaatgaactcagtgtgtatctccagctgcatcaacgatgcacacgaccctcgcgtgccggttcgtcctgtacgtgcctcctacgtgaatctctataagtggccggagtccgacgccgagttcgtcaggtccgtacgtcgtggaggcggcctaccggcggcccgtgtagttgatagcatatcttgtcgacagatgtatctccgtagctacactttctctcgggaagacgacgagagcaaatcggagaaggtgtcgtctgggacgcagacgtcgtgtctaaggggagagtttaagggaacagcgttcgtctcgacggtaagggttaaggagggaaatttggaatcatcactcgttttggggttcaaannccgngttttntnttnttaaaaanagggggtttttttgg

SEQ ID NO: 100718 - DNA, 958 bp, Arabidopsis thaliana columbia
acggggctacacgcgtacgtaagcttggatcctctagagcggctgctctgttttttttaattctttttttttttttaagggaatctcattatctttttttcccccgcggtttctcctcaaggtaacaaagaatctctctgggcacctcaagctacatttacattacaataattctctttaattacaagaagaagcacaataaccttggtagaacagagcaacaacgaatctcacagtatggttgcaaatgcagtttataaatagtgttgaatcttatgaagacactacaaggtcagaaactcagaagtagatgtctgattgcttggattgtgcctttagatcctttagtttcttcaatatgttgctgaagtaatcctgcaagtacttctctagagtcaccatatccttctgatccacacctagtagactattagtctcagtcatcggagcagagaagaccgtgtcactcgagagaacctctgagaaggccagtctatccgcgacatcatttgtccattgaaagaaccgagttaactgacgcgtgactctcaatacagaaactggaacggttgtgacatttgcatcttgcccagcaagtctctcacatagtgttatcacttcttgtgttgtccatgcacgagggccaccgaaagtcagaagttttcccattgatcttctcattacgtaaagctataagtgtcagcctagcaatatcctgtgtgtccatgtaagcaacacgcgttggtgcatctgttccccaaaccgatttctcctccagaattggaactgcatattgaccaataagaccttgcatgaaaccacataaccgaatggtgatgtggtttaaaccagattcctgaggaaccttctcagtgcagtacttaatctccatgagaggaacctcaggatgcttatcgcaattgtggattgagtaaaagacgtatttctgaatcccctc

SEQ ID NO: 100719 - DNA, 677 bp, Arabidopsis thaliana columbia
  unsure (1)..(677): unsure at all n locations
gcattcccnnctagggncaaggtggncccccccgggggngccncttaaactngnggccccccgggttcagggatccccgcccccggttccccnaagggtaccaaagganctttntgggcacctcaaggctccttttccattacaataattctctttaatttccaggaagaagctccattacccattggaagaacagagcaacaacgaatctcacagtatggttgcaaatgcagtttataaatagtgttgaatcttatggaggccactacaaggtcagaaactcagaagtagatgtctgattgcttggattgtgcctttagatcctttagtttcttcaatatgttgctgaagtaatcctgcaagtacttctctagagtcaccatatccttctgatccacacctagtagactattagtctcagtcatcggagcagagaagaccgtgtcactcgagagaacctctgagaaggccagtctatccgcgacatcatttgtccattgaaagaaccgagttaactgacgcgtgactctcaatacagaaactggaacggttgtgacatttgcatcttgcccagcaagtctctcacatagtgttatcacttcttgtgttgtccatgcacgaggcggccgcgaattcgatatcaagcttatcgataccgtcgacccgtagggggggcg

SEQ ID NO: 100720 - DNA, 452 bp, Arabidopsis thaliana columbia
acccacgcgtccgcccacgcgtccgaacgcaaattgggtgttattgttccatggagatctgcacacggctttgttgtgcctccaattttggcggagcatttgctaacctttgaacttgaagcggatgtgaaaaccaacgagtttttcctcgagttcgaagtcaaccgttacgaagtggtgataaaagaatgtggagtactccaactctaagtccttccatttttttggaagactggttgggacgcacttggttgagaacttgagagaagaacaagacagtgatctattgttattgtttcttccacttacctgaatcccacctccagttcctctataacatccatggcacggcacttcttcaatgcgtttttcctaacaaccaccgtttaaaggcggagaaggagatcacgaggtaaagttttttccatagtaatactgttcccacgcgtccg

SEQ ID NO: 100721 - DNA, 541 bp, Arabidopsis thaliana columbia
  unsure (1)..(541): unsure at all n locations
cgattgtnnnnnnnnnnnnnnnnnnnnnnnnnngacggggctacacgcgtacgtaagcttggatcctctagagcggttgctttttttttgtttatcctttttttttttttggctggcagagaagtaaatactaaatagacaatgttctaattgttcagtttcttatgtcaaacagaagaatgtttcaatagaagggaagtttacattttgttatagtgtgatgtctaccagaactagtaacaggactttccaatggaagctttagatgatcttccttatacttaacagacacaagacaaagaccatgaggcgacgcaggcaaactagtatactttgcaagcaccctcctgtctttggtttcgagaatcattgggacaatgtctgaatccagtgcttcttttccaatctgaatcagcaaagctaccatgtttctgacttgtctgtacaaaaagccagaaccttcaacttcaagctgtagaagagatcccacttgaatgacatcgaagcgagatatagttttcaaaggatcaggtactccatt

SEQ ID NO: 100722 - DNA, 536 bp, Arabidopsis thaliana columbia
cgtacgtaagcttggatcctctagagcggtctgctctatgtttgtgtattcttttttttatattacagaaggggatatttgctgtccattctagtaagcaaaataagataagaaaattacatattataactgctggtcattattttgattacttttttgactgttgctaatcaatcttacaaaaacgctaaacaggtacaggcagataaagctaaaacaactgatttaactgtaacgctcattggcatctttcctttgtcttgcctcaacaacatacctttatacagaggccagtttatgacaactagtactcctgttatcacaaattgcatccccattgttttcaaatctccaccgtctccggaaacaagtctcgcaaccgctgcggcgaagcagaagagattgagcataccgagtgttccgaggacgagaaacatgggagactccactccaaactccattacctcttccttgtatctctctgctgcttcttcttctgctacttttgctgtgatcacaaacgcagactcagaaac

SEQ ID NO: 100723 - DNA, 1192 bp, Arabidopsis thaliana columbia
  unsure (1)..(1192): unsure at all n locations
aatacgtttctgcaacatcttgtgacttttgggattgtgaagaaggatgatctagctctttataggaaacttgtggttggttcagcttggcgtaaacagatgccaaagcttgctgtttcagttggtttgggcgaccaaatgcctgatatgattgaagagttgataatcaggggacaacagcttgatgcggttcatttcacttttgaagttggtcttgtacacttgttcccncctgttcctttgctcaaagcttatctgagggatgcaaagaaagctacagctttaatcactgatgattccaacaattctggccgatctgcgcatcttgtggcgcgcaaagagcaaccagcacttagaggcagccttaaaatgcattagaagaatacaaacctcgaggaagaattcccccccgggaaccccaagaagaggttggatcagctagagaagaccaaaaccgagaagagaaaaccagccgtgattcccgccaacaagagaacccgagcaagctacagcggtccaatgccaccagccaaagcagggcgtatcacaaacgcttacgtctcctctttcccaccgcctccaccaacattcatcagatcccaaagtcactcacctcaatacggtgtaccagcatacaccacatccccacctaccatctacagcaacaggagccctccataccaatactcacccgaggcggttcatggttcttaccaaacctctccggtcagttatccgacagcatatggtacctactgcagtccggtggctgctccaccccctccagtttaccatcctcacccgcaccaccaccaccatattcagcatgcttactactgattagacaatgacaaaggaaaaaagaagatggtaagtaaccaaccactgatctctggtgtctacgttttgtctctacctcgtttttgttgtaatctctctttttttatatcgtatcatttgtagctaacactctcactctttctggttctgaattagtctacccttgtgtgtttattaatctaaattatacatatctattcactttcctaatgtttcaatcaacgaatttagttcagtacttaatagattcatcttaaaccaaaaaaaaaaaaaaaagnnnnnnnnnnnnnnnnnnnnnnnnnnnnnnnnnnnnnnnnnnnnnnnnnnnnnnnnnnnnnnnnnnnaacggaaa

SEQ ID NO: 100724 - DNA, 595 bp, Arabidopsis thaliana columbia
ctctcttcttcacctatagtttatctcttttttttttttgttttggcttctcttaaattcactttctctaaaacataaacgacattgatgtttcttcatcagatcctttaattcttctccaattctcattctccttacatcaatgataaactttgtagttggagatttgttgtggatgaagattattgattgcagcttataggaagctgctctttttgttttgaacaatgttgctaacttttcagattcttataattaatcagtcttatgatgagaagttggttcttgattacatactacaatcaagaagtaaacagtttatgcaatcttgtgacggttcttgtgttcaaagagtagatacttgttcttcaaggtggaggttaacagaggacaattgacggggtttttaatcgttgttgtattgctcgaataaacggaatcatggaaaggtataagattttggaagagcttggtgatggtacttgtggtagtgtatataaagcagtaaatttggaaacatatgatgttgttgctgttaagaagatgaagagaaagttttatttattggtagagtgtgtgattctgcgagaagttt

SEQ ID NO: 100725 - DNA, 2262 bp, Arabidopsis thaliana columbia
aatacgactcactttagggaaagctccgtacgcctgcaggtaccggtccggaattcccgggtcgaccctcgcccgcgctctcttcttcacctatagtttatctcttttttttttttgttttggcttctcttaaattcactttctctaaaacataaacgacattgatgtttcttcatcagatcctttaattcttctccaattctcattctccttacatcaatgataaactttgtagttggagatttgttgtggatgaagattattgattgcagcttataggaagctgctctttttgctttgaacaatgtggctaacttttcagattcttataattaatcagtcttatgatgagaagttggttcttgattacatactaccatcaagaagtgaacagtttatgcaatcttgtgacggttcttgtgttcaaagagtagatacttgttcttcaaggtggaggttaacagaggacaattgacggggtttttaatcgttgttgtattgctcgaataaacggaatcatggaaaggtttgttcttgttctgttcttgttgttgtttgtatatatattggacatggtgagaaagtgatgatggtgtttgtggtttttgttatgtgtaggtataagattttggaagagcttggtgatggtacttgtggtagtgtatataaagcagtaaatttggaaacatatgaagttgttgctgttaagaagatgaagagaaagttttattattgggaagagtgtgtgaatctgcgagaagttaaggctcttcgtaagctaaagcatcctcatatcataaagttgaaggagattgtgagagaacataatgagctttttttcatctttgagtgcatggatcacaatctgtaccatataatgaaagaaagggaacgacctttttctgaaggagaaataagaagttttatgtctcagatgctgcaagggctcgcacacatgcataaaaacggttatttccatcgagacctgaaacctgagaatttgctggtgaccaacaatatcctgaaaattgctgactttgggttggctagagaagttgcatctatgcctccttacactgaatatgtgtccacacgttggtatcgagctccagaagttttgctacagtcttcattatacactcctgcagttgacatgtgggcagttggagcgatactagctgagctttacgctttaactccgttatttcctggtgaaagtgagatagatcaattatacaaaatctgctgtgttcttggcaagccggactggaccacgttccctgaagcgaaaagcatatctcgaattatgagtattagtcacacagagtttccgcagacacgaattgctgatttacttcccaatgctgctcctgaagctattgatttgatcaatcgactttgctcatgggatccattgaaacgaccaactgctgatgaggcactaaatcatccatttttcagtatggctacgcaggcttcatatcctatccatgaccttgagctgaggcttgataatatggcggcgttgcctaatcttgagctaaatctctgggactttaacagagaacctgaagaatgttttcttggcttgacactagctgtgaaaccaagtgctcccaaactagaaatgctccgcaatgtatctcaggacatgagcgagaattttctcttttgccccggggtcaacaatgatcgagaaccatcagttttctggtctctgctctctcctgatgaaaacggcctccacgcgccagttgaatcatctcctttatctttgtctttcagtccaatgcagcaacacacagttggacctccacagtcgagtggcttcacaatgacatcatcaatgcaaccgaatatgttggaccgcccgtggatggccgtgtctgcgccgtttcaacaaagtcattacctctgatctaataaacccataccctagtaaaaaaagtaaataacacagaggtttgtcagaaagatttgagtttaaagaacaagatagcaaaacaaaacagaggaaaggtgttagaattttcatttttggggtcaccaatttgttcttaatttgtaaaaatttggtttggctgatgcattttcctctcagagcttgagctctatcaatatcgaacaaataatttccttattcttgtctctgtataatatatgataaaaaaagacattgaaatcttgatgtggcattaccataaagaattacgtttcattaatgttggtcctgtcgccttttaatataaaagccctttaact

SEQ ID NO: 100726 - DNA, 494 bp, Arabidopsis thaliana columbia
  unsure (1)..(494): unsure at all n locations
cgcgtcgtaagcttggtcctctagagcgtttgccttttttttttattctttttgaagtggcaaaacattttatatgcattccctaacaaaaggcatttacaatgtaatttttacatttttaaccactaaaaggccagaagaagtgcacaaagaaagactgaccaaataataaaataatttttcttggcggttgtcaccaaaaccatgctattccaaaatgcacttcctttgcaacaaacggcttatatccatatgaatccgacagaggaagacaaaaggatttagtcttgtgatgtagcagagtattcaaaaagcaaacgtttggaaggtgcagattgcagaaggacacgcaagcggctcgtgagctggtaaataagtgttccattgcattgccatctcagaatctttcatctgtcttaccacagaggcctgaagacgttntccgagctgcacttcaacttccgttccaaatgatatgttgctcgccagagact

SEQ ID NO: 100727 - DNA, 695 bp, Arabidopsis thaliana columbia
  unsure (1)..(695): unsure at all n locations
gtaaatccgttnnnnnnnnnnnnnnnnnnnnnnnnnnnnnnnngcgtacgtaagcttggatcctctagagcggttgcccttggtttttttttcaaactaaattgtaacttgaatataaaatggtttataatttaaaatgtaagaacatattaagcttttacaagataaaggtagaaattctacaaaaccaaaggcctctcaactgaagaagtttttacctttttcatcattaagtatcaaaaactttcacaatctttctcaaattttaaggcttttcagggatcttcttgtgtctgcatcttcttgctcaacctcaacaactactcttggtttcttctttgcttttccattatcatcagacttctttaaagctcttccctttttatgaatcacaacttgttcttcagcatcatcgtcatcctcgtcatctgagtcatgatcatcaccttcaaggtaagactccttagatggaagaccagagaagtcttccatgtcttcttcttcctctgcttcgagttcatcatcgccttcaacatattcaatcactccttcctcctcctcttctttctcaacttcgtcgttggtttcgatttctctatcaagcagtttgttaaacacactgtcagataaattgtatatttccggacgcgtgggtcgacccgggaattccggaccggtacctgcaggcgtaccag

SEQ ID NO: 100728 - DNA, 519 bp, Arabidopsis thaliana columbia
ctcaatcccactttccgacgaacaaaaacaacatctgaaaaaaatcatgaatccagcagattccgatcatccacagcttccaaacatcaagatccatcaccctccatctccacgtcactctcaccatcaccactcctcatctactccctcctccgccgcaactccaacaccaaccgccggagctcgtcgtaaaatcggagtcgcagttgatctctccgaagaaagctctttcgccgttcgttgggctgtagatcactacatccgtcccggagacgccgttgttcttctccacgtttctccaacctccgtcctcttcggtgccgattggggacctctccctctgaaaactcaaattgaagatccaaacgctcaacctcaacctagtcaagaggattttgatgcttttacttcaaccaaaagttgcggattctagctaaaaccgttgaaggagttaggggttccttataagatcccttttgtgaaagatcatgatatgagagagagattatgtcttgagat

SEQ ID NO: 100729 - DNA, 809 bp, Arabidopsis thaliana columbia
cccacgcgtccgctcaaatggatttactgacttgaacgagccagtccaatgccaagattcagtacctgtttcttcttcttccagggacttatattctctttatggagcaaacatttcacacgtgcaaggccagtgggtggaaaaaaatactagtcaaaatggatggatggttctagaagcagggaacggaaaaagcactccaagagacaagttatgcctgccttcccattcggtacaagttctttctaacagtgcatttcaacctctgggatacccttcaactgaccacagcaagttatcgggcgaaagagcatctttcaaatgtgaagttcgtcaaaggaatcctgaggtttcgtatgatagctatgtggaatcaagtgtggcatcaaatgttccaagcttgaatcatggatatcgcccggaatctgtcagaccttggagccattggatttcatcatgggagaaccgaagtagcagctcagttcagaaacctttgccacttcaagcgaatctattcttgacttttaatactcaagtacgggcagactcaagtgcagagatgagaagccgtgattctaacgggcttaaccaaggatttctcttcaattctcggcaggaaaagtgcctttaaattttccatcagtaaactttaaccatcttaacaatggcccaaaaggggcagttactaatggttctttgtgtgagagtgtgatgcatcagagtcttaaaaaccttcaaggaccaaaaaagcaggagtgctcttctggtttgccctggataaaacctaagccccttaacaaaatggaaaa

SEQ ID NO: 100730 - DNA, 509 bp, Arabidopsis thaliana columbia
acgcgtacgtaagcttggatcctctagagcggctcgcctgggggtttaatcctttcttcaataagatgatattatgtattaatatcaatgggtgccaaaaggatacacatcttcttggtgtggaacatcacaacaaaggatcaatctatatttctacacttctaaagctggtcaaaaatattaccccctcacctcctcctttcggggatcaaaacaatttccgttacctattacctcaaattccacagagatcatagtaacatcattaaaccggaagcagaacctccaaccaaaccaccaacttcaaaatcaataaagaatagaggtgtcatcacctggcatgcgagacagatgccgctttgagaaaaatgcatcaactctttgggggctaacccataccaggcgacctccccactgttgggggctctgtttcacttctcactctgcgggagaaaagaacatatcccgccgggctttttatttcagattcatttacagatgacacatga

SEQ ID NO: 100731 - DNA, 439 bp, Arabidopsis thaliana columbia
agtgaaggaagggttaagagagaaaggtaaagtaacaagtctctcgagtttcctttttgctttcccttttgtgtggttcatctctcagtcttcttcttctgctataacgctcttctccatcaccgtataatcgagtttcgattgtctccgacgaagagaagctgacacttctggtttcgtcaatttctactgggataaagctctctactacctttttgctcagagaaaatggtttgattttcgaggatgataaaggcttcaggttgttgtagaggtgtttttgccagccttggtgctggtcatggattttatctgactatcgtatgtgcctttgatgaaactaaataatgccccggggagagttagctatgggctctttagagactgtttgttggcttaagggctgcttggtttatcgcttcttgttatttattatctg

SEQ ID NO: 100732 - DNA, 485 bp, Arabidopsis thaliana columbia
acgcgtgcgtaagcttggatcctctagagcggtcgccctggtgttttattctttttttaacagtagaatttagtagaattataaaaccattcatttgaatagcacagggtttaaatagaattctaatttctttcagattcaataaaaatcctacgttcaataaccccccctaagtcctttcggagtttagtaatcctccagacggggcaagtaaacataagtagaactctcttgagacaatcatgtcaacatctataaactaaggttcacgaccatctttgtctaaagaagaagataagaagctcaagatgaaaccatctaaggctccttcaagaaccgagtcaggatcagagacctcgtagttgggtcgcagatccctcaccattctgtatggatggagaacataagttcggatctggtgtccccacctgacctctgttagtgattgtgtatgttgagcgttcattgctgtctgacgagccatt

SEQ ID NO: 100733 - DNA, 959 bp, Arabidopsis thaliana columbia
atacgaccctcttagggaaacctggtacgcctgcaggtaccggtccggaatttccgggtcgacccacgcctccgggtcactgaaagtctctgaaaccaccaccaaagagaaaaacagttctttagagagcatcaaagctccgaggaagagagagagagacgctatggaagcattgaactaacacaactctaaatctctaattttacgggtggctctagttctatacattatggggaagtctacccaaaggctgaagaatgtattgccttgcgaaaaaaccttctaaatctagtgggttccaaagacaaagagaggagttggtgagctggaaaagaagtacctggttactttcaaaggggggaagaattaagatgtgggatccagatctttcatctttctggaggtgcagagaccaatacccgttgatagaaagggggggttggtagagactcaaaatggaggacccggaagaaacctcagatggatgaaatggaaccttccctgagggaaatgaaccagaatcttcagattggtggcccttggtccaagatcattcacttatccgatgccgaaagaatcccacccagagattggcggttccttcaggggaccaaccttggcaaaccctccgaaggctaccctggaaacaagaaacctaccggccagggctttggccagaagcttcctccttgtatcaccaaaggggttccttggccacccctttgatccctccaatccaactctaatctggacctgggtaagaacacctggacaccctctggctcttggaaccaattcctcacccgagagaactataggcgaaaccttcacaaggctcttaccgggctgggttcctaacccaaaagagggcgctaagcctcgctcaacttgaagtcctcaccaccactcttgggttgaaaccaaccggttccagagttaacccgtcaagagccccctgt

SEQ ID NO: 100734 - DNA, 1454 bp, Arabidopsis thaliana columbia
tttttttttttttttccatttattttctcgaatcttcttcttcttcctagattccagcgacttaacaacaacaacaacaacatattctctgctgggtattagattcgaatttctctttttgtgatcagaaatggatcgagctccggtgaccacaggaccgttggatatgccgattatgcacgacagtgatcgatatgacttcgttaaggatattggttctggtaatttcggtgttgctcgtcttatgagagataaactcactaaagagcttgttgctgtcaagtacatcgagagaggagacaagattgatgaaaatgttcaaagggagatcattaaccacaggtcactaaggcatcctaatattgtcagatttaaagaggtcattttgacgccgactcatctggctatcataatggaatatgcttctggcggtgaactttacgagcggatttgcaatgcaggacggtttagtgaagatgaggctcggttcttctttcagcagcttctatctggagtcagttattgtcattcgatgcaaatttgccatcgtgacctgaagctagagaatacattgttggatggaagtcctgctcctcgattaaaaatttgtgattttggatattcaaagtcttctgttcttcattcacaaccaaagtcaactgttggtactcctgcatacatcgctccagaggtactgcttcgtcaggaatatgatggcaagattgcagatgtatggtcatgtggtgtgaccttatacgtcatgttggttggagcgtatccgttcgaagatccagaagagccaagagactatcggaaaacaatacagagaatccttagcgttaaatactcaatccctgatgacatacggatatcacctgaatgctgtcatcttatttcaagaatcttcgtggctgatcccgctaccagaataagcataccagagatcaaaacccatagttggttcttgaagaatctccctgctgatctaatgaacgagagcaacacaggaagccagttccaggagcctgaacaaccaatgcaaagccttgacacaatcatgcaaatcatctctgaagccacaattcccgctgttcgaaaccgttgcctagacgatttcatgactgacaatcttgatcttgacgatgacatggatgactttgactctgaatctgaaatcgacattgacagtagcggagagatagtttacgctctctaataaaaagccttttttaacaaccaaaacacttctctatctgttctaagaccagtagtgttctgatcctctggtttcaaattctaccaatttttgtattgtctctgtttgtttcttgttttcttcatgcacacatatatcatatatgtaatgtaaaatatcatctgtgtatattatatatatattccaatgtcacacaaaagcaaattaacagttaaaacagttgaagcaagttgaggtt

SEQ ID NO: 100735 - DNA, 1464 bp, Arabidopsis thaliana columbia
tctcattcgtcgtggaattccctttttcccccaaattcatatccttccttagatatttttctccttcttcttcttctagattccagctactccagaagattcttcgacttaatctgatgtgattaggaagagcaatagaggaagagaagaatcagaaaaaatggatccggcgactaattcaccgattatgccgattgatttaccgattatgcacgacagtgatcgttacgacttcgttaaagatattggctctggtaatttcggcgttgctcgtctcatgaccgatagagtcaccaaggagcttgttgctgttaaatacatcgagagaggagaaaagattgatgaaaatgttcagagggagattatcaatcatagatcattgagacatcctaatattgttaggtttaaagaggtgattttgacgccttcccatttggctattgttatggaatatgctgctggtggagaactttatgagcggatttgtaatgccggacggtttagtgaagatgaggctcggttcttctttcagcagcttatatctggagttagctattgtcatgcaatgcaaatatgccatcgggatctgaagctggaaaatacattgttagatggaagtccggcacctcgtttgaaaatatgtgattttggttattccaagtcttctgttcttcattcccaaccaaagtcaactgttggtactcctgcatacattgcaccagagattcttcttcgacaggaatatgatggcaagcttgcagatgtatggtcttgcggtgtaacattatatgtaatgttggttggagcttatccattcgaggatccacaggagccacgagattatcgaaagacaatacaaagaatccttagtgtcacatactcgatcccagaggacttacacctctcaccagaatgtcgccatctaatatcgaggatcttcgtggctgatccggcaacaagaatcactattccggagatcacatccgataaatggttcttgaagaatctaccaggtgatttgatggatgagaaccgaatgggaagtcagtttcaagagcctgagcagccaatgcagagccttgacacgattatgcagataatatcggaggctacgattccgactgttcgtaatcgttgcctcgatgatttcatggcggataatcttgatctagacgatgacatggatgactttgattccgaatctgagattgatgttgacagtagtggagagatagtttatgctctctgagattcctgaggacaaagtctgttttgtccgtactgttgagacacaccactggagttttgtcttagctccacgcactccatcgttcatttttggatcgtttgttgttttttactctacaagctttggattcacatacatatatatgtattgtaatgtaatatgtaatatattctatgtatttctctttgtttaataactattggcacattttatac

SEQ ID NO: 100736 - DNA, 484 bp, Arabidopsis thaliana columbia
gccgcgctcgtaagcttggatcctctagagcgttcgccctttgggtttttttttttgctttcaaggttctgtatagattcttatgaagcttaagatactcattcttatacatggttagatcattatacatatcattctccttcatataactgataagctccattactctctcaaaatacccgcctctgagattgtgttccacaaggttgtctaacagatcttgtgttgtctttaagtttttgcttgcaatgttcctcttgatatctccccacacgattgtgatctcccggtacatgccaagagatgagtacatgtcgatcaagatccaaaagctttggacaggtggtgggattttcatcttggggattttccggtaggttattaaggcatctccttgcattttagctttgcaaaagtactagagggacgagtttaactcatagagcatacttggagctttcatttgttttcctgcattgattca

SEQ ID NO: 100737 - DNA, 814 bp, Arabidopsis thaliana columbia
  unsure (1)..(814): unsure at all n locations
cacagatcttttacagagaatcttgtaagaagaaagaagatgattgagaggtgtttaggagcttaccggtgccggagaatccaaagagctttacgccaattaaaggtaacgattctctgtcttcttcttaccgttgttgtcctacgtagcacaatcggcgccggtaaattcggaactccggagcaagatcttgacgagatccgtcaacatttccacgcacgcaaacgaggtgagcctcaccgtgtcctcgaagaaattcagaccggaggagattcttcttccggtgacggtggaggtaattccggtgggagtaataactacgagacgtttgacatcaacaagattttcgttgacgaaggtgaagaagagaaacccgacccgaataaaccttacactctcggacccaagatatcagattgggatgagcagagatctgattggttagctaagaaccctagcttccctaatttcatcggacctaacaagccacgtgttcttttggtgactggttcggcgccaaaaccatgtgagaatcctgtcggtgatcattacctcttgaaatcgatcaagaacaagatcgnttactgtaggttacatggggatccgagatcttctncaacaatggctctttctncgatgcaagaatggctggttttttggggnaaaggttccattgattanggaagntttttgttgtcacaatcctgaggttnaggttnttttggtggntgggaaggnntncnatngttcaaggaatggntttnaggttccnttgggggggtnaaagntcnancttggggttcatggttgntta

SEQ ID NO: 100738 - DNA, 542 bp, Arabidopsis thaliana columbia
  unsure (1)..(542): unsure at all n locations
aacccaaagcagacaaaaagaggggggggggaagncccttgttgtaaccggcctcggagttttagggggagaacagcacgcgtacgtaagcttggatcctctagatcttccgccctttgggtttttttttgcaaatttacaattcataaaatatataccgaaatgaaattcaaatcatagctcatacatatgggatccactttattttaatcatatgacgaaggcatcgaatttacaaaaaacacactaaacttgggaataatgcattttcgtttagacggggaaaagctcacacaactctctgcgtagcaagatggagcacaatgcgaaagaattgaggagggtacattggcggctgctctgctaatgcctgttggattaaaacagtggaaggagtcattccgggaactgtgtttacctatataaccagcacctctccggtttcaacatgcacaaaagcatcgatccgggaaaacccttctaagccgagagtttttgaaatcactcaatgccttgtttgcatctctccaaagcttccttac

SEQ ID NO: 100739 - DNA, 384 bp, Arabidopsis thaliana columbia
aaacattttgagaaaccaaagaagaagaagaagaagaagaacaagcagaagctaaagaagaagacttgaacttgagagatggagcgcagacagtcatatgtgcttgtcgcgctcattggattgcttctcttgacagatattgtcattgcacagagcgatggcggcaaaggcaacggtaacaatggcaaggggaacgaggtacaagtagacaagggtaaaggagataatggcaaaagtaacggtaacggtccaaaggataaagaacaggagaagaaggacaaggtgaaggcagccatggacaagaaggagaaggagataatggataaggaggaataggagaagaaggataaggaaaggaaggaaacggagatgaaggataaactg

SEQ ID NO: 100740 - DNA, 531 bp, Arabidopsis thaliana columbia
gttctagatcgcgagcggccacccttttttttttttttttttttttttttttttttttttttttttttttcaacaatggaaacttgcagataattttcgaataagaacagaggaaacgtgtctgattcgaagatacgagaagctataatctgtcaaaagagcaagaacagttgaaaacaaaatcacatcgactagtacaaaggattcttttaggcgactgggatcatcgcagggtaatctacggctgtgagtggtgcatctgctacgagagcagccggggcagcaacctgagcaggtgcatagatggcctcttcttctttaggagaatgaatgatcacaacatcaggcaatggtgtctttggtcctgatatgcccttagggtcccaatcaagcataaccttcaccttgattcccaacacaccttgtctaagcaaaacatgtctcactgcagagtctatgtattccttagttggttgaccagatgacaccatgtagccatctttgaacttcatagacttggctctggcagca

SEQ ID NO: 100741 - DNA, 472 bp, Arabidopsis thaliana columbia
gcacgcgtacgtaagcttggatcctctagaggtccgccctttgggggttgtttttttttttttttaaactgatgtggtttggatagtgttcaatgaaaccaaaagctactattaccaacacacaccttaattgattgtgcctggacaagtactattgcagtcagattctagacaaatttctccatttagtagagagagaactaaacatgtaaaaaacttaaaaataaaaaagaaccaaacttgttgctaagagatccaaactaaaagcttaagaagaagacgatagatagctcagtcttcgtagtcgccttgggcatacttgtcttcggggtaatacacagccactacttggtttcctccaaattttcttccattcatccccgatctggcctttgatgagccatccacatccgcatactctaagaaaaccttcccaactcctgggggtgggtcatgatctggattaagcctc

SEQ ID NO: 100742 - DNA, 478 bp, Arabidopsis thaliana columbia
  unsure (1)..(478): unsure at all n locations
gcacgcgtacgtaagctaggatcctctagagctgtcgccctttttgttttttttttgaggacgaagtaaacttttactcagtaaaacaccacaatcaaatttacagttacattaagagaaaaaaagaagaaaacaattgtgagatatactaccaaacaaaatatatgtgtgttgactagtgcagcaacttgggtgtgtcttaagctcgaaggagacgcttctcgcatgttagaatcctggtacttgcgtgaggaccctcggatgtgtcacgcaaagaaagatgccaacccatgggctttgaggattcttgaatttcatccaagacaagaattggatcccagaatgggtggctcttccaccgggggttaaatatccgggccatatctaacaaaaggggggcagctaaaattttttttttttcatcgaaaaaaggccaaagggaggtnaaaagggcttatgttcggggggtggtataaaa

SEQ ID NO: 100743 - DNA, 466 bp, Arabidopsis thaliana columbia
  unsure (1)..(466): unsure at all n locations
aaccagaatcttttcctctttctctaatcatatcaaaagctcccttaaccatctctctatagctgcatatatatatataagcaaaatctgttctcttcactagattacaaaaccaggcaccaaaaaaataaaaacttgtatttttgttttctgggatctctctaatggagcaacagcaacaacaacaactaccttctactactactagacccaagcccaagctactaaaccggctcaatacctacgtcggttcgagccgggttggcaaacggttcaaactcgccgaacgtaattcaactttcacgacggagctccgtgctggtaccgccactttcttaaccatggcttatatcctcgccgtcaacgcttcaatcctttctgatccgggggganttgcccngttccgatnganccccaatggcaaaccagggtgacctcgagngacggacgggnncgntaaccaaca

SEQ ID NO: 100744 - DNA, 564 bp, Arabidopsis thaliana columbia
  unsure (1)..(564): unsure at all n locations
nnnnnnnnnnnnnnnnnnnnnnntgacgtcgctgcgccgcgtccgtaagctgggatcctctaaagcggccgccctttttttttttttttgtcttttttttacttgtttttttttgagccacttaacacatgaagatcttatacttataaaatcaagactttaatcgtacattaaagaaaaagaagtcaagtctaagaatctaaaccaaggggttcccattgaggaactcttttactgaagaacctcccaataactctggaatcaagaatctcaagagctcctccagatttaacacatcttggagtcttatactgattcaaagatgatccttgtgagacacaaaaatccattaacgaatcaaacgtgcccaaactcaccactcttatctccaatggcccaatcgacttggccctgttcctgcatctcctggagacgtaatccaaacaatcctcaacctcagagcaacaatcctccattgtcttgtcgtcaagctttggtgggtcattgctgtgacgtggctttagctcccagaagagcacgtaatgccctgggattgatgacgtg

SEQ ID NO: 100745 - DNA, 430 bp, Arabidopsis thaliana columbia
  unsure (1)..(430): unsure at all n locations
aacaaaaccagaagtcgtcgccattatcattcagacaatattcagccaaaatcagttttaaatggaattttacaaagaacccaaaaaacgaaatgacaaacgttttagaaccaaaaaagagagccggacttgttttgatgttcatcagctacttattgcaatatgcagagagaaagacctcatatgatagataaacacatgaaagtgaatcacgaaaaagatgaagcttctaaacggcgatcccaagggacttcttgaacttctctacctctaagtagacagttgagtaaggtaggaactccagagaagtaatctccgcttaagtggttgatggctacagcgagtttggggatctctaggggttctccgttggtaagggtctaatgatctgcggattgcnccccnagtcacngngggnnctctcnggcgt

SEQ ID NO: 100746 - DNA, 368 bp, Arabidopsis thaliana columbia
ccgtcgttggctaaatcgctctggttgccaactcgatcatcatcttcttctacccactttctctggctgctctccgtatctaggagcgccctcagatctgtgcttaattctccggtaacattaccggcatcactgggattgctgatctggaaccgctgtgaaattttaggttttctctgagaagacaggcaagtttaacgatggcggcgaagacggccagatcaaaagctacgccgacgaaggaaaatggtgtcagagtcgaggaaggattgagtctgttcaagtctgataagttcgatgctgatgcttatgtgcaatccaaatgttctatcaacgagaaggatataaagcagttatgctcgtatcta

SEQ ID NO: 100747 - DNA, 504 bp, Arabidopsis thaliana columbia
cgcctgcaggtaccggtccggaattcccggttcgacccacgcgtccagcccacgcgtccgcggacgcgtggggagagggacggggctccatggaatccaacacatgttggagatacctcagtcttgcacaacgatggacacaatggactctctgaatcctcaggttccataactcggcttgcctccatagtcgtccttcgaggcgggatggctacagtttctagaaccgggagaatcggttctaatgatatcagcggtgaagaagctacagaaaatcacaagtaagaaggtgcagctaatactcaccaacaaaccaagactgatttacgttgacccatcaaagcttgtagtaaaagggaatattatctggtctgataactccaacgacctcaacgttcaagtctcaagtgccttcccatttcaagatttgcacaccgagagaaagttttatcgtttgaaagatgcgaagcaaagaactttggcagaggaaaaagggccttctat

SEQ ID NO: 100748 - DNA, 551 bp, Arabidopsis thaliana columbia
  unsure (1)..(551): unsure at all n locations
gcgcacggaagcngggatcctctagagcggcctgcccttttttttttttttttgattgaaactgtctaaagttttgatatgatttcgaaactttaacatctttccacaagttaacactgttagatgacaacaaaaaacaaaaaagctttagaccaagaagaagaagctttaaaggctaacaaaatagctttagcttggtcctgtcttaagctaaaatcgcctgtggtttaggatatgaagacgacaatgaaaaacaaaaaagctttagcctactcctttcttaagctaaaaccgcctgtggtttaggaggatgattcctttccttcttgtaacgcaactgccctggatcaaacccaccttcctgcgctccataaaccgcccacgatggtgtttgagccatatagtctgtgctcgtgaacggttctccagaagcaaccagatcgtggaacttttcatagtcaatccaggtgaaccaacttccaccacttggactttccggtcncccngaggaccancaaaggggnggcccgaaggacncgaacccatggntt

SEQ ID NO: 100749 - DNA, 476 bp, Arabidopsis thaliana columbia
  unsure (1)..(476): unsure at all n locations
agcnnggatcctctagagcggttgcncctggtttttaaatcttttttttttttttttaattcacaaatctattaataaaaaggcacaatcaaaaggagagatgaaatcaagaaaacacacataggctcacaaaaacccacaaatgatgtgacaaatctgttcaaaagcttaaaaccaccatcttgtctcaccatatttgtcattcaagcatggcagcattcaaccgccatcgccaaaacatgttttacaaatggagtcgctaatagccaaaccgcagattgcgaatcttcaaactcgagtggggtcattacaatggcctgaggtggcactagagaaaaggattgatcactttttgtcatcaccaccattttcacntagcttgactctggnttggctcttgatgttggaanctgangctggatggttgatctagaagtcatgggcnaaanccatcggcttctactggccaagnattt

SEQ ID NO: 100750 - DNA, 589 bp, Arabidopsis thaliana columbia
cggacgcgtgggcggacgcgtgggcggacgcgtgggcggacgcgtgggcggacgcgtgggcggacgcgtgggcttttgttctttgtcgcttcaattcaacgcttattcctaaattcgattttgcgttgtcaaattccttaaatttcgttacaaaggtttgatatttccgatgagatctccagcaaagacgatgccgtcgatgtcaccttcttcagtttccacggagaaatctccacctccgtcagatacttcaatggctatagtagctttcgataactccactactcacttctcttcttctccatcgccgccacattctcttgatcattccagtgaatcggagaaggaagatgcgaaaagtaaacccgagagtagaagaaacaagaatcctggaaaggttgaggaaactccatctccgattgtggtggttcataatcacaatcgctctgtgaaagaagtggttccgacgagaaagagtgcgagagttggttctgggagaagtagtggccaacgatctggagctgtttcggctattttgagaaggtctaggagagaagatgtggtaaagttttcagctttagggtttcgg

SEQ ID NO: 100751 - DNA, 438 bp, Arabidopsis thaliana columbia
  unsure (1)..(438): unsure at all n locations
ttttttagcagcaacacaattgtnataatttgcaactaattaaaaacttcaaacatacgnaacacaaactctgcaatacttgcaggtcagatctcttcatagagagagcacattattgaaaatttgagatatcttacaaaacacccacaaacatagagtgattggtagagggagggatatccaaggaatcctctagacttcggacaaaagcacccncgcccttgattggggtagctcggccaacaactcgagcaggttttccggaggcgccaccttcttgtcaatcctctcatattttaagggacacttaaccacacttccccgggctcttttacctccggggtttcctggaatagtgaccaagaaagcttttgaactcctgtacgggagaatctccattgtattaccccggagcccctaacaagattcttttcccgg

SEQ ID NO: 100752 - DNA, 1264 bp, Arabidopsis thaliana columbia
cgggcaggttgatctctccgattcggatatcttagctctggccgatagattctccggcgattcatcttctttatccgccgtaattttcgtatataggatcggtggtggcttttcaagatgccgtcgaacggagatctggaccgtcagatcgagcagctgatggagtgtaaaccgttatcggaggcggatgtgaggacgctttgcgatcaagcgagagcgatccttgtcgaggaatataatgttcagccggtgaagtgtcctgttaccgtttgcggcgatattcacggccagttttatgaccttattgagctctttcgtatcggtggcaacgctcctgatactaactacctcttcatgggagactatgtagatcgtggctactattcagtagagacagtttctctattggtggcactaaaagtgcgatacagggatagacttacaatcttacgagggaatcacgagagtcggcagattactcaagtctatggtttttatgacgaatgcttgaggaagtacggaaatgctaacgtctggaagtattttacagaccttttcgattatcttcctcttaccgccctcatagagagtcaggttttctgtttgcatggagggctttcaccttctctggatactcttgataatatccgaagcttggatcggatacaggaggttccacacgaaggacctatgtgtgatttattatggtctgatcctgatgatcgatgtggatggggaatatctccacgaggtgctggttatacatttggacaggatatcgcagctcaatttaatcacaacaatggactaagtctcatatcaagagcgcatcaacttgtcatggaaggttttaactggtgtcaggataagaatgtggtgactgtgtttagtgcaccaaactattgctaccggtgtggaaacatggctgccattctagagataggagagaacatggagcaaaacttcctccagttcgatccagctcctcgacaagttgaacctgatactactcggaagacccctgattattttttgtgatttctctgcttttttttgtggtcccgaccatatataattttttgaagttccagttttattgcctatgtatcattgtagatgtgcccttttctcttcttttttctaagtggagttcgaatttcccctagaaaaaaagaaacacatcatttttttctgttgttgaggtgattgctataaaaaagtttgtaggagaggcttctatatctataaaaaaaaaacctgcccg

SEQ ID NO: 100753 - DNA, 588 bp, Arabidopsis thaliana columbia
  unsure (1)..(588): unsure at all n locations
gagcggttgccctggggggttaaaaccccnnnaacagaaacagaagcacatattgaacggaattctattgagacaaaggatgtgaagtgtcatacatcttaacaacaaaggaggcggcataacgagagtaacattggctgcgtcacgggcgagaagaaccgactattggatacaacaggggatgtacatagaatcttgggagctgatttcgaatagatcaacctcaacactgttgcatggaacacattcatccggattgtttcctcgagaaagcacaagaagaattttatgacattattcacccaggaaatggctttaagattcctcggttctctcatccgattcatgacctcttggaagcatcgtttagtttatctgctctctcacacaaagcccccacaacccaatgcaactccttggctattggcatttgggaccagattccaatccctgaaacaacgctcaccactcaaaccttctncgtgggataacnccgcattnggaatgactcancngggaanaacctccctgnattcctgaacnggtgntttcaaacccttgtnccganggntaaaccaaggaaaattt

SEQ ID NO: 100754 - DNA, 934 bp, Arabidopsis thaliana columbia
  unsure (1)..(934): unsure at all n locations
tgttnnnnnnnnnnnnnnnnnnnnnnnnnnnnnnnnnnnnnnnnnnnnnnnnnnnnnnnnnnnnnnnnnnnctttttttttttttttttttatttaacgtaattctattgagacaaaggatgtgaagtgtcatacatcttaacaacaaaggaggcggcataacgagagtaacattggctgcgtcacgggcgagaagaacgattattggaaacaacaatgaatgtacatagaatcttgggagctgatttcgaatagatcaacctcaacactgttgcatggaacagattcatccggattgtttactcgagaaagcacaagaagaattatatgacattattcaaccaggaaatggctttaagattcctcgttctctcacccgattcatgcctcttgaggcatcggttagtttacctgctctctcaatacaaagccgccacaacccaaatgcaaccccttgctattgacattaggatcaggatcctaacctctgaaaacaacggactcaaccatctcaaaaatctttccttcgatgaggtataaacctcaggcatttggaaatgaacttcatcagggaaaacacatccttcctcttgcatttctctgtaaaccgtgtctgctttttcaaactctctttgtttcccgtacgcgttcaacaccatagctatcacattcgaatccggaaagtaaccagcggttctcattttctcaaacacttcgatgacatttacgtatctttggtttcttgagtaaagattgatcatacagccaaatactgatatgtcttttacctccccggattcaaaggcttgacgaaaaacccatgtcgcctcttccgttctcccagctttagccagaatggtgatagcggtttcccgaggaatattatccgggagctttaactcgtgaagcagacgtttagcatgacccattagac

SEQ ID NO: 100755 - DNA, 629 bp, Arabidopsis thaliana columbia
  unsure (1)..(629): unsure at all n locations
cnnnnnnnnnnnnnnnnnnnnnnnnnnnnnnnnnnnnnnnnnnnnnnnnnnnnnnnnnnnnnnnnnnnnnnnccacgcgtgcggagaaagctcataggggacagatgagagcaactggtgatccatacctgcaacattgtgtggagactgcaatgttgttggctgacattggagctaattcgactgttgttgtagctggaattttacatgatactttagacgattcgtttatgagctatgattatattctcagaacttttggatcaggagttgctgatcttgtggaaggggtctctaagctgagccagttaagtaaacttgctcgggagaacaataccgcttgtaaaaccgtagaagcagatcgtttgcacactatgtttcttgcaatggcagacgccagagctgttcttataaagttagctgatcggttacacaacatgatgactctatatgctttgccaccagtgaagcggcaaaggtttgccaaagaaactctagagatatttgcgcctttggctaatcgtttgggaatttctagctggaaagttaagcttgaaaatctgtgttttaagcatctccatcctgatcagcaccatgagatgtccgatatgcttgagggatcattcgat

SEQ ID NO: 100756 - DNA, 801 bp, Arabidopsis thaliana columbia
acacgacgtcgcatgcacgcgtacgtaagcttggatcctctagagcggccgcccttttttaaaatttagagctggtagtagtttcatttcatcatttataatccgggaagatttttatcacatctattgaaacaaagaccgacatattttctatcgccttagctttccttgagcttgaccagaaattcagagacatcaaaactatatcctctctgcagaaaaccagcgtggacgagttgttattcccaagaggaaatgctctatgtatgttgttgcctatgtgtctcatacttgatggatcttccacatgccagttctgtatcccacagacattaaagcaagctcccaaagcatgtttggaatgctcaacatactgactttagacccgggaatttcggaccatttcacagagatttcaaccattggtatattaaaacgcttgcacaagtacaccaattcaacatcaaagcaccaccttttcagatggacgtttgtgaaaagtctcctagcagcagccctagtaaacatcttgaagccacactgtgtatcccgaataccaggaccagcagctaatagaaccacgagatggaaacccttcatcagaaagttgcgataccatttcctctgaaattgaaagatgtagcaagagctttctcctcgagatgagcacgagaaccaaatgcggatacttgaacatcacctattttgaaatccatatccttagatgctggatttctgattgaatattcttctctggctactgcattgatctgattttcaagtttttctaggtccgtaaca

SEQ ID NO: 100757 - DNA, 635 bp, Arabidopsis thaliana columbia
atgatactccagcgtctctacgactcactattgggaaagctggtccgcctgcaggtaccggtccggaattcccgggtcgatccacgcgtccgggcctgcttaatttcggacgaggatgatttggaaacaatagcaatcatgtttgaggttttcagactatatggacacaagatgccttgcgatgtgttcgagagattcaaaagcgaagatgggaagtttaaggaaagtttagttggggatgttagagggctgctacagctgtacgaagccgcgcatctaggagcaccatctgaagatataatggatgaagccttaagttttgcgcggtatcacttggaaccgttggcaggcaccgaaacaagctctaatctttttaagcatgtagaaaacgttttgtatagagctcgatatcatagcatagagatactagtagcacgacagtacatctctttctatgatcaagaagaagaccaagatgagacgctccttaggttttcaaagctcaatttcaatttttgccagatgcattacgtcaaagagctcaaaattgtcactagatggtggaaggagctaggtatcgcatctaagctaccgtactccataagggagcggaaatgtggagacttatctttggg

SEQ ID NO: 100758 - DNA, 373 bp, Arabidopsis thaliana columbia
cagagatgcagctgagaaagagcttaaaggtaacccttgacgtctgctgatgagcctcttggctctgttgaccttcaggtgctccgatgtatcctccactattgattcttccctcacaatggttatgggagatgatatggttaaagtgattgcttggtatgacaatgaatggggttactcacagagagtcgttgatttggctgacattgttgccaataactggaagtgaagactcaacaacctcttgatgtctgctccattattttttactgttacatgattcggaatgtataattgtagttcctgagtttattatgtatttgtgctctataatttatagtaataaacttgattcaaacaaaaaaaaacccgg

SEQ ID NO: 100759 - DNA, 666 bp, Arabidopsis thaliana columbia
  unsure (1)..(666): unsure at all n locations
caccctatcccccccgcctgcccccgccgcggggtattatattagtacacnnnnnnnnnnnnnnnnnnnnnnnnnnnnnnnnnnnnnnnnnnnnnnnnnnnnnnnnnnnnnnnncgcgggctagaactagtggtcaccatggcttcggttactttctctgtccccaagggtttcactgaattctcaggattgcgaagctcctctgcttctcttcccttcggcaagaaactttcttccgatgagttcggttccatcgtctcctttcatacttctgggaggggaagcattggtggatacaggaaaggaaaaactgaggccaaccttaaggggcccatttatgggattccgtaggatccggaaggaacttcctgagatgttggcatggcccccaaggactctccctctggatatcattgccattaatgacactggtggcgtcaagcaagcttcgcatttacttaaatacgactctactctcggaatctttgatgctgctggcacaccttcgggagagaccgcaccgtctgttgctggagagagcacccgagctggccgtttacatagatcggttcatcggccataacgtgggcgttcaaggtggcagctcagaaaggagaatggttgcccgggttggcatcgcctgattatctcaccggcagtcttgcc

SEQ ID NO: 100760 - DNA, 595 bp, Arabidopsis thaliana columbia
  unsure (1)..(595): unsure at all n locations
tcccccgnnccagggttctnacccgngnccccgtttttagggggccaaggccccctncttgaacatttncccncctncnccgggccccctaaagctgtgnctcttgggcccccctacctcaagggaaacccaacgggaccgctctccgtgtcccaacaccaaacgtatcagtggttgacctcgttgtgcaggtctcaaagaagacatttgctggaggaagtcaacgctgctttcagagattctgcagagaaagagcttaaaggtatactcgatgtctgcgatgagccactagtgtccgttgatttcagatgctcagatttttcaacgaccattgattcatcactcactatggttatgggagatgatatggttaaggtgattgcttggtatgataatgaatggggttactcacagaggagttgttgacttggctgacattgttgccaaccaacttggaagtggatttcatcaaaacttttgtttcatggtttttcccattttttcccccttccccttttttcattatggtgcgccccataaaaatccggggtaangcctgnntaanttntngtattgggttttgaaaaaataaccc

SEQ ID NO: 100761 - DNA, 663 bp, Arabidopsis thaliana columbia
  unsure (1)..(663): unsure at all n locations
aagctatccagaatctaatcttatttgcctccaagtcatcaattctttatcctatattactagtctctgcttcaccaatcctttttgctctcctgtctgctacaaaccttaacttggattctttctggtcaccatggcttcggttactttctctgtccccaagggtttcactgaattctcaggattgcgaagtcctctgcttctcttcccttcggcaagaaactttcttccgatgagttcgtttccatcgtctccttccagacttctgcaatgggaagcagtggtggatacaggaaaggtgtgactgaggccaagcttaaggtggcccattaatggattcggtaggatcgggaggaacttcctgagatgttggcatggtcgcaaggactctccctcttgatatcattgccattaaatgacactggtggcgtcaagaaggcttcgcatttaccttaaaacgcgcctctactctcggaatctttgatgctgatgtcaaaaccttctggagagactgcaatcnctgttgatggaaanatcatcaaagttgtctccaaccgaaaccggntcttctcccttggaagggctnnggattgaaattgcatcgaggaccggatgttgtngaaaaaagnnaaggannatnactggcaaaagnnctnctnnctc

SEQ ID NO: 100762 - DNA, 569 bp, Arabidopsis thaliana columbia
  unsure (1)..(569): unsure at all n locations
nnnnnnnnnnnnnnnnnnnnnnnnnnnnnnnnnnnnnnnnnnnnnnnnnntctgcttacatcatacaacaagcttctctctctggtagccatggcttcggctactttctctgtggccaaaccatctcttcagggtttttctgagttctcaggacttcgaaactcctctgctcttccctttgccaagagatcttcttccgatgagtttgtttccttcgtcagtttccaaacttctgcaatgagaagcaatggtggatacaggaaaggggtgaccgaggccaagataaaggtagccatcaatgggttcggtaggattggtaggaacttcttgaggtgttggcatggtcgtaaggactctcctcttgatgtcgttgtcattaacgacactggtggtgttaaacaagcatcacatctcctcaaatacgactcaactcttggaatctttgacgctgatgtcaaaccttcaggagactcagctctctctgttgatggaaagatcatcaagattgtatctgatcgtaacccatctaatctccccgggggggaactaggccttgacttagttatcga

SEQ ID NO: 100763 - DNA, 1099 bp, Arabidopsis thaliana columbia
  unsure (1)..(1099): unsure at all n locations
cggacgcgtgggcggacgcgtgggcggacgcgtccgcggacgcgtggggcatttacttaaatacgactctactcttggaatctttgacgctgatgtcaaaccttcaggagactcagctctctctgttgatggaaagatcatcaagattgtatctaatcgtaacccatctaatctcccctggggggaactaggcattgacttagttatcgaaggaaccggagtgtttgttgacagagacggtgctgggaagcaccttcaggctggagccaagaaggttcttatcactgcacctggaaaaggtgacatcccaacttatgtcgttggtgtcaatgctgaactttacagccatgaagatacgatcatcagcaatgcgtcttgtactactaactggtttcgctccattcgtcaaggttcttgaccaggaaattttggggtcataaagggtacaattggcaactttctctactcattacaactgggtgaccccaagggttgttcagatgcggggccacccgtgatctaaggggggcaagagcagcagctttgaacattgttccaacatctacaggagcagccaaagctgtggctcttgtgcttcctaacctcaaaggaaaactctaacggaattgcattgcggtgtgccaactccaaaccgtttcagtggtttgacttcagtcggtgcaaggctcccaaggaaaacttttgctgaagaagtcaatgctgctttcagagatgcagctgagaaagagcttaaaggtatccttgacgtctgtgatgagcctcttgtctctgttgacttcaggtgctctgatgtatcctccactattgattcttccctcacaatggttatgggagatgatatggttaaagtgattgcttggtatgacaatgaaatgggggttactcacaggagagtccgttgattttggnctgncatttgttggccaataactggaagtggaagncctcaacaacctcnttgnatggccngnccccattanttttncctggtaccntggatncgggaangnaaattggagnncccgggggtaatattggaattgggncccaaaaatnaaggaanaaacctnggtcnaac

SEQ ID NO: 100764 - DNA, 1654 bp, Arabidopsis thaliana columbia
  unsure (1)..(1654): unsure at all n locations
cgtttctacaacgacccactatagggtaaagccgggtccccccccggtaccggtccggaattcccgggtcgacccacgcgtccgaattctttatcctatattactagtctctgcttcaccaatcctttttgctctcctgtctgctacaaaccttaacttggattctttctggtcaccatggcttcggttactttctctgtccccaagggtttcactgaattctcaggattgcgaagctcctctgcttctcttcccttcggcaagaaactttcttccgatgagttcgtttccatcgtctccttccagacttctgcaatgggaagcagtggtggatacaggaaaggtgtgactgaggccaagcttaaggtggccattaatggattcggtaggatcgggaggaacttcctgagatgttggcatggtcgcaaggactctcctcttgatatcattgccattaatgacactggtggcgtcaagcaggcttcgcatttacttaaatacgactctactctcggaatctttgatgctgatgtcaaaccttctggagagactgcaatctctgttgatggaaagatcatccaagttgtctctaaccgaaacccgtctcttctcccttggaaggagctaggaattgacattgtcatcgaaggaaccggagtgtttgtggatagagaaggtgcagggaaacacattgaagctggtgccaagaaggttatcattactgctccaggcaaaggagatattccaacttatgtcgttggtgtcaatgcagatgcttacagtcatgatgaacctatcatcagcaatgcatcttgcactaccaactgtcttgctccctttgtcaaggttcttgaccagaaattcggtatcataaagggtacaatgacgactactcactcttacaccggtgaccagaggttgctagacgcgagtcaccgtgatctaaggagagcaagagcagctgctttgaacattgttcctacttctacaggagcagctaaagctgtggctcttgtgctccctaacctcaaaggaaaactcaacgggatcgctctccgtgtaccaacaccaaacgtatcagtggttgatctcgttgtgcaggtctcaaagaagacatttgctgaggaagtcaacgctgctttcagagattctgcagagaaagagcttaaaggtatactcgatgtctgcgatgagccactagtgtccgttgatttcagatgctcagatttttcaacgaccattgattcatcactcactatggttatgggagatgatatggttaaggtgattgcttggtatgataatgaatggggttactcacagagagttgttgacttggctgacattgttgccaacaactggaagtgatttcatcaaactttgtttcatgtttttccatttttttctctttctcttttttacattatggttctcaaaatatcggtgaagactgtataattgtagtatggatttgtaataaataatcataaactattcaaacttgtttacattttgtgttttgtgatacacttttcagtnnnnnnnnnnnnnnnnnnnnnnnnnnnnnnnnnnnnnnnnnnnnnnnnnnnnnnnnnnnnnnnnnnnnnnnnnnnnnnnnnnnnnnnnnnnnnnnnnnnnnnnnnnnnnnnnnnnn

SEQ ID NO: 100765 - DNA, 398 bp, Arabidopsis thaliana columbia
gagagagtgtgagtttgattgaggaaagacgacgacgagaacgccggagaattaggattttgattttattttttactctttgtttgttttaatgctaatgggtttttaaaagggttatcgaaaaaatgagtgagtttgtgttgaggttgtctctgtaaagtgttaatggtggtgattttcggaagttagggttttctcggatctgaagagatcaaatcaagattcgaaatttagcattgttgtttgaaatggagtcgagttatgtggtgtttatcttactttcactgatcttacttccgaatcattcactgtggcttgcttctgctaatttggaaggtgatgctttgcatactttgagggttactctagttgatccaaacaatgtcttgcagagctgg

SEQ ID NO: 100766 - DNA, 527 bp, Arabidopsis thaliana columbia
  unsure (1)..(527): unsure at all n locations
nnnnnnnnnnnnnnnnnnnnnnnnnnnnnnnnnnnnnnnnnnnnnnnnnnnnnnnnnnnnnnnnnnnnnnnnnnnnnnnnnnnctttttttttttttttacaacaaaatcaatcattcatattgctcatgagctgtcgcagctgattacagccgcaaacacagcgttttaggtcttacatcaacaaattacaaccaccaagatcaaaccctattctagtatactgtaaattacatattagtcacaattactagtagagtagagatcaaaaccctccgattcaacaagagacttcatcttccattaaaccgtcttgatcacaaagaggtttgtcttctttcagcacatctcatctccttcccagttatctttctcctttggccctgtgggaccttcttctccataaagagcaatgggaaacaaatcaacaatgttctcaatagagaacctaacaaccaaaggaagaagattcatgatcttattgatctcagaccctgaatcatatgcaatggtcggaccccattctct

SEQ ID NO: 100767 - DNA, 410 bp, Arabidopsis thaliana columbia
atctggaaccaaggtttaattacacaaaggggcgcttattatttagctaacagaactggcaaggccatggatgccaaactttacagtgtaagctttaatcaacattctaatctccatccatggaagctctttcagaaatctctacaccaagaacactaaataacttcaatctgtaaaactcactgtaaattcctctttcaagctgttctctcgccagtggtggagtcacattctcaaatgactctcaatggttcatctaacagctgcagacattcttgtgggttggcgtagaagtagtcttcttccttgggtctattgggaatcactaaccgtctcttagggcttcccattcgagtagagtgaaatgccttcaccgtggatgaaaatacatcccaactcaacaatccttc

SEQ ID NO: 100768 - DNA, 475 bp, Arabidopsis thaliana columbia
cgacctaaactatttttttatttatcaccgaaaaataacattttcattttttaatattcatcgtattctattagtacaataaatacaacaatacatgagtcacttgtttttttttgtgaagcctctcttttggttttatcatcagcctcccatgctacttgaagggtaggaacggagaccatgagattcttctgctgtagaatctcttgacgctaacaaattcaccttgactatttcagaaagtgagcttgaccgtgcgtacgcagccaatacactcatattgaaatccctgaaggggtcaccgcgtagagactgaacatacatcatggaaaagtccgagccgtttccctctagagttacatccctaagtcgtcttccagtttgagcacaacaacacggatcacattctcatcgcagcttccacttatgatgtagtcattaccattcatgtagtatgatcgagtatagttcatcg

SEQ ID NO: 100769 - DNA, 399 bp, Arabidopsis thaliana columbia
gacgtaagagtttatgcatttgaatcgagggctaatatgttgtcaacattggagacaaaacaaccacaatatgttgagccaattttcttcaaccattacttaaacattaaccagaatttgaaacacaatgacactattcctacaaatacatcaaacaagattgagacttgagaccgtggaagaagaatgaaagacctgtcctctctagtgagctatcaagtgtagagaggtaaagcagtccaagcaccagagacatgaccattctcacaaacataagctctcacaactggttcaccatcatcatgaaacccaaacactcttctcaaacaaaacgatgaatgcaaatcccaagtctcatcgcacaaacaaaacgcgcatttcaaacccgaggtcttactc

SEQ ID NO: 100770 - DNA, 520 bp, Arabidopsis thaliana columbia
cttgagacttgacgcgctgccgcgtcgtagctggatcttagagcggcgccttttttttttttgtgagcatttctcaccattacttaaacattaaccagaatttgaaacacaatgacactattcctacaaatacatcaaacaagattgagacttgagaccgtggaagaagaatgaaagacctgtcctctctagtgagctatcaagtgtagagaggtaaagcagtccaagcaccagagacatgaccattctcacaaacataagctctcacaactgggttcaccatcatcatgaaaccccaacactctttctcaaacaaaacgatgaatgcaaatccccaagtctcatcgcacaaacaaaacgcgcatttcaaacccgaggtcttactccgattaccgccgtttatcgttctccaaactctagaccttttgaaatccttgaagactcctctaaacaacatgtaatttcgtttctcttctacgtgaatacacccaggccaattgcaaatgtagagacaatcacc

SEQ ID NO: 100771 - DNA, 1291 bp, Arabidopsis thaliana columbia
  unsure (1)..(1291): unsure at all n locations
caaatacaagaaatttaataacctcgagcagttaccctatttaaatcccctctagccttgttttccttctcacacctatgaagcaatggaagaagagagagaccacaatgcatctgagtcgtctctcccatctttgagcaagcagttggagagctcgactcttggaggaagcacggtcgacgttcccgtcgttgatctaagcgtttctcatgaagacttcttggtgcgtgaggtggtgaaagcgagtgaagagtggggagtttttcaggtggttaaccatgggattccaaccgagctgatgcggcagctgcaaatggttggtacgcagtttttcgagctcccggatgctgaaaaggaaaccgtggcgaaagaggaagacttcgaaggatacaagaagaattatctaggaggtataaacaattgggacgaacatctctttcacagactctctccaccctcaattatcaattataaatattggcctaagaatcctcctcaatatagggaggtgacggaggagtatacaaagcatatgaagaggctaacggagaagattcttggttggttatcagagggattagggttacagcgtgaggcgttcacgcaaagtataggtggtgacacggcagagtatgtgcttagggtcaatttctatccgccaactcaagacacggaattagtcataggagcccgcggcgcacagcgatattgggtgcaatcgcactcctcatcccaaatgaggttcctgggccttcaagccttcaaggacgaacaatggttggaccttgactatatcgactccgccgtggttgttatcattggcgatcaactcatgaggatgaccaacgggaggttaaagaacgttcttcacagagcgaagtctgataaggacaaattgaggatttcttggcctgtttttgttgcacctagggctgatatgtccgtnggacctttgccggagtttaccggagacgagaatcctcccaaattcgagactttaatatataatgactatattgaccagaagataagaggctgggcgctcgaagatcttccctgtctactgaaaaccctcaataccttcaataaatggatgatggattgttcaaggggacaatttcttttaatagctttccttttgagggggttctatatgggggacaataaaacctatttcaaggatttaaaataatattggggaaagctaagcgggttggccaaatattcatctgattgatgctatacattcaaatgtaatcgctcctatcctatgtacgtagtgattaacctc

SEQ ID NO: 100772 - DNA, 528 bp, Arabidopsis thaliana columbia
tcttcctctttaatttcatttccagctgttggttggcttgaaagtacggtatccacagcgaatcactattcttagaggaaaccatgaaagtcgtcagattactcaggtttatggattttatgatgaatgtctgcgaaagtgagtttccctgcaaacattcttatgttgtataagctactgactcgctttgttcatgtgatgacaaacttctttaactaatactatgcatgtcctcatggtttctgttgtcgctgctaattttctttctttctttattctagtcctggctagtttatattgatctaccgggttaatattgctttgctcatgtgactgtgttctcatgacattttttcgtaccttagttgttgttagatagtgccattcaaaaatgaatttgataagatatgtctccttctatgcatgtaggaaagtgttttttttttggttatttcgtttgtaatttgcttaacaaagcttgcttgtacttgcaggtatggcaatgcaaatgtttggaagatatttaca

SEQ ID NO: 100773 - DNA, 559 bp, Arabidopsis thaliana columbia
  unsure (1)..(559): unsure at all n locations
gaaggcgagagagagagagaaagaaaaaagcgaagaatacgcagaatccatccaatttagggttagggctgcccctaatctggaaacctttgcctcgtttctgatctgttttccggatccgacttgaaggaaagaagacgacgacgcactaccaaaaacatgggcgcgaattcgcttccaacggatgcaaccctcgatctagatgagcagatctcgcagctcatgcagtgcaagcctctctccgagcaacaggtcagagcattatgtgagaaagctaaggagatcttaatggatgaaagcaacgttcagcctgtttaaaaaagcccctgtgacaaatctgcggtgatattcaatgggccagtttccatgatcttgtcagagcttttttccgtatttgggggggaaagtgtccctgatacccacctatcttgtttatgggggggctcttttttggccccttcggataatatttcctttgggaactgttncgtgttgggttgctttnaaagncggnttcncagggnttactttttttggggnaccntnnaagncncantta

SEQ ID NO: 100774 - DNA, 1404 bp, Arabidopsis thaliana columbia
cggacgcgtgggtttcctctctcactctgcacacgaaggcgagagagagagagaaagaaaaaagcgaagaatacgcagaatccatccaatttagggttagggctgcccctaatctggaaacctttgcctcgtttctgatctgttttccggatccgacttgaaggaaagaagacgacgacgcactaccaaaaacatgggcgcgaattcgcttccaacggatgcaaccctcgatctagatgagcagatctcgcagctcatgcagtgcaagcctctctccgagcaacaggtcagagcattatgtgagaaagctaaggagatcttaatggatgaaagcaacgttcagcctgttaaaagccctgtgacaatctgcggtgatattcatggacagttccatgatcttgcagagcttttccgtattgggggaaagtgtcctgataccaactatctgtttatgggagactatgtcgaccgtggatattattctgtggaaactgttacgctgttggttggcttgaaagtacggtatccacagcgaatcactattcttagaggaaaccatgaaagtcgtcagattactcaggtttatggattttatgatgaatgtctgcgaaagtatggcaatgcaaatgtttggaagatatttacagacctctttgactatttcccactgacagccttggtggagtcggaaatattctgccttcacggtggattatcaccatccatcgagacccttgacaacattaggaactttgatcgggttcaagaagttccacatgaagggcctatgtgtgacttattatggtctgatcctgatgacagatgtggctggggaatctctcctcgtggtgctggatatacatttggtcaggatatttcggaacaattcaatcacactaacaacttaaagctgatcgcccgagcgcatcagctcgttatggatggattcaattgggcacacgagcaaaaagtggttactatattcagtgcaccaaactattgctatcgctgtggaaacatggcctcaattcttgaggtcgatgactgcaggaaccacacgttcattcagtttgaaccagcaccgaggagaggagagccagatgtaacccgaaggacacctgactatttcctttgaagatactcagctcctcctgcagcttccggttgttggtttttgaagatctctgcttattccatttggttcaacgcatttgtgttccaggttgcttctctttaaaatcaatttagccctctcccttggaatagtgtaatataggcaaagaggtcaatgaactttaaaacctctcatgaacatgtgtttggctgaacttattagctcccttctgcatcagaatctgtttattgtgagatattttttcgatttatttcacgtaatttttccca

SEQ ID NO: 100775 - DNA, 1627 bp, Arabidopsis thaliana columbia
  unsure (1)..(1627): unsure at all n locations
tctctacgactcactatagggaaagctggcacgcctgcaggcgaagagacaaagaagagagagagagagagagagagagagagagagagagagagagagaaagtgggggaaaaaaggcgaagaatacgcagattccatccaatttagggttaggacttcccctaatttggaaacctagtcctgtttcctgatctgttttccggatcggacgagagacgaattaacgaaaatgggcgcgaattctattccgacggacgcaaccattgatcttgatgagcagatctcgcagctcatgcagtgcaagcctctctcggagcaacaggttagagcattatgcgagaaagccaaggagatcttaatggatgaaagcaatgttcagcctgtgaaaagccctgtgacaatctgcggtgatattcatggacagttccatgatcttgcagagcttttccgtatagggggaatgtgccctgataccaattacctgtttatgggagactatgtggaccgtggttattattctgttgaaactgttacgctgttagtcgccttaaagatgcgatatcctcagcgaatcactattcttagaggaaaccatgaaagtcgtcagattactcaggtttatggattttatgatgaatgtctgcgaaagtacggcaacgcaaatgtttggaaaatctttacagacctcttcgactattttcctctgacagccttggttgagtcagaaatattttgccttcatggtggattatctccatctatcgagacccttgacaacataaggaattttgatcgagttcaagaagtgccccatgaagggccgatgtgtgacttattatggtctgaccccgatgaccgatgtggttggggcatctctcctcggggtgccggatatacatttggtcaggatatatctgaacaattcaatcacacaaacaacttaaagctgatcgcccgagctcaccagttggttatggatggatacaactgggctcacgagcaaaaagtggttactattttcagtgcaccaaactattgttaccgttgtgggaacatggcctcgattcttgaggtcgacgactgcaggaaccacaccttcatccagtttgaaccagcaccgaggagaggagaaccagacgtcacccgaaggactccagactatttcctgtgatcactggacacagactcatctcaatcagcagctgcaggcacccacaagtgaaaagtcacagttggctaactctagattctggtcctatgcattgtgttcaggttgctctgtttaaaattcaacttagtgcccaccaccggaatatagtgtgtattataggcgaagaaggcttcttatcttcctctataaccaagaaaagaaaaaagatacccattatgaacattgttttgttgatgttattagcttcttcttcttctcccttctgcatcagaatgtggtttcatgtgagaaatcttctaaattttatttcacgttattcgttcttgaacatctcttgatttttgaatagaaccttgaaattgttatgtttatttgttcttcaaagcttgatataatacaatagtcgctgaacgcaaannnnnnnnnnnnnnnnnnnnnnnnnnnnnnnnnnnnnnn

SEQ ID NO: 100776 - DNA, 522 bp, Arabidopsis thaliana columbia
cggctctaattcgactcactttagggaaagctcggcacgcctgcaggtaccggtccggaattcccgggtcgacccacgcgtccgcttcaattaatctcagatttagatcgagagagaccaaattgagagcaagatctttgcattgttcatctcttgctttgtaatgccggtgttcttcatcgtaaccgactcggtggacgcgatcaattgactcgttctcttttggatccttgttgactcggcgagcttggcttaggagacatgggaggtgtgccttcaacgccgcgaaaaaccggtggtgatgatgtttcggtggccgagtacctcattgccacttttgttggggagaaatcgtttcctttagcgtctgatttctggaacaagctacttgagcttccgttgagttctcgctggcctagtgatcgggttcaacaagcccgtgaacttttcgcacaaagtaatggctccactaaggccccttgcaaaactattgattcatctgtcctggtgtttgcaagagct

SEQ ID NO: 100777 - DNA, 357 bp, Arabidopsis thaliana columbia
cggacgcgtgggggaagatcataggagcgcagcattttgctgaagccgctaaagcagctggtgctttcaatccggatatcgactttgcttcaccaatggatggcgatggacatggaagtcacacagcagctattgcagctgggaacaatggtattccagtgaggatgcacggttatgagtttggaaaagcaagcgggatggctcctcgtgcaaggattgctgtttacaaagctctctaccgactttttggacgctttgtagctgatgtggtggctgccattgatcaggctgttcatgatggagtagatattttgagtctctcggttggtccaaacagtcctccagctactacaaaga

SEQ ID NO: 100778 - DNA, 505 bp, Arabidopsis thaliana columbia
tcgcatgcacgcgtacgtaagcttggatcctctagagcggccgctttttttttttttttttttttttttttatcatcaggataaaacttggaatacttgaatttttagcggttatacaaaacatgagaagcatttgaagaattttggggttattatacattaagctgcaaatgaagacagctgaagatggtacaatttgaacatgtgtgagagttatgcttctggacttttcaactaagcaggggggaggccggcacatcatagatagttcaaactagtaagatggctgcgtgaggaatgaaaggaaggcgtcctcgtatgtctacttcttgtggcttaaccagaggatcaatgggtgtctctccatccttcataatctttgggagaaccagcgccaggcagctcgaattcattgacgtataaggacggtgtgccggacactcctctggagacgcttgaaggaaactctgggggcaagatcagattgggagttgccgaagccaga

SEQ ID NO: 100779 - DNA, 408 bp, Arabidopsis thaliana columbia
catgcacgcgtacgtaagcttggatcctttagagcgggcgctttttcttttttttttttttttttttttctagcaggaatgcagaagcaaaggacttgagattcttttgttgttctctttcgcccattgattcttattacgaaaaatatgggttctggggaatacacaacaggagatcctcacactattgggatcaagtggaatgcgccatttttacaaggaactcgttcatctgagtaatctgatgcaagaggtgagctattctctcgtctctctctttgattgcatctctgagatgagcagcgatgatttcacctttttcaagtcgtcggcgagtttcggttacccttccaccaccaaaggaatatgaccataaccgaataaaatgaccgcagagtctttgagaag

SEQ ID NO: 100780 - DNA, 375 bp, Arabidopsis thaliana columbia
agtacataccaagaagaagaagaggcaaagaaaaagatgataacgggaaacgaattctacacggtgatgtgtgccatggcaccactctacttcgccatgttcgtggcttatggatcggtaaagtggtgcaagatcttcacgccggcgcaatgttccggaatcaaccgttttgtctccgttttcgccgtcccagtcctctctttccacttcatctcacaagacaacccttacaaaatggacacaatgttcatcctcgccgacactttgtccaaaatcttcgtcttcgttttgctctctctatgggccgttttcttcaaagccggtggtctcgattggctcatcactctattctcaatcgctactctccctaacact

SEQ ID NO: 100781 - DNA, 670 bp, Arabidopsis thaliana columbia
  unsure (1)..(670): unsure at all n locations
cgcgtacgtaagctgggatcctctagagcgtccgcccttttttttttttcctaatggaaataataatatttttgatcagagtgagttcacgcagtttccatgtatattcatttgttcctaatttccatgtctggtctcttttgggggaaatcaataaataaaacgaaacttaagcgcgtgtactccactccttgcctctaaagcaacgagtgattaacacgcgctggaacaggagagtgggactcacgggaactaagctatgttccccaaatcagaagactgtcactttttttttggtgctctctctcttcttcttcttcttcttcttcttcttctaggccttcagcacaaatctcaaatcacggagatttcaatttccaacacaaagaaagacaaaatccctcaataaaaaatcccaatcagatcgccgatgatgggatccaacaggatcgccaagaacatcgaagggctctcctccaagatcggacctaacctttaggnggancatgggcaagaaacggananggggttggccccttgaagcggctaaggggttccccgggtccccagggantttccaaaccggggtagcgggaaagcccagaaaggancgnggccggaaaaacgggggtaccgcnggggtaaggccgnttgggcaaccaggggnggg

SEQ ID NO: 100782 - DNA, 1553 bp, Arabidopsis thaliana columbia
agagattgatgggtgcttgtatttcgttctttgcttcttcctctccttccaaaacaggtctccatagtcatgccacaacgaacaaccacagcaatggaacagagttctcgtcaaccaccggcgcgacaacaaacagcaagcgtcggacaacagagccaattctccgatatttccactgggattataagtgatgccggtaaactactggaatcgccaaatctcaaagtctataactttctggatctaaagacggcgacgaagaatgtcacaccggattcgatgttgggtcagggaggcttcgggaaaggtatacagagggttggggccgattgccacggctcttgcctccttccagaggcggctcctggtatgatcccgttgccatcaagagattgaattctgagagtgttcaaggatttgcagagtggcgttcaggaagttaactgggaatgctttggcaccgaaatctggtgaagttattgggatactgtcgtgaagacaaagcgcttctccttgtctacgagttcatccccaaagaagtcttgagagtcatgtttcttagacgaaacgatccttttccttgggatttaaggatcaagattgtgatttgtgcagctcgtggtccttgcgtttctacacagcttacaaagagagaatgcatctatagagatcttcaagtcttccatattcttcttgatttgagctatggcgcagtgctttctagagtttctggtccgtggctggtggctatggaacagcagaatagagaagttcacagagggacggctaaggtgcataggcgtcatataaaggttatgctgctcctagaatatatagcaggccatttatacgttaagagtgtcgcattcgcctttggtgtggttttactagaaataatgaccggactgacggcgcacaacacaaaacggcccagaggacaagcagagaatcacttaatgcgaacatacgtcatggatgataagcacacacagacagcaactccatactacacacacaaacgaacagagatagaagaacaaaataatgagatcaaaggaatcaacaaggtcaatcacaaccaaagagtcgccggaaccagattacaattcgcgctacgacattacactctccttcttgtaatcgagccagacccaaaaaaccagaccacccatgaaggaagtaggtcgaagtcctcgaacacatccaagggcttaatgttgtcccataccgttcttccactaaacaggaccgttgctaactcttcacgttcttcgccacatcactatcgctaataaacgtgaaacacttgggtcgtgaacgcaagagagcaacgctggacggtttggatccatgtatgaatatatataaatagttgtttggacaaccttttttttgggtctggtatgaagtgattttagagttctttattgtttcatttctctttgaattaattctgtaattctagataaatattttcattcatatataaaatatttttttaaagtctatgtttacagagttgatattggataaagtttgagaaagtttcatac

SEQ ID NO: 100783 - DNA, 499 bp, Arabidopsis thaliana columbia
  unsure (1)..(499): unsure at all n locations
nnnnnnnnnnnnnnnnnnnnnnnnnnnnnnnnnnnnnnnnnnnnnnnnnnnnnnnnnnnnnnnnnccacgcgtccgcggacgcgtgggttcgcgacaatcccagcggctttgcagctcgtgctagaaggaagatatattgttgcagtgattttatctgtgactcatcttgtgctaatggagtatggtgcttcagagattcaagatgacattcctgggtccaatgcttaccttactggactaagtattattggtggagtcactctgtttccttctgctctagagggagcgataatggggccgttgataacgacggtggtgattgctttgaaggatctgtatgcagagtttgttctgaatgagccaaagaagatcaattagttgttattggtttctttaataggagcttcaagtgcttttgccgtggctgctttgtcttggaagaagattcatgtagattagtagagagactcaagtgttgattgaagtgtgtgttttgtg

SEQ ID NO: 100784 - DNA, 591 bp, Arabidopsis thaliana columbia
  unsure (1)..(591): unsure at all n locations
nnnnnnnnnnnnnnnnnnnnnnnnnnnnnnnnnnnnnnnnnnnnnnnnnnnnnnnnnnnnnnnnnnnnnnnccacgcgtccgagctcagagctaaagctttcgtacaactgacactcctccaaaacttccaagaaagcatcagatcccattctccgcaatcatctctcaattttcaaaaaaagcagattaaaacagagattagcgagtgagagagagagacaaagatatagagcttctcgtgaagcaacagtgaagaaaaggaaagtgaatcgccatggatgatcgccttcgcttaagccgcagaatccgctttcttcttcttgcttggctccgtcgttctcgctccggaagaatagagtttatcagacgatttggatacaaggaaataatcaaagcaacagaaggtttccgtaaggttatttacaccaactatcacgggtctgcatacagagctaaattcaaaggtggtgaggttgctttggtcaaagaactcactgctcttgatcttggacgagaaaggtttgatgaggaagttcagcttttgggtcgcttacgtcaccgtcatctccttacacttcgtgggttttgca

SEQ ID NO: 100785 - DNA, 1227 bp, Arabidopsis thaliana columbia
  unsure (1)..(1227): unsure at all n locations
ctctatntgcggtattcctatctattattttggagatttataattcttctgttctactggatggaatttcagtgaattagactgagaagaatcttgaagttctagcttttagctcgatacaaaaaagtaaagtatgcaggtctaacaattttagcctattctcctttggtagttcgaccgcgaaatttttttctgcattgtatatttccggaatatgagtgtgtgacttgttagaattgaccctatggatagtacagagaatggggtctgtcatctttatcaagatggttttacttcgtcggatattcattcgagtatctggagcacgaaatagatcaaatagatcacaaagtattcgaactatgattcataacttaaatactcaaacctcgtagccggacttctttccgttctatcttataaactttaataaatcaaaaaaattttctgcttttaaactcttatttggatcaaaggacaaacgcttctttgtattttatgtttttagtcattatagctttttttttattgaataagtgatgatccaatggttctcactcagtgaactttggactttgaaggtttcattaaattatcgtggttctcgtatgaatctgaggtttcaattgattagttaagtagggtcttaacaagagaattcctatcaataataaagaaagcaagaagagatccctgtccccgttccatacaaataccaaataaaaaaagacaataaagataggtaatctagaagattcaagaggcctgtaacgatcaacacaacataaagacgaatgagcttacttgattttttggcatttaaccacaaagacgagctttcgcattttgactctttcatatctttaaataataaaaaataatattgaatgagagacaagtttaaaactttatattccatatctgtttcaatcagtatttgggtctttttttgtttgagctgtacgagatgaaattctcatatacagttcttggagggggagtaaccttggtttacctatctcaataaagtttatgattggttcgaagaacgtcttgagattcaggcgattgcagatgatataactagtaaatatgttcctccgcatgtcaacatattttattgtctaggcggaattacccttacttgttttttagtacaagtagctacgggatttgctatgactttttattaccgtccaaccgttactgaagcttttgcttctgttc

SEQ ID NO: 100786 - DNA, 1870 bp, Arabidopsis thaliana columbia
ggggcattccaaaaacttggagatccaactacaaaacgacaagcagtctgatgcaacattgctttttttcttctagtttctgttcgttattggatttaataggtagggtactgtaggaatctttatttaaatcgctgccgtttctttgactctttttctttctttatcctcccaagtaaacaaaacgtaaacaaaacaggtatgaaagctataattgtaaaccacgatcaaatttatggaagcattggtttatacatttctcttagtatccactttagggataatttttttcgctattttttttcgggaaccacctaaaatttcaactaaaaaatgaaataatttttcattatcttcattaacgtaatcagcctccaaatatttggaggctgattacgttaactagtccccgtgttcctcgaatggatctcttagttgttgagagggttgcccaaaggcagtatatagagcatacccagtaaaacttacaagtaacccagatataaagatggcgactagggttgctgtttccattattatagaattgaaagaccacaccggatctatgctaagatcatttatttacaacggaatggtatacaaagtcaacagatcgtaatgaatacaaaataagatttatggctacacaaactgttgaagatagttctagatctggtccaagaagcactactgtagggaagttattgaaaccattgaattccgaatatggtaaagtagctcccggatggggaacgacccctttgatgggtgttgcaatggctctatttgcggtattcctatctattattttggagatttataattcttctgttctactggatggaatttcagtgaattagactgagaagaatcttgaagttctagcttttagctcgatacaaaaaagtaaagtatgcaggtctaacaattttagcctattctcctttggtagttcgaccgcgaaatttttttctgcattgtatatttccggaatatgagtaaagtttatgattggttcgaagaacgtcttgagattcaggcgattgcagatgatataactagtaaatatgttcctccgcatgtcaacatattttattgtctaggcggaattacccttacttgttttttagtacaagtagctacgggatttgctatgactttttattaccgtccaaccgttactgaagcttttgcttctgttcaatatataatgactgaagctaactttggttggttaatccgatcagttcatcgatggtcggcaagtatgatggtcctaatgatgatcctgcacgtatttcgtgtatacctcaccggtggttttaaaaaacctcgcgaattaacttgggttactggtgtggttctgggtgtattgaccgcatcttttggtgtaacaggttattctttaccttgggatcaaattggttattgggcggtcaaaattgtaacaggtgtacctgacgctattccggtaataggatcacctcttgtagaattattacgcggaagtgctagtgttggacaatccactttgactcgtttttatagtttacacacttttgtattacctcttcttacggccgtctttatgttaatgcatttcctaatgatacgtaagcaaggtatttctggtcccttataaataatatagattctaggtatttgtacttacttattacttggtgaaggaacgatagtattttattgctataaatatggattattaaaaaaattaaacatgtatttggatatttcccttcaactccacaatattttattatttttttgacataaaaagtctcaaaaaaattctatgaagagataatggattatgggagtgtgtgacttgaactattgatcgggccgtgca

SEQ ID NO: 100787 - DNA, 388 bp, Arabidopsis thaliana columbia
caatatcaaaaactcttgcttctaattctcttcattcatggcttcagagaagagtttcaagaagagaaagatcaccgatgatgtagacggagtaggagtaggaggaggactagaatcccttcccgaagatatcatcgccgacatattctctcgcctaccaatctcctccatagctcggcttatgttcgtttgcagatcttggagatctgttttgactcaacacggtcgtctctcttcttcttcttcttccccgacaaagccatgtcttctccttcactgcgattcgccaatacgcaacggtcttcacttcctcgacctatcagaagaagagaaacgcatcaagaccaagaaattcacattaagattcgcatcttccatgccggagttt

SEQ ID NO: 100788 - DNA, 529 bp, Arabidopsis thaliana columbia
cggaaaaaaaaaaccagatctacaaaaataaataatccccaaattgaatttcaaatttcgaagcttcaagaaaccctaatttttctcaatctaagctgaggtttgggatctcgtacattgcacgcgatgggagatttcaatctcgctctcgtgattgttgcgatcgtagtttgcgtcattgttttcatctccagtatctacctcctcgtcaactatcagcatccagatgatgcaaaccaggcttatttccccaaattcgttgttgtttttggtttatccattgctatgatctctattctcatgttaccggcggatgtggctaaccggcatgcttgtcgacattcgatttacaacggcgcttgtaatctcaccttacctatgaaggatctttggcttgccgtttacattgttgacgctgtgcttgtcttcttcatcatccccttcgctatgttttttatgaaggttctcagacagggttttgttagaggttaagagtcttttatttggttggatcttttgctgtcgattg

SEQ ID NO: 100789 - DNA, 754 bp, Arabidopsis thaliana columbia
accggtccggaattcccgggtcgacccacgcgttccagatctactaaaatccccaaattcaattttcaaaatttgaactcctagaaaaccctagcctttgcaattgggtgctacatcttccaaatcgttccgggatcgaaatctctcgaattggggacgttgtacattgcacacgatgggcgatttcaacctcgctctcgtgattgtcgcgatcgttgtttgcgtcatcgtattcatctctagcatctatcttctcgtcaactatcagcatccagatgatgcaaaccaggcttatttccccaaattcgtcgttgtttttggcctttctattgctatgatctcgattctcatgttaccggctgatgtggccaatcggcatgcttgtcgacatgctatatacaatggagcttgcaatctcaccttgcccatgaaggatctttggcttgctatttatatcgtggacgctattctcgtgttctttgtcatccccttcgcaatgtttttctatgaaggcgaccaggacaagactcttggaaagaggataaaaagtgccttaatttgggtagttaccacggctgttgtttgtgctctggtgcttggaattttatatggtgtcattggaaaggtggacttttcggtcaggcatttggcttctgccacatccactttccctacttcctggcagtttttaaatacttaaccatgcataggtaacactgctcgccagtgctcagcatttacagttaatcccaca

SEQ ID NO: 100790 - DNA, 535 bp, Arabidopsis thaliana columbia
  unsure (1)..(535): unsure at all n locations
nnnnnnnnnnnnnnnnnnnnnnnnnnnnnnnnnnnnnnnnnnnnnnnnnnnnnnnnnnnnnnnnnnnnnnnnnnnnnnnnnnnnnnnnnnnnnnnnnnccaaaaatccaatgaattctaatcaacacgctccaatataaaaagaatacaaactttcaaataaaacctaaactttcaatggacaatgttaatcccaaacacatcaaggggatctaaagaatcaatctttttgtcaaactatttgtctttgcatgcatttcactgggaagaatctgaacctgagtaacaaagaataccctcttatgataggatcactagcccgagatagagcgatgcacaaagaaacgcaaatgatatcattccccagatgacaccccagccacaaccggtacagcaaggacagatctctgcgaacttctcagcatcgctcgaatggaccctccgagatatcaaatcatcatagatatcgtaaactgaaaataagctattcatcacaccaataaacagaatgacataacggagaattttgactgtag

SEQ ID NO: 100791 - DNA, 551 bp, Arabidopsis thaliana columbia
  unsure (1)..(551): unsure at all n locations
atgannnnnnnnnnnnnnnnnnnnnnnnnnnnnnnnnnnnnnnnnnnnnnnnnnnnnnnnnnnnnnnnnnggggggacgacgccacgcgtccctgctactctgcaaccatgtcgaagcgaggaagaggaggaacctctggtaacaagttcaggatgtcactgggtcttccagtggcagccactgtgaactgtgctgacaacaccggagctaagaacctttacatcatttcggttaaaggaatcaagggtcgtcttaaccgtttgccatcagcgtgtgttggtgatatggttatggctactgttaagaaaggtaagcctgatctccgtaagaaggtgcttcctgctgtcattgttaggcagaggaagccttggcgccgaaaggacggtgtcttcatgtatttcgaagataatgctggtgtcattgtcaatcccaagggtgaaatgaaaggatctgctatcactggaccaatcggaaaggagtgtgctgatctgtggccaagaatcgcaagtgctgcgaacgccatcgtttaagcaagcttgagatctctatg

SEQ ID NO: 100792 - DNA, 618 bp, Arabidopsis thaliana columbia
  unsure (1)..(618): unsure at all n locations
gcnccccnccggtgcnccnctaaactggacccccgctcaggatcnccccccaggtctcctgggctcccttgcacccactgtgaactgtgctgccaacaccggagctaagaacctttacatcatttcggttaaaggaatcaagggtcgtcttaaccgtttcccatcagcgtgtgttggtgatatggttatggctactgttaagaaaggtaagcctgatctccgtaagaaggtgcttcctgctgtcattgttaggcagaggaagccttggcgccgaaaggacggtgtcttcatgtatttcgaagataatgctggtgtcattgtcaatcccaagggtgaaatgaaaggatctgctatcactggaccaatcggaaaggagtgtgctgatctgtggccaagaatcgcaagtgctgcgaacgccatcgtttaagcaagcttgagatctctatgttttgtgttgaacgtttagcattatctctatttgggattgttttttgtttttgtcttagacttttgttatgccttaaagctgattctagttcttataagaaaccttcggttcccggtgccagnttggcaccncagtggtttaaggccaancggaaacttgggatttgatcc

SEQ ID NO: 100793 - DNA, 637 bp, Arabidopsis thaliana columbia
  unsure (1)..(637): unsure at all n locations
gaagaaacccatcatcatcatgatgaactcttctcttctaactccttcttcttcatcttcttcccatatccaaactccatcaacaactttcgaccacgaagacttcctcgatcaaatcttttcctcggccccgtggccctccgccgtcgatgatgctcatcctcttccctccgatggcttccacggccacgatgtcgacccacgcgtccgatggctactgttaagaaaggtaagcctgatcaccgtaagaaggtgcttcctgctgtcattgctaggcagaggaagccttggcgccgaaaggacggtgtcttcatgtatctcgaagataatgctggtgtcattgtcaatcccaagggtgaaatgaaaggatctggctatcactggaccaatcggaaaggagtgtgctgatctgtggccaagaatcgcaagtagctgcgaacgccatcggttaagcaagcttgagatccctaggttttgggttgaacggttagcattatctctatttgggattgtttttggtttttggcctagactttgnaacccnaaacgggtcaaggcctaaaaaccccggttccggnaattgaccnaggttagcnncgaacgggttggnnaaaaaaaaaaaaggggggcggggngc

SEQ ID NO: 100794 - DNA, 545 bp, Arabidopsis thaliana columbia
  unsure (1)..(545): unsure at all n locations
caaaaaaaagtgtagaagcagaagaaacccatcatcatcatgatgaactcttctcttctaactccttcttcttcatcttcttcccatatccaaactccatcaacaactttcgaccacgaagacttcctcgatcaaatcttttcctcggccccgtggccctccgtcgtcgatgatgctcatcctcttccctccgatggcttccacggccacgatgtcgactcaaggaatcagccgatcatgatgatgcctttgaatgatggctcctccgtccacgctctttataatggcttctccgtcgccggatctcttcctaactttcatatccctcagggatcgggaggaggattgatgaaccaacaaggacaaacgcaaacgcaaacggaacctcaggcggagcgcgtcttacaggcaactgggggtacgggttggggggttccccaagaagtagggcttaaaatccgggctttgggggggtnaacgaacttgttcctcaaaggtttccccaaagggttcggggaagttgtttttgtttttnaattttnttt

SEQ ID NO: 100795 - DNA, 1016 bp, Arabidopsis thaliana columbia
  unsure (1)..(1016): unsure at all n locations
aaaggggggggaatcgggggtggcgggggcctctccctttccgcgtatattagccacccccaagcctgtggcggaaaaaagggggggaaatgtgttgtttggcacaagagtgcggaaactattaaggtttggggggttaaaccgcctcccaggggtgtttttttcccacaagttccaaaggggccggtttggttaaaaaaacacaccgggaccaaggttgaatattttgagaattttaagggttggcccccttataagaaagaagctaatttacgttcggcaatggcacgccggtaggtaaagcttggaatcctctaagaaccgcccgccccatttttgttcagcatttttgcgatgagttttctaatccaaaatcaaagtatcagaacgttctttgagaccacaacgcaagaatggagagagacaaattcgagcagaaaccaaaaaaaaaaaacaccttaaaagttcaaaagatttgtcagacttttttttaacaaaaaccagaaaaggggattttaagaagatcaatactcccacttcttgagctccatgccatctggtggagtgctctccactttcttagtcccaacttctttccagtttgtcgacagtaccgtcccattcgactctgcaaatgatttgttcattgcccgcctcatgtcttcatctgcactcgagtatatgtcgctgaaaaatttgttcatagctgcatctccatcaagcttctcatccttctcctgtttcttcacttcagcttccaacttgtcccagtcttttgctggcttagaagatgggtacactggtctctgcgacagcgctgatgagacattgggtttgggcaaaacactttgccctcggacgcgtgggtcgacccgggaattccggtccggtaccgcagacnnnnnnnnnnnnnnnnnnnnnnnnnnnnnnnnnnnnnnnnnnnnnnnnnnnnnnnnnnnnnnnnnnnnnnnnnnnnnnnnnnnnnnnnnnnnnnnnnnnnnnnnnnnnnnacccgg

SEQ ID NO: 100796 - DNA, 627 bp, Arabidopsis thaliana columbia
atgacgtcgcatgcacgcgtacgtaagcttggatcctctagagcggccgcccttttttttttttttttttttttttaactttaaaagtttgtggttgattgaattcaaaattatgacaaacaatattacattgagaagggaactctaggtatcaggcgcatttgatgtacttttcgttgttgggtttatcttaaggcttctctcacatcttttgtggtgcaatcaaacagtgtatgtttcaccatgtttacgattacagatgtctaaccaaattctaagctcttaaaatgggcaaaatacaatcaagagaaaaagagccaattcatttctgacaattcttaatgtaacaactccagagaccattcacctgagcttccaaccatcaggtagatggcactaagctcttagggtttagatcccaaagcaagaagtatcttcttcctcggacccatcggtatgagcatagccttgaggtcatcatctgtcatatgcatgagagcatccatatcaacttcttccacttgaaacgctgttgaatatttctcgagacccaatgattcaagaaagctatcaaccgatgaatcagcctgctgtgatttcttcctggtagcttgactggaagttttt

SEQ ID NO: 100797 - DNA, 911 bp, Arabidopsis thaliana columbia
  unsure (1)..(911): unsure at all n locations
cctcgagtgccaagacgggggacacaactaggttcgggagtttacctacaaaagacttccaaggaccaacttgattcgtatggaagaaagaatcccccccaatggctttcttgaattcctcacaccaggcctgaaaccatctaagtcctcaaagctacacgaggagctctgagtcgagtttctttgcaagatcttaaagcccaagcttcaatcccgcggacaataaaagaagggcgacgagtttgtctttggtttcttcttatgttgtatagtttctgctccagtgtagttaagacatgtttagaataaggaaatgggttactatgtacccacatatatgtatccccaatatgtacagtgttgttgttgcctctaaattcgaaatccaaagctttgatttatgcatgaaagacaacataatctatttgcagagtgatgcaagaactcgacgaggaggatcaaacggtcttcgagaatgaagaaccgcccagttatctataagcaaaacatctcgtctctgccacggaacagcaacacattcctcttcaagaatcctaagacaatcatggactatatccgcaggtaaaggctttccatccccaaaagtcacagcctttcttgtaccttgctagaaaactggctggagaccaaaaccttcactttgtggagacaccagcgcttgctccaccagaggttcacattgacattgctgatcaagcaggaaggaacgnngggcgagctccttacaggntgcaggtcaancccctccccggatgacgntgatgntaacctttgggtaaatcatccttcnagaatggntgccgngggaacccttggttgtccctttnggtttcccanggtggttnggggnnantnaacaanggccngngcgatctgancnggggcncngt

SEQ ID NO: 100798 - DNA, 935 bp, Arabidopsis thaliana columbia
  unsure (1)..(935): unsure at all n locations
aatatccgggcggacccacgcgtacgcgccgcttccttcttaacaccatcgcctgaattcgctctcctctagctcgcgattgcgaaaacatggctctacctaaccagcaaaccgtagattatcccagcttcaagcttgtcattgttggtgatggaggcacagggaagactacttttgttaagagacatcttactggggagtttgagaagaagtatgaacctactattggtgtggaggttcatccattagatttcttcacaaactgtggcaagatccgtttttactgctgggacactgctggacaagagaaatttggtggccttagggatggatactacatccatggtcaatgtgctataataatgtttgacgtcacagcacggctcacatacaagaatgttccgacatggcaccgtgatctctgcagggtgtgtgaaaacatcccgattgttctgtgtgggaccaaagttgatgtgaagaaccaggcaagtgaaggcgaagcaggttacattccacaggaagaagaatctgcagtactatgagatatcagcaaagagcaactacaactttgagaagcctttcttgtaccttgctagaaaactggctggagaccaaaaccttcactttgtggagacaccagcgcttgctccaccagaggttcacattgacattgctgatcagcagaagaacgaggccgagctcttacaggctgcagctcaacccctccccgatgacgatgatgatatctttgagtaaatcatccttctagaatgtctgccgtgggaagctcttgcttgttccttttggttttctctatgttgttttggtgttacatataaatcaatcggtctttcttataacaaaaaaaaaaaaaaaaaannnaagggcggccgctctagaggatccaagcttacgtacgcgtgcatgcgacgtca

SEQ ID NO: 100799 - DNA, 983 bp, Arabidopsis thaliana columbia
acgcctgcaggtaccggtccggaattcccgggtcgacccacgcgtccgccgcttccttcttaacaccatcgcctgaattcgctctcctctagctcgcgattgcgaaaacatggctctacctaaccagcaaaccgtagattatcccagcttcaagcttgtcattgttggtgatggaggcacagggaagactacttttgttaagagacatcttactggggagtttgagaagaagtatgaacctactattggtgtggaggttcatccattagatttcttcacaaactgtggcaagatccgtttttactgctgggacactgctggacaagagaaatttggtggccttagggatggatactacatccatggtcaatgtgctataataatgtttgacgtcacagcacggctcacatacaagaatgttccgacatggcaccgtgatctctgcagggtgtgtgaaaacatcccgattgttctgtgtgggaacaaagttgatgtgaagaacaggcaagtgaaggcaaagcaggttacattccacaggaagaagaatctgcagtactatgagatatcagcaaagagcaactacaactttgagaagcctttcttgtaccttgctagaaaactggctggagaccaaaaccttcactttgtggagacaccagcgcttgctccaccagaggttcacattgacattgctgatcagcagaagaacgaggccgagctcttacaggctgcagctcaacccctccccgatgacgatgatgatatctttgagtaaatcatccttctagaatgtctgccgtgggaagctcttgcttgttccttttggttttctctatgttgttttggtgttacatataaatcaatcggtctttcttataacaaaaattaggtatgtatttttggacggttcttctgatggtatccaaagctaagttgtttcttcgcaagaatattaagtgattggaaaactttattctacctcc

SEQ ID NO: 100800 - DNA, 937 bp, Arabidopsis thaliana columbia
cgcttcttaaacctcgacgacatcaacgtctgacttcgcttctcctctcacatggctctacctaaccaacaaaccgtagattatcctagcttcaagctcgtcatcgttggtgatggaggcacagggaaaacgacctttgtgaagagacatcttactggggagtttgagaagaagtatgaacctactattggtgtggaggttcatcctttggatttcttcacaaactgcggaaagatccgtttttactgctgggatactgctggacaagagaaatttggtggccttagggatggatactacatccatggtcaatgtgcgataataatgtttgacgtcacagcaaggctcacatacaagaatgttccgacatggcatcgtgatctttgcagggtgtgtgaaaacatcccgattgttctgtgtggaaacaaagtcgatgtgaagaacaggcaagtgaaggcaaagcaagtcacattccacaggaagaagaatctgcagtactatgagatatcagcaaagagcaactacaacttcgagaagcctttcttgtaccttgctaggaaactggctggagaccagaaccttcactttgtggagtcaccagctcttgctccaccagaggttcaccttgacattgctgctcagccaaagaatgaggccgatcttgcagctgctgcagctcagcctctccccgatgatgatgatgacgcatttgagtaaaatcttccaaaaagcctgctgtggttttcctctatgatgttttttgagttgatgttatatataaatcaatcggctctattttagaaccaaaattgggggaattatttggattgttctgttttttgggacccaaagagaatttgcagtcaagttttttctgccttaaagtatatgcggttattggaaaactttgattctaaaaaaaaaaaaaactcgtgcc

SEQ ID NO: 100801 - DNA, 518 bp, Arabidopsis thaliana columbia
actatgacgtcgcatgcacgcgtacgtaagcttggatcctctagagcggccgcccttttttttttttttttaataagaaaacaacttccattaccatatacatatgttatcttagaaaatggtggaaatgacaaaagattccttcttcttttacgtaatttatgcattaaccccgaaatttttaaactctttcaaatccatccattgatagacgatggatggcacaacgtttgtacaccaaccccgaggaaatcccgagtttgccctcctccacccacttcaacctccaccatcaactcttctacgtttccaagggtaattctgtaattcatccaaggcagacgcaaccgtaacgtcatttctagcgttctcgatctcttgatgatcatgactacgactcattaacccaatgttgttgttagacccgaacaaagcaaaaaacttttcgccactgtcataactggtggtttgatcggtggatttaagcgggaaactttgaagaaacgttgatgggtcat

SEQ ID NO: 100802 - DNA, 515 bp, Arabidopsis thaliana columbia
  unsure (1)..(515): unsure at all n locations
nnnnnnnnnnnnnnnnnnnnnnnnnnnnnnnnnnnnnnnnnnnnnnnnnnnnnnnnnnnnnnnnnnnnnnnnncttttttttttttttttttcgtaacaacttcacaatccacacctctctatttaaacagcgtttcccacattttttcatatattcatcaaacaaatctcaatcagttcaaaatcatcttccaacacaaaaaaaaaaaacagagcaacacttaacgataacattctccgtggggatcaagcaatcaccattcttgcttttaacaacaatcttgttcacggttgctgtgtttgtagcagcgcttgatcctgcacctgaagaccccattttcgaactctacatgcacgatttacttggaggaagcagccccaccgcgaggcccatcacgggtttgctcgggaacatttacaacggtcaagttccatttgctaagcagattggtttcactcctcctgagaacggtatagccatacccaatgcaaacggggcactaccaacggttaac

SEQ ID NO: 100803 - DNA, 535 bp, Arabidopsis thaliana columbia
aggtgcactctacaagagcttgacgtcgcatgcacgcgtacgtaagcttggatcctctagagcggccgcccttttggtttggtttttaaaggctttagagaaacaagtttcttgatgcttaaaggcataagattgacacacaacgtatgtattaaaatatatctctcttttcttcttgattaattgtatcatacgaaacataaaatggcaaaagtatatttgaagttttactaatgtggtggaataaactagatcaatatcgaattctcatttccgcaacttcaaagtcctttgccaaggtttcttggtattggtctttgcacttttctctcatgggacaatatcaaaagcggcgactgatatccgccggacaaaacggggtacccaagctaccccgggggcctagggatgttgaaaatgcctaagccttccttgctgctctttcatgtcccctccacacaagaaccgccaccaagaactcttccttcaccgggcgggttaattttgtgaaacaaaacctaaatctccccaccgg

SEQ ID NO: 100804 - DNA, 594 bp, Arabidopsis thaliana columbia
  unsure (1)..(594): unsure at all n locations
nnnnnnnnnnnnnnnnnnnnnnnnnnnnnnnnnnnnnnnnnnnnnnnnnnnnnnnnnnnnnnnnnnnnnnncttggggtttgtggttttttattttttttttttgggggttgaatactaaacaggggatttgaccaaagacagagaatgagctaatgaagttgtgacttaacaagcaaaatcgctgtcgtatacaccatgtgtaatatctcttctagttttcaccaaccaagtattaaataaccaacaagaatacaacatcaagcaatagaaggattgggttttccggcgatcagtaaagtattttccggcgagatgcttgccgggatatacttcactagctttgaatttaatccatgtttcttaacccacttcatcctccctgcatcgatgatctgtttgcatttgaatcctaaaacagctctttccatgggtttcattttcttcacaacttcctccacgctgatcaaagaagcatctcttacttctccttcttcctcctcctttggcatttggatcaaganggcaatgtcacaacaccgggaagctgggaccgnganaacatnaatgccagctagtgacgagcatgttggaa

SEQ ID NO: 100805 - DNA, 488 bp, Arabidopsis thaliana columbia
taggtgccctatacaagactatgacgtcgcatgcacgcgtacgtaagcttggatcctctagagcggccgcccttttgttttttttttttttttacgcatcaaactgatatcatatatgaagtcgcaatgggttacaacttacaagctcttgaaatcgatatttggtcacaaaggtgatccttaaatcgataactgatataaagtactgtacagagttggctaaaccgatggctaccggccgccaaaaaaacctccaggtggagctcctccttcgttcatcaacttatccagaaccacgttgaggtcaacagcttggccgttttcaggcagttttctcactgttgctctgacttggtcccttgggaatcccatggttggcaccctgtccattacatcatcgatggggggctctgctttctgatctaggggaactagacccaccaccggttggtgacggctgaaaccatttgcaaggctgtggcaatgga

SEQ ID NO: 100806 - DNA, 390 bp, Arabidopsis thaliana columbia
ttgtttcaatgggagtatactcagatggatcctacaatgttccagctggacttatctactccttccccgtaacctgccgtaatggagagtggaccattgttcaaggtttaccgattgatgacgcatcgaggaagaagatggatttgacagcagaggagttgaaggaagagaaggacctcgcttactcatgcctctcttaaaccggtcttttctcagctggtttaatcagtgagagctttgtttcgaataaagaagttttgttataaaatgaacttttaataacctcatgagcttgaggtttagttttcctaatgttcccatgatgtgtcggtactgaaatgctgcccatatataaacaatcattttgataattgaccacttaaggtttcc

SEQ ID NO: 100807 - DNA, 674 bp, Arabidopsis thaliana columbia
  unsure (1)..(674): unsure at all n locations
nnnnnnnnnnnnnnnnnnnnnnnnnnnnnnnnnnnnnnnnnnnnnnnnnnnnnnnnnnnnnnnnnnnnnnnnnnnnnnnnnnnnnnnnncctttttttttttttttctcatctgaatttggaaaaattgatcattgtatgtgaaaaatctaaaacccaaatgacatttttgaaaggggactagagtgttgagagagagagagatggtaaaaaaactctcatatgtccccttacaagttaagggtgtggataaaagtaaccacgtgttgcattgtcattgggaggttgtggccggaaatgtgagaatcctgatgatgctgctgcaactgagaacaatggtggtggttgtggtcccggtggctgcggtctcacggcgcttgtttgcccccggtctctgccatccccagttactcatcatcccctcaagcttcacttcctccttttccgttgctccttccctccggcgggattaattataacccgggcatgctccgttccagtaaaggcgatgatccgagggtccataaggaagaggtgaatcaccggctttcccangaatccgganctaccccaagcnaanccacgcgggttccaaaagnntagaaggaatgaaaagcccccaattngcttggggataccggcgaaaantcccagtgngnaanccagnttgcccaa

SEQ ID NO: 100808 - DNA, 812 bp, Arabidopsis thaliana columbia
  unsure (1)..(812): unsure at all n locations
gattccgggttgaaccccccgtccgaatcagaatcgcaacattggctgcttgttgcaaaggagatcctacggcaaccagtggcggaaacaataaggctacccgttccggcggaaggagcgaggccagccccaccgttaggtccggcgctaggtcagtacaggcttaacctgatggctttctgcaaagacttcatcgctaggatttttaagtacaaaccagacactccgatggccgtgacgataacggcgtacaaggacatctctttcaaattcaccgtcaagtctccgacggtgtcgtggtacatcaagaaagcagctggagtcgatataggaagcccacgccccggtcatttgtcggtgacgacgctatcggtgacacacgtgtccgagatcgcgaaggtgaagcagacggaatccgttttgtcagtatatgccgttggaatcgcttcgccaatccatccatggggactgcttattctatggggatcaagatcggtccagatttggaaggaatttaggggtttttaataaagagtgggatccatttgcttttgggaaacgtcttttcttttaatagtaaagtaaaaaccctggattgattttcccgaatggtccgtggtttgggggtaactcccaatggggtggttggttccaatgaaaaattaggctccaaaggctttccaaattcaaaaaagatattaggttggtttaaanncnnggttcaaaaaaaaaaaaaaaaaaaagggccgcccgctttaaagaatccaggctaaggtaggcgtgcatgcgccgtcaaagctcttctataggtc

SEQ ID NO: 100809 - DNA, 814 bp, Arabidopsis thaliana columbia
  unsure (1)..(814): unsure at all n locations
ctggtacgcctgcaggtaccggtccggaattcccgggtcgacccacgcgtccgcaacaatggcggctgctgcgaaggagatcctacggcgaccagtggcggcaacaataaggctaaccgttccggcgggaggagcgaggccagccccaccggtaggtccggcgctaggtcagtacaggcttaacctgatggctttctgcaaagacttcaacgctaggactcaaaagtacaaaccagacactccgatggccgtgacgataacggcgttcaaggacaactctttcgaattcaccgtcaagtctccgacggtgtcgtggtacatcaagaaagcagctggagtcgataaaggaagcacacgcccgggtcatttgtcggtgacgacgctatcggtgagacacgtgtacgagatcgcgaaggtgaagcagacggatccgttttgtcagtatatgccgttggaatcgatttgcaaatccatcattggtactgctaattctatgggtatcaagatcgttcaggatttggagtgattttagggtttctgatgaaagagtggaatcaatttgcttctggtaaacgtctttgctttgagtagtaaagtataaaccatgaatgaatttcacagattgttttgtgttttggtgttacttccattgtgttgtttgtttcaatggataattgagctccaaaagctttccaaaatcaaaatagatattgagtttgtttaaaaaaaaaaaaaaaaaagnnnnnnnnnnnnnnnnnnnnnnnnnnnnnnnaacggnnnnnnnnnnnnnnnnnnnnnnnnnnnnnnnnnnnnn

SEQ ID NO: 100810 - DNA, 630 bp, Arabidopsis thaliana columbia
  unsure (1)..(630): unsure at all n locations
cnnnnnnnnnnnngcgataaatcctctcttccttctacatctctcttttcctctctttctttctctctctcagccctaagagagaagaaataggctctgctctgcgccttttctacaagaaattcaccaaaaaagcttgaatatttatcggaatcaaagcttgggtttttaatcctggtaaagccatgtcacatatggtgtttcagagcgttgtcgctcccaaacccttatctcctctcaaaccctgtttacctatccctcgtccactcgttactctgccttgtaagctccgtcgtggcttcgttagagcttcttcgtcctcgtttcttgtcgatgattcagtttcaggactcgagcgttgcttacagttaccttctggagttgagttaggcacatcttcctctggctctttctctgcaagtactcagatgtgtcctgtgatgaaaggcaaatttggttcggtaggagctgttactttggaaaaagggaagcttgatatgacccagaagatttcctgagactaaccctgagattgcacctggaggaggggggggaacctttggaaagagtatcaatatgggggggggcaagggaagcgaccatactggggatgatgatgataactttgat

SEQ ID NO: 100811 - DNA, 531 bp, Arabidopsis thaliana columbia
  unsure (1)..(531): unsure at all n locations
cctttttagttagtgactcgagattacataaaatcttctatacactggatccacatctgtttcaatcatggcggagaatggtgaagagaagttacttgctgttgcgcgtcacatagccaaaacacttggccacaatgaatccatggccgatgatatcttacagatcttctccaacttcgacggcagattttctcgcgagaagctcgccgaaggtcaagctggagaagatggatccggagtcgccacactcgagcgagctctaaattcaatagacggtcagatctctcgctttgttgctgcggaccaaccaatttgggctgatcctgcagattcagctgctttcctcgacacaatcgatgagctcgcttgcaatcattagagagtggagtcccatggctttcagagaaacctatcggcaatctgtctaacacgcgccgacggtatgatgcaggaagctatgttccgaatcgaannaagggtcagggcnntntttgagnctgnggctnaggtttttgggttaaatcnnaaggg

SEQ ID NO: 100812 - DNA, 694 bp, Arabidopsis thaliana columbia
  unsure (1)..(694): unsure at all n locations
nnnnnnnnnnnnnnnnnnnnnnnnnnnnnnnnnnnnnnnnnnnnnnnnnnnnnnnnnnnnnnnnnnnnnnnnnnnnnnnnnnnnnnnnnnnnnnnnnnnccttttttttttttttttttgttcagaggttttgattccctccctcaaccattacacattttcatttacaatatatgttacaccatttatttgctttaccttaatcataaaaacgcgataattaatgctaacaaataaacagactataaaacctaagaaagagctaattaacaactaaacctttgtttgttgtcgatcgatgcttaattcaatagactaaatcatatatcgcgacttttgtcttcaacgaggagctacattagtaatgggaagcatcatcgactgaacaaagagcggacgtattgatagatagacgatccactaatcctagtatcctacttgttcatgtttactactccggacgaaaaaaccaagtcgttgaggaactgcgagagcaattgagctagtagtgagcatctggacaatagctgacacggttggacgacttcagcttctccttgaacacatagaaagcgatatgggcaatggngcacccggaactncattatccgnaggancncgaaggnggggccccaggccaacggggccatgccccaagncccagccaagggatttagaataaaactnggccaat

SEQ ID NO: 100813 - DNA, 641 bp, Arabidopsis thaliana columbia
gttgatgattactatcaccaagcctgtcttgctaagaaatctgcaggtgcaaaactgaagcatcatttctgtccaaatcatttgagggaccttcaacagcgtgcacggtcgaacaacgagccccatgcttttcttcaggttgaggctcttggtagggttcctttctcttcaatccgcaggcctcgtcctctgcttgaagtggaccctccaaattcagctaaatttggtaatgcagagcataaacctacggataagccccttgatcaagagccgatgcttgcagctagagtgtacattgaggatggtctttgtctcctccttgaagttgatgatatagatcgtttcttggagtttaaccaactccaggacggaggacaccagttgaaacaaagacgacaagcattgttgcagagccttgcggtttcacttcagctcggtgatcccctcgccaagaatgggcaaagccagtctcttgatgattttctctttctaagggttatctctcttccaaagggtcgaaagctacttataaggtatcttcagctaattttccctggcagcgacctaatgcggatagtttgcatggccattttccgtcatttaaggtcattgttcggagtcctttcatctgaccccgatat

SEQ ID NO: 100814 - DNA, 551 bp, Arabidopsis thaliana columbia
  unsure (1)..(551): unsure at all n locations
nnnnnnnnnnnnnnnnnnnnnnnnnnnnnnnnnnnnnnnnnnnnnnnnnnnnnnnnnnnnnnnnnnnnnnnnnnnnnnnnnnnnnnnnnnnnnnnnnnnnnnnnnnnnnnnnnnnnnnnnnnnnnnnnnnaaaaccaaagccacagcttgtcaaacattattgtttcgtgaaacgaattggaccaacaaaatcctacaaatgaaatgaggaatgttttggtgtatagagagaaacattacttaatctcacttgtttctggggatgactctatgggtcaagtcaataagtgcccgcctcgatcttttgacatcttcattggctgtttcaggtagagacccgattgcagctgctgctagattcgcatgttccatggctaattctcttgccctctgtattcccttgctcttcccaagatactctaaagcaatgtcaacattcctaggatctttttcaacttgatcaacaacttcgcgtagttgaggaaactctttcatggcaaagaggattggngctggtatgactccatggcgaatatctgacaacgatccct

SEQ ID NO: 100815 - DNA, 552 bp, Arabidopsis thaliana columbia
  unsure (1)..(552): unsure at all n locations
nnnnnnnnnnnnnnnnnnnnnnnnnnnnnnnnnnnnnnnnnnnnnnnnnnnnnnnnnnnnnnnnnnnnnnnnnnnnnnnnnnnnnnnnnnnnnnnnnnnnnnnnnnnnnnnnnnnnnnnnnnnnnnnnnnnnnnnnnnnnnnnnnnnnnnnnnnnccctgcctcggaaatatttattgctcatctctcattcatatggaaggagtatatacccacataaaagcgtggcaagtctaaatgtcagtaagaggggtgaaaaaagcaccatcaaaagtggaggggtgaaagtcaaaccaaaaaagaacataggggacccagaaaaagattgaaaagcgtggcttcttctataataattcggccacgggacagtgaaaatcatgaacaccagaagccgcccatagccgttgattaaactcttcttgcatctaatctggaacaaacggtgttctacaaagtggacacgttttctgatcatgatccatccaacggncaagacagctccggtgaaatatatgtctgcaatttctcagccaccggatctcttgttctcctt

SEQ ID NO: 100816 - DNA, 584 bp, Arabidopsis thaliana columbia
  unsure (1)..(584): unsure at all n locations
nnnnnnnnnnnnnnnnnnnnnnnnnnnnnnnnnnnnnnnnnnnnnnnnnnnnnnnnnnnnnnnnnnnnnnnnnnnnnnnnnnnnnnnnnnnnnnnnnnnnnnnnnnnnnnccttttttttttttttttgaaatccaaacggtcaaagcaacattacattgtatcaaggtatatgtaatacaccaacttattgtcactgtttaataaacattgatctagttgcttaaaacgtttcatcaggttctgtgcaatggtgttttcatccacactccgcctctaaagccaacatcttcaatcgcgaaagactctagctctggacaccagtttgcggtcacggtcctcaggtacggcattgactgttgcagcacttcccagtccatgtctaggtccgacaatgaacttaacattaaaccttcaattctccagtgagtattctcgtttccccagaatgggtcctgcattttcaccaaattacctgaacatattgacatgtacctcaacatcggaagcttgtgaggactcaaccacgatgggactcgactttccaggatagattggagagaaagcccatgggaccggtgtgga

SEQ ID NO: 100817 - DNA, 525 bp, Arabidopsis thaliana columbia
  unsure (1)..(525): unsure at all n locations
nnnnnnnnnnnnnnnnnnnnnnnnnnnnnnnnnnnnnnnnnnnnnnnnnnnnnnnnnnnnnnnnnnnnnnnnncttttttttttttttttttaaaatagaataattatttattttgtaaaataatagtaatgataatcatatgtgtgatataattttacactgcattttactttttagctaccaaaactgcaaggccatggatgatgatgactgaggtggcataggacaaatttgcaaacatgaccctgaaagcttcaacctttcttctgcatcaactgaagctcttcagatatctctgtacaccaaagaaccctaaataacttctcatctctttaagaaacctaatcttccagatggatatatcattcccattagataactccatccatgtcctgcatcacccccacgaaagacaacattggaggatctgttcattaggtttcttctagtgaattgccattattctcatgtaatagctgaagacattcatatggattagcatagaaggagtcttcttctttcgg

SEQ ID NO: 100818 - DNA, 3484 bp, Arabidopsis thaliana columbia
cattaccagtgagaggacttcttgttatatatcatatcttcttcgttctcgatttacgagatccttgattctctctttctctaatcttatctcatctgaagtatagttaagaattcactcgttgttcgagagtagtaagctgaagaaatggagagctacttgaacgaaaacttcggcgatgtgaagccgaagaactcgtccgatgaggcgttgcagcgttggaggaagctctgctggatcgtcaagaatcctaaaaggagatttagattcactgctaatctgtctaagcgttccgaggccgaggcgattcggcgttccaatcaggaaaaatttcgagtggcggtcttagtttcacaagctgcacttcagttcattaatagtttaaagttgtccagtgagtatacactatctgaagaagtaagaaaagcagggtttgagatttgtcctgatgagttgggatcaattgtagaaggtcatgatttgaaaaagttgaaaattcatggtggaactgagggcctcactgaaaaactttccacgtctattgctagtggaattagtacatctgaagacctgctgagtgtaagaaaagaaatttatggaatcaaccaattcacagaaagccccagccgtggcttttggttatttgtttgggaagcccttcaggatacaacacttatgattctagctgcatgtgcgtttgtttcacttatagttggaatactgatggaagggtggcctattggtgcccatgacggacttggtatagtggcgagtattctgcttgttgtgtttgtcactgccactagtgattataggcaatccctgcaattcaaggacctggatgcagagaagaaaaagattgtggttcaggttacgagagacaaactgaggcaaaaaatctcaatatatgatctactccctggagatgttgttcatcttggcattggagaccagattccagcagatgggctttttatctcagggttttctgttctgataaatgaatcgagcttgactggagaaagtgaaccggttagtgtcagtgtggaacacccgtttcttctctctggtaccaaggttcaggatggatcttgcaaaatgttggtgactacagttggaatgaggactcaatggggtaaactgatggctacactaagtgaaggcggtgatgatgagacaccgttgcaagtaaaacttaatggtgtggcaaccatcattggtaaaataggtctattttttgctgtcattacgtttgctgttttggttcaaggattggctaatcagaagcgcctagataattctcactggatctggactgctgatgaattgatggcgatgctagaatattttgctgttgctgtaacaattgttgtggttgcagttccggagggtctgccgttggctgtgacattaagtcttgcttttgccatgaaaaagatgatgaatgacaaagcgctagtgcgcaatcttgctgcttgtgagacaatgggatctgcaacaactatttgtagtgacaaaactggaactcttacaacaaatcacatgacagttgtaaaagcctgcatctgtgaacaagccaaagaggttaatggtcctgatgctgctatgaaatttgcctctggtatccctgagtctgctgttaaacttctactgcaatctatatttactaacactggtggtgagattgttgtgggcaaaggaaacaaaaccgagatactgggaactcctacagaaactgctctgttagaatttgggttgtcactcggaggggacttccaagaagtaaggcaagcctcaaatgttgtgaaagttgagccctttaactctacaaagaaaagaatgggagttgtcattgagctgcctgaaagacatttccgggcacattgtaagggtgcttcagagatagttttagattcttgtgataagtacatcaacaaagatggtgaagttgttcctctcgatgaaaaatcgaccagtcacctgaagaacataattgaggaatttgctagcgaagcacttcgaactctttgcctagcgtatttcgaaattggtgatgaattctcattagaggctcctattccaagtggtggatacacttgtataggtattgtgggcatcaaagaccctgtacgccctggtgtcaaggagtctgttgcgatttgtaaatctgctggcatcactgtcagaatggtgactggagataaccttactactgcgaaggccatagccagggagtgtggcatattgactgatgatggcatagctatcgaaggtcctgaattccgggagaaaagtgatgaggaactgctcaagctaatcccaaaattgcaggtgatggcacgatcctcgcccatggataagcatactttggtgagactcctccgcacaatgtttcaggaagtcgttgcagtgacaggtgatggaacaaatgatgctccagcacttcatgaagctgatattggactcgcaatgggcatttccggaactgaggtggcaaaagaaagtgcggatgtgattatcctagatgataacttctctacgattgtcatagtagccaaatggggccgttctgtgtacataaatattcagaaatttgtccagttccagctgacagtaaatgttgtggctcttattgtcaacttcttatcagcctgcctcactggaaacgcgcctctgactgctgtccaactactgtgggttaacatgataatggacacacttggagcactcgcgctagcgactgaaccaccacaggacgacctgatgaagagatctccagtgggaaggaaaggaaacttcataagtaatgtaatgtggaggaacatccttggtcagtcactctaccagcttgtcatcatatggtgtcttcaaacaaagggaaagacaatgtttggtctcgatggccccgactctgatctaacactcaatacccttattttcaacatttttgtcttctgccaggtattcaatgagataagctcgagggaaatggaaaaaattgatgtgttcaaggggatactaaagaactacgtattcgtagcggttctaacatgtacagtggtgttccaagtaatcataatcgagctgctgggtacatttgcggatacaacaccattaaatttgggacaatggttggttagcatcatactcgggttccttggcatgcctgttgctgctgccttgaagatgatccctgttggttcacactaagcaacacattgtataatgtgattccttgtgccacaactttggcattgaaaggtaccaattttttctccggcctttggaagtttgatatcccaagatggccttggactagttacggtgcttttttatgttttcattttggccaaatgtataagtgatttggaggagcatttgcttcgtaaatatttcaatgttgtggaacttgttactttatcttttgttcttctgttagataccttttactgaataagtgaagcataggctaaattgtctctca

SEQ ID NO: 100819 - DNA, 5028 bp, Arabidopsis thaliana columbia
  unsure (1)..(5028): unsure at all n locations
gatcccaagtcagtaaatagctttgactttcttgaccagctccgagtcatgtccgaataaatgagtgttccaaaaaaaaaaaaaaaaccatggccatgaggaaatttcagaacaggcagacgaaacttcgacgaagctcacttagtgcgagacgacgcgtcaaagcatcgtcttcatcttgacccatataaaggtaaataacaataagttaaaagcacccattaccagtgagaggacttcttgttatatatcatatcttcttcgttctcgatttacgagatccttgattctctctttctctaatcttatctcatctgaagtatagttaagaattcactcgttgttcgagagtagtaagctgaagaaatggagagctacttgaacgaaaacttcggcgatgtgaagccgaagaactcgtccgatgaggcgttgcagcgttggaggaagctctgctggatcgtcaagaatcctaaaaggagatttagattcactgctaatctgtctaagcgttccgaggccgaggcgattcggcgttccaatcaggtgcttctttcttctcactttgattactgaaatatttctttctatttctgcttgtatactgttggagatctaataagtgatctttctgcattccgagttttttgtttggttgactcactgtacttactggatgggatctaagtgagctcgtttttagtatttttctagttacctatcctcaggttagggattgttatcactagacatgattacattaggttctgtttctaatttaagatgtagatttttaggttcttcgtggtgtttgctagtaagaatgttcaagcaaatatgactcattagtagcaaacaacccatttcaagccttgtgtttcttgtagtttgtattgaaggaggcgttaattagagcgatcaaagcgttctgttcatttttcctttgagaataaattcttactgctattggtgctttgttctaataccattttcctttgtcaaccttatgaatgcaggaaaaatttcgagtggcggtcttagtttcacaagctgcacttcagttcattaatagtgagaatagactactcccttgtgttattcaatatgtatttgatttccttaacgagaaggtattgcgtgcttacaggtttaaagttgtccagtgagtatacactacctgaagaagtaagaaaagcagggtttgagatttgtcctgatgagttgggatcaattgtagaaggtcatgatttgaaaaagttgaaaattcatggtggaactgagggcctcactgaaaaactttccacgtctattgctagtggaattagtacatctgaagacctgctgagtgtaagaaaagaaatttatggaatcaaccaattcacagaaagccccagccgtggcttttggttatttgtttgggaagcccttcaggatacaacacttatgattctagctgcatgtgcgtttgtttcacttatagttggaatactgatggaagggtggcctattggtgcccatgacggacttggtatagtggcgagtattctgcttgttgtgtttgtcactgccactagtgattataggcaatccctgcaattcaaggacctggatgcagagaagaaaaagattgtggttcaggttacgagagacaaactgaggcaaaaaatctcaatatatgatctactccctggagatgttgttcatcttggcattggagaccagattccagcagatgggctttttatctcagggttttctgttctgataaatgaatcgagcttgactggagaaagtgaaccggttagtgtcagtgtggaacacccgtttcttctctctggtaccaaggttcaggatggatcttgcaaaatgttggtgactacagttggaatgaggactcaatggggtaaactgatggctacactaagtgaaggcggtgatgatgagacaccgttgcaagtaaaacttaatggtgtggcaaccatcattggtaaaataggtctattttttgctgtcattacgtttgctgttttggttcaaggattggctaatcagaagcgcctagataattctcactggatctggactgctgatgaattgatggcgatgctagaatattttgctgttgctgtaacaattgttgtggttgcagttccggagggtctgccgttggctgtgacattaagtcttgcttttgccatgaaaaagatgatgaatgacaaagcgctagtgcgcaatcttgctgcttgtgagacaatgggatctgcaacaactatttgtagtgacaaaactggaactcttacaacaaatcacatgacagttgtaaaagcctgcatctgtgaacaagccaaagaggttaatggtcctgatgctgctatgaaatttgcctctggtatccctgagtctgctgttaaacttctactgcaatctatatttactaacactggtggtgagattgttgtgggcaaaggaaacaaaaccgagatactgggaactcctacagaaactgctctgttagaatttgggttgtcactcggaggggacttccaagaagtaaggcaagcctcaaatgttgtgaaagttgagccctttaactctacaaagaaaagaatgggagttgtcattgagctgcctgaaagacatttccgggcacattgtaagggtgcttcagagatagttttagattcttgtgataagtacatcaacaaagatggtgaagttgttcctctcgatgaaaaatcgaccagtcacctgaagaacataattgaggaatttgctagcgaagcacttcgaactctttgcctagcgtatttcgaaattggtgatgaattccgggagaaaagtgatgaggaactgctcaagctaatcccaaaattgcaggtgattgtctgccaaacacaagttactttatcctgttttatgcagtgtgttggtagttcacatccgcaaacaggaaacaaaccctcaatttcattgcattagcttccggattctgaaaaactccttaggacatactcttctacaaaagattcaagtataatttccttcttgcaggtgatggcacgatcctcgcccatggataagcatactttggtgagactcctccgcacaatgtttcaggaagtcgttgcagtgacaggtgatggaacaaatgatgctccagcacttcatgaagctgatattggactcgcaatgggcatttccggaactgaggtgtgtactcaatcttcattgtccctatttcattatctggtttgtgagaaaatctaacaattgagtttgggttctcatggaaggacaacacttacatattctattcctcgcgtcccgtaggtggcaaaagaaagtgcggatgtgattatcctagatgataacttctctacgattgtcacagtagccaaatggggccgttctgtgtacataaatattcagaaatttgtccagttccagctgacagtaaatgttgtggctcttattgtcaacttcttatcagcctgcctcactggttagttcccaacccacatttatttttctcttgttcaaaagactaatctcctcagggattgcaactaacttctctgttacattgacactaactactgtgggtctcaggaaacgcgcctctgactgctgtccaactactgtgggttaacatgataatggacacacttggagcactcgcgctagcgactgaaccaccacaggacgacctgatgaagagatctccagtgggaaggaaaggaaacttcataagtaatgtaatgtggaggaacatccttggtcagtcactctaccagcttgtcatcatatggtgtcttcaaacaaagggaaagacaatgtttggtctcgatggccccgactctgatctaacactccatacccttattttcaacattttttgtcttctgccaggtaacttgccgcgtctggatcttaaaaaggaaaacaaccaacattgaccataaccacgttctcatcataatgtatgatatttgtttcaggtattcaatgagataagctcgagggaaatggaaaaaattgatgtgttcaaggggatactaaagaactacgtattcgtagcggttctaacatgtacagtggtgttccaagtaatcataatcgagctgctgggtacatttgcggatacaacaccattaaatttgggacaatggttggttagcatcatactcgggttccttggcatgcctgttgctgctgccttgaagatgatccctgttggttcacactaagcaacacattgtataatgtgattccttgtgccacaactttggcattgaaaggtaccaattttttctccggcctttggaagtttgatatcccaagatggccttggactagttacggtgcttttttatgttttcattttggccaaatgtataagtgatttggaggagcatttgcttcgtaaatatttcaatgttgtggaacttgttactttatcttttgttcttctgttagataccttttactgaataagtgaagcataggctaaattgtctctcaccaattctagggctaaattttgtctgtcaccaatacactgacaaattttcagtgacaattccgagtctcagctcaaaatacaattggtcaatggcactcttaacagaaacaacaagtgttgaatcataggaattacactcaacggtcgaaaattgttataaatgaaaagacatttctaagagttggttataatattggaaccaattatcaaatcaaaaacatgaaacaagaaaaagtgtactaatggaacaacaacattttccaaaagcagcagatgagtgtgccatcattcttcaaaaatcaattgtagagccatcattcttcctccattgctgtagctgcgtaatgcccaacgtccttttcttagctacatcccttgctggccaggaacngggtcttgcttgttaagancgagttgggggtttaacaacccctttcggcataggnaacttccccnccanctccttggggggacaaanaccccgngggtcntcccgcaagntnaaaagc

SEQ ID NO: 100820 - DNA, 662 bp, Arabidopsis thaliana columbia
  unsure (1)..(662): unsure at all n locations
nnnnnnnnnnnnnnnnnnnnnnnnnnnnnnnnnnnnnnnnnnnnnnnnnnnnnnnnnnnnnnnnnnnnnnnnnnnnnnnnnnnnnnnnnnnnnnnnnncggccgcgcattacatcaccaagattcacaacctgacttagattcttatcagaaagccccagtagaaaagaatctcctgtattaacaaacttttagtttaacttataagagaagagaagaagaaaaactaaacgaaaaaacaaaaactcttcttttgcgggaatcacacaatcttctatgacccgggcttggatatctcaaggtataccatttgagtatacccattgaacactgacttatccagacgacctaaaccgattcgttggaacaaccggtgcttgccatctgctacgattggtggagtcgctcgagcagggtcataccgcgactgatgggttaatgaaggtcctgcgaccggaggtagctcccaatagacgtcaagaattgattcaacgtagcgactgttttgaaaatgctgattgtatgaaatcggcgtgttagtgtggttgaatcacncncattcccccttaactcccaccatgttncccngnccgaaagtccncgnataatgnttttccagantctccccttggccaccaggtcanggggcnttnaaagtngncg

SEQ ID NO: 100821 - DNA, 663 bp, Arabidopsis thaliana columbia
  unsure (1)..(663): unsure at all n locations
gaatgnnnnnnnnnnnnnnnnnnnnnnnnnnnnnnnnnnnnnnnnnnnnnnnnnnnnnnnnnnnnnnnnnnnnnnnnnnnctttttttttttttttggttaaaggaagagtttttatgagtttttcaaggttctgtcgatacacaacactaatacatatgtatttacaacagaacatggcccgaaagaaaataaagctaaggcattgcacatggatcttacacgataccaatggcattatcaaaaaccctaatatacgaaaacacctaaaagtacagtaggctttattttgttcttgttagtccttagagaaagattgtgtaaaccttagatcatcaggtttacctacagtcttgttcgtcatataatcacagctgttttgcctacctttagcttcttgtgttgctgctgtagtagacgtcatcccctgtgactttgacttcgtatctggttcatctaacccgatcgggattgcgcctggttagagtttttatagcaaagtcgatacacggggtcttgccagataatttggacccggggggngggctcggnaaanccaggttttcagagnatggggnaaaatttcccgggggccccgggggaaangngaccccttcngntngggggggtggtaaaggggttanaannannccggngggtgnaa

SEQ ID NO: 100822 - DNA, 486 bp, Arabidopsis thaliana columbia
cacaatccgatcctctggtgggctctcagaggatgagatccagataccaaagtttagagagaagaccaaagagaacaaaaagagaaaaagagaaagatgaggttgttcgatccatggccagtgttcttcaagagagaatggaaacgttgttggccgtttctcaccggattcgccgttaccggcgttctcatcaccaagctcaccgctggactcactgaggaagacgccaagaactccaagtttgtccaacaacacaggcggtgatctactgacgtgagttgtcgaagctgagaagccgaagcgttcttatggaaactactgagagtgcttcagctttcaaacctgttctaataacatgaaagagaggattatagacactatcaatctctcgtttccttttctctgtgttttcacaactcttgaacagtgcaaattctactctgtttatccaatttttttcctttgcaatgaatttcttcttctctt

SEQ ID NO: 100823 - DNA, 778 bp, Arabidopsis thaliana columbia
ctctagggttggttggtacgcctgcaggtcccggtccggaattcccgggtcgacccacgcgtccgcaacaacaacaaaacttaagggaaagataatcgtttgtctgtgcagagagagagagagagaaaatgaggttgttcgatccatggccagtgttcttcaagagagaatggaaacgttgctggccattcctcaccggtttcgccgtcaccggcgttctcatcaccaagctaaccgccggactcactgaggaagatgctaagaactccaagttcgtccagcaacacagaaggtgattcactgaagcaaaatgtagaagctgacaaggcatatagatttgggactatagtgaatgcttcagctttgaaacatgttcaataacaaagaagatcattctatatactcttttattttctctgagtttcgaaatcagcttttccttttctgaaacttagcaatggaatggtttttgttcacagtatcttattcccatttgtttggaaatggattttatggcctttttgaatcatgcgaacgcacatttcaataaggatttcgttccccaatgaatattaacgtttgttctaataatcctttggttctcaatctcataaaatggaatggagaacctattcccttcaatttgtttggggggacacccaaacctttttccaatagttttgaggggggggggcccgctttttttagaggtatctccaagggttttacgtttccccccgtgcttttggccaaacagccaaaaggcctcttttttttt

SEQ ID NO: 100824 - DNA, 716 bp, Arabidopsis thaliana columbia
ctcaacgaaagccaaattcgaatcggtccacaaaataccaaacgtcgtcggatcaatctacaccacacatattccgatcatcgctccgaaagtccacgtggcggcgtattttaacaagagacacacggagaggaatcagaagacgtcgtactcgataacagtacaaggagtggtcaacgccgacgggatcttcaccgacgtttgtatcggaaacccaggatctctcaccgacgatcagatcctggagaaatcttcgctttcacggcaaagagcggcgcgtgggatgttacgtgacagctggatagttggaaactctgggtttccgttgactgattatcttcttgtaccgtacacgagacagaatctgacgtggacgcagcacgcgtttaacgagagtatcggagagattcaggggattgcgacggctgcgtttgagaggctcaaaggacggtgggcttgtttgcagaaacggacggaggtgaagcttcaggatctgccgtacgtgcttggagcttgttgtgtgttgcataacatttgtgagatgaggaaggaggagatgttgccggagttgaagtttgaggtttttgatgatgtggcggtgccggagaataatatccgatctgctagtgcggttaatacgagggatcatatctctcacaatctcttgcatcgtggacttgccgggacaagaactctataggctctgtttttcacct

SEQ ID NO: 100825 - DNA, 553 bp, Arabidopsis thaliana columbia
  unsure (1)..(553): unsure at all n locations
agctacnnnnnnnnnnnnnnnnnnnnnnnnnnnnnnnnnnnnnnnnnnnnnnnnnnnnnnnnnnnnnnnnnnnnnnnnnnnnnnnnnnnnnnnnnnnccttttttttttttttttttttttttttttaagaggctattttccttcattccaagagttttactggaatttccgaacacgctggtctggtccggtcacaacatactacttttaccgcagaacccagaccagagccccatctgggcccagtttgatgaaattgatcgtaaactacaaacatttgtataaaaagcaaagataagtcaaaagaatgacacctaaaacccctcaggtagtatttctctgcaacctgtacttgtgagaatcaattatacaaatgattttgttactaaagaaaagaccgaaagaaagaaagaaagaaagagacgcaaatatgatctgatctgattagatcggcgcatagattacccgtgggatcttgggattttgtactgttttttcagaaactgagatgcctctgaatcgtttctggggcaaagcactcggaccaatgtt

SEQ ID NO: 100826 - DNA, 1119 bp, Arabidopsis thaliana columbia
ctctgacgtcgcatgcacgcgtacgtaagcttggatcctctagagcggccgccctttttttttttttttttttttttttttttttttttggacacctaaaacccctcaggtagtatttctctgcaacctgtacttgtgagaatcaattatacaaatgattttgttactaaagaaaagaccgaaagaaagaaagagacgcaaatatgatctgatctgattagatcggcgcataaattacccgggggatcttgggattttgtactgttttttcaaaaactgagatgcctctgaatcgtttctgtggcaaagcactcgtaccaatgtttgggtgtccgctccaagtttgccttttcctccttgctgcatctctagactgcttctaaacctcaagtcatcaataagctcccgtgtctcatatccgtgcaactttacaacaagacgaactctggctacttggttttcaaccactcctttcggaagtccatccccaccagaaataaagaattcctttaagacctttacatcttcttttaacagctttgactcgcttggatgaaatacacgagacgcgcctccatctaatagtacacgaagcaacccatcaagtgatgcttggagcaggctggtgactatccgatcccttaatggctccattatgacactacatagctgtccaagttccgtgtctagggcttcgattaatccttccaatcttgattgagaaacatttggcttatacaaattttcaataaaatggctccccttaaatccgcaggaagataatcttggtcccagtaaactcgcaaatacgatccagagctgcattgatatcttttctactcccctcaaaagattccttctggttaaaactcttggatttctcaaccatagattttctgatgacaatcttttcacgaggtttttttgctatccagcgtagccacatgctgtcttctaacttgctcagttgactaacagcataatgtaaagtattgagctgaacgcaaagcatagcggttgcaggaacatcaatgttaatcgaccttctctcatcaaggtgttttgagtcgaatagttccttcttaacaaaaaccttgattgctgtttccttcttgtaac

SEQ ID NO: 100827 - DNA, 462 bp, Arabidopsis thaliana columbia
  unsure (1)..(462): unsure at all n locations
acccanncaaaaaccttgggtccncnntaccnaaaaacaccganaagccntgggatnnccaatgggacctttgggtggccccgtccttgggagcactagctgcagcagctttaccacccaatacatattgagagcttcagcaattaaggccttgggctcgttccgaagcaacgcaaccaattaatgaaggctttttttaagataatgtcaagaaacacctttaagatttatatgctttaattattatttggtgttcttttgtgtgtaatgagagagatggtggattgatgttaattatgaaatggctcagtgacttctatttccttctttagtttttgattgtctttgttaatcgtttgcctttggtttctcttagtagttacaaattcatgttttctcttcatgtcagttcgtaaatatcgaacaatccaagttggaatttattattcacaacatcacaag

SEQ ID NO: 100828 - DNA, 600 bp, Arabidopsis thaliana columbia
  unsure (1)..(600): unsure at all n locations
agaagcaaaagaaaaaaaagctattgtttgaaagaagaagaagttaactatggcaaaggatgtggaagccgttcccggagaaggatttcagacaagagactatcaagatccgccaccagctccgtttattgatggagcgganttaaagaagtggtctttctacagagcagttatcgccgagttcgtagccactctcctcttcttatacatcaccgttttgacagtcatcggttacaagattcagtccgatactgatgccggtggcgtagattgcgggcggagttggaatcctcggtatcgcttgggcctttggtggtatgatcttccatcctcgtctacttcaccccccgggtatctcttgggtggtcacatttaaccccagcgggtggacaattttgggctatttcttttggccccgaaaaagggtccggtaaccctaggggcccctttttgtaccatcaatccccccaagtgttttgggtccgattttttcggggttggttttgtcaaaagccttccaaaggttttacttacccccntacgggggnggggcacctcttttgcggtggttaaananaagggccntttngcnnanggnta

SEQ ID NO: 100829 - DNA, 744 bp, Arabidopsis thaliana columbia
  unsure (1)..(744): unsure at all n locations
tgcaggtcccggttttcggattcccggctcgacccacgcgtccgtgttctcgtcttctcgtaggtggtcacattaacccagctgtgactttcggtctgttcttggcccgtaaggtctctttggtgcgagctcttggttacatgatagctcagtgtcttggagccatttgtggtgtgggtttcgtgaaagctttcatgaaaactccttacaacactcttggtggttgagctaacaccgtagctgacggttacagcaaaggaactgctctcggagctgagattattggaactttcgttcttgtttacaccgttttctctgcaactgaccctaagagaagcgctcgtgactctcacatccccgttttggctccacttccaattggatttgctgtgttcatggtgcatttggctactatccccattactggaactggtatcaacccagctaggagctttcggtgctgccgttatctacaacaagcggcaagccgtgggatgaccactggatattttgggttggaccattcattggagctgcgatagctgcattctaccaccaattcgttctgagagcttcaggttctaagtctcttggatcattcagaagtgctgccaacgtctaaacacatcaaaccagatttctcaagactaaatgaagttgtgatctctctgtacaaatataagaaaaggaatcnttactgttcatctctacttgcatcataactgcttcctccggtgttcgctc

SEQ ID NO: 100830 - DNA, 408 bp, Arabidopsis thaliana columbia
  unsure (1)..(408): unsure at all n locations
gcaaaagaaaaaaaagctattgtttgaaagaagaagaagttaactatggcaaaggatgtggaagccgttcccggagaaggatttcagacaagagactatcaagatccgccaccagctccgtttattgatggagcgganttaaagaagtggtctttctacagagcagttatcgccgagttcgtagccactctcctcttcttatacatcaccgttttgacagtcatcggttacaagattcagtccgatactgatgccggtggcgtagattccgggcggagtttggaatcctcggtatcgcttgggccttttggtgggtttgacctnaacccnggtttttttaccccccccgtttttttgggggggccaaatttacccccggggggnaaaatttggggcttttttttnggc

SEQ ID NO: 100831 - DNA, 607 bp, Arabidopsis thaliana columbia
  unsure (1)..(607): unsure at all n locations
ctgtcgtcgtcacacagcaccacaaactccatagctagctagagagtaaaaagaacaaagatgtcgaaagaagtgagcgaagaaggcaaaacccaccatggaaaagactacgtggatcctccaccagctcctcttctcgacatgggtgagctcaaatcctggtctttctacagagctctcatcgctgagttcatcgctacactcctcttcctctacgtcaccgtcgctactgtcatcggccacaagaagcaaaccggtccttgtgacggcgttggtttacttggtatcgcttgggctttcggtggtatgatcttcgtcctcgtctactccacccccggtatctctggtggtcacattaacccagctgtgactttcggtctgttcttggcccgtaaggctctttgtgcgagctctttgttacatgatagctcagtggcttggggccatttctggtgtggggttcgtgaaagctttaatgaaaacctcttacaaaattgtttggggggggggttaacaccgagtttcgggttaagaaaaganctttttgcggttantattgactttgcctgttaaccgttttttaaatggtttctggtaaaggaattgc

SEQ ID NO: 100832 - DNA, 1065 bp, Arabidopsis thaliana columbia
ctgggcccgccctcgaggtcgacggtatcgataagcttgatatcgaattcgcggccgcgcaaaggatgtggaagccgttcccggagaaggatttcagacaagagactatcaagatccgccaccagctccgtttattgatggagcggagctaaagaagtggtctttctacagagcagttatcgcagagttcgtagccactctcctcttcttatacatcaccgttttgacagtcatcggttacaagattcagtccgatactgatgccggtggcgtagattgcggcggagttggaatcctcggtatcgcttgggcctttggtggtatgatcttcatcctcgtctactgcaccgccggtatctctggtggtcacattaacccagcggtgacatttgggctattcttggcacgtaaagtgtcgttacctagggccctattgtacataatcgctcagtgtttgggtgcgatttgtggagttggttttgtcaaagccttccaaagctcttactacacccgttacggaggtggagccaactctctagccgatggctacagcacagggaccggtctagccgcagagatcattggtactttcgttcttgtctacaccgtcttctctgccactgaccccaaacgtagtgccagagactcccacgttccggtgttggcgccacttccaatcggatttgccgtgttcatgggtacattggctaccattcccattaccggaacccggaataaacccggcaagggagtttcgagctggcgttatctacaacaagagcaagccatgggatgaccactggatattttgggttggaccattcgtgggagcattagcagcagcagcataccatcaatatatcttgagagctgcagcaatcaaagctttggcttcattccgcagcaacccaaccaattgatgattcatgagacttcttagaacaatttgagatctttttttttgtgtgcttaatgagagatatttgtgtgttttaatttgatgtaatcggatttattcattttcatagtttaatttggtcttaattcatctttgtccgttgcttt

SEQ ID NO: 100833 - DNA, 1219 bp, Arabidopsis thaliana columbia
  unsure (1)..(1219): unsure at all n locations
ctacaacaaccacaaagcaaaacacttacttagaaagtccagaaacatccattaacacatatggctaaagacgtggaaggacctgatggatttcagacgagagattacgaagatcctccgccaacaccgtttttcgacgcagaggagcttaccaagtggtctttatacagagcagtcatcgccgagttcgtagccactctcctcttcttgtacgtcaccgttttaactgtcattggttacaagattcagtccgacacaaaagccggtggagttgactgcggcggcgtcggaatccttggcatcgcgtgggcttttggtggcatgatcttcatccttgtctactgcaccgccggtatctcaggtggtcacataaaccctgcggtgacgtttggtttgttcttagcccggaaggtatcgctgattagggcggtgctttacatggtggctcagtgtttgggtgctatttgtggagttgggtttgtgaaggcatttcaaagctctcactatgttaattacggtggaggagccaactttctagctgacggctacaatacaggcaccggactcgcggcagagatcatcggaacattcgtgcttgtctacacagtcttctccgctactgatcccaaacgcaacgctagagactcccacgttccggttttggcgccacttccgattgggtttgcggtgtttatggtacatttggccactattccgatcaccggaaccggtatcaacccggctaggagtttcggagccgccgtaatctttaacaagagcaagccatgggatgaccactggatattctgggtgggaccattcattggagctacgatagctgcattttatcaccaattcgttctaagggcctcaggctccaagtccctcggttcattcagaagtgcagccaacgtttaaacttagccacgaaagaaaaaaagtgtgcctacaattatgtagaaacatatcctcttttccactcgtatcttagcttcttcctattttctatttctaactgtgtgattccatattaaatcgagtgaaatgtttttcaattcatctttgcaacgtatgtaagtttggtgtattgagaaaaaaaatcgagaaagacaactttttcttcgaaaaaaaaccctaaaaaaaaaaaaaaagnnnnnnnnnnnnnnnnnnnnnnnnnnnnnnnnnnnnnnnnnnnnnnnnnnnnnnnnnnnnnnnnnnn

SEQ ID NO: 100834 - DNA, 1288 bp, Arabidopsis thaliana columbia
ggtatcctggacgctacggtccggaaatccgggtcgacccaagcctccgttacggaggcaaaaaaacaacagaaggggcttcacaaacacaacatatccacaatacaaaacacaactttcatatataacaaaaaaagttatagaaatggccaaagacgtggaaggacctgagggatttcagacaagagactacgaagatccgccaccaactccgtttttcgatgcggacgagcttaccaagtggtctttatacagagccgtcattgccgagttcgtagccactctcctcttcttgtacatcaccgttttaactgtcatcggttacaagattcagtccgacacaaaagccggtggagttgactgcggcggcgtcggaatccttggcatcgcgtgggcttttggtggcatgatcttcatccttgtctactgcaccgccggtatctcaggtggtcacataaaccctgcggtgacgtttggtttgttcttagcccggaaggtatcgctgattagggcggtgctttacatggtggctcagtgtttgggtgctatttgtggagttgggtttcgtcaaagctttcaaagctcttactatgatcgttacggtggaggagccaactctctagcagacggctacaacacaggcaccggactagccgcagagatcattggaacattcgttctcgtctacacagtcttctccgctactgatcccaaacgtaacgctagagactcccacgttccggttttggcgccacttccgattgggtttgcggtgtttatggtacatttggccactattccgatcaccggaaccggcatcaacccggctaggagtttcggagctgccgtaatctataacaagagcaagccatgggatgaccactggatattctgggtgggaccattcattggagctgcgatagctgcattttatcaccaatttgtcctaagggcttcaggttccaagtcacttggatccttcagaagtgcagccaacgtttgagtttttgccacacaaaaaaaaacctatcataataacaacaattacaaaatggttgtgttattatgtatgtacaaaaattggcaactttgcttgtaaaactatgcactatatttcttcttgctttttctgttttcattgtggtgtaatactttgatatgtgccaatgccaatgtttgtgtactcgggaaaacaattaatgaaaaccaaattctttttgccctatcctccctctttttattttatacagatgatattaccagctaaaagcatatctacatagactac

SEQ ID NO: 100835 - DNA, 1466 bp, Arabidopsis thaliana columbia
  unsure (1)..(1466): unsure at all n locations
nnnnnnnnnnnnnnnnnnnnnnnnnnnnnnnnnnnnnnnnnnnnnnnnnnnnnnnnnnnnnnnnnnnnnnnccacgcgtccgaaaaaccaaaaaaacatataatcgttggcaaaaatactaagaatattttttaaaagataaagcaataaaaaagtatacaaacaaattaacaagaaggagagctctcactataaaacagagcacatgttcttctcactaaccactccaacagagaagcaaaagaaaaaaaaaagctattgtttgaaagaagaagaagttaactatggcaaaggatgtggaagccgttcccggagaaggatttcagacaagagactatcaagatccgccaccagctccgtttattgatggagcggagctaaagaagtggtctttctacagagcagttatcgcagagttcgtagccactctcctcttcttatacatcaccgttttgacagtcatcggttacaagattcagtccgatactgatgccggtggcgtagattgcggcggagttggaatcctcggtatcgcttgggcctttggtggtatgatcttcatcctcgtctactgcaccgccggtatctctggtggtcacattaacccagcggtgacatttgggctattcttggcacgtaaagtgtcgttacctagggccctattgtacataatcgctcagtgtttgggtgcgatttgtggagttggttttgtcaaagccttccaaagctcttactacacccgttacggaggtggagccaactctctagccgatggctacagcacagggaccggtctagccgcagagatcattggtactttcgttcttgtctacaccgtcttctctgctactgaccccaaacgtagtgctagagactcccacgttccggtgttggcgccacttccaatcggatttgccgtgttcatggtacatttggctaccattcccattaccggaaccggaattaacccggcaaggagtttcggagctgccgtaatctacaacaagagcaagccatgggatgaccactggatattttgggttggaccattcattggagctgcgatagctgcattctaccaccaattcgttctgagagcttcaggttctaagtctcttggatcattcagaagtgctgccaacgtctaaacacatcaaaccagatttctcaagaataaatgaagttgtgatctctctgtacaaatctaaatcagtcacttgcagttttcatttccctttcttatatttgtgttttccacttgctcttttgtgaattttccttcggtgtaattgttttttctttcgcttttaaacgagtgattggaattataatcaatgaaatcaaagaggttcttaagcgttgtgtaaaaaaaaaaaaaaaaacccaagggcggccgctctagaggatccaagcttacgtacgcgtgcnnnnnnnnnnnnnnnnnnnnnnnnnnnnnnnnnnnnnnn

SEQ ID NO: 100836 - DNA, 1202 bp, Arabidopsis thaliana columbia
  unsure (1)..(1202): unsure at all n locations
nnnnnnnnnnnnnnnnnnnnnctgtcgtcgtcacccacgcgtccaaactccatagctagctagagagtaaaaagaacaaagatgtcgaaagaagtgagcgaagaaggcaaaacccaccatggaaaagactacgtggatcctccaccagctcctcttctcgacatgggtgagctcaaatcctggtctttctacagagctctcatcgctgagttcatcgctacactcctcttcctctacgtcaccgtcgctactgtcatcggccacaagaagcaaaccggtccttgtgacggcgttggtttacttggtatcgcttgggctttcggtggtatgatcttcgtcctcgtctactgcaccgccggtatctctggtggtcacattaacccagctgtgactttcggtctgttcttggcccgtaaggtctctttggtgcgagctcttggttacatgatagctcagtgtcttggagccatttgtggtgtgggtttcgtgaaagctttcatgaaaactccttacaacactcttggtggaggagctaacaccgtagctgacggttacagcaaaggaactgctctcggagctgagattattggaactttcgtccttgtttacaccgttttctctgcaactgaccctaagagaagcgctcgtgactctcacatccccgttttggctccacttccaattggatttgctgtgttcatggtgcatttggctactatccccattactggaactggtatcaacccagctagaagctttggtgctgctgttatctacaacaacgagaaggcgtgggatgaccaatggatcttttgggttggtccgttcttgggagcactagctgcagcagcttaccaccaatacatattgagagcttcagcaattaaggccttgggctcgttccgaagcaacgcaaccaattaatgaaggctttttttaagataatgtcaagaaacaactttaagatttatatgctttaattattatttgttgttcttttgtgtgtaatgagagagatggtggattgatgttaattatgaaatggctcagtgacttctatttcaaaaaaaaaaaaaaaggtgtctttgttaatcgtttgcctttggtttctcttagtagttacaaattcatgttttctcttcatgtcagttcgtaaatatcgaacaatccaagttggaatttattattcacaacatcacaag

SEQ ID NO: 100837 - DNA, 767 bp, Arabidopsis thaliana columbia
agctctatacgacttcactatagggaaagctgggtccccctggcaggtcccggtccggatttcccgggtcgaccaacccgtccgtccggttgcaagaagacaacagaagggggttgacaaatctctcaaaaccatttgttttgcaatcgcagatccgtttttcttcgggtctcatcacaatgaatggtttctctgatcttaatccttctgagagcaaaccttctctgtcacaactagctccattagaagccattctgtttgatgttgatggaacactctgtgactcagatcccatccaccttattgccttccaagaactgcttcaagagattggttttaacaatggtgtcccaatcgatgagaaattttttgttgagaacattgctggaaaacacaattctgaaattgctctacttctgttccctgatgatgtttcaagagggttaaaattctgtgatgaaaaggaagctctttaccgcaaaattgttgcagagaagataaagccacttgatgggcttataaaactgaccaaatggttcgaagatcgtggattgaaacgagctgcggtaacaaacgctccaaaagaaaacgcagagctcatgatatcgaaacttggtctgactgatttctttcaagcagtgattcttggctctgaatgtgaatttcccaaaccacaccctggaccttacttgaaggctcttgaagtgcttaacgtgtcaaaggagcacacgctagttttcgaagactcgatctctgggataaaagct

SEQ ID NO: 100838 - DNA, 489 bp, Arabidopsis thaliana columbia
  unsure (1)..(489): unsure at all n locations
atcagcggacgcgtgggtctgagtctctctgacactctcaccaacctaatttctcacaaaaacctaaaaagttatcgcccatggattcagatttcggaatccccagagaactctctcctcttcaacaactccgatctcagtaccaccctgagcttcctccttgtctccaggggactactgtccgtgttgaacttggtgatggaaccactgtggcaaaggctggtgatgctcatatcattgcccgtgccttcccacatactctaggccagcctttggctcatttcctcagggcaactgctaaagttgctgaatgctcagatcattactgaccatccagtgaagagggtcggaaattgttggtcctgtggagggcaggctcctggctgggcacaaatgtagtttttgggggattttacgnggnttntaaaaggtnacaaacggggngnaccacttttgctttgnnnttttttggggtngtcctaaaggntt

SEQ ID NO: 100839 - DNA, 611 bp, Arabidopsis thaliana columbia
  unsure (1)..(611): unsure at all n locations
atgatactgccagctannnnnnnnnnnnnnnnnnnnnnnnnnnnnnnnnnnnnnnnnnnnnnnnnnnnctctgtgtctcacaccacaccaaccacttcttcttcttcttcttcttctacataaaacctaacgccatggattcagatttcggaatccccagagaactctcccctcttcagcaacttcgatctcagtacaaacctgagcttcctccttgtctccaggggactactgtccgcgtggagcttggtgatggaaccactgtggctgaagctgctgattcacataccatggctcgtgctttcccgcataccttaggccagcctttggctcacttcctcagggaaactgctcaagttcctgatgcgcacatcattaccgagcttccttcagttagagttggaattgtgttttgtggaaggcaagctccaggtggacataatgtgatctggggtcttttcgaggctctcaaggtgcacaacgcaaaaagcactttgctaggatttttgggtggttccgagggtctatttgcacaaaagactctagagattacagatgatatacttcagacttacaaaaaccaaggtggttatgatttgctcggaagaact

SEQ ID NO: 100840 - DNA, 585 bp, Arabidopsis thaliana columbia
  unsure (1)..(585): unsure at all n locations
nnnnnnnnnnnnnnnnnnnnnnnnnnnnnnnnnnnnnnnnnnnnnnnnnnnnnnnnnnnnnnnctcttgaacaatatttaactatatatgccccttcttcttctttgctgttcttaattgcaacatcttctacgaattaatcaaaagccaaaaacatatacaaataaaagttgagacaaacgaagcaaagaaaagtagaacatacatatacatacagaaacacatttgcacaaatcccaccgttgattatacaaatcatattagaacatcaaatatttaggggttgccattttgctctaactcttttttgtgggctttccactttaaggccacaagactaagtgcttttgtcgaagtcccatcatccttcaacaccctacaagctgcttccttcaactccttcatcttgggtcctcactcctttgccttccttcaccttccatcaatccttttaccactctaggccacctcttctcttctaacnaaccatggnccgggaagggggctaagggnggacggnaantttnncncaaaaancgggttantttngnncggggaaagggncaggtnaaggggaaccgggna

SEQ ID NO: 100841 - DNA, 533 bp, Arabidopsis thaliana columbia
  unsure (1)..(533): unsure at all n locations
nnnnnnnnnnnnnnnnnnnnnnnnnnnnnnnnnnnnnnnnnnnnnnnnnnnnnnnnnnnnnnnnnnnnnnnnnnnnnnnnnnnnnnnnncctttttttttttttttttttgaaattaacttactcgtaaatatgtcgaaaataaaacatagtcactttaacaatggcaaatccagaaaagctgaaagaaaaatatgcgatggccaacaataactaaaaccaccatattaaggctgcttgaatacagggaattaggacgcgatgttagaccaaattaaactaggtaaacagaattttcagaatgacagcctagttcctcctcaatatcccatgtttcctcctgcacaactttctccaggagttgcataagttccatctcttccttctcaatatatatggttaaatgaggctcgaagcaagaagatatcattccacggaagttaaactgccaggtcaagtaactagtgagcaatggctcaagtggcactgggtggcataatttagaggaacccaaaagaaagaacattggcatac

SEQ ID NO: 100842 - DNA, 430 bp, Arabidopsis thaliana columbia
gaggagagagatatggagagaactttgcttcaatggagactattgcctcttctcgcactcatcgttgctcttttctccttcttcttcgcttctcctcgctctttacaggggaataataagtgtagtcttcttcctcatgatcattactggatctcaagtaaacgcatcgtcacacctaatggtctcatctctggttctgtggaggtgaagggaggaattattgtgtcggtggtgaaggaagttgattggcataagagtcaaaggagtcgagtgaaagtgattgattatggagaagctgtcctcatgcctggtctcattgatgtgcatgttcatcttgatgatcctggaagaagtgaatgggaaggttttccttctggaactaaggctgctgctgctgggggaataactacattggttgacatgcccttaa

SEQ ID NO: 100843 - DNA, 617 bp, Arabidopsis thaliana columbia
  unsure (1)..(617): unsure at all n locations
ggtacacggccccccctctgtgtcgacggtatcgataagcttgatatcgaattcgcggccgcccttcttcttcgcttctcctcgctctttacaggggaataataagtgtagtcttcttcctcatgatcattactggatctcaagtaaacgcatcgtcacacctaatggtctcatctctggttctgtggaggtgaagggaggaattattgtgtcggtggtgaaggaagttgattggcataagagtcaaaggagtcgagtgaaagtgattgattatggagaagctgtcctcatgcctggtctcattgatgtgcatgttcatcttgatgatcctggaagaagtgaatgggaaggttttccttctggaactaaggctgctgctgctgggggaataactacattgggttgacatgcccttaaacagtttcccttcaactgtatcccctgaaactttgaaacccaagattgaagctgcgaaaaacagattacatgttgatgctgggtcctggggaggtttggacctgaaatgccccaacccaagggcccttgaagccccctaanatgngggngtcttnggccaagccttaatgggccctnanggacaacggtttccaaggnaa

SEQ ID NO: 100844 - DNA, 1623 bp, Arabidopsis thaliana columbia
  unsure (1)..(1623): unsure at all n locations
tgatatnnnnnnnnnnnnnnnnnnnnnnnnnnnnnnnnnnnnnnnnnnnnnnnnnnnnnnnnnnnnnnnnnnnnnnnnnnnnccacgcgtccgtggattcacagctagtcttgtctctgaagctgaatccaagcttcactcctctttctcctctcttccctttcactccatgttcttctttttcgccgtcgctccggttttcttcttgctactcccgccgcctctattctccggttaccgtctacgccgcgaagaaactctcccacaaaatcagttctgaattcgatgacagaatcaacggcgctctctctcccgacgctgattcccgcttcctcgaccgccaaaaggctttagaggcagctatgaatgacattaacagttcatttggtaaaggaagtgtaacaagattggggagtgctggtggagcattagtggagaccttttcgagtggtattttgactcttgatcttgctttaggtggaggcctaccaaagggtcgggtagtcgaaatatatggaccagaaagtagtggcaagaccacgctagcactccatgctattgctgaagtgcagaagcttggaggcaatgcaatgcttgttgatgcagagcatgcctttgatccagcgtattctaaagcattaggtgttgatgtagaaaatttgatagtgtgccagccagataatggcgagatggctttagaaactgcagaccgtatgtgtcgctcaggtgcggttgaccttatatgtgttgattctgtttcagcacttactccacgagctgagattgaaggtgagattggaatgcagcaaatgggtttgcaagctcgtcttatgagtcaagctcttcgtaaaatgtcaggaaacgcctctaaagctgggtgtactcttattttcctaaaccaaataagatacaagattggtgtgtactatgggaatccagaggtgactagcggaggaattgcgttaaagttcttcgcgtcggtccgtctagaaattcgttctgctgggaagatcaaatctagcaaaggggatgaagatattggtcttcgggctcgtgtaagagtgcagaagagcaaggtttcaagaccgtataagcaagcagagtttgagattatgtttggggaaggagtcagtaaactgggatgcgttcttgattgtgctgaaattatggaagttgtggtcaagaaaggttcctggtacagctacgaagaccaaaggctcgggcaaggaagagagaaagcactgcagcacttaagggaaaaccctgctcttcaagacgaaattgagaagaaagtgagattgttgatgttagatggagaagttcatcgatcaactcctttgatgagcagcagctcttcctcggcttcacatcgcgaagaagaagaagaagactcgcttgacgatttccaatgacataacacttaagcttgagactttcggatctatggatgtacaacacttgattttctctcatcatgttcacctcttgtttcaagtttcatcaattaaaaaaaaacactcatatggttcagtcttaaaaaaaaaaaaaaaaaaaagnnnnnnnnnnnnnnnnnnnnnnnnnnnnnnnnnnnnnnnnnnnnnnnnnnnnnnnnnnnnnnnnnnn

SEQ ID NO: 100845 - DNA, 585 bp, Arabidopsis thaliana columbia
  unsure (1)..(585): unsure at all n locations
gagggttttctcagccgcttaagagcttatcatctttgtgcttcctgcaaatagctctttgctgttgatctttctcctccatcaacaaacatgggtaagacacgtggtatgggagctgggcgtaagctgaagagactccgaattaaccagaggtgggctgacaagcagtacaagaagtctcacttgggaaatgagtggaagaagccttttgctggttcttctcacgctaaaggaattgttcttgagaaaattggtattgaggctaagcagcctaactctgctatccgtaagtgtgctagagttcagcttatcaagaatggaaagaagattgctgcctttgtccccaatgatggttgtttgaactacatcgaggaaaacgatgaggtcttgattgctggatttggtcgtaagggtcacgctgtgggagatattcccggagttaggttcaaggtcgtaaaggtttctgggggtttcactctttggccccttttcaaagggaaaaaaaagggggacccaagtttttcaggaacccctttcaaaaaagntttaaantttttnaaatnggtttttaaaggccagtttaag

SEQ ID NO: 100846 - DNA, 648 bp, Arabidopsis thaliana columbia
  unsure (1)..(648): unsure at all n locations
accgggccnnaatccccntgcggacntcccccacacacctggtanccctgttggcctggcaaacctgagngcgtaactgaagagaccccgaattacccagaggtgggctgacaagcagtacaagaagtctcacttgggaaatgagtggaagaagccttttgctggttcttctcacgctaaaggaattgtccttgagaaaatcggtattgaggctaagcagcctaactctgctatccgtaagtgtgctagagttcagcttatcaagaatggaaagaagattgctgcctttgtccccaatgatggttgtttgaactacatcgaggaaaacgatgaggtcttgattgctggatttggtcgtaagggtcacgctgtgggagatattcccggagttaggttcaaggtcgtgaaggtttctggtgtttcactcttggccctcttcaaggaaaagaaggagaagccaagatcttaagcaacccgtacaaaaagcttcaagcttttgaaatggtttttgatagttcagtttaagtcttgttctgttctactttatgtttcaagaacttgattttgtgttacattttatgagtttttgaattaagacattatcgtttaatattattggcgtttaatcaatttactcttttacccggg

SEQ ID NO: 100847 - DNA, 812 bp, Arabidopsis thaliana columbia
  unsure (1)..(812): unsure at all n locations
ccacgcgtccagcactagagccggtaaaattctttctctttctttgtttttctcttttttcggcacatccatgatttttcttccaacggaatcaattctagttttctagatctaaatatttaaagcttaaatctcctcctcctttggtttttgatgttttgcttttttgtctccgccattctcagcatcatatctggttgtatctttcttggtaggtagaagcagtcttcaatcggttcttctctgcctcagattaagaaatttcgccatcgtaaatctagatcttcttcctttcttcaagagacgttctttgagtctctatttttttggatgcgtttcaccgcctctgtgacttctcgagagtattataaagagggtcacacgacactttcatttggttttaacctgttataaacaagactcttgtattataatccgtttgtgtgtttttctaagtctcagttttgttttaatttgcaaggtttaggctttgttaatcttttttttgaatttccagattctgatccagaaagtattaatggatgttgtgtagtttatttgctcgggtttttttccctttgtttactttgtttgatcactgtttctggtgttcttggactcgccgactaatgtttccggaagtgttcatgtacccgccggctctttgtaattccctttaaaccttatcaatagaatctttttgatggnnnnnnnnnnnnnnnnnnnnnnnnnnnnnnnnnnnnnnnnnnnnnnnnnnnnnnnnnnnnnnnnnnnnnnnnnnnnnnnnnnnnnnnnnnnnnnnnnnnnnnnnn

SEQ ID NO: 100848 - DNA, 535 bp, Arabidopsis thaliana columbia
  unsure (1)..(535): unsure at all n locations
tctacagagaaattatatgaaaagaagaaacaagtttctgtgcccaaccctatggtttttacatgatccatggagtgagccaggagaaaggaaggttccggtcccacagttggtttaaaaagcccgtatagaaggaaaaaaaaacccccctaagtctgtctccttgtgccccaagaaatcgagtgtaagcttcttgggagtcttcttgccagtaatgttatcagagaggaggatgatcttcttctggtgtctgtggtggaaccggtttccaaccaggtttctcgtcccaatacatatcgtagtaaatgtgtcctggggtctttgttctcctcacaacaccatattcccacatatctctttacccgtcttctaaatctttcttctcgctccttgtcagaggatccgattgaaagcatcttcaattgaaggaaaccttggtcactttgccatcgtcgaagggagggaatatcgccttaaacggtttttcattgtccgtttnggcctnagncccggggggcttggntttttnttctga

SEQ ID NO: 100849 - DNA, 828 bp, Arabidopsis thaliana columbia
  unsure (1)..(828): unsure at all n locations
cnnnnnnnnnnnnnnnnnnnnnnnnnnnnnnncactatagaccagctatgacttcgcatgcacgcgtacgtaagcttggatcctctagagcggccgcccctttttttttttttttaagaaaaccaaaaatggatttaaaataaaataagtcaaaactcatattttacaagtcaacggaggagagttcataatttattttagaaaaaggtaaaaaagtaaaaaacgtaaagagtaaaaaattagaatttatcctttctctaatctaagcgttaggactcgtcacaagattctcgtacgtgtcaacagagcttgacggaacggcgaccattactttaacggcgtcattttgttcaggaatcggaagcaacaaacagtaacggtcgcaacagaccgatccaacatgaaccggtttacccaaaccaaaatcaagcttctctaaaccgagacgtgaccattgcgacaatatcaagactccaaccgagtcaggactcgctctctccttgctcacagcttccaccaccgatctgacgtactcgtcaccgactcgctccttcgcttgtttcacgagcatcgtcgcgtagcttaatcctttctccgtcaagtctttcacggtggtttgagcacatccgacgacgaatgcgttcccgtagaacccactgggtagactcggtttgactcggtctctaatgttgacgctaaacaaaagcttaaggacctgattcgatggcaagttcagtgatctcgcccagctccgccatacatgtgcagagagtacctcgaacgatgtgtgtttagaattgaactcaccgagtcgactcgcgagtttct

SEQ ID NO: 100850 - DNA, 602 bp, Arabidopsis thaliana columbia
gctgtgcagtaggtcagactcttgtagtgaattcactgcaaagtaagggaaagcttggcttggaaatgggagttgaacaagccatcgattcgggctaatgtgtatagtttgattcgtctggggagcttttgagagatagcaatttagttttccgcttacgaatgatctttttctgatgcgtcattttgattaagtgtgtacttctgcaatggaggcttctctagctgttatacagaggcctcaagctggagcttcgaatacggtttataagagtggccctctcttcatatcatcaaaaggactaggttggacatcctggaagaagcgttggtttatccttacccgaacttctttggtctttttcaaaaatgatccaagtgcattaccacaaaagggaggtgaagtaaatttgacccttggaggcattgacttgaacagttcggggagtgtcgtggtgagagaagataagaagttgctgactgtactattcccagatgggcgtgatggacgagccttcacccttaaggctgagacattggacgacttgtatgaatggaaggctgcccttgagcaagcccttgcacaagctcccaatgcagcac

SEQ ID NO: 100851 - DNA, 1541 bp, Arabidopsis thaliana columbia
aatttgtatagtgttgtatctctctctctctctctctgtctgtttgtttcagagaaggatttttggcgtctccacgcacgatttaacgcatcgaagctctctgcacgcttcctgaaagagagagagaagagagagatcgcagatcgatttctcttaaatctctcgtgaatcccatttgccttctctctgctagattctctcttcttctcttcacccatttctcgctttctcctttgttctctcatctgggttcttctcaaagcctcttcctttttatgccatggtgggtgcgtcttcctcttacgcatctccgttatgtacctggtttgttgctgcttgcatgtccgtctctcacggtggaggagatagccgtcaggctgttgctcttcaatctggtgggcggagtcggcgaaggaggcagcttagcaaatgctctgtcgcttctggatccgctagcattcaggctctcgtcacttcttgtttggattttggtccttgtactcactacaacaacaacaatgcattgtcttctctctttggatcgaatagtgtttctttgaatcgaaaccagaggagattgaatcgtgctgctagctccggtggagccatggcagtgatggagatggaaaaggaagctgcggttaacaagaaaccacctacggagcagcgtcgagttgtagtgacaggcatgggagttgaaacatcattgggtcatgacccacataccttctatgagaatttgctaccaggcaacagtggtattagccagattgaaaattttgattgttctgaatttcctacgcgaattgcgggagagatcaaaagcttctcgactgaaggatgggttgctccaaaactttctaaaaggatggacaaattcatgctctatcttctcacagctggtaagaaagctttggctgatggtggggttactgatgaagtaatggcagagtttgacaaaaccaaatgtggagttttgattggctcggcaatgggaggaatgaaggtcttttacgatgctattgaagctctgagaatctcttacaagaagatgaatcctttttgggtaccttttgcgacaacaaacatggggtctgctatgcttgccatggatctgggatggatggggccaaactattctatttcaactgcttgtgccacaagcaacttttgcattctgaattcagcaaaccacattattaaaggtgaagctgatgtaatgctctgtggtggctcagatgcagttattattccaatagggttgggaggttttgttgcatgccgggctctttcacaaaggaataatgatcccacaaaagcttcacgtccttgggataccaatcgagatggtttcgtgatgggagagggagctggagttctacttttggaagaactcgagcatgctaagaaaagaggtgcaactatctacgcagagttcctcggtgggagtttcacatgtgatgcctatcacatgaccgagcctcaccctgatggggctggtgttattctctgtattgagagagcgttagctagtgctggga

SEQ ID NO: 100852 - DNA, 429 bp, Arabidopsis thaliana columbia
gggataataaaagatcattactgggccattttatagtcccacggcctgaaaaaacatatacatgttgggaaggtccaattcctgactttattcatatccacagcgtattatttaattccaaacaaacaacaacaacaaatcgtttttatgcctcgtacagatccaagtatcccctcattttttatggtaaaaatttatctccacaggcaaataaataaatttaattgacccttatacggagagaaggggaaaaaatatattggattttaatagaaagaaatcaaacatgttttttgtaccttatatatgcaaaatgcagaggatgagaggaatgaatcacatcactcgtcttcgtttgccgtgaaaatgaaagtgaaaggagcgaacttgtaaccatctccttcgtagaatttgttctgaaacttaacc

SEQ ID NO: 100853 - DNA, 588 bp, Arabidopsis thaliana columbia
  unsure (1)..(588): unsure at all n locations
nnnnnnnnnnnnnnnnnncnnnnnnnnnnnnnnnnnnnnnnnnnnntaggtacaactatagaagagttatgacgtcgcacgcacgcgtacgtaagcttggatcctctagtgccggccgctttttttttttcgggaagggccaattcctgactttattcatatccacagcgtattatttaattccaaacaaacaacaacaacaaatcgtttttatgcctcgtacagatccaagtatcccctcattttttatgggaaaaatttatctccacaggcaaataaataaatttaattgacccttatacggagagaaggggaaaaaatatattggattttaatagaaagaaatcaaacatgttttttgtaccttatatatgcaaaatgcagaggatgagaggaatgaatcacatcactcgtcttcctttggccgtgaaaatgaaagtgaaaggagcgaacttgtaaccatctccttcggagaatttgttctgaaactcaacccagtgaagacgcagcgcgtgaaggaacgcgcttagtgtctccattaccagcaaacctcccacggttgcgaatatgaaccccaagacgcccacg

SEQ ID NO: 100854 - DNA, 724 bp, Arabidopsis thaliana columbia
atgacacaagcggatttaggacttgcagatgcttatatcaatggagatttttctttcgttgataaagaatcaggacttttaaatctgattatgattctcattgctaacagagatacaaaatcaaatcttagtaagaaaaggggatggtggacaccgatgtttttaactgcgggtttagcatctgcaaagtattttctaaagcatgtctctaggcagaacactctaacacaagctcgtagaaacatttctcgtcactatgaccttagcaacgagcttttcggtttcttcttggatgataccatgacttactcctctgcagtattcaagtcggatgatgaggatctgagaactgcacagatgagaaaaatctcgcttctgattgataaggcgagaatagagaaggaccacgaggttttagagataggatgtggatggggaactttggccatagaagttgtgagaagaactggatgcaaatacaccgggattacgctatctattgaacagcttaaatatgctgaagcaaaagtgaaagaagctggacttcagggctggattacttttgtgctccgcgattatcgccaactatctgatgctcccaaatatgacagaattatagcttgcgagatgctagaagcggtcggccacgagttcatggagatgtttttcagtcgttgtgaagccgcgcttgcagaaaatggcctaatagtcttgcagttcatat

SEQ ID NO: 100855 - DNA, 1294 bp, Arabidopsis thaliana columbia
  unsure (1)..(1294): unsure at all n locations
accgcctgcggtaccggnccggaatcccgggtctacccacgcgtccgcccacgcgtccgctgagagatctcaaatcgacgaccaacaggaagaatgagcagtcgttcgagtagaaccgtgtacgtcggaaaccttcctggcgatatccgtgagagagaggtcgaagatttgttcagtaagtatggacctgttgttcaaattgatttgaaggttcctccaaggcctcctggttatgcattcgttgagtttgatgatgctcgggatgctgaagatgctattcatggtcgtgatggctatgactttgatgggcatcgtttgagggtggaattggcgcatggtgggaggcgttcatcagatgatactcggggtagtttcaatggtggtggccgtggtggtggtcgcggccgtggtgatggtggtagtcgtgggccatctaggagatcagagtttcgtgttctagtcacatggcttgcttcatctgcttcttggcaagatctcaaggatcacatcgctaaaggaggcgatgtctgtttctcgcaagtgtaccgtgatgctagagggacaactggagttgttgattacacctgctatgaggacatgaagtatgcgctgaaaaagctcgacgacacagagtttcgaaatgcgttttcgaatggatatgtccgggttagagaatatgattcaaggaaggattctaggagtcctagccggggaagatcctattctaagagccgcagccgcagccgtggacgaagcgtgagccgaagcaggagcagaagcaggagcaggagcagaagtcccaaggcaaagtcttcacgtaggtcccctgcaaaatctacatcaagatctcctggcccccgctcgaagtcaaggtcaccgtctccaagaagatcgcgttcaagatcaagatctcctctaccttctgttcagaaggaaggaagcaagagccctagcaagccaagtccagccaagagtcctatccacactaggagtccatcgaggtaaaatgggagatatccaggtgaaaagagaagagagaagcatcttcttgctactcaaaacaaattctactttcttgaagtggattatatctgaacgcttattgactgtagaagatgcgacaagtttgatttgcactatcattttgtaatattcttgccattcttcgtcttctggatccctttacttttgagaatgatgtttttttttgaagatatcgtttcaaagccctcnnnnnnnnnnnnnnnnnnnnnnnnnnnnnnnnnnnnnnnnnnnnnnnnnnnnnnnnnnnnnn

SEQ ID NO: 100856 - DNA, 556 bp, Arabidopsis thaliana columbia
  unsure (1)..(556): unsure at all n locations
ccnnnnnnnnnnnnnnnnnnnnnnnnnnnnnnnnnnnnnnnnnnnnnnnnnnnnnnnnnnnnnnnnnnnnnnnnnnnnnnnnnnnnnnnnnnnnnnncctttttttttttttttaatttttaacaatcttggagcataatcaaacaaacatacgcaaaagacaatgcttatgttttacagaagtaaactacttactctctttaccatctcttctcagtaaaaagaacaaacacttaacttaaggggaatcattattcattaatcataggctactaatccctttttcccacctgggctattatccgaggatgtcgaatccgacttcgatggagaccttgccttggatggggatcttgacactgatcttgctttccccggcccaaggggagattttgaatatgaccttggatcttgagcttgccctccacggactcaggctggggctagcggagggggaccttctctttctgcaagggggagaccggccacggatagggctgcggctgtaccgccggttgcgataacagagaccaggcgatactgagcggcttcttct

SEQ ID NO: 100857 - DNA, 405 bp, Arabidopsis thaliana columbia
aaatttttgtttttatttttctgatgttacaatggcagacaagatcttcactttcttcctaatcttgtcttcgatctctcctctcttatgctcttctttgatctcacctcttaatctctcacttattagacaagcaaatgtccttatctctctaaagcaaagttttgattcctatgatccttctcttgattcatggaacattccaaatttcaactctctatgttcttggactggtgtttcttgtgacaacttgaatcagtctattactcgtctagacctatctaatctcaacatctccggcactatctctccggaaatatctcgtctttcgccgtcacttgtttttcttgacatttcttctaacagtttctccggtgagcttcctaaagagatctatgagctctc

SEQ ID NO: 100858 - DNA, 533 bp, Arabidopsis thaliana columbia
  unsure (1)..(533): unsure at all n locations
cnnnnnnnnnnnnnnnnnnnnnnnnnnnnnnnnnnnnnnnnnnnnnnnnnnnnnnnnnnnnnnnnnnnnnnnnnnnnnnnnnnnnnnnnnnnnnnnnncctttttttttttttttttcggaaacaattactatcccttttggttaattaatctcagtttctttacatcaaatttcaacaatttctatgtatcaccaacacacgaatctgctaactaatcaaaaacaaaatctaatctaggtgtcctcataatacttttcttagttttggacttggatttggattgaagtttacgcttcgaacttgaatcactctgagacttcttcttcatcacagtaaaccttttcctcttcttcttcggcttctccatcgttgctgctttcattgccttagcctctggtatcgccttaagctttggcttccatctacgtaaaccaaccaatggaacatagtctttcttcaacttcaccgtagaacaaaccctaccttctccttctcctcctccttattcttcctcttcctattcggttactc

SEQ ID NO: 100859 - DNA, 304 bp, Arabidopsis thaliana columbia
tttccaaatcaatgaagacatcaacatacgtgaaagccttaatcacactctttctttacaaacatcaagaccaaatataattaggggcaaaccaaattgttggtggatgcaataacatatgtagattttcctcctttttacatgaaaaaataattgccagtcccagtatcagaatttgggacgaatacaagcaatttctttgtatatcaaccaaaataatattaggatagtcctgaaacatcccgtacccaagatattccacctggaaacgctctatgaactctgcttcttcccgtgcagtgac

SEQ ID NO: 100860 - DNA, 559 bp, Arabidopsis thaliana columbia
  unsure (1)..(559): unsure at all n locations
nnnnnnnnnnnnnnnnnnnnnnnnnnnnnnnnnnnnnnnnnnnnnnnnnnnnnnnnnnnnnnnnnnnnnnnnnnnnnnnnnnnnnnnnnnnnnnnnnnnnnnnnnnnncctttttttttttttttttattactaaaaaactatatatacgatgttccaattccaaacactgaatttaatttccctccgcagtaaaagaaccagatgaataaaaattagaaaaaaccaaagcaaacaaaaaaaaatcagcgggttttctcgtttctccaatatagaggccgaaagcaaataaaaagctctgaacaaatacgacaactttgctaagcgatggatggatgatgtatcagtggttggtgaaacctttcgtcgggagacttggagagtctcaatgcctttgatagcagaatcgtaatgttttctggtggaagaagatctcttcccttccggcggtgtaacataccggagagtttcttaaaccggcgccggttcggcatttctgtacctcctctgacgttactctcctcgatgatcctggtgattggcaaacagggacgagcttg

SEQ ID NO: 100861 - DNA, 418 bp, Arabidopsis thaliana columbia
acttagtcgttcacgaaacatctcatatatatctagagagagaaacaaaacaatatatagagaatctatatagaatcatataagtggtacatacctctcaaatcgaggaagaaaatgaaaggaggaaagatggataaattgaagccaataatagcaatcatatcactccaatttggatatgcaggcatgtacatcattactatggtctccttcaagcatggcatgaaccattggatccttgctacttaccgacatgtcgtcgccacaattgtcatagctccttttgctctcattctcgagaggaaaataaggcctaagatgacatggccattgttccttaggattcttgcccttggattcctagaaccacttttggaccagaacttgtactacataggaatgaaagccacgtcagcaa

SEQ ID NO: 100862 - DNA, 426 bp, Arabidopsis thaliana columbia
gagagtaaatagaaaatgcatttcacaccaaatgtcgagtatacaaaagttcaaaataacattggatataagaagaacgacgctattaccaagtcttaaaaacaaagatcagaaatcaaattaatacactccaaaaccacacaagtggggttttataacagaaaacattacacgggactcggtttttgttttattgccacataccaaaagcactcaagagctgagctcccattggattttgagtctttagagccctttctagcagaacagtttaggtagtacgatttgatacgcctctcccctggccacgtccaccatacccggagccaccgccgccgccgccacggccaccataaccgccataaccacgccctccataaccaccacgtgagtaaccgttgtttcgtccataaccaccacgccctt

SEQ ID NO: 100863 - DNA, 411 bp, Arabidopsis thaliana columbia
cccacgcgtccgcccacgcgtccgcggacgcgtgggagaaagcagaatgagaaacttcaggttgttaggcatgaaggagatcctgattttgaagatggtgatgatgctgattttccaatgatggatgagggaaggcagccattgtctaggaagataccaatcaatatcgagcaagataaatccttaccggatgttaattgtgctacgtcttgtgattcttggtctcttctttcactaccgtattcttcaccccgtcaaagatgcatatgctttgtggcttatttctgttatatgtgagatatggtttgctgtttcatgggttcttgatcagttccctaaatggtaccctatcgagcgagaaacgtacttggaccgactctcattaagatatgagaaagaagggaaaccgtc

SEQ ID NO: 100864 - DNA, 544 bp, Arabidopsis thaliana columbia
agcgtctctacgactcactatatggaaagctggtcacgcctgcaggtaccggtccggaattcccgggtcgacccacgcgtccgacaggttggagaacgtggtgttcaactctcaggtggacagaagcagagaattgcaattgctagggcgatgttgaaagacccaaagattctgttactagatgaagctacaagcgctcttgatgctagctctgagagcattgttcaggaagctttagacagagtcatggtggggaggaccactgttgttgttgctcatcgtctctgcaccatcagaaatgttgattccattgccgtgatacagcaaggccaagttgttgaaaccggaacacatgaagaactcattgccaaatccggtgcttacgcatccctcatcaggtttcaggaaatggttggtactcgagatttctcaaacccgtcaactcgtcgcactcgttcaacccgtttgagccattcactgtcaacgaaatcactcagtttaagatcaggaagtttgaggaatctgagctattcttacagcactg

SEQ ID NO: 100865 - DNA, 943 bp, Arabidopsis thaliana columbia
gtagatactcaacaaactcagaactagaattttctaatcttcactcagcgatatttttggctcatactcgaaacaaatggcttctacactctcatttgctgcatcggctctatgttcacctcttgctccatctccttctgtctcatcgaagtccgctacaccgttctcggtttcgttcccacggaagatccctagccggatcagggctcaagaccagagagaaaactccattgatgttgttcagcaaggacaacaaaaagggaaccaaggatcaagtgtcgaaaaaagacctcaacaacgcttaaccatggacgtctctcctttcggattgttggatcctttgtcaccaatgaggacgatgcgacaaatgttagatactatggacaggatgttcgaggacactatgcctgtctcaggaagaaacagaggaggaagtggagtgtcagagattcgtgcaccgtgggacatcaaagaggaagaacacgagatcaagatgcgtttcgacatgcctggtctctctaaagaagacgtcaaaatctctgtagaagataacgtacttgtgatcaaaggagagcagaagaaggaagacagtgatgattcttggtctggaagaagcgttagctcatatggaacacgacttcagctcccagacaactgtgagaaagacaagatcaaagctgagctcaagaacggagtcctctttatcactatccctaagaccaaagtcgaacgcaaagtcatcgatgtccagattcagtaggactcgattcaacattatcctcttgtttaatgtttcttggaggtactgtttgttgtacataagcatatgtttctctttatagcttaaagtgtgtgatgcaagtaaaaacaacaaagagagattttagagaagtcttttccacaaaagaaatgaaataatggcactaaaaaaaaaaaaaaaaaa

SEQ ID NO: 100866 - DNA, 2746 bp, Arabidopsis thaliana columbia
aaacacacacaaccacaatgtagtctatttgttcctacccttaaaagtctctgttggcttttcaaaacctggtccattgagtcattgactcagagagttagaactaaaaagtctttatatttacacatatacgcagatttaatctctacatctttgcttcagtaaaatgggttctctttcttgttcaataatccatctggttcttattctgcaactacaaacatttttcgttttttctcaaaacatcagaaacggctctgttcctgtcggagaatctctcaccgcttcagagtcccaacaaatctctagttcatggcgttcaccttccggtgactttgctttcgggttccgcaagatccaaccaaacgacggtttcactctctccatttggttcgacaagatttctgacaagaccatcgtgtggcacgcacaagccgtcaacacaaccaccggtcttgtccctaatggttcgaaggttacattaactgcagatggcggtctggttatcgctgaccctcgaggtcaggagctgtggagagcgttgagtggtggctctgtttctcgagggcgatttactgacgacggaaacttcgttcttttcagagatgggtcagaagattctgacgaggttctatggtcgagctttgaaaatcccaccgacactctgttacctaatcagaatatagaagttggaaggaatctgtcatcacgtaggacagagacgagcttcaaaaaaggaagattcagcctacgtctagaggatgacggaaatcttcagcttcactctctcaacgccgagactgcctcagaatcagacatatactctcagtactacgaaagtaataccaacgatccaaacaaccccgggattcaattagttttcaaccagtcaggggaaatatatgttcttcaaaggaacaattcaagattcgtcgtcaaagatagagatccggatttttctatcgccgcgccgttctacatttcgacggggtttttgctgagtactatcatcccaaaggaggccaggagaatagtgggtgggtgtttgcttgggctgtgccgggataatatgtgtagccccgatgatgcacttgggaatatggcttgtgggtataataatatatgtagtttaggaaacaacaagaggccaaaatgtgagtgtcctgagaggtttgtgttaaaggatccgagcaatgagtatggtgattgtttgccagattttgagatgcagacttgtagaccagagaaccaaaccgcaaactcagatgtgaatctttacgagttcattactttagagaagacgaattggccgtttggggattatgagagttatgccaactatgatgaagaaagatgtaaagcttcttgtcttagcgattgtttatgtgctgcggttatttttggaacaaatcgggatctaaaatgttggaagaagaagtttcccttgtctcacggtgaaagatctccacgtggtgatagtgatacattcattaaggttcgaaaccgctccatcgcggatgttccagttaccggaaacagagcgaaaaaacttgactggttaatcattgcttgttctgttctacttggaacttcagcttttgtgatttttgatacttcttgctcttatagaaagactaagaagagtaaaaatatgatgaagaatcaagcgagagatatcggtcggactacagctacaactactgcaaatgagttgaatttgagggtctttacatatggagagcttgcagaggctacaagagatttcacggaagagcttggaagaggagcctttggtatagtttacaaaggatatttagaagttgccggtggttctgaagttaccgtggctgtgaagaaactagatcgtcttgatttagataacgaaaaagagttcaagaatgaggttaaagtgataggtcagattcaccacaagaacctagtgaggctcattggcttctgcaacgaaggacagagccagatgatcgtctatgagtttttaccacaagggacgctagccaattttctcttcaggcgtccgaggccgagctgggaagatagaaagaatattgcggtggccattgctcgtggaatcttgtatctacatgaagagtgcagcgagcagatcatacactgtgacataaaaccgcagaacatactcctagatgagtattacactcctcggatctcggattttggtctagcaaagcttttgttgatgaaccaaacgtatacgctcactaacatccgtggaagaaaagggtatgtggcccctgaatggttcaggaatagccccattacatccaaagtagatgtttatagctatggagtaatgcttttagaaatcgtgtgctgcaagaaagccgtcgaccttgaggataacgtgattctcatcaattgggcttacgattgttttcgacaaggaaggttggaagatctgactgaggacgattcagaggcaatgaatgacatggaaactgtggagagatatgtgaaaatagcgatatggtgtatacaagaagagcatgggatgagacctaacatgagaaatgttacacagatgcttgaaggtgtgattcaagtttttgatcctccaaatccgtctccttatagcactttcacttggtctgatgaatctttgtctagtgatccagtgtcacttgtttgataagttgataaaaaaacaaaataaagttattatacttttgtatggaataaactccaatcattaatattagcttaaataatc

SEQ ID NO: 100867 - DNA, 492 bp, Arabidopsis thaliana columbia
gtttgttctcacttctcacttctcagatttttataaacatgaatgaaacctgaattgttccactaactctcagcaaaaatgcgatcactttacttaatcgtcttcatcgttattagtcttgttaaagcttcgaaaagcgatgatgggttttgttcagcgccttcgattgttgaatcggatgagaagacgaaccccatttattggaaagccacgaatccaacactctctccttcacacctccaagacttgcctggtttcacacgaagtgtatacaaacgagatcatgcgttaataacaccggaaagtcatgtatacagccctttacctgactggacaaacacattaggggcgtatttgatcacaccggcaacgggttcccattttgtcatgtacttggcgaaaatgaaagaaatgtcaagttcaggtttgcctccacaagacatagagcgtcttatattcgtggtcgagggtgctgtgacactcactaacaca

SEQ ID NO: 100868 - DNA, 540 bp, Arabidopsis thaliana columbia
tccaagagctatgacgtcgcaccgccgccgtcgtaagcttggatcctctagagcgggcgccctttgggtttttttttagtaaaacgacactgcattcaacatacaaacaaacaacttataggttttcagatcttgacaatggtcattttcggggaaatcaagaaatatataaaacacaaatcatgtaaagtagattaaaaaggtggtaagaatcttggatgttgagcgggcggaaaagattttcaacagattgaaaccggggctccgttccactccttgagacattccaacaacggatcaataagttttccatcagaaatcgctaagaacactttatcaaactcctctcctggcgaccgaacattctctccaggaagcagttcagtatttacctaattcgggaccaacccgagccatagggtaaaaaccgcccttcctttaacccggtttggtttaagcccgtggtccctttcctcgattcaacccgggcggggttttattttttttgggagaagcagtttcaagcccgggtttaaaagc

SEQ ID NO: 100869 - DNA, 530 bp, Arabidopsis thaliana columbia
taggtacaactactagaagagttatgacgtcgcactgcacgcgtacgtaagcttggatcctctagagcggccgcccttttttttttcctttttaatctgaaaatataaatcataacttccgcacaatagaatccaaacagacaagcaattatggaaatgacaaggaaaagtattgaacttgacacgactctcttagcagctcgtaacaagtactaaagagccaatgtatccatgcaacattggtgacatatcatgaattcactcatagatactttaacaaaagcttttctttcgtttttccattatcacatcataagattcatctagaaatctaaaactgacaacaacaaaataagaacaaaccttggcactgctcattgttgtaggtgtgccttctgatctatgaaacactacctttggtgaatatagccatcaacgtaggcaccagctcgttgtgcttcatcacatacctgtctaaaaatccctcatcggtacacgacaaaacagaggacactgcaggtagttcactt

SEQ ID NO: 100870 - DNA, 690 bp, Arabidopsis thaliana columbia
cttgacgtcgcatgcacgcgtacgtaagcttggatcctctagagcggccgccctttttttttttttttttagtaaactcaaatcatgtaataataatcaaatgaaaacaacaacaaagagtgttgagtctaatacatacacattacattaaaactattgttcagattccaaatttcttcttcttctccaatattacaaactacaaagagagagagagaatggtaataagagaagaaaaacagtacaagagaatcatcatcttgacaaatcttcaaatatctaaatcctccaactgaatgttgctcttaagaggcacataatctccaagatacccaccaagttgatcatacaaagcggtcttatcaatagtctgatgatgataactcttacaaacatagtaaaacacactctgaaccaacaaacccacaagattaaccatcacaagaacaccaactaacaatccaccaaccaaagtcctagtaaaagttccatacttcccaccaccatgaaccacaacagcaccaaaaacaactcccatcaatccacagaggaaaagataaacaaagattaaccccatagccatcttagtcttccctttaagcaactcataagcttttctcatagcggcgattccgtaaaccggttcaagaacagagattacactacctaaatgccataaagcagtgaaat

SEQ ID NO: 100871 - DNA, 581 bp, Arabidopsis thaliana columbia
  unsure (1)..(581): unsure at all n locations
atnnnnnnnnnnnnnnnnnnnnnnnnnnnnnnnnnaatgaaactggttcaatttcatccaaatatgttctacacgaactctttttttctttttgtaaaattcaacaatatcatatacaacgaaacatttacatcaacagataaataaatttgttcacaacccaaaaacaactgattaaagctaatcacaaactgaaatctgtcaaaatccaacacgcacactacacttgtgttctctacttagacacccctccctgtcatttggaactgaataaatgaatctctcagaccagtgagtcttccgatatgacagtgagcagagagtatttagctttgattgagatcttgcctgcctcaacacaaagtttagcaccagtcacaacccaatatccaggttgttcctctggacctctcatcacttccttcgtgtctacaagactcagcaactttggtttcacaggcggtgatggccctctaggatacactgcagagtttatatccaatcttaggatgngggctaagtggtgccggggttggnctaancccggggtaagcctggacgggcaccgggaaaancgggtt

SEQ ID NO: 100872 - DNA, 479 bp, Arabidopsis thaliana columbia
gacgtcgaacgcacgcgtacgtaagcttggatcctctagagcggtcgccctttgtgttttttttttttaaaaaaagatgaattatatgattatcttccttatgaggtattattcccggttgatacaaaatttagatgttaaaaaacagaaaatgacaaaattagcaacaaagaaaaagggcaaacaaacacgcatacaaaattaaatctttttgaatggccttttaaaactatacaattgcggcttagccaaatctcacacttcaattagccacaaccaattccgagccgactcctttaaacccgacatctccaccggtctgtttcttaaaccggacattcacctcagttaaggctcttctagtctcttcgtcttcaggggtctccatcatcaacaacttataaatcttgaatccgggtgtggccatttcttccaacttgggcataagaaatcttgccctggcgccggctttgcctttc

SEQ ID NO: 100873 - DNA, 545 bp, Arabidopsis thaliana columbia
ccgcgtacgtaagcttggatcctctagagcggtcgcccttttttttttttttttttttaaaaagtctagataagaaatatgtaaagagaatgagaatgtcacaaaagatgtacaacagatcctctaaaagccctaaactggtcagagaaaccttattccagttaaaaactttacattgagaaaagttaaaaaaatctattccagggggggagaccaaatctttgcatctatgtcagaatcttacataatcatcaataggagtagtaatacacaaaggagagacgacctccaaggctgcagcagattcatttagagaaggaacccaccctctgtcgtttgagactggggctcctgctccagcttggtcacattctggctgcacctgctgcatctgttgctgcgcccagcagccatgggcggtcaagactcgggttagaagttcctgcggcactggctctcctctcctctgtggtggagatttcttaaccgtgtggaccaagcgtttccatttatccttgagatctacgtaagtgcggtggtcagca

SEQ ID NO: 100874 - DNA, 489 bp, Arabidopsis thaliana columbia
  unsure (1)..(489): unsure at all n locations
aggtnnnnnnnnnnnnnnnnnnnnnnnnnnnnnnnnnnnnnnnnnnnnnnnnnnnnnnnnnnnnnnnnnnnctntgggtttgtttttttttttttttttttttgtgagagagctgagccatttttttttcagaccaaagaaagatctacaaagtctgaagagggcaggacactcatatggcaactcaaagcctcatcagctttatttgcactatttgcaaatcatcaaaacaaacaaacaaaaacccctccctgcctttctcctctcccattgccaaagtagtagctaagcttttctcaggaacaaaaagaccaaaagaagaaaaatattttaaaaaagaaattagaaactatctttccaaaaaccagtactttcttcagttttgtaaagttgggttcaggagtcttaagctacatcctctcttgcttcatgtatcagggatagtctctccgggaaataacggcccaagttcttgtactgttcaaaaaa

SEQ ID NO: 100875 - DNA, 491 bp, Arabidopsis thaliana columbia
ctctagaagattatgacgtcgcacgcacgcgtacgtaagcttggatcctctagagcggccgcccttcgggttttgggttttttttttttttttaaaggcagaaaataaagggttggtgctaaaccgtgggaagcagacccaaagtacaattacttggacagaaacaacggttctatttctagttctagttctagagctgaccgtttgcgctttggtgttgcaactgtgggtgttccaagccatcactatgtatatgtatgtcttgcgactgacctgggggttcctgggtaggggaaacctgggggtgagacattctataataggggtccttcagatcgagtttgcacgatgatgtctgggggattccaccttgattggcacccggaccccacattttaggtgaaaggggttaatttataggggaactctgagcacttggggcaatcaaaagaagtctacccaggattttttgccctcccataacttgaata

SEQ ID NO: 100876 - DNA, 527 bp, Arabidopsis thaliana columbia
  unsure (1)..(527): unsure at all n locations
taggtacannnnnnnnnnnnnnnnnnnnnnnnnnnnnnnnaaacggccgccccttttttttttttttttttttctttttttttttttttttttgtttagagcaataatcataattgaaatccatttaaattttacaggcgccattacaaatttctgccaagattgtgttcatagttatttcgtatgcaacaggaatctaggaaatatagatagaagcaaacaatacatattgaaacactagtgcttgatctgggacaacatggtcctgacatctttactgttcggcctctgttttggatcatccaaagtacagtaacaggcgatcttcagaaccagaagcatctgttcatcgaatccttgatccatcaacttcggatcaatcgcaaggctaggattttccgatgttattatggtcctcatccactttatcagactcatctcggcagtatgctgaaaaaactcatctgaaggaagcttcccaatcaccagaatcccaagaatcactccaaaactatagatatcacatt

SEQ ID NO: 100877 - DNA, 2728 bp, Arabidopsis thaliana columbia
atcttgcaaaaattctctccacatttcaaacgtctaatagttaaagagagcttttgttttttctttcccatgtctatcagtatcaccaccgagaacatatcatcaacaccaccaaccaaacattaacccacccgagagtacccaatgccatgtactacttatcttcctcttcttcttctcctcttccttcttccaccaccatctgtacaaagcaaagttatcatcaaaggaaaccaaaccattctgagtttcaaagctattttccggcttggtttcttcagcaccaccaatggttcctccaattggtacttgggtatctcttacgcttctatgccaactcccacccacgtttgggtcgccaatcgaatccgacccgtttcggatcctgactcttccactctcgagctcacctccaccggatacctaatcgtcagtaacctccgtgacggcgtcgtttggcagacggataacaaacaacccggaaccgatttccggttctctgaaaccgggaatctgattttgatcaacgacgacggttctccggtttggcagagctttgacaatccgactgacacgtggcttccggggatgaatgtcaccggtctaacagctatgacttcgtggcggagtctcttcgatccttcgccggggttttactctctgagactgagtccaagcttcaacgagttccagcttgtttacaaaggaaccacaccgtattggtccaccggaaattggaccggagaagccttcgtcggcgttccggaaatgaccattccttacatctacaggttccatttcgttaacccttacactcccacggcgtcgttttggtacatcgtcccaccgttggactccgtttccgagccacggctgacgcggttcatggtcggcgccaacggccagctgaagcagtacacttgggatccacagacgcagagctggaacatgttctggttgcagccggaggatccttgccgcgtttacaatctctgtggtcaattagggttttgtagcagcgaattgctcaagccctgtgcttgcatccgcggtttccggcctaggaacgacgccgcgtggagatctgatgattacagcgacggatgccgccgtgaaaacggtgattccggcgaaaagagtgatacttttgaagccgttggtgatctacgctacgatggtgatgtgaagatgtcacggttgcaggtaagcaagagctcttgcgccaaaacttgcttaggaaactcttcttgtgttggtttttatcataaggagaagtctaatctctgcaaaattttactcgagtcgccgaataatctgaagaattcaaagggaaacatctctaagtctataattatattgtgcagcgttgttgggtcaatctcagttcttgggtttacattgttagtgccattgattctgttgaagaggagtcgaaagaggaagaagactaggaaacaagacgaagatgggtttgctgtgttgaatcttaaggtattttctttcaaggagcttcaatcagctaccaatgggttctcggataaggtcggacacggcggttttggggcggtgtttaagggaacattaccgggttcttctacattcgtggctgtgaaacgcttagaaagacctggaagcggggagagtgagttccgggcagaggtatgcaccattgggaacattcaacatgtcaatctcgttaggcttagaggtttctgttcagagaatcttcataggcttcttgtctatgattacatgccacaaggatccttgagttcctatctgtctagaacaagccccaaattgctaagctgggagacccgtttcaggatcgcgttaggtactgccaaagggatcgcgtacttgcatgaaggatgcagggactgtattatacactgtgatatcaaaccggagaacattcttttggacagtgattacaacgccaaagtgtctgattttggcttggctaagctccttggacgtgacttcagcagagttctagccacgatgagagggacatggggctacgtggctcccgaatggatatctggtttgcccatcacgacaaaagctgatgtgtatagctttggaatgacattgctcgagctgatcggtggtagaagaaatgtcattgttaatagcgatacactgggagagaaagagacagaaccagagaaatggttctttccgccatgggcagcgcgtgagatcatacaaggcaatgtggactctgtggttgactctagactcaacggagaatataacactgaagaggtgacgaggatggcaacggtggcgatatggtgcatacaagacaatgaagagataaggccagcaatgggaacggtagtgaagatgcttgaaggagttgtggaggtgacggttcctccaccgcctaaattaatacaagctcttgtctccggcgattcataccgaggagtgagcggcacaagctgtagtgaaggccatggctgttcggatctcaatacaggtttgtctagccctggctcacggtcgtcttttggtagaccttctccttgatcaattttgtaaggtgatttggtcaaaaccagccttaaatgttttaagtgttgctctctaagagggtttaattagtttaaactgtatttgttggttgtatgatatttgacttaatcgacattaacagttaaaaccatggattatgtctttcttcttagtttgaaagttcttgtcactttgataatcttct

SEQ ID NO: 100878 - DNA, 391 bp, Arabidopsis thaliana columbia
cttttctttccaaatttgtttccatggcgcagcagagccaacgtccaatctcaaaccgtcacatctctctcctcaaccgtaacggtctcatcctccttctccttctagctctctttgttatcctcggtgtattcttacctttgacaaaatcttccttgttcatgtttccaaacacaacatcttcttctctttctccttcttcttctttatcggtctccgactggcgcgactattcccttgctcaagccgttaagtttgttgctaagaacgagactgtgatcgtctgtgctgttagctaccctttcttgccttttcttaacaactggttgattagcatttctagacagaaacatcaagaaaaagttcttgtgatcgctgaagactatgctac

SEQ ID NO: 100879 - DNA, 519 bp, Arabidopsis thaliana columbia
taggtgacactctcccaagatttatgacgtcgcacgcacgcgtacgtaagcttggatcctctagagcggccgccctttggtttttgtttttttttttcgatgtaatacgaaacacttagtcaaaatatgagtttaaaaccaaagagcaccccaagggatttggtttgttattgaactaattgatctatttggtacaaaaattataacattacaacacatttcatgtaaaatgctggagtagctttagttttctttgagccttttttaattccttcttacctttggtttcttcatcacctttcagaaatttcatgaaccagtaagcagatgattttgggtggacggggttaaaccggtcttggtggtttacatataccaaaccaaatctcttggtggacccttgcgcccactccaaggttgtccagcagcgaccacgcaaagtatcccttttatgtccactccgtcttcaatagcctgggaaacgttggcaagtaactcttgaatagtaactctacgtta

SEQ ID NO: 100880 - DNA, 376 bp, Arabidopsis thaliana columbia
aggggaaaataacgctgttcaaaccttagtttcgactgcattatgtggagtgatacattccattattgggggacaaccattgttgattcttggtgttgcagagcctactgttataatgtacaccttcatgttcaattttgctaaaagtagaacggatttgggctctaatctctttctagcgtggaccggatgggtttgcttgtggacggggctgttgttgttcttgttagctgtattaggcgcttgcaccttcatcaatcgattcactcgacttgctggggaactgtttggtactctaatagccatgcttttcatgcaagaagccattaaaggcattgtggatgagtttggtgtccccggaagaacaaatccaaga

SEQ ID NO: 100881 - DNA, 922 bp, Arabidopsis thaliana columbia
  unsure (1)..(922): unsure at all n locations
naggtgcactctacaagatctatgacgtcgcacgcacgcgtacgtaagcttggatcctctagagcggccgcccttcggtntttggtcttttttttttttccattaaccattattaattcctcaactaaagtcattagaaaaaaagaaaggctatttaattaactcgaagatgctggctggggttaaaaaattaacccaggggtttggttacaaacttcttacatcacggacggggaggggtgtaataataaaggaaacttaacggccgtcagcgagagggttaacggcagattccttgcaaggacttggaggtagacttgactttcctgacgcaacaagacgttgcacgaaaccctctattctttctccgttactctccgtttaggatccgttttacccccaacgggcgccgtttccacacctctctctttcagcaactcctccgttccgccgttcgtcaaaccgttcgcctggattctaacgtaatcagtacggttccagcagaaagcgttccccagcatctgatcgccggtatcggaaacgccgtcaaccactatgtccaccacacttgacgttgaatagtctccgttacgacggagtttcctccctggtgatgatgacatggtcgacggaccgtttcccaacgacagtacaagcaagtcatctacgccgtttactgacgggaaatctcgtttgttgtgtagcacgtgcgtgacggcagctgctgttggattgttcatcaccaaaccgccgtctacggctgagcatgaggttttcccgtccaccgacactacactgaacggcttgaagaggcttggtgttgctgacgtggcacggcagactttccacagctcgaagtcgaagctcgcggacgcgtgggtcgacccgggaattccggaccggtacctgcaggcgtaccagc

SEQ ID NO: 100882 - DNA, 605 bp, Arabidopsis thaliana columbia
atgacgtcgcacgcacgcgtacgtaagcttggatcctctagagcggccgccctttggttttggtttttgtttgatcatcttttatatacaggggaatcacaggagttgaagcagggcctattaatgccaagacttttctattcagtcgaatacattttcatgttcttaaagaatacaatcttgaaacagagtaacccattgatctacaactgaatgaagctgttctctgttcattatactttttcttgtgaggtatacggtgacttactgagctacgcagctttcactttctcagcgtatcggcttgtatcttcggagtacagtacaccatcccgcgatagaaggcgggaaagagatagagaaaaccgagcccatgggaatcccacgagagcataccagcagcctctcaaaccaaatcctccattgctcagaagcataagtagaagcccagcgaccgctaagcatccagtcattgacaagctgatatatctaagatctcttccagccttcatttcatatacaacagtcttagttcttctagattaggtttgcaggtgatccagaaatgtactcggatgtgacaaccttgtcacgtgtgaagatgc

SEQ ID NO: 100883 - DNA, 477 bp, Arabidopsis thaliana columbia
  unsure (1)..(477): unsure at all n locations
cgaacccaaacaaaaaaacattttttctctataaatcctttattattgttataaaaactccgatggatcggcaaaattccgatgacatcatgagatttctcgatggaatggctagctccgacgacgttcttttcggttttcttgacgaaggaaaccagtcaccggaagatttctccgtaaacctcaacgccggcgaagatgacggtgacgaagacgacaataataacaattctgaagataacaaagctttttggcaggaacacgaacaacttcttcaggggacactgtataggacaagttccattgagacaaagattagacaagctacaaaagaagcgttgaaacaagttaaatctaagggtctttattgtgtttgccggcgaccagtggacggcggttgccggagttgcttacgtggcgaaatctcttttggcaccctnaggantttcgccggnttcggtttctttaaccctaaat

SEQ ID NO: 100884 - DNA, 531 bp, Arabidopsis thaliana columbia
  unsure (1)..(531): unsure at all n locations
nnnnnnnnnnnnnnnnnnnnnnnnnnnnnnnnnnnnnnnnnnnnnnnnnnnnnnnnnnnnnnnnnnnnnnnnnnnnnnnnncttcgggtttgttttttttttttttttttttttttccaaattcaaactcattatgtttcaaaaatattaatatatcatattaataacctatttgactttccataacagcgacccaaaaagaaaaaaaaaaaggggggaaaatctcattcgaccggaaaacattaaaagggagagcagcttcaagggattcatttataactccaaagattatctccttcatgattctccggcgaatcatcttccatcgtcggatgtatcatcattctcgggggactcatcaacatcccttcagccatctccgtcaacaagaggcggcatattcaacatcgtttcctcatccataaactccaacgaacacgagttacacgacacttcttctaattcttcctctttgccgggttgaaccggttccaataccttctcatccccaccctgatccggttgcttcat

SEQ ID NO: 100885 - DNA, 524 bp, Arabidopsis thaliana columbia
  unsure (1)..(524): unsure at all n locations
nnnnnnnnnnnnnnnnnnnnnnnnnnnnnnnnnnnnnnnnnnnnnnnnnnnnnnnnnnnnnnnnngttctagtctttggttttttttttgaaaaataattgtcaaaaaatttcaacagactctgtcggagatattacaattgttccgctcaccaaaagcattaaagcccatacaaggaaaacaaaaacaaaaactcttaagccactctgattattttcctcactgcacacaaatttacacgaaaacaacaaaagatgaaagaaagcatcatttttcaaaatcgaagaggtttcttcagaatcaagcaaactgtgtttcccctttgatgttcaaaacttcacagtaacttaccaagaaagtaaccatggtgatctacttaaaccacttgatatctccatattattttccgataacccgaaacaatcagatccatgttccgggaatatactctctttcaaagaatcacaagtaatttccggcgaaacccactgtgaataacctctcacattcgagcattcccatgg

SEQ ID NO: 100886 - DNA, 491 bp, Arabidopsis thaliana columbia
  unsure (1)..(491): unsure at all n locations
gtgtgnnnnnnnnnnnnnnnnnnnnnnnnnnnnnnnnnnnnnnnnnnnnnnnnnnnnnnnnnnnnnnnnnnnnnnnnnnctttttttttttttttctcaaggaaagaatcttccctgtataatttagaaaaccctcctcaaccttttcacattcttcacaacacacacacatacactttattttaattaaattacacacacctctctgttcaccactctttccaatctctctagcctcattccatatcggcaaggattcagatagagctcacggcccaattcgagcctgcacgaaactggggacttccccaagaatccaccattttaaactaggcgcaggatccacaaatcccgcggaataatatagagataaatatttatgagaatgaatgttcattcttggtgtggagaggaacaacgaggtcatgtgcataatcaaggagcttccacacatctaactggcctgccatactttgggcctcctttaaaac

SEQ ID NO: 100887 - DNA, 527 bp, Arabidopsis thaliana columbia
  unsure (1)..(527): unsure at all n locations
nnnnaatgaattatgtgcactataaaagagcttgacgtcgcatgcacgcgtacgtaagcttggatcctctanagcggcctcccttttgtttttgttttcaggggtcatgcaaatacataggccccttcccttctcttttggataaagggggggctttccgatctacggtccctcggaacaaagggttaggcaggtagtattgggccctctgacttccacctatgtgcttgcgcggctcccgcgaaccggagggggggaagctctcttcgaccttacgggggagcttacttttactctctgcctctttgatgggggggcggcgcggcaaagccccccctacttaagattcccttcataaggataattttttgctgtcgcgaccgctttggttaggcccacttataaagcaaggtctagcttctatagaggccctcccacttcccttctgggggagcttggattttggcctgagggaatttttccaaccaaaaaagggcgagcagtattagccccttttttgggaaccg

SEQ ID NO: 100888 - DNA, 285 bp, Arabidopsis thaliana columbia
aggtcacggcgagacgagccgtttatcattacgataggtgtcaagtggaagtgcagtgatgtatgcagctgaggcatcctaacagaccggtagacttgaacattccaatatgggctgagaatcggtttgggccggggatagcaatttgatgttatgatgctaggcgaactgtaagaaagatatcaaaaacagaaaagtggagctttctgattaggtaattgctcttaaagctaatataaagttataatttggatatttaaaacaagagataaaagaacaactaaa

SEQ ID NO: 100889 - DNA, 452 bp, Arabidopsis thaliana columbia
cggacgcgtgggctgttgttgattcgcaaaggcgaagattatccatcttctcagttactcctactggaaccaaaagctcagaaccttaaaacatggagtctctatctcttcccgttctaaatcctctgttagcttctggttctaatctttttagaaaccagcactcgaggatgacctcttcaatggtatcttcacttaaatcccccattggaggcacatcgctctccactgttcgtcgctttggagtaggtgttgttaggatgcaagctgttgatgaagatattgatttgaagcaaatgagagacatagctgctgctaaaaagcgttgggatggtttgttaagggaaggaaaagtgaagcttcttacaccaagagaagcaggctatgctatttctctttcaaacaaacctctccttgatgttcgtccctctagcgagcgcaacaaggcatgg

SEQ ID NO: 100890 - DNA, 676 bp, Arabidopsis thaliana columbia
  unsure (1)..(676): unsure at all n locations
gattgattttnnnnnnnnnnnnnnnnnnnnnnnnnnnnnnnnnnnnnnnnnnnnnnnnnnnnnnnnnnnnnnnnnttgcccttttttttttttttcttcatacactttaattggtttattagacatcaaaagtacactttaagcctttgttctatcaaattcgcaagttctaattttacatccgactcaacctcgtcgtacccatcttcttcgcaatctctctaagtacaaacttcataaccttccccgtcgaagttttaggcagctcatccacaaaggacaccgttttaggaaccatatatttcggcatcttcttcctacaatactctatcatttccacctccgtcggtctttgagtcaacccacttttcaaactaacaaacgcacacggtgtctctccccaaaacacatgaggtctcgccaccaccgccacttcattcaccgccggattcgtatacaaaaccgtttcaacctcaacactactcacattttcacctcccgttataattatatctttcgatctatctttaatctctagataaccatcggaatgaatcacaccaacatctccggtgtaaaaccacccgttctttaaagctttctctgttccgaccggatcttttaagtaaccgagcatgatcgagcttcctctcatcactatttctccgacggtttc

SEQ ID NO: 100891 - DNA, 699 bp, Arabidopsis thaliana columbia
gactatctatcacgtcgcatgcacgcgtacgtaagcttggatcctctagagcggccgcccttcgtttttttttttttttttttttggctgagtccgacttattattaatcatgacagtcatgtccacttgcaaatacactcaaatcaaaggtacatacagctcaagtcggttccgaacaaagaaataaacacattgcacaataaggctggtttcttcttttttttaaaaaaatatggaaggcactaaatgaagatgaatccaaagatgaagcatctaggcataagtgaagaagaagatgaagaagaccgaggtgtgtctaagcaaatggattgcctccagtaaatgcaacagggccttgtgctgctgaattcgttgatgcttgccctgccatgtatgctaagccaccttgtgcgactgctggagcaggtaagtacgagggtacagaatctgcagcgagccacggttgtgatacaccattaaggaaggcttgtggtgtctggatatcgggcagtgccccttgtaacgaactcatgtccaagaacatgtcatttgagtcgaactcagaatcataggggagatcaaatggattagctgacttttgttcatttacatgctgccaagcttcttccgagtatgatggtgccatgccaatatttcctggaaaaccaaaagcagaaaagccagcagggattctggtg

SEQ ID NO: 100892 - DNA, 525 bp, Arabidopsis thaliana columbia
  unsure (1)..(525): unsure at all n locations
aannnnnnnnnnnnnnnnnnnnnnnnnnnnnnnnnnnnnnnnnnnnnnnnnnnnnnnnnnnnnnnnnnnnnnnnnnctttctttttttttttttttattgaaattcacatgacattcatatattatagtacatagaggatctgtattcgtatacaagacaggatttggattattaattaaagagacatgaacacacacacacaaaagcttaatcaaagacaagtataggagatgaagattgaaatgtttcaaagagaagaagtgaagctataagaagaataagacaaggtaccaagttgccaacttgtatggatttgctctgcctttgcatctccacctgctgcacccatcacaacatgtaacggatacaaatgctcgggccacggatgcgccattttcgcattcggagctttctcttcccactcattcacatctccataccttccttgaagtagagaatctctaagccaatgatcaaactccaaggcccaaggaacgggtgagccatcagtgatattaaagtca

SEQ ID NO: 100893 - DNA, 609 bp, Arabidopsis thaliana columbia
  unsure (1)..(609): unsure at all n locations
nnnnnnnnnnnnnnnnnnnnnnnnnnnnnnnnnnnnnnnnnnnnnnnnnnnnnnnnnnnnnnnnnnnnnnnnnnnnnnnnnnnnnnnnnnnnnnnnnnnnnnnnnnnnnnnnactaaacataacctatttttcttaattatagggtaaaacatgaaacgtggcagtaacaacacatgttagggatgcgtaaagaagagagattccaaaccataaagaaggaatcaatttatttattccgacgggaacaaaataagataagcccatgttgaaacttgtggcgtaagagtagttgcacaaaaataatttgtttaaacggtgaggcaaatttttttgtttggtctctcgtcatggtcaccacttagtttctttttatgtcttcaatagccagaaaatcatacaacccttgacgacataaagcctcatggcctttgtcatggacatgccaaaaccatttaacacgacaaagaataggcttcatgatttgagtttttatcattaccttgaagacgtttgtatcgtttagttcgaatcttcgaatggagggcaagccccactcttccggtttaaaatcgactaggagaggttatgatttgatctgcaacatcttg

SEQ ID NO: 100894 - DNA, 598 bp, Arabidopsis thaliana columbia
atgttgacagcgggcgagccttcctgtaggccttcacttcccatccccatgtatcctcccattagcccgtcgtcccgcctcacagagagctagcccgagtcctcctccggaatggttcctgtgagttccggtccgagcctgtacgaatttggtatagagcaaagcaatgtcttgtgtgtgaattccacaccctgtgtccttcacctgcgcacataggtagaagtggctgtcactgagagctggaacagattctggggatggtaattcgtgtaaggacccgggtttcatcataccggctagtatggagatgtagccttccttagtaaatttctcagcgttgcccatgatgtttaaaattctctgcatcagacgtttctcatcaccactggcataagctggttagtctgcagacagaatcagattcgttgatagtttcttcactgatgcgactggcttcatcaaagagatcccctcctcatagctcgcttgtagactgaatggttctttattccaagagtaagcatcccatctggccgtccgcctaagagcctcccctccgtacgcgtgggtcgacccggaaattccggaacggtactgc

SEQ ID NO: 100895 - DNA, 622 bp, Arabidopsis thaliana columbia
tgcttgatgatgaacgaagctgtgcagcctttctgtaggccttcactttctatccacatgtatcctcccattagcccgtcgaaccgtttacagagagctagcccgagtcctcctccggaatggttcctgtgagttccggtccgagcctgtacacatttggtaaagagcaaagcaatgtcttgtgtgtgaattccacaccctgtgtccttcacctgcacacataggtagaagtggctgtcactgagagctggaacagattctggagatggtaattcttgtaaggactcgggtttcatcatagcggctattatggagatgtagccttccttagtaaatttctcagcgttgcccatgatgtttagaattgtctgcatcaaacgtttctcatcaccaatagcatgagttggtaagtctgcagacagaatcagattcgttgatagtttcttcactgatgcgattggcttcatcaaagagatcccctcctcatagctcgcttgtagactgaatggttcatttaaacaagagttaagactccccatcttgcccgtctcgctaagatcgcatacccatcgtgacgcgtgggtcgcacccggaaagttccggcgcagctaggtgtacatgc

SEQ ID NO: 100896 - DNA, 1036 bp, Arabidopsis thaliana columbia
  unsure (1)..(1036): unsure at all n locations
nnnnnnnnnnnnnnnnnnnnnnnnnnnnnnnnnnnnnnnnnnnnnnnnnnnnnnnnnnnnnnnnnnnnnnnnnnnnnnnncttttttttttttttttcgtgaagatttatatcgcttatttagtagtgaattccaaaacatattctctaaagtaatgttcaataaaatatagtgtgaacagataaggtacctctccccgtatataggatttttattttacatattacatccaacaaaatccaataagttagatcacaccgtccggtcatgtattttcttctttctcttgctgctgtgtagttaaaaagtctcacctcaatacaagtctttccaacgtaatgtatcaccagttccacggtctggtttgtgatttagctgcaagatgtagcgccattgaaccactgctactgcttggaccgttgcagataccaagcctgatgatgaacgaagctgtgcagcctttctctaggccttcactttctatccacatgtatcctcccattagcccgacaaaccgtttacagagagctagcccgagtcctccaccggaatggttcctctgagttccggtccgaggctgtacaaatttggtaaagagcaaaggaatgtcttgtgtgtgaattccacaccctgtgtccttcacctgcacacataggtagaagtgactgtcactgagaactggaaaaaattctggagatggtaattcttgtaaggactcgggtttcatgatagaggctattatggagatgtagccttccttagtaaatttcacagcgttgcccatgatgttaagaattgtttgcatcagacgtttctcatcaccaatagcataagttggtaagtctgcagacagaatcagattcgttgatagtttcttcactgatgcgattggctttatcaaagagatgacctcttcaaagatcgcttgtagactgaatggttcattttccaagagtaagctcccatcttccaatctcgaaagatccagaacgtcggacgcgtgggtcgacccggaaattccggaccggtaccgcag

SEQ ID NO: 100897 - DNA, 1089 bp, Arabidopsis thaliana columbia
  unsure (1)..(1089): unsure at all n locations
agaaaganagattctcctcctncgattccagcgaaggaaaagcgtattcctcgtnagcactaacttctnactcctctntnctcctncttcatcagtctacgttcacacaatctttcacccacctattcaaagctctctccggaagtttcgaggggttggttgttggttttcccgatgacttcggatggagctacgtcgacatcagcagctgcagctgcggcggcggcagcagcggcgaggaggaagccgtcgtggagagaaagggagaataatcggaggagagaaagacggagaagagctgtagctgcgaagatatacactgggcttagagctcaaggtgattataatttgcctaaacattgtgataataatgaagtccttaaagctctttgtgttgaagctggttgggttgttgaagaagatggtactacttatcgcaagggatgcaagcctttacctggtgagatagcctggggcttcatcccgggtaactccatattcatcacagaaccagagccctctttcatcagcctttcaaagtcccatcccatcttaccaagttagcccgtcttcttcatcattcccgagtccttctcgcggtgaaccaaataacaacatgtcctctacattcttccctttcctcagaaatggtggcattccttcttctcttccttccctcagaatctcaaacagttgtccagttaccccaccggtctcatcgccgacttctaagaacccgaaaccgttgcctaactgggaatctatcgctaagcaatccatgggccattgctaaacaatcaatggcgtctttttaattatcctttctatgcggtttctgcacctgctagttccgacacatcgcccaccaagttttcatacccccgggttactattcccctgtgtgatgagtctgactcttccactgttgattctggtcattgggtaagctttcagaaatttgcacaacaacagccattctctgcctctatggtgccaacctctcgtaacttcaatcttgtgaaacctgcgcctcagcagatgtctccaaatactgctgccttccaagagattggtcaaagctctgagttt

SEQ ID NO: 100898 - DNA, 659 bp, Arabidopsis thaliana columbia
  unsure (1)..(659): unsure at all n locations
aatgnnnnnnnnnnnnnnnnnnnnnnnnnnnnnnnnnnnnnnnnnnnnnnnnnnnnnnnnnnnnnnnnnnnnntgccttcttttttttttttttttttggttaattatctgattttataagcaaataacaaatgtaaattcgataacaatggttgcgtcttctgtctctatgcgaatttcagaatcaatcaattacaaaaagcaagctaaagaacgcaaacacatggttcagctcctgtggggtattacaacaacttttcttcaaaccttcgaaacatggaaaccaaaatcgatttttcaacacacaatctttggatgagtctctatggagatgctgaagatagaactgctcctgtgtttgatgactcttcttggctctaaagaaaaaggcaaaagtggcattgggtaaaagactagaaaatcccagaggaaatgcttgaagttgcgtttatcttcagtgactgctctggaatgtatctacgacctttctcctttgcatggatctgaagagtatccagagtgattatgccatcagtcaaagggagtagctctagcttgattgtcgccgtagatttcgaaggagcgcatcctaagggctctcgactttgtagccagagatgtgtgcaacctaagccgctctttggaacaacatctgaagg

SEQ ID NO: 100899 - DNA, 519 bp, Arabidopsis thaliana columbia
  unsure (1)..(519): unsure at all n locations
nnnnnnnnnnnnnnnnnnnnnnnnnnnnnnnnnnnnnnnnnnnnnnnnnnnnnnnnnnnnnnnnnnnnnnnnnnnnnnnnnnnnnnnnnnnnnnnnnnnnngagccacaattattagttttcgttatccttcatcctcttacattcggtgactaaaacatatgattcatcatgcctcggttggatttgttattcaacttattattatagacatatattactttattcacttgatactttatcgacactggggtttcatcctctctacgggcaaaggagtgtgcttagtagcgttttgagatacgcggtaccgtagtactagtgtctctaccgtcatggtacagccgcagaatcacagccgcggtttcttcaatcgccttattcgtcacatctatcactgcccatccggggtttcgctcatagatccttgacgcgaaatctagttctttccgaacaagatcaatccccgaggaattgttctctgcctctgtatctacgcctagcgttttaacccttgttc

SEQ ID NO: 100900 - DNA, 645 bp, Arabidopsis thaliana columbia
  unsure (1)..(645): unsure at all n locations
atgnnnnnnnnnnnnnnnnnnnnnnnnnnnnnnnnnnnnnnnnnnnnnnnnnnnnnnnnnnnnnnnnnnnnnnnnnncttttttttttttttttttagcaaatcccgtagtcttgaatctcgattgttcacatttggtaagaaacgttcttacattaatctatcatatttccttctcaacactagcgagaaaaacaatttttttttttttttttttttggtttgattgggcaaaaaaagggggaaaggagaaaagggtcaacaaatatctccctcctgaccccaaaacacttggaaagagtaaagagaaacctataaaatatcgaatctgtttcactttgaagccttgtgagctggtggtttggattggttcgaagtagctgcagttgacataacacgtaaccgaccagctatctccgtgaaggatggccttgctgttgggttaggcgcccaacactcctccattaatattcgccagtccgagtcacagtagctcggtatggtcggcctcagtgtgttgttcaacctatcccacctcattataagcaccggaggtgcatattaagcatatgggttcctcgccggttagaatctcccacaagactataccaaaagagaagacatcgaccttctctgaaactttgct

SEQ ID NO: 100901 - DNA, 875 bp, Arabidopsis thaliana columbia
cttctccgcttctgtagcaatgtcaatgtggtaccctctaccttcttcttcttcctccactcactaaccaaatccagaatcaacaataatagaaaaagccctaactttctccgtcgatggctttcttcttctactttttcttcctcttgactctttcttctccttcttcttctgcttcctcttcaaactccttgacttacatcgtccacgtcgaccacgaagctaaaccctcaatcttccccactcattttcactggtacacttcctctcttgcctcactcacctcttctcctccctccattatccacacatacgacaccgttttccatggcttctccgctagactcacttcacaagacgctagtcaactcttagaccatcctcatgtcatctctgttatcccggaacaagtccgtcacttgcacaccactcgttcccctgagtttcttggtcttaggtccaccgacaaagcgggtctactcgaagagtctgatttcgggtcggatctagttatcggagttatcgatactggtgtttggcccgaaagacctagctttgatgaccgtggtcttggtcctgttcccattaaatggaaaggccaatgtatcgcttcccaagattttccggagtctgcttgtaaccgtaaactcgtcggagctagattcttctgcggtgggtatgaagcaaccaacgggaaaatgaatgaaacgactgagtttcgctctccgcgtgactccgatggacatgggactcacacagcttcaatctccgccggccgttacgtttttccggcgtcaactctcggctacgctcacggcgtcgctgctgggatggctccaaaagctagactcgccgcttacaaagtctgttggaac

SEQ ID NO: 100902 - DNA, 856 bp, Arabidopsis thaliana columbia
  unsure (1)..(856): unsure at all n locations
agctcnnnnnnnnnnnnnnnnnnnnnnnnnnnnnnnnnnnnnnnnnnnnnnnnnnnnnnnnnnnnnnnnnnnccacgcgtccgggatgcccgggcattgagaaggaaggacgctttcagaggcgaaaggccatggggagataccgtctgtgatccatggatctcccctcgcgtccccgtatccaagctccgtggctagtctgcgctctttggactttgaaaacttagcgaactgaaacatctaagtagctaaaggaagggaaatcaaccgagaccccgttagtagcggcgagcgagagcggatttgggattttaagaaaaagaaagacgaagcttcgttccaaagtgttcacttctttttcgccaggtttcattcgatttattgtggattggatgatggaaaaaccagcaagcccctcttctttaagccgagttactttcgaccttgactgaagattcctaaagggcgctgtgaactgtaattgtgaaaaggttggaagatctggccaaagaaggtgatagccctgtagattcgttcctatggttcgatccttcccagtaaaacgcggcgtgttcgaattctgatcgcttttacgcgagaaagggggaccaccctctaagcctaagtattcctccatgaccgatggcgtacaagtaccgtgagggaaacgtgaaaagaaccctatgacgggagtgcaatacagaacctgagatccgatgcgaacaatcagtcgaaggagtagtcaagcgcactcactcttacggcgtaccttttgcatgatgggtcngcgngganntgggnngngcggctttngccatttggtgtgggctttccanggnggatcttntngtcntcc

SEQ ID NO: 100903 - DNA, 663 bp, Arabidopsis thaliana columbia
gcccgccctcgagtcgacagtatcgataagctagatatcgaattcgcggccgccgcttttacgcgagaaagggggaccaccctctaagcctaagtattcctcaatgaccgatagcgtacaagtaccgtgagggaaaggtgaaaagaaccctatgacgggagtgcaatagagaacctgagatccgatgcgaacaatcagtcgaaggagtagtcaagcgcactcactctaacggcgtaccttttgcatgatgggtcagcgaggaaatgggaagagcggcttaagccattaggtgtaggcgctttccaaaggtggaatcttctagttcttcctatttgacccgaaaccgatcgatctagccatgagcaggttgaagagagctctaaccaggccttggaggaccgaacccacgtatgggccaaaatacggggatgacttgtggctaggggtgaaaggccaaccaagatcggatatagctgggtttccgcgaaatctatttcagttcagagcggatgatgtcgatggcccgaggtagagcactcaatgggctaaggtggccccatttcgccttaccaaccccagggaaactccgaatacaggccgttctcgtttgtacagacagacttttggggtgctaagatccaaagtcgagagggaaacagcccc

SEQ ID NO: 100904 - DNA, 812 bp, Arabidopsis thaliana columbia
  unsure (1)..(812): unsure at all n locations
atgnnnnnnnnnnnnnnnnnnnnntagacaactatgacttcgcatgcacgcgtacgtaagcttggatcctctagagcggccgcttttttttttttttttgaaaaagcaggaatgaataatacaatttgccaatgccaactgtctcacaacaagaacaagatgtctctgatttaccacaacaaacacaggatggattcagatcttattgattgtacaaatttgcgaaaggaagacttgaatgggctgtgttgagaccctcataactcatctcgtgaaccacttttgctttcatatgatgcataagctttgatgattgaaacatacacctcaatgcctttcaagtactcagctttacccaaatactcattgtggtcatgaagcagactcggggtgtttgatatgggagagaacccaaaggcaggcacgccagccttgcgaaagtagcgagcatccgttgatgcagggaaaatctcaggcttactggtcctacctccggcttccttaacagcattttccaagagcccccaccaaggatttgaatcatctgctgctgtaaggaattgcttccccgtaagcttctgcttgaactcaaaggacatgtttcgtgctgctggagcccattcctccactaaacgtctttcgagtgcttcagcatcaacgctgggtggaacacgaatgtcgaaaccagcttttgcctcagatggttgcagattcattacgaaaccagttggagaaggtgggccagccttgaggaaggccatgttcacagagacaacatcgccttcagctattccaccaggttggagaagata

SEQ ID NO: 100905 - DNA, 737 bp, Arabidopsis thaliana columbia
  unsure (1)..(737): unsure at all n locations
aanatgnnnnnnnnnnnnnnnnnnnnnnnnnnnnnnnnnnnnnnnnnnnnnnnnnnnnnnnnnnnnnnnnnnnnnnnnnctcttttttttttttttttggtagaaacttcttttattagattccaagcagcaaatgtttatccaaacaaacaaacaaccagaagaagaagaagcattgaacgtatcacttaaaacactgatttattctctttccctcttcttatttcaacggcctatgtggaaagtttttgattgagaatccaaatcacacattacatcaaatcagaactcattatgagtcactaacgagttcagacatgtcgcggctgatgctgttctcatgtgtggacaatggagttccagatataaaagccttgaagagcgcaagagcttgcttcggtctgtgcaaaggaacttcatggcctgcacctctcactgtcacaaagttcagaccagcatactgctgactccaccctcccacctgtccatctaagtaccaaggaccataggcactcaaaggacgaaggtttagtgcatcgatactgtaccgggttgatgtgactggtacaacggcatctgcgtccccactgaaaacccagatacgaagcccagcagctataagctcgtggtaaatgtttagaaccgaggaaggagagtcattccagtgttcactcacgacatcactgcaagtatcccattttgatggtgcaagtcctggtgggacatggagggctttt

SEQ ID NO: 100906 - DNA, 558 bp, Arabidopsis thaliana columbia
  unsure (1)..(558): unsure at all n locations
atgnnnnnnnnnnnnnnnnnnnnnnnnnnnnnnnnnnnnnnnnnnnnnnnnnnnnnnnnnnnnnnnnnnnnnnnnntcctttttttttttttttaaataaataaattgttataactttgtagattttttcgtcggttcttttacattaatagagattaattagaactagtccaaaaaaaataaaaaactatgagaagagaagaaaaagaatgattgataatttgtttacagcttctttctaaagatatctgatgatttcaactgcaaatttacctttcttcgtttcattgatctctccaatcttgagtctccctttcccgctaacggagacaacatcaccagtcttcactatggttccgttctttgtaacggttgcccagttaacccgaacatccttgctactaatcaaatcaactagctttgaccgcgaaatcttgaaaccagcactagctactgcatcaattctcaacgaggcctccacggttttaaaggaattagtcctaggcggttcgtattcaagagcaagcaaaggtatcttactacaagttacaccaacat

SEQ ID NO: 100907 - DNA, 523 bp, Arabidopsis thaliana columbia
  unsure (1)..(523): unsure at all n locations
atgnnnnnnnnnnnnnnnnnnnnnnnnnnnnnnnnnnnnnnnnnnnnnnnnnnnnnnnnnnnnnnnnnnnnnnnnnnnncttttttttttttttttttaacagagaaacaaaacctttgtcttgtatcatcaaaaatttctcttcaaacatgtggggaaaggtacaacaagttacaacacaaactagttttgttcgtctctaaagttctttgtttcagcagagaatcaaacaatcatccaagtcaagtgtctgtatccagcccattttgcagcaagtcggacgccaatggctaatgctgcagccaacaacggcattggtggtgccctccttaagatctgactctcttcttctgaggaggtcttcgttgaattgtgatacatggctagagccagataccctgtgatagccaccactctcacccatggctcccctactcctgccagaacagctgcagaaggaagagccgaggtcacatcgtctctcttctttatcaaccgcgagtacccatacaaacctaacaag

SEQ ID NO: 100908 - DNA, 519 bp, Arabidopsis thaliana columbia
  unsure (1)..(519): unsure at all n locations
nnnnnnaatgnnnnnnnnnnnnnnnnnnnnnnnnnnnnnnnnnnnnnnnnnnnnnnnnnnnnnnnnnnnnnnnnnnnnnnnnnnncttttgtttttttttttttattgaaattaatacacttcttatttatttaaaaatttttgctttgatttattgcctcttttttcaacctctcatcagacatcatactgattataataatgtaagaaaaaaacagttttttttttaagaaagatgtgtctaagaagaagaagaatcatgggtcttaaagctgaaacaacaagccgatacttgtaaaaccccattgggtgtttgtgaacataagtctgagccatcactctctatcatttcccctatcttcttcactctctcctttggaagtagtgagaaaagaggagagaaggaagagttgtcaaagtgtactctctgcaattctccagaaacagaaagtgccacagcagcagcaacttcagaggggctaacctccaaaaaggcattacctttggttgcgctggcta

SEQ ID NO: 100909 - DNA, 515 bp, Arabidopsis thaliana columbia
  unsure (1)..(515): unsure at all n locations
annnnnnnnnnnnnnnnnnnnnnnnnnnnnnnnnnnnnnnnnnnnnnnnnnnnnnnnnnnnnnnnnnnnnnnnnnnnnnctttttttttttttttttaaaaagtcaatatacatgattataaatgtatttaaaataatatatctatgtttactcttttcttttacaatgataaagcatacaacaaagtaaggttatctcaaagttgcacaaataaatctgaggaaagtggtatacattatacaaagggtgatgaactttaaatccaatactagaagagccaatgcttcctgcgcggttttcttgttggaacatctggaagagcaagaactccattagcgtataaagaattgtaatgcacttcgctccagaagctgagccaagcctctctaagagggttcttgttatgaggaagaatctcgatgtaggattgatcccgaaaggatgtgactaagcagatcttggcttcgaatctatccgctgcagcttgaagagtaacatgatctccccattcacc

SEQ ID NO: 100910 - DNA, 803 bp, Arabidopsis thaliana columbia
  unsure (1)..(803): unsure at all n locations
ttgaaacctagaattgcggattttggtcttgccaagattcttcaggccagcaatggggctccagagtccacgcatgtcgttgcgggaacctatggctacatagctccagagtatggatatgcgtcaaaagtgactgagaaatgcgatgtatatagcttcggggtcgtgttgatggagctagtcacagggaaaaaaccgatagaggcagagtttggagagagcaaagacatagtgaattgggtgagcaacaatctgaagagcaaagagagtgtgatggagattgtggacaagaagataggagaaatgtatagagaagacgcggtcaagatgctgaggattgcgatcatctgcaccgcaagacttcctggactaagaccgacgatgaggagcgtggtgcagatgatcgaggacgcggaaccttgcagattgatggggattgtgatcagcaaagagagtgatgtcaaggtcaaagaaataagttgatgattgagggaccaagtcactcttttggggtctgttttgttcccaatgaaacttagggagatcgactaaagtggatcatctaaatctattaagacgtacgtaagagtttagatggagagtgttgtaatactagtactccgggttatgaaatcataggtgttgtaacgatctcattgtaaactattttcttgtaattgtagaattttaaggttttcaaatgttcatgaaggtcaacccctaaaaaaaaaaaaaaaaaaaaaaaaaaaagagggcggccgctnnnnnnnnnnnnnnnnnnnnnnnnnnnnnnnnnnnnnnnn

SEQ ID NO: 100911 - DNA, 629 bp, Arabidopsis thaliana columbia
  unsure (1)..(629): unsure at all n locations
tttttggtttgcggnacatttccccgggaccctttccctnttccccnnccttntccccccctttgggaactntccccccccagntcccccccngaatccccgggggcccccccnccccggaaaccccngtcaaatctgggnttccatcatctgcccccccaggcttcctggcctaaccccgacgatgaggagcgtggtgcagatgatcgaggacgcggaaccttgcagattgatggggattgtgatcagcaaagagagtgatgtcaaggtcaaagaaataagttgatgattgagggaccaagtcactcttttggggtctgttttgttcacaatgaaacttagggagatcgagtaaagtggatcatctaaatctattaagacgtacgtaagagtttagatggagagtgttgtaatactagtactccgggttatgaaatcataggtgttgtaacgatctcattgtaaactattttcttgtaattgtagaattttaaggttttcaaatgttcatgaaggtcaactactaaatgaaaaaaaaaaaaaaaaaaggcnnnnnnnnnnnnnnnnnnnnnnnnnnnnnnnnnnnnnnnnnnnnnnnnnnnnnnnnnnnnnnnnnnnnnnnnnnnnnn

SEQ ID NO: 100912 - DNA, 526 bp, Arabidopsis thaliana columbia
taggtgcaacttagaagatctatgacgtcgcacgcacgcgtacgtaagcttggatcctctagagcggtcgccttttttttttttttttattgtgatatagttttcattaaagcctttgaaagagactgccttattttgttcacaaacacgagcggatagtttttgatgttcaaagttacaaatgttggtaatcataatggtttttaaaatagagggtattcttcggacatgattaagaggagaagtgcacaccaaccggtgaagacacgtgcaccttctccagttccttttgtttgatcgtagtgttcccagataattccagtctggtcatagtttctaaccacgttccttattagattgctccttaggtcctacgtaaatcgtgcgtgctttgctgttggacggtccatccactgtagagtaagggcgcagggaagaaagaatcatgtagttcatgttcatccatatagcacctctccagtatggggcttgatgctcactgttatacttcatgtacaaagaacta

SEQ ID NO: 100913 - DNA, 950 bp, Arabidopsis thaliana columbia
  unsure (1)..(950): unsure at all n locations
nnnnnnnnnnnnnnnnnnnnnnnnnnnnnnnnnnnnnnnnnnnnnnnnnnnnnnnnnnnnnnnnnnnnnnnnnnctttttttttttttttgataagaaactcttttaacctttatagctggtcgtaacattgtcatctaaagccatgatccaaaggattcaccacttccctactaacatcatttacaacaaccctttcattctagaagaaacgagaggtatataaaccaaatggcaaagaaatagaaagctaccagcgtgtatgaacatatccaacggttttgctatagacaaacccaccaatccaaccgcattattactcccaacaccaatccaaccgatatgtgacaaactgaccagtcaagctgaattaccagattccaacgcctgtaagataactgactggttgaacttgaagtttatgaaactgccaccaggttttatgtcctgagaatggtcgactacaggctttgtattgtggctttctactgttgctgttgtattgtggctttccattgttcctttcctgagttcaggctttgtactgtggctttccattgttgttctcttgagttcaggctttctactgttgctttccattgttgttgtcctgagttcagactttctattttggctttccactgttgctgtcccgttccctccaacactagtccttgcattccacacgcagagtgctttaaggggcttgttaggtctccgtgctacaggtgaaggatgctttaatatccacgacttcaatgacgaaaggaaaggtgcccccatgtacaatttgagaccagaaactccatgagtaacgcttcgttccttgctggctgaagatgatcaaggggatcccatgtcatttcactgatttccttcttctctccggaggcagaagctgtatagtaaccaaacacagccacaatcaatggcggtagtctttgctgcctg

SEQ ID NO: 100914 - DNA, 813 bp, Arabidopsis thaliana columbia
taggtgcactatagaagagttatgacgtcgcctgcacgcgtacgtaagcttggatcctctagagcggtcgccctttttttttttttttttgaaaaaataatgtctctgtactaaggaaaaaaagtaacaatattcggcagattcttaaatatcataagtttaggggcgtttccgaagtttatattataattaaattttctgtttaaaataacggggaacccacatggtagctaatgaccggcgaaacaagtagttagctaagttttgctctgaacaccaaacaattgccacctaactcctcaacacagcttggttcagtttaccgcctaaaccggtttggtttcaattcatggctcatctcaaatcaagttctccaaaaccagtgtaccaaaactcaaaaagcaagagattgttctgcaaagccaataaggaccaccaaaaaagaaaaaaccagaaatgaactatacacaaatgtggaactactagaactaggtcctggtttaaagctactacggtttctggttatctaatcagttcagtggtttgttcggtttgcccggtccccaaatacggatggtttggtcatcactagcagaggctagcatccgaggatttttcgggttccagcttacacagtttacggtcatcgaatgacctgataacacttcaagcggctttgggttctttagattccatatgtaaacctgtgaatcctcacttccactggcgatgaacgaactatccaacccaccaaaacatgaccgtatcacgtatttgctctgcctgtgacccgagaacttcaatggttgtttc

SEQ ID NO: 100915 - DNA, 565 bp, Arabidopsis thaliana columbia
  unsure (1)..(565): unsure at all n locations
taggtgcactatagaagagttatgacgtcgcctgcacgcgtacgtaagcttggatcctctagagcggtcgccctttgtttttttcttgttttttttgggtggagatctaacacataaccttttagattaccaattcacaacacaacacaacccacgtgtataaaaaccagagcattgtgcacattgcactccaaagaaaacccacacaaaacaaaaaccccaaaaaaaactaatccttcttcttgtctttcaacggtcctcttgggattttgctgaatacctttgcgtccaacacagcgtattgcttcttcaactcagccattgctttctcaccgcatgagtctactttgtcttcgcacttgtcgtagaaaagaggaacagtgaagagcagaaccagagctatgtatgccaatgtcaagaaactatagcagccgcccaagatcgatagaacccacattccggcaatagcagagaggaacttcttgatatccctccccgacgcaatctcacgaagagaagagatcncacggttgatttcgattctaagacccgaagcaagctgaag

SEQ ID NO: 100916 - DNA, 507 bp, Arabidopsis thaliana columbia
tgacactactagaagatctatgacgtcgcatgcacgcgtacgtaagcttggatcctctagagcggtcgcccttttttttttttttttagataagatcgattttacgacaacaccatcataactctttaatcctactttactccaatcggtcaactaaccacgcaattggcttgcccttgtagaagttgatgacttccttggacttggcagcgatctgatcgggatcgaatccaaagcgagtgtaaagctgcttgaaaggagccgaggcccccaaagacctcatgccgatctggtagtgtgaatagcgctcccagccatggatacccgcagcctcgattgatacaacgagtgcccctgcagggaagacctgcttcttgtactcagctgactgttcatcgaagaggtcgtagcaaggcatacacacaactcgcacgtttacaccggcctttttcaggagctccccaggggcgacggaaagaaaaacttctgaccccggagaaaccggga

SEQ ID NO: 100917 - DNA, 504 bp, Arabidopsis thaliana columbia
  unsure (1)..(504): unsure at all n locations
aatgnnnnnnnnnnnnnnnnnnnnnnnnnnnnnnnnnnnnnnnnnnnnnnnnnnnnnnnnnnnnnnnnnnnnnnnnnnncttttttttttttttttcttttaacctttttactaaactgattcttaatatttgtccctcattttcttcagcctattttaattaatatggtcatcaatacattactttatcgccacggcattgatttacaatagcattagataaatgaaaccaaaaaaaaaaaaactctggagtgacacatctttactacgatggttctttacttggcgcaggcttaactcgaaaagaagtctttacttggcgcaggctacaccttcacaatcctgactagtctcaccggtcttgagatgattcattactcggagcaggcttgacgaaagagaactctttagaatcagtttcagtgtcacggctagtctcaccggtattggtcttatttggttcaactttcacaacaagctcgaagcttggaggagatttgggag

SEQ ID NO: 100918 - DNA, 530 bp, Arabidopsis thaliana columbia
taggtgcactatagaagatttatgacgtcgcacgcacgcgtacgtaagcttggatcctctagagcggtcgcccttttttttttttttttttaagatagaaaatcttaactatgatatttaacatcatccaagaagtttactacacattcatgtaattacattctccaaagattcaacatcatcaaataagttcagtaacacatcagaccataacgataaggtcaatatcgcatggacatcgatacttccttcttcgatccctcgaaaaactacaagcttgccaccaatgccattagccggtccagctcgaacagccatcggtttacctaaaccgaaatcattatcgtacacttggaaccaaggagagttactgcccataaaaccatgatcacccattctacttctaacatcaattcttgggatcttaccatttctaacccaattctcagaaaaagttctaaagttttcattcgggggcaccctcacagttttatttatttgcaaagcagcccatcccagtccacgatcga

SEQ ID NO: 100919 - DNA, 477 bp, Arabidopsis thaliana columbia
cattatcaaagtcccagaggcagagagagagaatcagagagagagaagtcgagatgtttttccacatagtattggagcggaacatgcagttgcatcctcgtttctttggtcgtaacctaaaagaaaacctcgtatctaagctcatgaaagatgtcgaaggcacttgcagtggccgacatggatttgtagtggcgataactggaatagatacaatatgaaagggtttgatcagagatgggactggttttgtcacctttccagttaaataccaatgcgtcgttttcagacctttcaaaggcgagattttggaagctgttgtcactttggtcaataagatgggattcttcgctgaagctggccctgttcagatttttgtgtctaagcatttgattccagatgatatggagtttcaagctggagacatgcctaactataccacatcagatggatcagttaagatccagaaggagtgtgaag

SEQ ID NO: 100920 - DNA, 421 bp, Arabidopsis thaliana columbia
  unsure (1)..(421): unsure at all n locations
gaaagagaaagaagaagaaagaaacaatggagtctcccaaatctaacgtcgacgatggctaccagaacatcttcgtcatgcgtcacggtgatcgaatcgacaatttcgagccactctgggtttcaaccgccgagagaccttgggatccacctctggttcaagacggtatgattcgtgcgtttcgtaccggtcaaaggatccgatctcagatcgggttcccgattcaccgtgtcttcgtctcccctttcctccgatgtctccagacagcttccgaagtcgtcgcagctctatccgccgtcaatgtcgatcctaacgccatgtcttccaaagacgtcccttccattgataaatctaagctcaaggtttcctattgatttaggttttgtgtgagatgttgaactcagtcggctataanggcgtg

SEQ ID NO: 100921 - DNA, 510 bp, Arabidopsis thaliana columbia
  unsure (1)..(510): unsure at all n locations
taggtgcaactatagnaaaatttatgacgtcgcacgcacgcgtacgtaagcttggatcctctagagcggtcgccctttttttttttttttttttttactgcagtcaaaaaaataaattaatttacttttcaaaagcaaaattaaataaattatgaaacaaatattatatatgcagctcgctatttacaatcacctatgaccagattttatgtacttcaataactcatatgtcgtttcccgggagggtctgagctagagctctgaccagcacttatagtggcattactccgagttgaagctttaaaagatgcgggggtacctctaacaccagttcccgtgtttgtgttcaggtttgaaccgaaagaatctgtgctggaaccagtgggcgacaatgttccaagggatgctgctcctgaaggacgttgggttcgccgacggtatctaaatcccgggacaccaggatgagccggttatttagatggcctggttttctaaagagaagtagagatc

SEQ ID NO: 100922 - DNA, 611 bp, Arabidopsis thaliana columbia
taattgtttttctttttcatgtgcaaaatttgaatacaaagaccacaatacttcacacacaaatccaaccttaattgattcggattttttttttaatacaaacaaagagagacaatacaaacatctaaggattggatctgaaaggatttcgctggtttgatcttggatctacccttggcgacgatgcattgtatccatgcagcatttctctgatctttgagtacatcactgcttgtgacgcttcaccaccattcccaccactttcctgctcttttatcttttcaaacagatactctttctctgcctccgcctcgctcagcctcagtttcaaatagttacttgcgtattcctcttctgttttctcctttttcgctttcacaatcctttccaatctctctgcttccacttttgcctcgtttgcttttaactgaaacatctctgcctctgcttgcttcagcctcactatcctctccacctcttctatctgttgtttcttcttctgcctctccatctgcagttccgccacttgctttgctttctcttctacctctctctcgcattcccggacgcgtgggtcgacccgggaattccggaccggtacctgcaggcgt

SEQ ID NO: 100923 - DNA, 831 bp, Arabidopsis thaliana columbia
  unsure (1)..(831): unsure at all n locations
nnnnnnnnnnnnnnnnnnnnnnnnnnnnnnnnnnnnnnnnnnnnnnnnnnnnnnnnnnnnnnnnnnnnnnnnctttttttttttttttttttggcaacactctgtgtcaaagcttgcataacattatggcccaacatagacgatcatgtgcaaaatttgaatacaaagaccacaatacttcacacacaaatccaaccttaattgattcggatttttttttttaatacaaacaaagagagacaatacaaacatctaaggattggatctgaaaggatttcgctggtttgatcttggatctacccttggcgacgatgcattgtatccatgcagcatttctctgatctttgagtacatcactgcttgtgacgcttcaccaccattcccaccactttcctgctcttttatcttttcaaacagatactctttctctgcctccgcctcgctcagcctcagtttcaaatagttacttgcgtattcctcttctgttttctcctttttcgctttcacaatcctttccaatctctctgcttccacttttgcctcgtttgcttttaactgaaacatctctgcctctgcttgcttcagcctcactatcctctccacctctcttatctagagatggttcttttgcataatcatctgaagactcgccactggctttgctttctcttctacctatctctcgcattccttaagcccgattcgcgctttgttggacatcctggatttttccttcaccactatataaatttttgcttagtgtttttcttttacgactggagccaattggggatggattgcatcctacgaggtggcttattttaacccccc

SEQ ID NO: 100924 - DNA, 522 bp, Arabidopsis thaliana columbia
ttaggaccactatagaagattatgacgtcgcctgcacgcgtacgtaagcttggatcctctagagcggccgcccttttttttttttttttaataggggagttcttacttattattccagatacaaaatcgaacaaaactcactcctatctctgaaagcgaaagaaagtttccataaaccacacaaataatgaaaattctaagacgtgaatctatgaacaaaaaatgttcttccactctttcactgatcaagacttaggtctccccattggaccttgtgttttgcggctagataatgggcaccgactggaccacgactgccgtaaggatagaattctggggttgtcttcttttcttctatctctttgagcaatggagggaaaagcgcccaagcagcgtcaagttcatcgcttcttatgaacattctgcgttcaccttcgatcgcatctaacaaaagcctctcatatgcctctgggatctcttttaataccttggtgaatagagaaaattaaaggtactctgatc

SEQ ID NO: 100925 - DNA, 570 bp, Arabidopsis thaliana columbia
acccacgcgtccggtccattaacattgtgaccattctaaaaccctaaaatttaaagaaaaaataaataaatagcctttttgaccaaaaaacccaatctatggttttgcccactatctcttcctctctcctcctatatatatgtcttatgatgagcacacatcatcatcattcacatacataagccaaatgggtgtgtggtggatagtgctggtggtggctgtcttgactcacacggcgtctgccgccgtgagagaatatcattgggaggtggagtacaagtattggtcgccggactgcaaagagggcgccgttatgaccgtcaacggcgagtttcctggtcccaccataaaagccttcgccggagacaccatcgtcgtcaatctcaccaacaaactcaccaccgaaggccttgtcatccattggcatggaatccgtcagttcggaagtccatgggcagatggagcagcaggagttactcaatgcgcaattaaccctggagagacttttacctacaatttcactgttgaaaagccgggaaacacatttctaccatggacactatggcatgc

SEQ ID NO: 100926 - DNA, 477 bp, Arabidopsis thaliana columbia
ggtgcactatagaagatctatgacgtcgcacgcacgcgtacgtaagcttggatcctctagagcggtcgccctttttttttttttttttttttaggaagtaagatgtctttagagaggacttttggagttttggttaaggattcataaagaaaaactcaaatgagttcgtgtgtaaaatacattgcttgttctatgtaatcccaagtttccttttgatagtataccacaagagcatcacatcacattacaaagccaaatagagaagagagcttttgtatatccttcactagtctcctttcaagacaatcataattgtttcttcctcttttccaagtatgaatgatttctttggaagttcaatatagcccagagcagatgcctcaaaccaatctcaggccacagagcagccggagagcagagctgggtattacctgtttgccataagaaaaattgctcacccttgtttctccctgactc

SEQ ID NO: 100927 - DNA, 725 bp, Arabidopsis thaliana columbia
  unsure (1)..(725): unsure at all n locations
atgtnnnnnnnnnnnnnnnnnnnnnnnnnnnnnnnnnnnnnnnnnnnnnnnnnnnnnnnnnnnnnnnnnnnnnnnnnnctttttttttttttttttttgagaaacccatcatattatttgtcattctgaaacagttacacaagagttgaaattcagagaacaagcttcatgaacaatttacacgaaagaaaagagaggcaaactcaacaatttactgaaatatttgatatcaagagtgttatgtttataaacgagatatagtctttcaagtctcaaaagaaattttagagactacctgagctcctcttcctttagccatatatagacctccatggggcctcaacccctgggggtgggcctgggcgcctttgatgtctttcgcaaccttgaagaggaaggtcaaaagtagcacagccacgggggtacactaccacatcttctacaggagaaagaacaccgtggtttcgggcagaaagtgcacgtagccacaaaatcaaacacacatatgtctgtacagatacctacaacgacaataactttgatctgtttttccttaacccaatccacaaaaacattagaaccatcactctccatcgaacccacaaacccattaatacaatcctttcgtctaagngtggcacaatcctcactttcaagcnatttcagagcaggaacaagttctattcttcagttcctataatacaatgaggaggataaggtctctc

SEQ ID NO: 100928 - DNA, 511 bp, Arabidopsis thaliana columbia
  unsure (1)..(511): unsure at all n locations
nnnnnnnnnnnnnnnnnnnnnnnnnnnnnnnnnnnnnnnnnnnnnnnnnnnnnnnnnnnnnnnnnnnnnnnnnnctttttttttttttttttcactgtcgaatatctctttagtcaaaagacaagagttcatacatgtttagtctgtgggacctatagatcaaaagaaacaaacccctcttttggtttctgcaataatgggttttttagtacaataaagtttcaggaaatggatttcaaggctaataaaggaaatgactccttcaattcaatgcccataaaaagaggcacaagaagggcaaaacacctcatacaaccagaagaagagggtctatagttttgcattgctcttgagtgttttcccatcattgcgctcaaaagattcataccccttttacttgggaagatgttctttaatctttcccaacaagaaaaatcttaaaggctatatatcttacttcactgggggaactccattcttctttgcttaaaggttcgagccctttttcagg

SEQ ID NO: 100929 - DNA, 617 bp, Arabidopsis thaliana columbia
  unsure (1)..(617): unsure at all n locations
tatagaagagttatgacgtcgcctgcacgcgtacgtaagcttggatcctctagagcggtcgccctttttttttttttttttttttaaaaagaacgcatttacattcttcttataacgttgtcggcgaaacgtttttaaccttacttttataagctttattaggcttcttcaagccttataaaagaaaagaaaaaaaaggcaagttagagagagcgagagatttagcagcgggtaaaggaaagagagacagtgacaattgagaagtaaacgggcactaaggatctgtagaccttttgatggtaagctctgctctgagatggagaatgccattgatgaagtattgactatcttccgctataaaagacgtccatgggaccccaaacaggtttctgtaacctactgctttccctcctggtgaaggtgtagctccccttggattggcttatgaaaccctctgcgggctttgaccttgccgagaattcatagtccactccgaaactcancgnacccctttctcctgcatccctaggnncagcccggaaacagtggnacgagctctgttnggccaatggtgcaagtgacctgncagggaaaanccctggcctnccaagtgantc

SEQ ID NO: 100930 - DNA, 653 bp, Arabidopsis thaliana columbia
  unsure (1)..(653): unsure at all n locations
nnnnnnnnnnnnnnnnnnnnnnnnnnnnnnnnnnnnnnnnnnnnnnnnnnnnnnnnnnnnnnnnnnnnnnnnnnnnnnctttttttttttttttttttgatcaaacatttccaatgtaattatctgaaccgaccagtttataggggtctcaagtctcaacaacaatcaactgaatataataactgagaccgtaaaacaaaaatgcaaaggtcaaaaaaagacaagtcacagaagaatacaaaaaaggacatggactcatgcccacaaagaagagtggtgagaataatgtcataagaaaaagcttcaacgaagagcaaaactatttttgagttctgagaatccttttctcctcctccttcaagcttacaacacaacattcatcgcacaagcataagacccagagagagcaaaatcgtcaagtaatgattccttttacagattccgacaagcctctatgtctgcagcctgtgaggccaacaaggacttcccctgctcgcttgactccacaatgcgtacagctgcatcgaccaccatcttttggacctatcgncttccatttncccttnatttttttanccattttgganncncaccaccagccnggttaggttttcctnaatttanccaactgtttgggnctngggagcaatttc

SEQ ID NO: 100931 - DNA, 505 bp, Arabidopsis thaliana columbia
  unsure (1)..(505): unsure at all n locations
nnnnnnnnnnnnnnnnnnnnnnnnnnnnnnnnnnnnnnnnnnnnnnnnnnnnnnnnnnnnnnnnnnnnnnnncttttttttttttttttttaggaaaagtgcttactataaagatttttgggtagtatattacaatggatactacttgtaaagatagaccgatgtcgccatgaacatatctgcatagacgctaacaacacaaaagccattatacatggatacatacatactttttacatacatcaaatattgcagcccgaaatgaatataacgtatttataactcagcaaacatatataggtgacacgaactcaccctctcttggtgaaatccatgtagcttgggagcgatggctgcccgtttgtactcatctggtggttcgttttgttcccaaactgattcattgccgattgctgagatgagaattgagcccggttgtaagaatttccattcccctgaggaatttctccagctaccaccttaaggccggtcagttaatccccga

SEQ ID NO: 100932 - DNA, 548 bp, Arabidopsis thaliana columbia
aggtgacactactagaaaatttatgacgtcgcacgcacgcgtacgtaagcttggatcctctagagcggtcgccctttttttttttttttctgctattctgatattattattatggcgaaaacaaaattacagacacaaaagaactgcttaaaaggctaaaaactagaacatcttacataacttatcatatatatggcaatgccttagagactagtatctgaaacagactcaccaacattcctgggcgagaaaccacaggcattcgcaataagcatttgaaaagaactctctgaatcatcaaacatcagtcgcggaaactcgtggaaccctccaaaattacatgtatcaaagttcattggtgagaacgactcctcaaaacatatcctcccatcagtcattccaggctgtgtggtttcttggttagcatttgatgcacaaccaagattgaagccaaccattccttggttgttgttcccgccttcagagctccctctctgagtagatgtactggctgatggttttgtctcttcaagagggattgcaggcgt

SEQ ID NO: 100933 - DNA, 455 bp, Arabidopsis thaliana columbia
  unsure (1)..(455): unsure at all n locations
atcgatttaaagtcaatggcgtcacgtttatgtnttntccttctcgttgcgtgtatcgccggagcatttgccggagacgtcatcgaactcaatcgatctcagagggagttcgattatttcgctctatctcttcaatggcctggaacctattgccgtggaactcgccattgttgctccaaaaacgcttgttgcagaggctccgatgctccaactcaattcacaattcatgggttatggcctgactataacgatggttcgtggccttcatgttgttatcgatctgactttaaaagagcaaggagatttcaaccgtgttggggggtcgtccgtagtacttggctaggctcaattgtgggtntncatcatcangnaattggtggggaaaggggcaattttngggncncggttnggggnaannaaggggcttttccggtccccttttttaaaaanggggg

SEQ ID NO: 100934 - DNA, 1128 bp, Arabidopsis thaliana columbia
  unsure (1)..(1128): unsure at all n locations
ccacgcgtccgcccaagcgtccacggacgcgtgggcggacgcgtgggatcgaattaaagtcaatggcgtcacgtttatgtcttctccttctcgttgcgtgtatcgccggagcatttgccggagacgtcatcgaactcaatcgatctcagagggagttcgattatttcgctctatctcttcaatggcctggaacctattgccgtggaactcgccattgttgctccaaaaacgcttgctgcagaggctccgatgctccaactcaattcacaattcatgggttatggcctgactataacgatggttcgtggccttcatgttgttatcgatctgactttaaagagaaggagatttcaacgttgatggatggtcttgagaagtactggcctagtctcagttgtggttctccatcatcatgcaatggtgggaaagggtcattttggggccacgagtgggagaaacatgggacttgttcttctcctgtttttcatgatgagtataattacttccttaccacacttaatctctacttgaagcataatgtcacggatgtcctttatcaagctggctatgttgcttccaacagtgaaaagtatcctctaggaggtatcgtaacagccattcagaatgcatttcatatcacccctgaagtggtttgcaaaagagatgcaatcgatgaaatacgtatatgcttctataaagattttaagcccagggactgtgttggttcacaagatttgacatctagaaagtcatgccccaagtacgtaagtttgccggaatacacgccattagatggtgaagctatggttctgaagatgccaacagaaagagaagctctttgaatcggaaaagatgggagctttgttatcttctgagagacaatacatacatgtctctgatgttgtaactttactaccaaaacctataaagattggcttatttcgttctattggatatgtatcatcattactggtaaatcaagtttctttctaataatgtagaagatcagaaaatccataagaagatatcaacatttgagttctatggtaaaaaaaaaaannnnnnnnnnnnnnnnnnnnnnnnnnnnnnnnnnnnnnnnnnnnnnnnnnnnnnnnnnnnnnnnnnnnn

SEQ ID NO: 100935 - DNA, 500 bp, Arabidopsis thaliana columbia
aatgtattaggtgcactatagaagatctatgacgtcgcctgcacgcgtacgtaagcttggatcctctagagggccgccctttttttttttttttacgtaaatttgatctgacggatggatctataaaaaaaacagtagtacaacaaaatgtttctcgccactttccctggaaagaaactagtcaggagaccaactaaactcaacccccaaaccgaagtataacctaaccaacagttagacaagcggcgactacaagatatacagggtagatcaatggaagaagtagctgaatttctacagaatcccacgtctccgagtttaggagaagcctcaaaagcctttcttagcagtattcaaacttcctctaagctgaacttccaactggtctattcggatagccaaattatgcttcccgccattcttcaacccatcagcacccatatcaaagccccgtgatatgggaacccaacccatgtttgtaatctcaaccaagtaattag

SEQ ID NO: 100936 - DNA, 512 bp, Arabidopsis thaliana columbia
ttaggtgcaactatcagaagatttatgacgtcgcactgccgcgtacgtaagcttggatcctctagagcggtcgcccttttttttttttttttacacaaacagttgagatattctaatcaagagatcatctcagaagaaatggtaaatcacaaaatacaacagagaatttcagaaattccaaaagaattatgaggatttttacattttgattcagaacatcatttaccacagaggggaaagccggggcgcggggcgtgtagttggaaatttagcgaacaccatactgcagaacactcctacagctacacgcaaagttgtgagaacctccactaattcagctggagggttcgggatagaaacagttaaccacattcgtgaccaaacaaaaccacggctccaaaacccagaaccgacatattggcttgtacgaagtcgattaacccgttttttctcccttttgaagaagttctggaagaaaagtctctcgcccatcaatggtccaaaaaccctgg

SEQ ID NO: 100937 - DNA, 610 bp, Arabidopsis thaliana columbia
ttcattcctccatcctatttttcttcttcgccaaagtgttattcctcaactttatatattacacaaatgtctttagccgcggataatgtgttgttggtggaagaaggaaggccagccacagcggaacatccatcggccggaccggtttatcgatgtaaatacgctaaagatggcctcctcgatctccctaccgatattgattctccttggcagttctttagtgaggctgtgaagaaatatccgaatgagcaaatgttgggccaacgcgtaacgactgattctaaggtcggtccatacacgtggatcacatataaggaagcccacgacgctgcaattcggattggatcagcaatcagaagccgaggcgttgatccgggacactgttgtggtatttacggagctaattgtccagaatggattattgcaatggaggcctgcatgagccaagggatcacctacgtgcctctatacgattctttaggcgtaaacgcagttgaattcatcatcaaccatgccgaggtttcgctagtatttgtgcaagagaagacagtttcatccatcttatcgtgccaaaagggatgttcttcgaatttgaagactattgtgagct

SEQ ID NO: 100938 - DNA, 538 bp, Arabidopsis thaliana columbia
  unsure (1)..(538): unsure at all n locations
annnnnnnnnnnnnnnnnnacgtctcatgcacgcgtacgtaagcttggatcctctagagcggccgccctttgngtnnngactcctttttttgtttttttttggatgcaagactaactcaccttttattaagttaattggcggctggaacgaaaacataagagactctatccattaaacatacttctaccttatttaggcatcaaatctgtttatgcgagaatgagatgatggaagctctaagtggatcaacacggtcctaatctccatcgggtaaagctccatctccagctttcttggatcaatttctctccctctctttgccttcttctcctctccataagatccttcaccttctactttccacaccaacctcttcttctccatcgtgcttctttcttgatttgctgataggctcatctccgacaatttcccgatcttctttccaggaaaaagctttttgagttccacgcttgctactcctgatagttccttgccctcttccacctcataaagatgagctagacgcaggagcacgtt

SEQ ID NO: 100939 - DNA, 577 bp, Arabidopsis thaliana columbia
  unsure (1)..(577): unsure at all n locations
anttagnnnnnnnnnnnnnnnnnnnnnnnnnnnnnnnnnnnnnnnnnnnnnnnnnnnnnnnnnnnnnnnnnnnnnnnctctttttttttttttatttttaacaaaattttatttaattcaaaaagttgttgtttacagttcacctaataaatttacagccttgggcatttcacctaaaccagaagttacgatgcagccaaaaaaagaggaacaaaaagaccaaaagggacttagaaaaaaaaacatgaattaaagaacaaaggatgatgagaagagattgatgaagccttttctcatacctcactagcttaaagggtcataacattcacttcttggtgagttaagttgacaaggcctaacagtttacttgaactctagggcttgggattcccatgtatgctaagcgtggagagactcttactctaggactaggccttggagaaggaattgggccgtatggtgacggaaaacgtgtagaaccaggcgaaatccgaggagacaaactgacttgttcgaacgcttgtgactgaagttccattggataatccctaaaaccccattnttgggcncccccngg

SEQ ID NO: 100940 - DNA, 607 bp, Arabidopsis thaliana columbia
  unsure (1)..(607): unsure at all n locations
tnantttacctggattccnaccagagtcatcaccaaaaaggggncaaaagccaaaggggctnggaaaaaaaccatgattaaggccaaggttnttagnanngattgatnacccttttcncaaacctaacaacnttaaggggcatnacatcacctncttggtgagttaagttgacaaggccctaacaagtttacttgaactctagggccttgggatccccatgtatgctaagccgtggagagactcttactcctaggactaggccttggagaaggaattgggccgtatggtgacggaaaacgtgtagaaccaggcgaaatccgaggagacaaactgacttgttcgaacgcttgtgactgaagttccattggataatctctaacacacccaattcttggaccaactccactgttccatttgcaagacagcctctttgcaagctggaacaccggtctttctctctctttctcttcttcttgttcctctgtaacgatggtttctgctggtttcttctctgcttcttcttcttttgttgcttcttcttcgtagccactggaattgaatgacgaatattcctcattcacagagcatctcttaacattggtcata

SEQ ID NO: 100941 - DNA, 439 bp, Arabidopsis thaliana columbia
  unsure (1)..(439): unsure at all n locations
atgaannnnnnnnnnnnnnnnnnnnnnnnnnnnnnnnnnnnnnnnnnnnnnnnnnnnnnnnnnnnnnnnnnnnnnnnncttttttttttttttttttttaggatgagaacaaatcgtagatcacgggatgaatctcagaaggtcgtaagacaagcctacttccaatcttacaatacccggatctaagttaagccgtctacagaagatgtgcgtcaataataatttgaaattgcgatgcaggctcacctaactcacctattccggcaagcagagagaagcccattgtttgaactatggcagaagcctattcgcttgcatttattattgattagacattgctttccagcatggattctgacttaggngcggtcagtcataatcctacagatgggaggcttcacgggactagctggtcagctaaccctatttacccattatc

SEQ ID NO: 100942 - DNA, 587 bp, Arabidopsis thaliana columbia
  unsure (1)..(587): unsure at all n locations
gcaatgcaactgtagattattatagataatgtttcttacaaaatcataatagcctcaatgaaagctagtatcttatatagtttttgaagggggaaaagatgggatcacaagaagtcaacaactaacgaatacatttagatcaaacaagtatgttgcatatgttaaaaagatatacaaaccaagccaaaataaatagatgtggtgacgatggtggaattagccaaaaggttttaggatatagttaagaaccaaaggaaggacgagaaagagggatggtgaaccaatattctgatagtttcctttaagagagggaggactttgtaggacttgtaatgcactcctccaagatcagcatcgcacgtcaagagaacccattcttgatcatcgcctagataccttgggactgaagttacttcccaaaccatcatccatcccaaaccgctttnggntctcncttctgggggccgtgagncganattgtggaacaggnncatctcnggnncgatccccaacanagcctcccttcanccggcctngnttcctggggaatncgntgatnggggagggtaggcccgaagccttgccng

SEQ ID NO: 100943 - DNA, 558 bp, Arabidopsis thaliana columbia
  unsure (1)..(558): unsure at all n locations
nnnnnnnnnnnnnnnnnnnnnnnnnnnnnnnnnnnnnnnnnnnnnnnnnnnnnnnnnnnnnnnnnnnnnnnnnnnnnnnnnnnnnnnnnnnnnnnnnnnnnnnnnnnnnnaaaagcattactttttattgaaggtattgatatacaacaggtgatttgttttaaggctcaaaggcatccaattgcaaaattaatactggaaataattaaataggcatgtaatgccagtcactggtaggctgtttcaagttcttaactctatacatattatttctactaactgcacttaaatcattaccagatgctacttcttttgcagtgaacactggatatgtgctgttaacatttcaaatggggtcaaaaatgagctccttcaaaagttaagggaaataaacttgcaagaaattattctgcttaagggttaaatggcattctcttttcagtaaaatgcacaaatgagctaagaataattggcaaatttctcactaaaacttaagtacattatattttcatttgaaattgggtgctcatcaatttttaataagtagttggcaatatt

SEQ ID NO: 100944 - DNA, 724 bp, Arabidopsis thaliana columbia
  unsure (1)..(724): unsure at all n locations
nnnnnnatttcnnnnnnnnnnnnnnnnnnnnnnnnnnnnnnnnnnnnnnnnnnnnnnnnnnnnnnnnnnnnnnnnnnnnnncttcttttttttttttttttttgcaaaaatacacacttcattttataaacagtttaacgtatctttgaccgtagcatcaattgaaagacctggaaacaagattaaactgttacaaacacttttctctaaccagccactctattcacttttgctccccagaaactgctgtaaactgattgaacttgaccacagtagagaaaagaggcatgcattcttagaaatccactcatcttcctcctatattttctttgtcatacattttatgaagagaatccatattgttaactcttgtgcaaagatctggtagcctttgatgcaaaaaccattgctttggcttcgtcgcttgacatcatccaatccctctcagcacgacgttgacgttgccttgcattctttgcacgtttagggggccattcttgcatctctctctgcaaatgctagtctgaacttctttgctattgacagttcattgcttaacgggaaagatgtgggcttctgcacaactccagtaacaacccaagtcttaggatcaatatctttgacaaatggttcgtccagtgcaacatttggtagtgcttctcgagggaacctcgttttggtttgtaccgccgaccaagtggaaggggctttggggaattttacc

SEQ ID NO: 100945 - DNA, 860 bp, Arabidopsis thaliana columbia
ggaaagctggcacgcctgcaggtaccggtccggaattcccgggtcgacccacgcgtccgcttacctatctcaaccctcttgggaagaaggcaggtttacttccagaagaagaaaatgaagacgctgatcaggggaaagatccaatgcgtagatctttgtctactgcagatgggaacagaagaggagaggtcgcaatggggagaatgagtagggactctgcggctgaagcatcaggtggtgcaggcaataagaaaggaatggttcttcctttcactcctttagctatgtcctttgacgacgtcaaatactttgttgacatgcctggggaaatgagagaccaaggagttacagaaacaagactccaactgcttaaaggtgtgactggtgcatttaggccaggagttttgactgcgcttatgggagtgagtggtgccggtaagactacgcttatggacgttttggccggaaggaaaacaggtggatacattgaaggagatgtgagaatatcaggattcccaaaggttcaagaaacatttgctagaatctcaggatattgtgagcagaccgatattcactccccgcaagtaacagtcagagaatctctgattttctctgctttccttcgtcttcctaaagaagtcggcaaagatgaaaaaatgatgtttgtggatcaagtgatggaattggtagagctggacagtcttagggactccattgttggtttaccgggtgtcacggggctttccacggagcagagaaagagactgacaatcgcggtggagcttgtagccaacccttccatcatctttatggatgagccaacttcagggctagacgctagagcagcggctattgtgatg

SEQ ID NO: 100946 - DNA, 940 bp, Arabidopsis thaliana columbia
  unsure (1)..(940): unsure at all n locations
gatctccagctctatacgactactatagggaagctggtaccctcaggtaccggtccgaattcccggtcaccacaaacctcttcttcagtctgatagagatctcacgtttcaaacaacaagaatggcgttccctaaggtatacttcgacatgaccatcgacggccagcccgcgggaaggatcgtgatggagctgtacaccgataagactcccaggactgccgagaatttcagagctctctgcaccggagagaaaggtgttggcggtaccggaaaaccccttcacttcaagggatctaagtttcaccgtgtgatccctaacttcatgtgccagggaggagatttcaccgccgggaacggaacaggcggtgagtcgatctacgggagcaagttcgaggacgagaatttcgagaggaagcacaccggaccggggatcctgtcgatggcgaacgccggtgcaaacacgaacggatctcagttcttcatctgcaccgtgaagaccgattggcttgatgggaagcacgtggtgtttgggcaggtcgtggaaggcttagacgtggtaaaggccatcgagaaggttggatcatcatctggaaagccgacgaagcctgtggttgttgccgattgtggtcagctctcttaggatcttcctatcatcatccttaatttagcatcatcgtcgtcattgtggtgtctctttatgcttttgcttttgttatggagtctttttaaaatttgtagtcataagtttggtgtgtgttctcatgggaacatatataaacttgcccctttaatattaactaccagaaataaggaatgagcactcttttatcatatctaatttacgttaccaaatttcatcaaaaaaaaaaaaaaagnnnnnnnnnnnnnnnnnnnnnnnnnnnnnnnnnnnnnnnnnnnnnnnnnnnnnnnnnnnnnnnnn

SEQ ID NO: 100947 - DNA, 517 bp, Arabidopsis thaliana columbia
attcaatccaaaatcccatactaaattaaaaccaacacacaggaagaaagaagaaacctctcatcttcccctctcttctgttgaagaaagcttaaacctttctgggtttcttttaactatggcgacaagggttagtttcttcttagctctggtaatgacggtggtgattcttgctccttctgtcgtctctggagaaaatgggttttccgatcttaaaatccgtactcacttgaaacgactcaacaagccagctctcaaatcgattaagagcccagatggagatatgattgactgtgttccaatcactgaccaaccagcttttgctcatcctctgctcattaatcacactgtccagatgtggccaagtttgaacccagaaagtgtatttagtgagagtaaagtttcatcaaaaaccaagaatcagcagtctaatgctatacatcagctttggcatgtgaatgggaaatgtccaaagaacacaattcccatcagaagaacgagaagacaagatctttac

SEQ ID NO: 100948 - DNA, 520 bp, Arabidopsis thaliana columbia
  unsure (1)..(520): unsure at all n locations
aatgnnnnnnnnnnnnnnnnnnnnnnnnnnnnnnnnnnnnnnnnnnnnnnnnnnnnnnnnnnnnnnnnnnnnnnnnnnncttttttttttttttttttcgacataatcccatcaaatttataccataatgcattgatactcttcacttaattttaaagcttttgttgtctctctctctctatgtgtgtattagcatataattcttacaacaaaagacaaatttatgaaaaatttctcaagactcgggtgttatctcaggagtctgcaaaggaatgggactgttatcttcttctttcgcgtttggattctcggcttgtttttcttcaggttgggaggctacaccattctctgatgcatcctttgtgtccgtgctgatgacctttggagatttgttggatggttcttgagaggacgatgcagctaagatgcgacccagaccttcgtatgcactcttggcatccataacgattgtggcaccacctggataacatcggccaaagcatgtggcgcaatgtggaaa

SEQ ID NO: 100949 - DNA, 367 bp, Arabidopsis thaliana columbia
gggattttgattgtagtttatgcttactacaatgaagagatgatccccttttggattttctattgcttgttttgttgttgtggtgtccttttgatttctaaattctttctccttcttattcaggaactggatttccgtctctaagaggacttcgaggacagaacacccgctatctacgagatgtctcccggtgggcaaatgacaaagatgcagaattgttacggattggcaatgtcaagcctgaagtagtcagttggtcccctcgaattattgtgcttcatgactttctcagtccggaggaatgtgaatacctaaaagcaatcgcccggcctcgccttcaagtttccactgttgttgatgtaaaaac

SEQ ID NO: 100950 - DNA, 595 bp, Arabidopsis thaliana columbia
  unsure (1)..(595): unsure at all n locations
nnnnnnnnnnnnnnnnnnnnnnnnnnnnnttttaaagagaagagaagatctctgagaagaaactcctctgacgcctcgcctccgcccaaatctctctcaactctcaagctcctctctttttcttccttctgcaacaacaacaactgttactgatctctctctctctctcccaagtttttattttattttgatcggagatcgagatcagctagacatggctcctgccatgaagatcgtcttcggtctcttgacatttgtcactgtcggaatggtcatcggttccttgttacaattggcctttattaatagattggaagattcgtacggaactggatttccgtctctaagaggacttcgaggacagaacacccgctatctacgagatgtctcccggtgggcaaatgacaaagatgcagaattgttacggattggcaatgtcaagcctgaagtagtcagttggtcccctcgaattattgtgcttcatgactttctcagtccggaggaatgtgaatacctaaaagcaatcgcccggcctcgcctttaagtttccactgttgttgatgtaaaaaccggaaagggagttaaagtgacgtga

SEQ ID NO: 100951 - DNA, 521 bp, Arabidopsis thaliana columbia
  unsure (1)..(521): unsure at all n locations
atgnnnnnnnnnnnnnnnnnnnnnnnnnnnnnnnnnnnnnnnnnnnnnnnnnnnnnnnnnnnnnnnnnnnnnnnnnncttttttttttttttttaaaaaaaaaacatgatatcacaaatttgggtatgttcattgttttccttggccaacacatcaaagcctttaagctttccaaggtagtcccaataaaagaccattgacagaaacgtactaacatgagctcttccttggtttcttctttgcatgcaacttcacaaaatctaaactactcagttattcactcttgaaacttcacaaaatctacagacactattaaacctctaaattcacagagatgttcttgcctgtctttcccctctcaaggcagtgaaaaccaaagggtcatattccatatcagctatggcgaacaccccatcatcgccctctccaactaatgtttctggttttccaagctcaccctttggctgacaaaatcttttgaccccttcgggggattggttggccaccctctggagaaaaaa

SEQ ID NO: 100952 - DNA, 806 bp, Arabidopsis thaliana columbia
  unsure (1)..(806): unsure at all n locations
cgtaagacacaagttttctatatcaggtttgtttagaagctcattcgtcctgccgaggtgggtaagccatagttgcatgacactatcgttctgggtgtcttgatgcaatttcagttccagctcacatagcaatttgggtatcgccacaagataaaaccgcttgtaatcatgctctgagagagagtattgacctcagttaagtgccacaaggttccttatgtggaattgagtcaagtcttgcaaattgtaaggtctctttgagagtgggcctaaaccgttaaacttcgtccttggtactgtagaaaaacacgggcaagggtcctcttccatcgaatattaggattcatgatcaagaggtgtttcccgaggaaatgtactgagtattagtattccgtgcaagtcgaaataaacttcccctgagcatctgacctgatctagcatgcaacgtggtctatattatgaagcagttttattggccgcaagactcatggtagatacaagcatgtcggtttggcaagtaatgaaggtataagcttgtaggactcngagtctaagagacttgnctttcgatgtcccaagaaaggtgtagaatctatgcctgcggagagctcccgttagatgcttgataatcactattgaccgatgcattgtctttgccatctttgttctgttttgtgctactatgactaatgaggaatcctaaccatcaaaaagccaaagatttcaaaaaaaaaaaaaaagatttattatatatttcggatacatgagttataagttcttttaatcgatgtgggattcttattnnn

SEQ ID NO: 100953 - DNA, 1156 bp, Arabidopsis thaliana columbia
  unsure (1)..(1156): unsure at all n locations
tgatctccnnnnnnnnnnnnnnnnnnnnnnnnnnnnnnnnnnnnnnnnnnnnnnnnnnnnnnnnnnnnnnnnnnnnnnccacgcggtccgcgtatctgcaaaactaaagactgttgtctaaagcgaaccaacaaaaagtcttcatctttaatcattcaatggcttcttcgtcttctatgcagatggttcacacttcccgctccattgcccagattgggttcggtgttaagtcgcaattagtttctgcaaatcgaacaactcaatcagtttgctttggagctcgttcctctggaattgcattatcttcgagattgcactatgcatcacccattaagcaattttctggggtttatgcgaccaccaagcatcagagaaccgcttgtgttaaatccatggctgctgaggaagaagaagtaatcgaacctcaagctaaagtgacaaacaaggtttactttgatgtggaaattggaggtgaagttgctggcagaattgtgatgggtctctttggagaagttgtgcctaaaaccgttgaaaacttccgtgccttgtgtactggtgagaagaaatacgggtacaagggttcctctttccatcgtattattaaggatttcatgatccaaggaggtgatttcaccgagggaaatggtactggaggtattagtatttacggtgccaagttcgaagatgaaaacttcaccctgaagcatactggacctggaatcttgagcatggcaaacgctggtcctaatactaatggaagccagtttttcatttgtaccgtcaagacttcatggttagataacaagcatgtcgtgtttggacaagtaattgaaggtatgaagcttgttaggactcttgagtctcaagagactcgcgctttcgatgttcccaagaaaggttgtagaatctatgcctgcggagagctcccgttagatgcttgataatcactattgaccgatgcattgtctttgccatctttgttctgttttttgctattatgactattgaggaatccaaaccatcaaaaagccaaagattttcaaattctggtcttttanntattatatattttcaaactcagcttcattctctattcttgtccatttgtttgtttgtttgtagcctcttcaaactcggataaaaacaannagttttt

SEQ ID NO: 100954 - DNA, 525 bp, Arabidopsis thaliana columbia
  unsure (1)..(525): unsure at all n locations
atgaannnnnnnnnnnnnnnnnnnnnnnnnnnnnnnnnnagaagaaaacggatataattttcacaagaacttttttccgtttggctctcttttttatcatatacatgtttggaaatttactaaacttgaagagaacttcaattttgctttaccaatattacgagagataaataaaacagacacttacaaaactcacatcttcaaaatatatacagttttattagtgaaggggtctctcttacgccgtggacaaaacctccaactctgcccaccaaagaggtgacaatttcggtgtagcatcgttcggtgacaatcccgtgatctcccgtaaccatcctgtgacttcttgcattggaggtctctctttcgggtcagtcctaaggatggattgatcacttcacctatattctcaatcttggcatcataaaattcccggggtggatctaccattttggctagaaggctctccttttaaaaaacaacccgcgagcctatttactgggtcaaggtttgtaaacggtttta

SEQ ID NO: 100955 - DNA, 1045 bp, Arabidopsis thaliana columbia
  unsure (1)..(1045): unsure at all n locations
nnnnnnnnnnnnnnnnnnnnnnnnnnnnnnnnnnnnnnnnnnnnnnnnnnnnnnnnnnnnnnnnnnnnnnnccacgccgtgcgcaaacaaagacttatccttctaatttcctttttgaaaaagaacctaaataaaaagattatggtatttttctcgacttgcaagtcggtacaattccatacggaaatcatgaaaataagcgacgtggatgtctctgatattcatggaggcatggatcagaacagaagaactaaaacctttttcgacttcatgaaagcaaagaaaggtatcttgttatgtactgatgttgctgctcgtggtctcgatattccttccgtggactggattatacagtatgatccaccagacaagccaacggaatatatccatagggttggtcgaacagcccgtggagaaggagcaaagggaaaggcattacttgtcttgattcctgaagaacttcagtttattcgctacctgaaggctgcgaaagtacctgttaaagagcttgagttcaatgagaagaggcttagtaatgttcaatctgcgctggagaaatgtgttgccaaggactacaatctgaacaagttagccaaagatgcgtacagggcttatctctcagcatacaattcacactctttgaaagacatctttaatgttcaccgacttgacctcctggctgttgctgaatcgttctgcttctcttcgccgcctaaagtgaatctgaacatagaaagtggagctgggaaggtgaggaaggcgagaaagcagcaaggtcgcaatggcttcagtccttacagtccctatggcaagtccacacctacaaaggaggcataaagtgtcatttgtttacaaaattactattttgctccgtagttttgactaattaccaccaccaagttttgtttaaagagtaaacagtgcatttgatttaaatgaaatgttccttggctactattaaaaaaaaaaaaaaagnnnnnnnnnnnnnnnnnnnnnnnnnnnnnnnnnnnnnnnnnnnnnnnnnnnnnnnnnnnnnnnnnnnnnn

SEQ ID NO: 100956 - DNA, 655 bp, Arabidopsis thaliana columbia
  unsure (1)..(655): unsure at all n locations
atgnnnnnnnnnnnnnnnnnnnnnnnnnnnnnnnnnnnnnnnnnnnnnnnnnnnnnnnnnnnnnnnnnnnnnnnnnnnctttttttttttttttttttaaccaaaatcttgagcaataataacgttgcgatcaaattgggttcagaaacatgatacataccagaatttagcagagcaccgacttcggccaaaaacaaaaaaagtagagcaccgacaaaagctcagttctcagatcaaactgaaccaggaatcaaaaacgggttactctgaccgagtactcaaaagtggtttggtaaaaattacaggtctcactggtgtaaataaatactagcagagccagaggggagcttaggacaaattacctcaaaaactgggatcaaaaacaggggtctgaaccaagctttttgttacccggagaattcaaccatttgggaccccgcgggcccgcaacagctatttggggatcgggtttcatcaaatggctttagcatctaggggcctctggctcgggcacgctgatgactatatgagcgtgctcgatcagtttaccatctttttcgagaaaccaacatcgaacacgttgatcaagacctgtcgagaacacccagttcgtgtccatccacacgcctttgatggcagagctatgagctgatgc

SEQ ID NO: 100957 - DNA, 363 bp, Arabidopsis thaliana columbia
gtaattatgttgtattgaaatatgaaatgatacatttatcaccagcattagatacaattaccaaaaaaattacaactattctttatttttatttatttttctcccaataagcaaagagagaccccattaacatcatgaacaagcagaagcatcaaaattaggtaacacaatgaacgacatcgacaatggcaagacattaagcggtgagttcacactacgggggaccggttcaaggctcgggatatctcctgttgccgtcggttttaacgatttaccattcaagaccattgttttgctgcgcaacacaccgttttctggtgtcagatgatactcttctttattcaaatatccatcagaagcttt

SEQ ID NO: 100958 - DNA, 737 bp, Arabidopsis thaliana columbia
tacactataaacgagtttgacgtcgcatgcacgcgtgcgtgagcttggatcctatagagcggccgacctattctttcttttttttttacaactatactatctttttttttttttttttcccaataagcaaagagagaccccattaacatcatgaacaagcagaagcatcaaaattaggtaacacaatgaacgacatcgacaatggcaagacattaagcggagagttcacactacggaggaccggttcaaggctcgggatatctcctgttgccgtcggttttaacgatttaccattcaagaccattgttttgctgcgcaacacaccgttttctggtgtcagatgatactcttctctattcaaatatccatcagaagctttgcttccaatccaagaaaatggtctttttaaagtatccaacaatgacttcttcttccttgattccgcattcaaaaccacgtttatgccattgctgacactaaccgtaaaatccgattgattgcttagatttatcagtagcaatgtcacaccggctcttccttttgaacaatgtgcgtaaacccgtagctgaggcggtccatctgtctgcaccgcaagaaccctttttcccattacacgatgcccaagcggagcgctatagtaattaggatttggaacaagcgttcccctttttgagcaaggcgcgtataaaccctccaaaccaaaggtcttgtactgcaagtaaaaactttttaaaagg

SEQ ID NO: 100959 - DNA, 559 bp, Arabidopsis thaliana columbia
  unsure (1)..(559): unsure at all n locations
gaatgatttattgtgannnnnnnnnnnnnnnnnnnnnnnnnnnnnnnnnnnnnnnnnnnnnnnnnnnnnnnnnnnnnnnnncttttttttttttttttacgtaattgtttatgtggctccaatatatcactgagattacgacaatatgcttaaggggtagcatgcataattacatataacctaaagaaatgtagaggatcaatgtttggagtacaataagacgatttagtcttctttttcactcgtgtggcacttcatacatgtactggtttacttttctcattgtttattttttattgaatttgatccctaacttataaggtttatcatccatcttagttttggcaacgttgattcattatatttaggcattctcctttgttccataagacgagtgatggctttatcgaccacttggcttcttcaggagaccaaagttacacggaatttcatctcagacctattagaacagcgtgtctgtagctcttttaactgaaggcaaatgctcctttgctatcaggtcatatgattgagatttccaaccagataatattagaca

SEQ ID NO: 100960 - DNA, 469 bp, Arabidopsis thaliana columbia
  unsure (1)..(469): unsure at all n locations
nnnnnnnnnnnnnnnnnnnnnnnnnnnnnnnnnnnnnnnnnnnnnnnnnnnnnnnnnnnnnnnnnnnnnnctttttttttttttttacaaatgatatacattacaatttgacaaagggggggctattcatgtaattattaggactttccgcatacaattatacaaaccaataaccactccttggtatctatctaaagactcttcacgctctcatttttgcagctgcttctttgatctggtcaatagtgaaaatgcccaagaagtcgtcatctttaacagcgctgatcacagcaagtgctaaatcatcgacgttaaccggtggcgccaagatgagatcagatgcagggagagacctcaatggtctaatgaacctctctgctgaatcatagatcttggctaggggctccccgactagatcaagcgggacctcgattccgttcacttttcgtttcccgaatatgaaaccggg

SEQ ID NO: 100961 - DNA, 578 bp, Arabidopsis thaliana columbia
  unsure (1)..(578): unsure at all n locations
atgnnnnnnnnnnnnnnnnnnnnnnnnnnnnnnnnnnnnnnnnnnnnnnnnnnnnnnnnnnnnnnnnnnnnnnnnnnctttttttttttttttgttcttaaaaaaaatatcacaaatggtaattttgattacttgcacatcacaaagcaactcactgttaggtagacacacctcttagggtgttaaaaaggattgtggccagagcaaagttacctgtagccaaacccaaggtcgagttcatgacccacagagccttgacgattaggaccaccggcttgacccactgccggtatctgtttggctgggtccatcctctgctgaatccccaagagtgtctgcagtgaagctggatgctctcctctgttgacttgagaacctggtgggtgggcataccgtagttgggctggcgatggggcaaagggaaagccttgtgacgggtttaactcaggaatgagacccggcatctggttgtttacatgaggagagtgtggggttgtgtggaccactaccgggggaaacccttgcattagatgatgatgttgcaggttgtcttgcatatgcatcttctgcatcatatg

SEQ ID NO: 100962 - DNA, 561 bp, Arabidopsis thaliana columbia
  unsure (1)..(561): unsure at all n locations
nnnnnnnnnnnnnagcgctacacgactcactatttggaaagctggaccgcctgcaggtaccggtccggaattcccgggtcgacccacgcgtccgctctcttcgtctctctcttgtagcaatgccgcttcttcatccacagtcgttgcggcatccttctttcgagattcagacccaaagaagaagcaattccacaacaagattgcttctttctcacaagtttctccattctcaagcttccattatctcaatctccaggacaagaatcctcaaacgggtctctcagaatctctctgtagctaaagctgcttcagctcaagctagtagtagtgttggtgagagtgttgctcaaacatcagaaaaagatgtgttgaaggctctgtctcagattattgatcctgattttgggacagatattgtttcttgtggttttgtgaaagatttggggattaatgaagctttgggtgaggtttcgttccgtttggagctgacaacacccgcatgtccagtcaaagacatgtttgagaacaaggcaaatgaggtagttgcagcccttccatggg

SEQ ID NO: 100963 - DNA, 584 bp, Arabidopsis thaliana columbia
  unsure (1)..(584): unsure at all n locations
atgnnnnnnnnnnnnnnnnnnnnnnnnnnnnnnnnnnnnnnnnnnnnnnnnnnnnnnnnnnnnnnnnnnnnnnnnnnnctttttttttttttttgcctaaataaataaattaatgaaatttctacagacattcaaacaacatatatttttgcataaatgcaaaatcaaatagcttaatgactcttttgcagaaatcaatgaattgagacaatctacaatcaaaagggttaaaacaagagagaccacacattgtctttcttcacgacccaaagaacataacaaaaaaaacataactttatatgtatgtctccttcaatcgcccactctacgttccctgtgaccctgtacaatgtttcttcacatggggaacaatgaagtctctacctcatgaacaaaacgagtatacaatagagagaattcttccttttctccattacttgcgtagatttccggcatctcaatcgggtaatgtgtatcttcttccatgaagataatactatcagtgccttaccggcctgtgtatttgcaggaggaatcaactttactgctgaggaatttggtaaacgataccttcgagatgatta

SEQ ID NO: 100964 - DNA, 511 bp, Arabidopsis thaliana columbia
  unsure (1)..(511): unsure at all n locations
aatgnnnnnnnnnnnnnnnnnnnnnnnnnnnnnnnnnnnnnnnnnnnnnnnnnnnnnnnnnnnnnnnnnnnnnnnnnnnctttttttttttttttttttaatggaaatggtatgaatcatacaacactcggtattgtacataatgttttggcacactcactctcacaatgtatacgaacgttgagtgtatatctaagattgaatctcagaacctaaattctctattcaatcatttgaattgcctgccatgccgactagtttgagcatgttgcgatcttccttaaacctctccagaacagtacctttcatggcgttatgtttggtgtcttgttcatttgaggcctgaacgattccccagcattctatcacttctggctgaattctgctcgtcttggaaaggctcgggctaccaaacgttgtgcattcgaatgtctggccttgatcgaagcttgctgatataaacaggccaaagtgatttatcttacctccaaatcctatcccattcggaatg

SEQ ID NO: 100965 - DNA, 529 bp, Arabidopsis thaliana columbia
  unsure (1)..(529): unsure at all n locations
atgatttatgtgtgannnnnnnnnnnnnnnnnnnnnnnnnnnnnnnnnnnnnnnnnnnnnnnnnnnnnnnnnnnnnnnnctttgtgtttgtttttttttttttattggggcggaagacagattttataaaaggcctcaaacggacatagaaaacagtacatatcaaagcccaataggcccacacattggtttatcaattattcaacttatttttgactgaaaagggaaaagttgatgagtctttagtgtttgtgagactggatatcttggcttcatcaatccttttatgtttaaagacttcttctatcttgaaacaggttcactgcgagctgagtggtttttacggatgattacctcttgcggcatatggtcataccatcgccgattgataccatactaatgcttacacgttgatcatccattaaattttttggtgaaatttccttaggctgagggccctctaatcattcacccgggaaataccgcaccccatccatgccaaaaaaacattatcaattcaccatggctt

SEQ ID NO: 100966 - DNA, 714 bp, Arabidopsis thaliana columbia
  unsure (1)..(714): unsure at all n locations
aacgntanncttctggtcccannggcgtnttnttggnaaaggacggttntccctncctaagtttgccacgccctggtctctggngcaagcacggaatggcntccgtttagngaatgatttccacaagattaacttancaaatcttctctanatcactgggaagcctgaatcagagatcggaaagtgacacagaccgtgataacttcttgaatccatgggaggcgaaagaatatggtttgatcgacgctgtaatcgatgatgggaaaccgggactaatcgctccaattggagatggtactcctcctcctaaaaccaaagtctgggatctttggaaagcgccacgcggcccggaaagacaacactaacttgccatctgagcgctccatgacacagaatggttatgccgccattgaatagaactgttgttgcagcgtttacgccttttatatgttattctgggggtacctgtaaccatataacgttgcatggccgtgcgtttgtaccatttctctgatagatttttggaataatttggaacgcaaaagatagattatttggttggagaagaagctacaaaatttaatgattaaattgaatcatcaagccaaaaaaaaaaaaaaaaaagggcgggccgctctagaagatccaagcttacgtacgcgtgcatgcgacgccataatttttttataatggcacctaaaattaaattcactg

SEQ ID NO: 100967 - DNA, 1243 bp, Arabidopsis thaliana columbia
  unsure (1)..(1243): unsure at all n locations
ctcagggaactcaaaaaaaaaacatccaacaccaaagacaatggagatgagtttgcgtctcgcttcatcttcaacctcaaacccaatttgtctactaaaccctggaaaaaaccttaatttcccaatccgaaaccatagaatccctaaaacttcgaaacccttttgcgttaggtcttcaatgagcttgtctaaaccacccagacaaaccttatctagtaactgggatgtatctagcttctccattgattccgttgctcaatctccttcaagactcccaagtttcgaagaactcgataccaccaacatgttgctccgtcaaagaatcgtctttttgggttctcaggttgatgatatgacggcggatttggttataagtcagctattgttactagatgctgaggactcagaaagagacattacgctttttatcaattcacccggtggatctattactgctgggatgggaatatatgatgcaatgaaacaatgtaaggcggatgtatctactgtttgcttagggttagctgcatctatgggtgcgtttcttcttgcttctggttcaaaagggaaacggtattgtatgcctaactctaaagttatgatccatcagccacttggtactgctggaggcaaagcaacggaaatgagcatacgtataagagaaatgatgtaccacaagattaaacttaacaaaatcttctctagaatcactgggaagcctgaatcagagatcgaaagtgacacagaccgtgataacttcttgaatccatgggaggcgaaagaatatggtttgatcgacgctgtaatcgatgatgggaaaccgggactaatcgctccaattggagatggtactcctcctcctaaaaccaaagtctgggatctttggaaagtcgaaggaaccaagaaagacaacactaacttgccatctgagcgctccatgacacagaatggttatgccgccattgaatagaactgttgttgcagcgtttacgccttttatatgttattctggtggtacctgtaaccatataacgttgcatttcctgtgtttgtaccatttctctgatagatttttggaataatttgaaggcaaaagatagattatttgttgtagaagaagctccaaaatttaatgattaaattgaatcatcaagccatgagaagctttttgttttcgcccgtaantaaaaacccccattaacaaaannaaagcgcccgctctagaggatccaagcttacgtac

SEQ ID NO: 100968 - DNA, 682 bp, Arabidopsis thaliana columbia
  unsure (1)..(682): unsure at all n locations
atgatactccnnnnnnnnnnnnnnnnnnnnnnnnnnnnnnnnnnnnnnnnnnnnnnnnnnnnnnnnnnnnnnnnnnnnnnnnnnnnnnnnnnnnnnnnnnnnnnnnnnnncggccgccaatgcacaacaaactgtgtattctttagacaaattttataaataccaaaggttttgaccagaagaggagtgaaaaatgttcacgtatgtcaaagacaaaactagtgttctaacaaaataagacataacaatacagaaatgaatccaaagacaaaagtcaacttcaaacgcttgttccaatccagaaatcatgttccagaagctaactagacaaaagcaaggttttttaagttgctgttcctccactatagtttatctctctgcttcagatcatggaggatagcctctttaccggggatatcgaaagagcttcaagatcaaacaatgtcttgttttgtgcttcaggcgacgcgggggttaaccatctccgatttcccggattctgaactatcttcgtcatcgtcatcatcttccttcacactccgtctgattcccctgcaagctagttcacggtgcagctgcaacgttccttctcgacgctcgccttgccttttcctgcagtccgggcggtgttcagaggccttggaaatttntgctttgacctgcttntcaagngcntggnttt

SEQ ID NO: 100969 - DNA, 413 bp, Arabidopsis thaliana columbia
cggacgcgtgggatttgttactggtgatcatgaaccacagaacagtgattttgttgattttggcggtttatttgatgagcctgagactactgagggacctgtttttggacctccttccaaggctgaagcctcgggagttggttttatggcgttcagcagcgagtctgatcctgaagaaatcgatgattcggatttaccggtgtctgtagagaggtgtttgggtcatttcacaaaacatgagatactgtcagatgacaatgcttggaactgcgagaactgttcaaagaacctgaaactccaacggttgagagaaaagcgaaaatccaatgaagatgaatcgagatcaagcaacaccagcaacggatgggtgaaagaaaatgaagatgaaggttttggagaaaccgaaattttgg

SEQ ID NO: 100970 - DNA, 463 bp, Arabidopsis thaliana columbia
tttttctttggcaaactcgatttcgcctagcttcttctgagcatccgccgcttccgtctacagaatggattctcaaatcaaacacgccgtggtcgtgaaggtcatgggtaggactggttctcgtggtcaggtcactcaggttagagtcaaattcactgattcagaccgtttcatcatgaggaacgtgaaaggacccgtcagagaaggagatgtcctcactctcctcgagtccgagagagaagctagaagactccgttgattccaccatatcccaattctctttcaaaagtcttaccaagatttacattttgatggtctcttgtttcttggcattgtagtcaagttctcttttctttttctactgctttgttttaattacttgaggttttgttaaggccatgggtggaatcctggaatgaatcttttatgacgcaatgaaaatgtgccatcagtaatttcaatc

SEQ ID NO: 100971 - DNA, 960 bp, Arabidopsis thaliana columbia
  unsure (1)..(960): unsure at all n locations
cgnnnnnnnnnnnnnnnnnnnnnnnnnnnnnnnnnnnnnnnnnnnnnnnnnnnnnnnnnnnnnnnnnnnnccacgcgtccgattatactcatgatgacttttgttaattataaaaactaatgatgctaataaccaaaatcaagagttgataaaggaagtcacgtttggagattctgtctatagtgtttcgctggaggcgttgaaacagccctctttaacagctcacttcgtttcacattcctaaattcctctcaatcttcttcttacttaacttattatataagtctctgtttctctctgacaaaaatattccaccacaaaaaaaaatggctcaattcttagagaaggcaacttcggctctcagcgaagccaaagaatccgttacaagcaccgctgaatccgtcacggcttctctcactgatgctgagaaaaccgttaaccaaaccgccaggagcactctaactgacgccgagacaaccgttgcagcatctgttgaaacggtcaagaccgaggctgcagccgcaccagacaaagcgtctggtgtgtctacacaggctaaggatgcagtggacaaagctttttctagaggtatagaaggagccaaatctttgcttcaaactttcgaagcgaagagcagcgatatttcctcaaagcttgttggaggtgttaccaatcttgtgagtggagcatcgagcagcaccgtggcaaaccgagaccttccagtatctacagacaaccagcctctgctagcgtctggtgaaacgacgccgtggtggaagaattgttgtggagttcttgatcttttcaagaaagatacttaagttaaaaagatcaaaaaaattgacaaattaaccggntttcacgggatgangnaacagagcactnggaggaggaagacccttatcccttttgattatttanttccctcccttttngntttttnatttnagnttgnngcna

SEQ ID NO: 100972 - DNA, 847 bp, Arabidopsis thaliana columbia
  unsure (1)..(847): unsure at all n locations
caggcttacgtcccatcatcattccccgttctctttttattttctctaatcgccgacgattatctctttcgtccggcgatagctattttgtctcttcaaatccccatagaccaatactcaactcttcatctccatgtctcctcaatctcatttctctccttagtgattgagctttttccttctttctctttggttattattccttctcctcctccgtcgtgtttttgattgatttcagaatctaaatctccgtttgatttctccatactcgtgctgattttcacctatgtaatgtgatttatgagctctgtttagttcaaatcgacggcgatcgttgaatttactgatcaatgtgtaagtaagagcttgaagaaatagtttttgttgttgttgtgaaagctcagagttttgtttgcttttttgttgacttttttgagattgatgctggatctcaatctcgacgtcgactcgaccgagtctactcagaacgaacgagattcgattactgttaaaggggtttctttgaatcagatggatgaatcggtgacgtcgaactcttctgttgttaatgctgaagcttctagctgtatagatggtgaagatgaagttgtgctctacacgaacggncaagtttccaatttgagatactgaaaggagggaggagaagaagaagaagaagatgatgatgaaagaagtcctgtnatgatgccnaaggggtttttcccggtgncaaagggatgancttatggntccngcgcccaagtccaagngcnccggtggaattcccnccaagggggancaggggggccttantgaccggcggtggngcnnccccggggtccccnnc

SEQ ID NO: 100973 - DNA, 896 bp, Arabidopsis thaliana columbia
cccgacgaaccctgtttcgcgtctcttttccaatcccaatccaatttcgattccttgattggaggattcgtatagccgtaaatccgttattgggttcttccgattatccaccgatagatctcgatcgaacgtttttctccgattggatttttgggtgatttcgccggaattcataatcagacgggaggagtcgcttctcttctcttgagtaatttagtccctttttgtgttatggaatcaattggttgatgaacaaatacaagtgtaaaacgatgccgggtttaacaacacacatgaatgagcattactcttcttctgggttttggtctgaggacgacgatggacttacctacgatcagttggaccagttctggagtgagctgtcgtcgaaagctaggcatgagcttcttaggattgacaagcagacactgtttgagcaagctcgcaagaacatgtgctgttccagatgccttggactgttgcttgaaggcttcgcccagattctttctgctgggagggccgcgtacgaaaaaagaatgatgggaccctccaaagataactgtaaatctaatggcactaggaaatgtacggttgcgtaccagagccctcctgttcatcgatggggaggtctcaccacaacacgctcgggatgtatcactcttcttgactgctttttgactgcaaaaactttcaaagggcttcaaaatgtctttgaaagtaaccgtgctcgagagagggaacgtgagttgctttatcctgatgcttgtggtggcggtggtcgggtatggcttagtcaagggattgctggttttggtaaaggtcatggaacaagagaaacatgtaatttgcataccacgaggctctcttgtgatacattagtggatttttggtctgca

SEQ ID NO: 100974 - DNA, 534 bp, Arabidopsis thaliana columbia
agctctctacgactcactattgggaaagctggcacgcctgcaggtaccggtccggaattcccgggtctacccacgcgtccgcccacgcgtccgcccacgcgtccgcggacgcgtgggaaaacggaaggttagtttgttcgatgttatggaagatccttctctttcgtcgaagaacaccaaatccaatggtctcggacttgcggcggcggctggtggtggaagcaatctgatcaacaaatggaacggaaaggcttattctcagaggtatttcgagattctggagaagaggagagatcttcccgtttggctccagaaagatgactttctcaatactttgaactctaatcaaactctcatactcgtcggtgaaactggtagtggtaaaactacacagattccacagtttgtattagatgctgtggtggctgacaactccgataagggaaggaaatggttggtgggatgtacccagcctcgtagagttgctgcaatgtctgtgtctcgtcgtgttgctgatgaaatggatgtctccat

SEQ ID NO: 100975 - DNA, 691 bp, Arabidopsis thaliana columbia
ccgcgctgtcaacgctgggcgtgagtgagatctaacaatcggtagcgaattgtggaaattttgttccggttttgaagtctcaatctcggggttccggttttagcaactacttcttctgacatttcagctgttctagttgatctttatatactttatatgatctgggattttgaagagtttttagggaggaaccaaaatttctgagagagaaaaatgaagttatcgagctgcgttttgatcttccttctatgtaacacattctcctcgatttctgctttccgtctgagtcggagtcaaccaactgagcgaatttcaagtagtgctggtgatgtgtcggaggatgatcccgtgtgatgactgaaagtctctgattatgagcttccaagtaaatacaacaagaagatacttcacaacgatccgagatgtctaaaccacatgttagctgctgagatatatatgcaacggtttcttttatctaacccagttcgaacacttaatcccgaggaagctgattgattctacgtacctgtgtacaccacttgtgatctcacgcctaatgggcttcctcttgcttttaaatctccacgaatgatgagaagtgccattcagcttattgcttccaattggccatactggaatcgcacagtacgagcagaccacttctctgttgtgcctcatgactctggagcct

SEQ ID NO: 100976 - DNA, 550 bp, Arabidopsis thaliana columbia
ttctctgtgattgattacattgaactctttttaagcaaactttgttttgttttgtttttttattatgattttccacgatacacttaatcatataccaatgaggcattggttactaccaaaggatacaaaatctttccttttgaaagaaagaaattttctaaggtatgtatatatgagagagaataaagaacatagtcaaaccatcatctgaacaccaagttgtggcagctcttgtcacacgggtatgggcaatcgactaactatcacttccgctctatcgaaataccaatctcctacagctattgccaccgcctttttcctgataacaggaggatcatcggcaaaccaagtatcttgtctctcggtttggcagtgagcaaagcaagaattgatgaacaatccattctgtctggacattgagaagcccttgactactctaagcatctgttccctgaatccttgcaagaatctcaactgtgcaggagtacattttccatggtttagtctgcagtcatgccaaaatccactaggatcagcttatgttggagct

SEQ ID NO: 100977 - DNA, 881 bp, Arabidopsis thaliana columbia
  unsure (1)..(881): unsure at all n locations
ctttgaacactgtctgggcacagaaggttgactttgcctacagtttctttgagaagcagatcccaattgaagctgtcttccagaaggatgaaatgattganatcattggtgtgaccaagggtaagggttatgaaggtgttgttacccgttggggtgttacccgtcttcctcgtaagactcacagaggtctgcgtaaggttgcttgtatcggtgcgtggcatcctgctagagtgtcctacactgttgctagggctggtcagaacggttaccatcaaccgtacctgagcttaacaaggagntttacaggttgggcaaaaggttgggtaccttagggcacacacttgccatgcctgaatattgccagggctttgaaaggatttgactcccaatggggggcttcccccactccgggatttttgaagggtggccttcttgatgggttaaggggggccttgtgttgggcccaagaagaggggttgtaaccctcaggcagtcccttctcactcagacttcccgtcttgccttggaggagatcaaactcaagtttattgacaccgcctccatttttggacatggtcgcttccagacctcccttgagaagatgaggttttacaaccgtgtcacgaagtaagagttgttttatcacaattcttcttagaaagtttcatgtttggttatctgttgctacttatctcagagatgttatcctttaaacaatgttatggagttttcttttgcttttagtttgttacttttttggaagttaaaacgatttgcttctccaaaaaaaaaaaaaaaaaaaacaaagggcggccgctctagaggatccaagcttacgtacgcgtgcatgcgacgtcaagactcttctatagtggtaccta

SEQ ID NO: 100978 - DNA, 1631 bp, Arabidopsis thaliana columbia
  unsure (1)..(1631): unsure at all n locations
ttgaactcatttttaagcaaactttgttttgttttgtttttttattatgattttccacgngtacacttaatcatataccaatgaggcattggttactaccaaaggatacaaaatctttccttttgaaagaaagaaatttcctacggggcgtcctcatcgttggagcttagaagccgtcggcacaagaagaagaagaagaagaatgtctcacaggaagtttgagcacccaagacatggttctcttggtttccttccaaggaagagagctaaccgtcacagaggaaaggtgaaggcgttccctaaggatgaccaaaccaagccttgcaagttcacagctttcatgggttacaaagctggtatgactcacattgtcagagaagtggagaaacctggatccaagcttcacaagaaggagacatgtgaggctgttaccatcattgagacacctgctatggtggttgttggagttgttgcctatgtgaagactcctagaggtttgaggtctttgaacactgtctgggcacagcatttgagtgaggaggtcaggagaaggttctacaagaactgggctaagtctaagaagaaggctttcactgggtacgctaagcagtatgacagtgaggatggcaagaagggtattcaggctcagcttgagaagatgaagaagtacgctactgtcatccgtgttttggctcacactcagatcaggaagatgaagggattgaagcagaagaaggctcacatgatggagatccagatcaatggtggtaccattgcccagaaggttgactttgcctacagtttctttgagaagcagatcccaattgaagctgtcttccagaaggatgaaatgattgatatcattggtgtgaccaagggtaagggttatgaaggtgttgttactcgttggggtgttacccgtcttcctcgtaagactcacagaggtctgcgtaaggttgcttgtattggtgcgtggcatcctgctagagtgtcctacactgttgctagggctggtcagaacggttaccatcaccgtactgagcttaacaagaagatttacaggttgggtaaggttggtactgaggcacacacagccatgactgaatatgacaggactgagaaggatgtgactccaatgggaggcttcccacactacggtattgtgaaggatgactacttgatgattaaggggtgctgtgttggtcccaagaagagagttgtaactctcagacagtcacttctcactcagacttcccgtcttgccttggaggagatcaaactcaagtttattgacaccgcctccatttttggacatggtcgcttccagacctcccttgagaagatgaggttttacaaccgtgtcacgaagtaagagttgttttatcacaattcttcttagaaagtttcatgtttggttatctgttgctacttatctcagagatgttatcctttaaacaatgttatggagttttcttttgcttttagtttgttacttttttggaagttaaaacgatttgcttctcaagttttgagactttgatgtgttctttatcatttatgaaaaaccaacctggagcatnnnnnnnnnnnnnnnnnnnnnnnnnnnnnnnnnnnnnnnnnnnnnnnnnnnn

SEQ ID NO: 100979 - DNA, 519 bp, Arabidopsis thaliana columbia
ttaggtcaactctagaagatcttgacgtcgcctgcacgcgtacgtaagcttggatcctctagagcggtcgccctatctgtttgttgttttaataatatcaaaacgatcaacataatgttctctttatggttcaacaactgagaatctgctatgaataaagacatgtggtccagaaacatgaactttgaatgcaaaactaaagaaaataatctgtgtatgacttgaatgtttttggtttactagtgagagaagtgaaggagccattgataaacatctatttaagagaaatctgggaggggatcaagcggatacacttacaggttcggtagctttcttgagccattccatttcagtctggttcataaatggggctaagatgtctttgcacttagaatgaatggtgttcaaccaggcaatctcttcccgtgtcaacttcggctagatcgataagtttcaccttgatatggtgcccaagtgatttgctcaaattgaatgtaacccttgtcgccaaaattgaat

SEQ ID NO: 100980 - DNA, 528 bp, Arabidopsis thaliana columbia
tgacactatagagagctatgacgtggcatgcacgcgtacgtgagcttggatcctctagagcggccgccctttgggttttgttttttttttaaccaaacaatcaatttatcttttcatctaaatactcttatatatatttacatatcaggttcaatcattttctttatctacagttagttacatctgaaggtgggcttcgttcaaaagcgtgtcatgtgctttcgattccagttggctttcatctgatagagaagcttaatggcttcaatgtaaatcccattctgcatataacttgcgaccatagcgttccagcaactaacactagtctgggccttactactcttaaaaaccttttccgcgtctttcaccttcccatacttcccatacatctcaattaaccgacatcggatcaaacaatctgactcaaatccgagctttatagcattcgcatgcacttggtgcccgcttctcccaccgtcactgacccatgagcatgcttttagaacattagagaacactgagacgttc

SEQ ID NO: 100981 - DNA, 511 bp, Arabidopsis thaliana columbia
atgacgtcgcctgcacgcgtacgtaagcttggatcctctagagcggccgcccttggtttttttttttttataaagacgacatctttctctaaagctttaaggaacagatcatctatgttttacactctatttattcgctgccttgtcttgacaacgaaagattcgttggaaccattttccttctctgttacggcgtggctaaaagagttgcgggggggcgagtgtcaagcccttgtacaaggaggggacgacccctgcccaagccgtttgggttagatccttcgattattggtcgaagaaaagctcgatgggcaggcaaaaatatcttgggatggacctagcgcgttatcgggagaaaagcttcttatttctccacccttagaaaggatgttaaaggtgaagggccggcttcccaaagctgaggaattcggagcgtcaatcacgcaactcgatctggctcggccttgggcgcccccgctactttcggccggcgcgacaggtcttggaccat

SEQ ID NO: 100982 - DNA, 433 bp, Arabidopsis thaliana columbia
agagaaatttctcagttacgcttcatcctcctctaagagatcttttttctatcttgggtagtagagagaaatggcgggtcggggaaaacaacttggatctggtgcagcgaagaagtctacttctcgtagtagcaaggctgggcttcaattccctgttggtcgtatcgctcgatttttgaaagccggtaagtacgccgagcgtgttggtgccggagctccggtctatctcgccgccgttcttgaatacctcgccgctgaggtacttgagcttgctgggaacgcagcgagagacaacaagaagacccgtatagttccacgacacattcagcttgctgtgaggaatgatgaggagctaagcaagttgcttggagatgtgacaattgctaatggaggagtgatgcctaacattcacaattttcttttttctctagga

SEQ ID NO: 100983 - DNA, 701 bp, Arabidopsis thaliana columbia
  unsure (1)..(701): unsure at all n locations
ttaggaccactatagaagatcttgacgtcgcctgcacgcgtacgtaagcttggatcctctagagcggtcgcccttgggttttgtttttacttattcgataacattattataagatcaaaatgtcacaatggtaacacattcattacttgagtttccaaaattttgtcatgagagacaaaactcaaaaggacacactgaaacaaatgtccaaatggtactcatctggctcactagtccagtttggacctgcgggtgaagcttgatgcttccaccttaatcctgtgatccgcagtagataaaagcggcttcaccctgttgccttctcctctagtgtggtcctctcttccatagtcgttccttcagaggtttcatcattcaccttatcgacaacgaatagctcagcattgccttcatggatattttcttcagagggttcaaccattcttcttatagacaatgacttcaatcccggtgggatttcattggcttccgtagatcagggtaagttcccctgggtccagagaatgnaaccaaatcggcaaaggtccanccttttcttcagcagagcaatatggggataaacaaacttccatttgaacnctnaagnanntccctggancctncaatggaacccccccaagggtgggttnaaccctttggtgaancgggnanagggtctncaggggaacaactntggggtc

SEQ ID NO: 100984 - DNA, 616 bp, Arabidopsis thaliana columbia
cggacacgtgggttaatttctctctctctctgtggagtgttcgaatctccaagctctctctcaaatggcagcgtccacatagtagagctgaagaagcactgtatctatctacagagaaagtgaagaggaagaaaaggaagagaggatatagaaattaagctggcgacttttagtccgaggcgagcaatggcagagttacggcactcgagctctctcggtagccgatcttcttcttctccgttacgtgccgccggagatgaggattcttcatcgcctcatgtacacgatcactctcctaacggcggagacgacgaagatggtcgcccacgtcatccttctagagatcgagaccgtccgatctggtttcactctttgtttcctttcttcggtgatgatcctagggtttctcctcagaagaataaaatctcgcttctattgattttgattctcgctattgctagcttgatctcagtttatgggattattaatcacttgaatgctccttatttatgtaaaaaagatgggattgtgctaaactgtcctcatgtaaaagagtcaccttctccttgggagaatcctttatctgcaacaacttcttggaagccttgtgctgagc

SEQ ID NO: 100985 - DNA, 459 bp, Arabidopsis thaliana columbia
acggaatccgggttttatttataccccccatcattggggtttaaaaaggtaacccgacaagaagggaaaaggcaaacataaacatatatatcccttttttcaaaattaaaaatccgttaagtttgaaactgattcatcgtcctaattagcaaggatgttttgctaaacgtcagaagcaaaatatgattaaatatggactttggttcgtgagtttattaagtttcaggaaactaagatcttggaggtgtgaaacgcgaacacttgttcttccttccgctgcttttactgaggccacagacacaagtctcgagcagctgatagtcctcttcccagaacaagagtgatgctttctcagattgctctattagtttcttagctgccaagaaacccgctatggtccaagtctggtaaagccttgattgtttccccacaaaccttccgcttttcgtgtcataatac

SEQ ID NO: 100986 - DNA, 510 bp, Arabidopsis thaliana columbia
taggacccactatagaagattctatgacgtcgcctgcacgcgtacgtaagcttggatcctctagagcggccgccctttgttttttttttttttcacagtaaaagcataaaactaaataagattacttgaaagtgtctgcagaagttatctacgatttaatcttactatctctaaaaggggaaatgaagatgcttaaaagttcctatagatacgttacaacaaatcacatattccttcatgtggccggcctcatatctctttggtttctatacaaagaccaacctaaatgagaaaaataagccctaaattctctttcactgggttaagccaaagtaacaatgcctgcgttctgtgggaatattacaagcccccatagatatcattgttgtggaagaagccatcttctgagaaatcatggtctgggatcgatatatcttctgaaaaatgaaggttgttgttccaggcttgctttaaaactgttgtttccacttgaacctcggcctccccctg

SEQ ID NO: 100987 - DNA, 522 bp, Arabidopsis thaliana columbia
  unsure (1)..(522): unsure at all n locations
nnnnnnnnnnnnnnnnnnnnnnnnnnnnnnnnnnnnnnnnnnnnnnnnnnnnnnnnnnnnnnnnnnnnnnnnnccacgcgtccgcactttcttcttctttgatcatatcatatttatcttcactacaaaaaaaacaagtaaaataaagccaatcttcttaaatatctccagaagatctatcagcatttacgtattcaggtcctccaatttcttctcacaaagaaaaaggaagaaaaaaaagaagttgtgagagcaaaaaaaaaatggcagtggataaagtgattgtgaagcagaggaacattatattggttggaattccaattgatgaaagtggcgtagaggttttaaaatgggcacttgaagaagttgcaaaacatggagattgtgttgttgttgtccatgtttgttttacttattaccgtgccttgaaaagcaagtcatcgctggatcggtacttaaaaccatacattgaattctgctcaacaaagaagattgagctcacaggagaagtgttaaagggaa

SEQ ID NO: 100988 - DNA, 637 bp, Arabidopsis thaliana columbia
  unsure (1)..(637): unsure at all n locations
gntcctgcccngatttttgcantcaacccttcggtccaccgntccctgtggtgaancatttncaaggattncctagncccggatnttggcttatgtgnggggttccaaggggaagagnggccccatggggttgccactttggctcaccagaaatggcccggtgctaattactatgatcgttatcttaagaccgtccaaggtggaatctcctccactgcagccatgggaaaaggtgtcactgaagaacagttcaaggagagttggacaaggccgggagctgatggaatgggtgaagggactagccttgtggtcgccaagtcaagaatgtaagacatatgttcattacggcggtgcggccaaagcggtgcggcatcttcgtaggaaagcttggaaaccacactatcttcaatatatatctttggacacccgagtaaaagaaaaaaaaagacagaaacagataataaatgtatctttgttattgtatttctcttcttcaacgtaataattgggttaaaaggtttggggcaatattttatggggtttgcttctttgtatggatatttggaatttggtggtattggctttggttatatgactattgatattcctataaaaaattaatattctcttttttttt

SEQ ID NO: 100989 - DNA, 626 bp, Arabidopsis thaliana columbia
agcttctctaatttcatagctcctaacaaagcaatatcatttccaatttataaaagttaaagccatggctgcatctttctctgtcccctctatggtaagaaaacgacccataattctcctttgtattatttgattaagttgaatacaatagaattatttcaccagtaaataagactaacatggaaattgatgatcgataaaccaaatcagataatggaagaagaagggagattcgaagcggaggttgcggaagtgcagacttggtggagctcagagaggttcaagctaacaaggcgcccttacactgcccgtgacgtggtggctctacgtggccatctctagcaaggctatgcttcgaacgagatggctaagaagctgcggcgagcgctcaaaagccactaaccaagacaacatctttacccgctgtacctattacgacgcgctggacccagcaagggtgtcgatgagtctaacagtgacaccatatacatgttgcttggtgtctaaccattaaatactctatatagataggaggctaggccccattgtgaaggctacaatttttatgatgcacgaggacaacggagaaattgtggtgcaggacgtaaccccctggagtatatcca

SEQ ID NO: 100990 - DNA, 559 bp, Arabidopsis thaliana columbia
  unsure (1)..(559): unsure at all n locations
cccccccccgatcgaggggggaatcaataggctggttatcgatttcggggccgctttctctgccccctctatgataatggaagaagaagggagattcgaaccggaggttgcggaagtgcagacttggtggagctcagagaggttcaagctaacaaggcgcccttacactgcccgtgacgtggtggctctacgtggccatctcaagcagggctatgcttcgaacgagagggctaagaagctgtggagaacgctcaaaagccatcaagccaacggtacggcctctcgcaccttcggagcgttggaccctgttcaggtgaccatgatggctaaacatttggacaccatctatgtctctggttggcagtgctcgtccactcacacatccactaatgagcctggtcctgatcttgctgattatccgtacgacaccgttcctaacaaggttgaacacctcttcttcgctcagcagtaccatgacagaaagaagagggggaaagattggcttgcccgggaggggggcaaaaattcgtcgnggctcctaagcctaatgcgggggnac

SEQ ID NO: 100991 - DNA, 2159 bp, Arabidopsis thaliana columbia
  unsure (1)..(2159): unsure at all n locations
ctaccnnnnnnnnnnnnnnnnnnnnnggcttctctaatttcatagctcctaacaaagcaatatcatttccaatttataaaagttaaagccatggctgcatctttctctgtcccctctatgataatggaagaagaagggagattcgaagcggaggttgcggaagtgcagacttggtggagctcagagaggttcaagctaacaaggcgcccttacactgcccgtgacgtggtggctctacgtggccatctcaagcaaggctatgcttcgaacgagatggctaagaagctgtggagaacgctcaaaagccatcaagccaacggtacggcctctcgcaccttcggagcgttggaccctgttcaggtgaccatgatggctaaacatttggacaccatctatgtctctggttggcagtgctcgtccactcacacatccactaatgagcctggtcctgatcttgctgattatccgtacgacaccgttcctaacaaggttgaacacctcttcttcgctcagcagtaccatgacagaaagcagagggaggcaagaatgagcatgagcagagaagagaggacaaaaactccgttcgtggactacctaaagcccatcatcgccgacggagacaccggctttggcggcaccaccgccaccgtcaaactctgcaagcttttcgttgaaagaggcgccgctggggtccacatcgaggaccagtcctccgtcaccaagaagtgtggccacatggccggaaaggtcctcgtggcagtcagcgaacacatcaaccgccttgtcgcggctcggctccagttcgacgtgatgggtacagagaccgtccttgttgctagaacagatgcggtcgcagctactctgatccagtcgaacattgacgcgagggaccaccagttcatcctcggtgccactaacccgagccttagaggcaagagtttgtcctcgcttctggctgagggaatgactgtaggcaagaatggtccggcgttgcaatccattgaagatcagtggcttggctcggccggtcttatgactttctcggaagctgtcgtgcaggccatcaagcgcatgaacctcaacgagaacgagaagaatcagagactgagcgagtggttaacccatgcaaggtatgagaactgcctgtcaaatgagcaaggccgagtgttagcagcaaaacttggtgtgacagatcttttctgggactgggacttgccgagaaccagagaaggattctaccggttccaaggctcggtcgcagcggccgtggtccgtggctgggcctttgcacagatcgcagacatcatctggatggaaacggcaagccctgatctcaatgaatgcacccaattcgccgaaggtatcaagtccaagacaccggaggtcatgctcgcctacaatctctcgccgtccttcaactgggacgcttccggtatgacggatcagcagatggttgagttcattccgcggattgctaggctcggatattgttggcagttcataacgcttgcgggtttccatgcggatgctcttgtggttgatacatttgcaaaggattacgctaggcgcgggatgttggcttatgtggagaggatacaaagagaagagaggacccatggggttgacactttggctcaccagaaatggtccggtgctaattactatgatcgttatcttaagaccgtccaaggtggaatctcctccactgcagccatgggaaaaggtgtcactgaagaacagttcaaggagagttggacaaggccgggagctgatggaatgggtgaagggactagccttgtggtcgccaagtcaagaatgtaagacatatgttcattacggcggtgcggccaaagcggtgcggcatcttcgtaggaaagcttggaaaccacactatcttcaatatatatctttggacacccgagtaaaagaaaaaaaaagacagaaacagataataaatgtatctttgttattgtatttctcttcttcaacgtaataattgggttaaaaggtttggggcaatattttatggggtttgcttctttgtatggatatttggaatttggtgttattggctttggttatatgattaggatccactagttctagagcggccgcccccccggtggaggtcccgcttatctaacctaggtgggttccat

SEQ ID NO: 100992 - DNA, 508 bp, Arabidopsis thaliana columbia
  unsure (1)..(508): unsure at all n locations
nnnnnnnnnnnnnnnnnnnnnnnnnnnnnnnnnnnnnnnnnnnnnnnnnnnnnnnnnnnnnnnnnnnnnnnnnnnnnnnnnnccacgcgtccggtaaatttacaggtaatgtatttatgtacatatagaatttttagataagctcaaaaagctggtttgtttagtgaatagggaaagttttgggtcgtcgatgaatgtgtcattttctcttatcccaaatttgctcgatcatacccaataattggatggctttctttcaacaatcggtttttccttctatttccccacaggtattatatatatatctcatatatttctttaataattataatgtttagttggaaattctatccagattctgtccacatatatgattcgaatattatccgaaattaggaacaagccgaatataaatatatccatgcataatcattaacccactgtatgacttcaatatgaatatattcatctatatattggatatatattacacttgattggtagataa

SEQ ID NO: 100993 - DNA, 406 bp, Arabidopsis thaliana columbia
atcttaaacacaaacacgcaaaagatggaaaagagtcttcttgtcctctgtctcattttgttttttacttatagttacgtctcggctaattactatccacctaaagccttagtatcaaccgtctctaagaacacaatcttgcctatcttcaccttcacactcaacacaaaccaagagtttttcattcacatcggcggtccctatcttgtccgtaaatgcaacgatggtctccctcgtcccatcgtcccttgtggctcccccgtatgtgctctaactcgtagattcactcctcaccaatgctctcttcccagcaacaaaatcatcaatggagtatgtgcttgccaagcaaccgcttttgagccattccaacgtatatgtaactctgaccaattcacctatggagatt

SEQ ID NO: 100994 - DNA, 1081 bp, Arabidopsis thaliana columbia
  unsure (1)..(1081): unsure at all n locations
nnnnnnnnnnnnnnnnnnnnnnnnnnnnnnnnnnnnnnnnnnnnnnnnnnnnnnnnnnnnnnnnnnnnnnnnnnnnnnnnnnnnccacgcgtccggagaaagtgaatgggctaaacaaagctcgggctattctcaccacggccaggaagaagaatcctgggggggctgagctatggttagctgctattcgcgctgaactgaggcatgacaacaagagagaagcagagcacttgatgtcaaaggctctgcaagactgtcccaagagtggtatcctctgggctgcggacattgagatggcgccacgtcctcgacggaaaacaaagagtattgatgctatgaagaagtgtgatcgcgaccctcatgtcaccatagctgttgccaagctcttttggcaagacaagaaggtggagaaagccagagcatggtttgaacgtgctgttaccgttggcccagatattggcgatttctgggcgttgttctacaaatttgaacttcaacatggctctgatgaggacaggaaggaagttgtggcgaagtgtgtagcttgtgagccgaagcatggcgagaaatggcaagccatctccaaagcggttgaaaatgctccccagcctattgaagttatcttgaagagagttgtgaatgcgttgagcaaggaagagaattctgcttgagagtatcaattttcttatgtttttcatgatcaagctctgctcatagcacattaccccttagttcttgttttctctttgcaggctcaacttttaaccattcatgtttttcttcagtagcgagacctgatattgatttacaggagtgtttccccagatacatgtagaattctcagtttactaaatgcttcagttttctttgtgagtctctgtgtgctgcagtgttcagctattaaacttcttttgttatttggaaaactgatcatttgttgttcgtttccnnnnnnnnnnnnnnnnnnnnnnnnnnnnnnnnnnnnnnnnnnnnnnnnnnnnnnnnnnnnnnnnnnnnnnnnnnnnnnnnnnnnnnnnnnnnnnnnnnnnnnnnnnnnnnnnnnnnnnnnnnnnnnnnnnnn

SEQ ID NO: 100995 - DNA, 577 bp, Arabidopsis thaliana columbia
  unsure (1)..(577): unsure at all n locations
nnnnnnnnnnnnnnnnnnnnnnnnnnnnnnnnnnnnnnnnnnnnnnnnnnnnnnnnnnnnnnnnnnnnnnnccacgcgtccgcccacgcgtccgcggacgcgtggggttaactgcaaatgtacggaaagaatcaacaaatagataatttataaattggtggagaaataccaagagcatcaaatggactcacgtcttttaaagacacttcctcaatattcaccattagtaatgattcttatctctagtcttagcaaaatgatggtgtggcaggtatatcggcaaaatcttcatagcgaactaggcgcactaaagttgatggtcaaaataatcagaaaaacagaaaaagttcaaaaacagaaagagttggaggattataaaaccaaattccctagaattaaaatgatatggattctcatttaccaaattccaataaaggtaatgataattaatagagaaaccctaagatgttaagtaatcaaagagacggtaaataagctgtatcagcaagaacaaataacttagaagcatggctttccaaaaagagagcatttgattagtagagtaaatagtaatctc

SEQ ID NO: 100996 - DNA, 499 bp, Arabidopsis thaliana columbia
  unsure (1)..(499): unsure at all n locations
atgatttnnnnnnnnnnnnnnnnnnnnnnnnnnnnnnnnnnnnnnnnnnnnnnnnnnnnnnnnnnnnnnnnnnnnnnnnnnnccacgcgtccgttatcattcatatctctctctttctctctctctcagctctggagaattaaacagagaaattttttggtctcaggtttatatcaaagatgcaaaacgttcctgaagaccaaaacaaaatggtcatagatgataaacttcctccattttcatgggaaagaaagttgaacagtcaagcaaagactccttctgagttcaaattgagtaaacgagatcacatgcatctgtttccattaggctacagattgtggcgtcacaccaaagacgaagccgccaaaggaagagcttcgatcttcgatatcttcagaaaacaccatattacgggagatcacggtgtccctttaggaggaattggttcaggaagcattggaaggagttacaagggtgagtttcagcagttcaagctgtt

SEQ ID NO: 100997 - DNA, 772 bp, Arabidopsis thaliana columbia
  unsure (1)..(772): unsure at all n locations
gaatgaannnnnnnnnnnnnnnnnnnnnnnnnnnnnnnnnnnnnnnnnnnnnnnnnnnnnnnnnnnnnnnnnnnnnnnnncttttttttttttttttttttctaccacgcttatttatttaccaaccgaattttaggacttaatttacaacaattatggacaacaaattagttacaaaatgtgactaataagaaaaaaaaaaaagaagacatcttgaggtaactttatttacaaggaaaagacaagaggctatttataaaatcgtccacaaccttggattggatggctacctgcttccctttgatgtctctgcaagttcagaatcttcccttgctcgttttaaccttgttcctacataatccatcttcttctctactcttaggagctgggagggggctggaaataagggtgctgcagagcctcatctacgggtactctgtcctcagggtaccattgtaatagacccctcaccaaccttaatgcccaaacatttggaaacccaatctcagtgggtctctgctctttatccggtccgcaaaaaatccttcagggcatttccatgacgcaaggggaattccaccctgctttgaggggcgccaccatgttttaaagggctacccgggattagggggcacatctccattaaggatcgaagcttgtatgcaagctctttaaagttttcactccaacctntgatatgntgatccaaaagggcacgtgtaacagaactaatcttaaaaacattgggtgatcctaaaatcatctctaacat

SEQ ID NO: 100998 - DNA, 770 bp, Arabidopsis thaliana columbia
  unsure (1)..(770): unsure at all n locations
gnnnnnnnnnnnnnnnnnnnnnnnnnnnnnnnnnnnnnnnnnnnnnnnnnnnnnnnnnnnnnnnnnnnnnnnnnnnnncttttttgttttttttgaccaatttatccaaaaccttttgatacaaataatccaaacatagaaaacagttgttgtccggagtaataaaagaactctgacatcattcaacgatattactatacatttaaactcttggaaaaacatggatgaagaatcacataaatgcagtagcaccatggtaaacaagacttgaggaaaggtggactaactctgggtttgtgttttacttagagaggaaatggctggacccctgagaaatcagatttgtgtcacatcagagagatatggagaagttaacacataacacagcatttgcttgcgttttcctggatgcatctctatttcattggttaattcttcaatccagcttgatgtcgtttttcgactgttctattttcttcggctctgccgggaaatatttgattccgctaaggtcacctactttgcttataaccttgagggctcttataagatcttctcttgaatgagatgcggagatgcaaatacgtgccctagccagcagtagaggtgtagctgggaaacccacgaccaccactgccactttttgtcgcagacattctcttgagaaagctgggatttttgctgggttgtaaagcattataggcatgactggggaatcattgtctccaagtacctcaaatcccatcttctgcagctcagcccggaaaaag

SEQ ID NO: 100999 - DNA, 518 bp, Arabidopsis thaliana columbia
gaatgatttattgtgtactatacaagacattgacgtggcatgcacgcgtacgtaagcttggatcctctagagcggttgcccttttttttttttccttttaaatatcaaattaggtgataacacctttttattttattaagcataaacctttaatccgtgttacatattccttagatactacaacgataaacactcaatattggggtgactagatttagtttttaaacttggcctcaaggtttttaacaacattgacgtctaactgaaacgcctgagccaaaatatctggattaatcggaggcgttgacccaaacacagtatctgcaatcgtgatgacaccagcattttgactacttagtccagcaaaggccactgcaagggtcttcccgatattcactgtgaaaatggatcattcctatgggggaacacaacacgttcgccggggttcagcactttagcgaaataacgggttgttgttttgttgggagaaaacaaacccacatataatgttccttaaa

SEQ ID NO: 101000 - DNA, 512 bp, Arabidopsis thaliana columbia
  unsure (1)..(512): unsure at all n locations
nnnnnnnnnnnnnnnnnnnnnnnnnnnnnnnnnnnnnnnnnnnnnnnnnnnnnnnnnnnnnnnnnnnnnnnnnnncttttttttttttttttagtcaaacaatgacaaatgcttttaaaaatgagatacaataatctttgttttttgtgctgacactttgaaccggttctacataaaagccaacaagtctataatgcaaaaaacccaactcgcatcattggaaaaccccatctctaatccggtagctacagctctctaccgtacctaagtaacttacccatctgataggttccttgttcttgaacacaccgagtcgaaatcacgaactaatcatgttgaaatggaatctggatagctgctgcggaatggttgatataaccggtccatatctctgaacattgtcatagagttcgaacaaagggacggccaagagcttcaaatttttgggcacagcaaagtactctttctcagacaagtgaacaatgtagagtctcttgcattcctttggtttc

SEQ ID NO: 101001 - DNA, 510 bp, Arabidopsis thaliana columbia
  unsure (1)..(510): unsure at all n locations
annnnnnnatgtgaactatagaagagctttgacgtggcatgcacgcgtacgtaagcttggatcctctagagcggttcgcctatgttttttatttcttttttttgaccaaaatattattttttcctctaaaaggcattacaaattgggaattttatcatctgaattttagaattttacaacataagagacaaccagaatttgaagacaaaagccaaattaatacatacaacatattccctctttttaagatttttacaatggagaagacgaagcaaaatcacagacaagaaaaagggaaagaagaacatttgggcttcttgctggttcttcttctctgcgagaggagttttttttaaagtattggtatcatcagattgcttactccattaagagctgtctatgtcgagtgagatcgttaaggtaagaggaagaggtgtgatctaagtcgcaatcgtcgagactcactgttcttgctacaccctgggttttgttcagctaactgggcatctc

SEQ ID NO: 101002 - DNA, 656 bp, Arabidopsis thaliana columbia
  unsure (1)..(656): unsure at all n locations
ccccnncannttttanacnctcagnnccgctgtgccttnccaaaacntggttgagccctggacttctcctnggatttnctanccgcttagggacaacaaatggtgatcccagggccccggggactcaaacttacagaaggaactgaacagatacatcccaacagcagcagcttttgggaggagtttgtatcgggtgcacttaccgttttggctgatttcatgggagccatcgggtcgggaaccggaattctgttggcggtcacgatcatataccagtatttcgagacctttgagaaggaaaaagccagtgaactcggcttcttcgggttctaagttagcttaaagaaggtgtaaactttgcctgaggcaaaaaagcagagcagaagaggctttagcttctgtgcccacctcaaacacagacaatttgtggtggcacttgggttagactacttttttttgttgttgttgaaacgaaattttctctttagtcatttatgtttttttgttactttttacaagttaaaaaacttatgtgatagacgcttttctaatgtatgtttctaggaaaaaaaaaaaaaaaagcaagnnnnnnnnnnnnnnnnnnnnnnnnnnnnnnnnnnnnnnnnnnnnnnnnnnnnnnnnnnnnnntgtcctaa

SEQ ID NO: 101003 - DNA, 1014 bp, Arabidopsis thaliana columbia
  unsure (1)..(1014): unsure at all n locations
atcaggggatatggtctcggatcaggaatctcccttttcattgccaccaacatttgtgaaagcattatctggaaggcatttagcccaactaccatcaacaccgggcgtggagctgagtttgaaggtgctgttattgcactgttccatatgctgataaccaagtccaacaaggttgcggctctccgccaagctttctaccggcaaaaccttccaaatgttaccaacttgcttgccacagtcttgatcttcctgattgtgatctacttccaaggtttccgtgtggttttgcctgtgagatcaaagaatgcccgtggacaacagggttcttacccaatcaagctgttctacacctccaacatgccaatcattctccagtctgctctcgtctcaaacctctacttcatctctcagcttctctaccggaagttcagcggaaatttctttgtgaacctattgggacagtggaaagaatctgagtacagtggacaatctataccagttagtggtcttgcatatttgatcacagctccagcaagtttctctgacatggcagctcacccgttccatgcactgttctacatcgtcttcatgctcactgcttgtgctcttttctcaaagacatggattgaagtctctggatcttctgctagggatgtagctaagcagctaaaggaacaacaaatggtgatgccaggacacagagaatcaaacttacagaaggaactgaacagatacatcccaacagcagcagcttttggaggagtttgtatcggtgcacttacccgctttggctgatttcatgggagccatccgggtcggggacccccattctggttggcgggcacgatcataataccagaattccngacctttnagaaaggaaaagccagtgnacccgggttctncggggncaaagtacctaaagaaggggaaactttgcctngggaaaannngnnaaaagnttacgtntgnncnccaaaaanaattttggggncttgggnancactttttttc

SEQ ID NO: 101004 - DNA, 439 bp, Arabidopsis thaliana columbia
acccacgcgtcaagcgacggcaacgaagacggcgaagaatacggcggacacgaggattcccaacgatcagattctttgacattccacggcggcttagatatcagcttctccgatccgctctctctgtttgtgtaaatcatggtgatcgcggctgcttcctctttttccctcggtccatctcattgccatcaatcttacacggatgagttctcttcctccataccttacaaaagaaccagcaatgcaagaaatcgtgtgtttgatggatgtggctctgctaatctctctgttttaagttccagatgcaagattcctttttttggatcagcatttcatgtatcatccggtggacatgatctcggcctcacgaaagtttcggttgctgctgattattctgattcggttcctgattcatctttctatggatatcatcctctag

SEQ ID NO: 101005 - DNA, 1329 bp, Arabidopsis thaliana columbia
acccacgcgtccggaaaaatcaagaaaatgtctgaatcaaggagcttagcctcaccaccaatgttgatgattcttctcagccttgtaatagcttccttcttcaaccacacagctggacaaatcggagtatgctacgggatgctaggcgataccttgccaagtccatcggacgttgtggctctttacaaacaacaaaacatccagcgaatgcggctctacggccctgacccaggcgctcttgccgctctccgtggctctgacatcgagctcatcctcgacgttcccagttcagatcttgaacgtctcgcctccagtcaaacggaggccgacaagtgggttcaagaaaacgttcagagctacagagatggtgtcagattccggtacatcaacgttggaaatgaggtgaaaccctcagttggggggtttctcttacaagcaatgcagaacatcgagaacgcggtttctggagcagggcttgaagtcaaggtctcaacagctatagccactgacaccaccactgatacgtctcctccgtctcaaggaaggttcagggatgagtataagagctttctcgaaccagtgataggtttcttggcaagcaagcaatctcccttgctcgtgaatctctacccttacttcagctacatgggagacacggccaacatccatctagactacgctctgttcaccgcccagtccactgttgataacgatccagggtactcataccaaaacctattcgacgcaaatctcgactcggtttatgcagcattggagaaatcagggggcggatcgttggaaatcgtggtgtcggagaccggttggcccacagagggagcagtcgggacgagtgtggaaaacgcaaagacttatgttaacaatttgatacaacatgtgaagaatggatcaccgagaaggccagggaaagctatagagacttatatattcgctatgttcgatgagaataagaaggaaccaacgtatgagaagttttggggactgtttcatccagatcgacagtctaagtatgaagttaatttcaactaatccttagagacttgtgggctttttatgtaagcgtatttaaaaattgggaacttgttgtagtaataaggaataattaatgcgctttcatgcgtgtagtatgttgttatttttaaggttataaatgaagctgcaagcataaataaggaaaaaaattagcatgggcctataggcccaataattaaacaagcttgcttagggaatgtgagacccaaaattttgtggaattcttgttagcaaaatgtttttgagtatgcatgatgcgatgagtcatcttggcgaact

SEQ ID NO: 101006 - DNA, 642 bp, Arabidopsis thaliana columbia
  unsure (1)..(642): unsure at all n locations
atgaannnnnnnnnnnnnnnnnnnnnnnnnnnnnnnnnnnnnnnnnnnnnnnnnnnnnnnnnnnnnnnnnnnnnnnnctttttgttttttttttattcaatattacaatggaaaattagttgaaaaatatcaaaaacatcattatattacaaagagtaaatcgattattatattataacacctaacagaggaacgacacgtataattcaaccactaataataaaagagctagaaaacggtaacaatttctaagcaccacgtgacaagtccacgacacgttccaaaaaccgttgacactccttggtgactctgcaaagcgactcgtgcgccaaaccaccaccgtcaatgctcagtgacatctccgccgagtctctcaacttcttcactttccttctcatcgcttcaccttccttctcagtcataaccttcctcaccaacgcctcaatcttccacctagaaatatcctcctttggatcatccaatctgactgcgattcccagttcgtcgctgagcaacgccgcattcatattctgctcggcaaaaagtggccatgcgatcatcggaacgccgccaacgacgctttccaacgtcgagctccaaccgcaatgggtcaaaaacccaccaacgccccgatgggacagg

SEQ ID NO: 101007 - DNA, 510 bp, Arabidopsis thaliana columbia
  unsure (1)..(510): unsure at all n locations
aannnnnnnnnnnnnnnnnnnnnnnnnnnnnnnnnnnnnnnnnnnnnnnnnnnnnnnnnnnnnnnnnnnnnnnnnnnnnnctttttttttttttttttcaaaaaatcagtttatttagaaacagagtaattacaaagaataatagtgtgttttgtttgtttgactaaaatgatttcttcacattcttcaaatgcattgaagaatcgacacaatttgtcttctcgatctcgtttctacaacggtttaaattccgcaagagctcgctcgctttctccttcgtcttatcctcgcacccgacttgtaagagcactaagagtttctcaaaggcaccaacttgaagagcttcaactaacaaacgatcatcacattctccgtctttcttattcttccatagcttccaaagtatcgaaaccgaacattgtgtcccgagatccgaaactctaagaatcttcttcaccagaagaggaacgatcaaagcgtttctaagaacatcttctttgccttggctcg

SEQ ID NO: 101008 - DNA, 494 bp, Arabidopsis thaliana columbia
  unsure (1)..(494): unsure at all n locations
nnnnnnnnnnnnnnnnnnnnnnnnnnnnnnnnnnnnnnnnnnnnnnnnnnnnnnnnnnnnnnnnnnnnnnnnnnnnnnnnnnnctcaaaagcctgacgtatcagtgacacatttaacctcaaatggagttgacaaaaaacatcattcatctttaatacttattgacggatatgtcattatcaagtatcaacctatttttctatttatttataatttcaaaacctataattatcaacatagagttttggaatcttgaaaccggggaatgattcgtccttgctcctatgtgatgacgagtggcgccggaggaaccgtaggctgtagcggtgaacaatcccagtctttaccgtttttgaccactaagaaatgtttgggaacccatgactcaccagaagcctttttttgttttaaagacgctttttgcttctcctccacaactatcttagcttcttttgctctttcccaatctttcttcagtattccttcacttactt

SEQ ID NO: 101009 - DNA, 523 bp, Arabidopsis thaliana columbia
ccagctctcttctactcacttatggaaagctggtcacgcctgcaggtaccggtccggaattcccgggtcgacccacgcgtccgcccacgcgtccgtgagtttctacaggtcagattccacccgcatcattcagaaatagttgcgagtggaagtttagatctcgaggtccgcttatggaataccacaacttctgaatgcattagatctcatctattctatcggcctattgcttctatcgctttccatgctgagggtgaactacttgctgttgcttctggtcataagctgcacatgtggcactacaataggagaggagagggatcatcaccaactgttgtattgaagacgaggcgatctttgagagctgtacactttcaccctcatggggctccattacttttgaccgcagagtggcaggtgaatgacattgattcattagattcctcaatgtctagagcaacatctatgggctacttgaggtatccgcccctgctattttgttcacaagcacggaaagcaatcc

SEQ ID NO: 101010 - DNA, 529 bp, Arabidopsis thaliana columbia
  unsure (1)..(529): unsure at all n locations
ttgnnnnnnnnnnnnnnnnnnnnnnnnnnnnnnnnnnnnnnnnnnnnnnnnnnnnnnnnnnnnnnnnnnnnnnntcccctttttttttttttctttttattaagaaatcagtacattgagaatcagagtttacaaatatcaagtgctgacctttttttactcttaaggagaagcaggttcaacaacaactacacacactttgcaaagcaactgaagaataatcaagcagccgctacaaccaaatatttaatgcacaaaaatatacaagagcttgagagaagactcactgatgaactataagctatgagtgtgcccatacacgagacagatagagagatcacagaaggtttagggttaccagaatttcccaacagacaagtaacgagatcccaacagcaacgatcaaagcagaacatctggctcggttaaactacctgaaaagttaactttacaacattttgggaactccaaaccagcttcactgcatctcacttctgtcacatgtgggagagaccttacatctatatac

SEQ ID NO: 101011 - DNA, 540 bp, Arabidopsis thaliana columbia
  unsure (1)..(540): unsure at all n locations
cagctctcnnnnnnnnnnnnnnnnnnnnnnnnnnnnnnnnnnnnnnnnnnnnnnnnnnnnnnnnnnnnnnnccacgcgtgggattcgagcaaaaaacaaaagaaatggttatggagcaagctggaacgacatcgtattcggtcgtgtcagagtttgaaggaacaatactgaagaacgcagattcattctcttacttcatgctcgtagccttcgaagcagctggtctaattcgtttcgctatcttgctgtttctatggcccgtaatcacactccttgacgttttcagctacaaaaacgcagctctcaagctcaagatttttgtagccactgttggtctacgtgaaccggagatcgaatcagtggctagagccgttctgccaaaattctacatggacgacgtatgcatggacacgtggagggttttcagctcgtgtaagaagagggtcgtggtcacgagaatgcctcgagttatggtggagaggtttgctaatgagcatcttatagcacatgaggtcatcggtacggaactgattgtaaacc

SEQ ID NO: 101012 - DNA, 405 bp, Arabidopsis thaliana columbia
ttaaatttttctagaaacgtttcttgtgtaaacacacacatatgcaactgtacaacatcattgaaagcttatatccataaagaacacaataatcttacatctttgtccacaaaaagaacattagaaaagtccaaactctgagtgattgcgcgcggagatgccccctgaaaaacttataacatttgtaccttagtatccccggaacctgtctttgtcctgactagaaactggacccctcaaacctgctttacccataataggatcttcaattgaaccaaccttggggcccacatggcttggatcccctctattcgaaccaaccatacgattttgctcatctttaacttactaaaacaaaaagcccaacacctgggggggtttcttcttattatcgaaaaaaaaaac

SEQ ID NO: 101013 - DNA, 572 bp, Arabidopsis thaliana columbia
  unsure (1)..(572): unsure at all n locations
tttgcccgtttcacttcttttgctcaaggctgatgctactgtcacaactgtacattctcacaccaaggatcctgaggctatcatacgggaagctgacattgttattgctgcatgcggacaagcccacatgattaagggcaactggataaagccaggggctgcagtaattgatgttggaactaatgcagtcagcgacccgagcaagaaatcaggataccggttggttggagatgttgatttcgcagaagcttcaaaagttgcaggtttcataactccggtccctggtggtgtaggcccaatgacagtggcaatgcttctcaggaacaccgtagacggtgccaagcgtgtctttggcgagtaaaacaatctactgtatgtaataaagaaaccaagagtttctccattctgtaattgtgtacttggcttgacgatatttttccactcaaataaattgaaattggcgttccctttggattaacaaaaaaaaaaaaaaaaagnnnnnnnnnnnnnnnnnnnnnnnnnnnnnnnnnnnnnnnnnnnnnnnnnnnnnnnnnnnnnnnnnntcgtcctaa

SEQ ID NO: 101014 - DNA, 614 bp, Arabidopsis thaliana columbia
  unsure (1)..(614): unsure at all n locations
aatgnnnnnnnnnnnnnnnnnnnnnnnnnnnnnnnnnnnnnnnnnnnnnnnnnnnnnnnnnnnnnnnnnnnnnnnnnnctttgtttttgggttttttttttcttggggggggagattcatccgtagaactaaaaagctcatttcaactatatatacatcagagtgtgctcttttaccttagaactatcggagcaaatttacatatcacaaagaggaatcttattgtgagagccaaaataaaaagggagggggtaaacaccttagaacaccacagaagagaaggtcttttaccttactatggatacccatcagcggtataaaccctgaccgcgctggtcaaaccgcaactatggaacaactataggtctactcactctcattccttcaccccattgggaggaaaactctagcgacagatagataaaactatctcatatctgtgtgttgaaagcttggttcgttatctccggtggttttgcctgattcttgggattgatgggggtttttggtttaccataaanccagagggntcnaggngnagaattacctcagctccttcnggaagganggaattaattcnggccactgangaccttggntgnccnttgngcagt

SEQ ID NO: 101015 - DNA, 780 bp, Arabidopsis thaliana columbia
cgtgacgtcgcatgcacgcgtacgtaagcttggatcctctagagcggccgccctaaccttttagattcttccgtagaaccaaaaagctcatttcaactatatattcatcagagtttgctcttttaccttagaactatcggagcaaatttacatatcacaaagaggaatcttattgtaagagccaaaattcaaaataaaaaaataaacaccttagaacaccacaaaagagaaggtcttttaccttactatggatacccatcagcggtataaacccttaccgcgctgatcaaaccgcaactattgaacaactaatagttctactcactctcattccttcaccccatttggaggaaaactttagccacagatagataaaactatctcatatctgtgtgttgaaagcttgattcgttatctccggtgttttgcctgattcttggattgatggggttcttgatttaccataaaccaagagggctctaggggtacaaatacctaagcttcttctgtatgtatgtatatatttcagaccaactggaaaactttgattgacccattggagctaactgaaacaaccatattcgagcttttttagcacaaacgcttgaaaagaacaggggggtggcctgctctattttcgtacccggaaatggggatcaaatggaaccaacactttgtaccgaaggttatattgggcatgggggaaggaggacccgggaggatatgggcaataaaaaccttcaatttggtctttcaaaaaggccaccaaaagtctattat

SEQ ID NO: 101016 - DNA, 452 bp, Arabidopsis thaliana columbia
  unsure (1)..(452): unsure at all n locations
annnnnnnnnnnnnnnnnnnnnnnnnnnnnnnnnnnnnnnnnnnnnnnnnnnnnnnnnnnnnnnnnnnnnnnnnnnnnnctttgggttttttttttgaaatcaaaatgacacgtcaacttttattaaaaagaacttgtgtttgagactttattgaaatgattgagaacaaacttgaaatcacagtaagtgttacattgcgagtcctagtcgatgggatggatcaaaatctttgcaaataaaacaggaggcatgtattgatagtgtaaactgagaccaccaggcttgggtaaattactcgctcacaagaaaataaaagccattcactctttctgatgggcgggctttcatcaaccttctccaagagggttggattttttagtgcaccccccacaccttctttaatggttaagtggttaattaaatgcattttttggtgcataaaaaccaaggg

SEQ ID NO: 101017 - DNA, 979 bp, Arabidopsis thaliana columbia
ggcacgagctcgcgcgacacacacaaaaaacccataaaaaaatatggcaaatatctccagtattcacattctcttcctcgtgttcatcacaagcggcattgctgttatggccacagacttcactctaaggaacaattgccctaccaccgtctgggccggaactctcgccggtcaaggacccaagctcggcgatggaggatttgaattgactccaggtgcttcccgacagctcacggctcctgcaggatggtcaggccggttctgggctcgtacaggctgcaactttgacgcctccggaaacggtagatgtgtaaccggagactgtggcggtctaagatgtaacggcggcggagttcctcccgtcactctggctgaattcactctagtaggcgatggcggcaaagatttctacgatgtgagcctcgtagatggttacaatgtcaagctggggataagaccatccggaggatcgggagattgcaaatacgcaggctgtgtctctgacctcaacgcggcttgccccgacatgcttaaggtcatggatcagaacaatgtcgtggcctgcaagagtgcctgtgagaggtttaatacggatcaatattgctgccgtggagctaacgataagccggaaacttgtcctcccacggactactcgaggattttcaagaacgcttgccctgacgcctatagctacgcttatgacgacgaaacgagcaccttcacttgtaccggagctaactacgaaatcactttctgcccttaaaaaccgaagcttcgagttagatacagtcgggtttaattatctctcacgtttcttttgcttattatgtacggaaagataaataaggaaagctgatgactatgaatcatcgtcttccacttttaagcttttttagtgagtattagtcagttgttacactcagctgatttgtttacaaagaaataaaacaaaatgattgatctaaaaaaaaaaaaaaaa

SEQ ID NO: 101018 - DNA, 509 bp, Arabidopsis thaliana columbia
tgaactatagaagagctttgacgtcgcatgcacgcgtacgtaagcttggatcctctagagcgggtcccctttgggttttggtcttttgctaaattgcattatcatatgcttagctatatatgaatgaataaaagtcttataattatgatgtgtgtacaactacaaagttttccttggagtatagtttgaggatttatccagaagtagcagaagaagcagctacagactcggagagttcttccatgagttccttttgctccaaagcagcacaagcctgcactgcgtcctctaaagcaccgtcaagaaatgttgtaagcgcaaagttcatctttagcctatgatcagtcactctactgtccttataattgtatgttcttatcttttctgaacgagctccagtcccaacctgagatttcctttcattccttatcttctcttgttgttcccttacttttatttcatacagttttgctcgcagaagctggaaagcacgcgccttattcctaatc

SEQ ID NO: 101019 - DNA, 465 bp, Arabidopsis thaliana columbia
  unsure (1)..(465): unsure at all n locations
gtttcgcgtctcttctcttctctctcagaaaatgctcatcagaaattgtctcctttttgtttccttgatgtgttttctcttctaatctccggtgaaacaaagaacaaaggattcataagacacaaagcagagaaggagagagagatacgaggcttttcttcatctttatggcttctatgaccgagaaggaagctatggtggatccttttctggtcgaggctcttcaaaatcctcgtcatcgtctcaccattttgcgaatggagcttgatatacagaagttctttcaaaaccctgagcagcttcagttcgaattcccgccttttccaacatcgtacctgcgtcttgctgcacatcgagttgctcagcattatggactagtaaccatggctttggacaatggtactggtgcaggagatggatccgataacagaatcctcgtgacgaagaccagcggaaaagnggntt

SEQ ID NO: 101020 - DNA, 924 bp, Arabidopsis thaliana columbia
  unsure (1)..(924): unsure at all n locations
cgccnnnnnnnnnnnnnnnnnnnnnnnnnnnnnnnnnnnnnnnnnnnnnnnnnnnnnnnnccgagacagagagccacgcgtccggagagagagagagagagagataaagggtcgataaggtctttttccgtttccttgacctctctgggatttggatttcgatttggatttcgatttcctcatctcatcgatttgcttctcaatctctccaattcgattctcctctggaaatttcaatcctttttatattttccttggtgatttctaagataattaagatcgagaaaaggagaattttgagagagaaagcatccatccatcgatggccgctatgagcgacaaggaagctatggtggatccttttttggtcgaggctcttcagaaccctcgtcatcgtctcaccattttgcgtatggagcttgatatacagaagttctttcaaagtccagagcagcaacaatatgagttccagcctttgcctacatcttatcttcgtcttattgctcaccgtgttgctcagcattacgggctatttaccactgctttagaaggtggtggtgttgatggctcagggaacagaatcctggcgaccaaaacggttgaaagtagatacccttacgtctgtttgtctgagattcctgtaaagcaacctgagattcatggtaggcctgagggtttcaaaatcgccatcaagcctaggcctaacagaggagctggtgggagtggtaggggatcaggagtagagaagaatcttttgagaagcgttgaggagagaaaagaagaagatgataaagctcggggctcgatcttcacagccctaacagttcagactctgaagattgcttaacacgagctcctcctcctcccactttttgtaagtnnaaaaacacatngttttaancccggattttggcctcaangtgg

SEQ ID NO: 101021 - DNA, 433 bp, Arabidopsis thaliana columbia
ggtcgtctcttctcggtttacctcaaatgtccttactaccacgggtattttccgatacagtaattctgctggtggtgtttctggacctattcctggtggacctaccattcaaatcgactggtccttgaaccaggctcgagccatcaggactaacctttcagcgagcggaccaaggccaaatccacaaggatcgtaccactacggtatgataaacactacaagaacgatcagacttgctagctctgctggtcaggttgatgggaagcaacgatacgctgtgaacagtgtctcattcaaacccgcagacactcctctgaaaatcgcggactacttcaagattgacggtgtttacagaagtggaagcatacagtaccaacccactggtggaggaatatacctcgacacatctgttatgcaagttgattacagaacc

SEQ ID NO: 101022 - DNA, 1336 bp, Arabidopsis thaliana columbia
  unsure (1)..(1336): unsure at all n locations
ctctttttaatacgtgccgactcttctctacataaactctacacccgaatctgtgtcttagagttagagagagagagaccacgccagatatacctttcttgtttcaccggttttcatacacaaaaatggcgggcagtgcctcattcgccgccgcattattcatcggactctctcttctcttcgccgtcacggctgaagatccgtacagattctttgaatggaacataacttacggcgatatatacccactcggtgttcgccaacagggtattttgatcaacggggcgtttccgggaccggacattcattcggttactaatgacaatctcatcatcaacgtctacaatagcctcgacgaacctttccttctttcatggaatggaattcaacagaggaggaactctttcgttgatggagtgtatggaacgacatgcccaatcccgccggggaagaactacacttacattcttcagatgaaggatcagatcggaagtttttactacttcccttctctcggctttcacaaagccgccggtggatttggtggcattcgtatcctcagtcgtcctagaatcccggtccctttccctgatcccgccggagataccactgtccttatcggagactggtacaaagcaaaccacacggatttgagagcacagcttgataatggtaagaagcttcctttaccagacggcatcctcatcaacggtcggtcaagtggtgcaactcttaatgttgaacaaggtaagacatacaggtttagaatatccaatgtagggttacaagactctctcaacttccgcattcaagaccataagatgaaagtggtggaagtcgaaggaacacacactcttcagactactttctcttcactagatgttcatgttggacaatcttactcagtccttgtaaccgcggaccagactccacgggattattacgtggtcgtctcttctcggtttacctcaaatgtccttactaccacgggtattttccgatacagtaattctgctggtggtgtttctggacctattcctggtggacctaccattcaaatcgactggtccttgaaccaggctcgagccatcagggctaacctttcaggcgagcgggaccaaggccaaaatccacaaggatcgtaccacttacggtatgataaacacttcaagaccggtcaagacttgctagctctgcttggtaaggtttatgggaagaacggtacggtnttaacagtntttatttaaaccggagaaatccnttgaaatcgggggtntttaaagttncgggttttaaagagngggganaaggccancccctggggggntntcctttc

SEQ ID NO: 101023 - DNA, 462 bp, Arabidopsis thaliana columbia
ctatagaagagttatgacgtcgcctgcacgcgtacgtaagcttggatcctctagagcggtcgccctttttttttttttttttaagcaacaaaacagatcgtgtttctatcgaaattgttatacaagaggttctgtatgatgaaagttatggacaagaagcatctaaaaccttatggacaatgggacgagctttacacatagcttgcaacgatgtagctttgcgcatcgtggttcctttttcactttctctcatgtctagatacttttctccaactctctcccactcaaaacattgtaccaacgatcctagagccaaggtcactagccgttgagctagccctgaaccaggacaagatcgtcgtccaatcccaaatggcatcaactttttatcctctccttttttctcaaacctctccggcttaaaatattttggctcttcccataactttggatctctatgga

SEQ ID NO: 101024 - DNA, 624 bp, Arabidopsis thaliana columbia
  unsure (1)..(624): unsure at all n locations
taggtacactatagaagactatgacgtcgcactgccgcgtacgtaagcttggatcctctagagcggtcgcccttagtgtttaatcctttttttttttgggtcaaatgatcaatatatatatatatatatatgttttcatgtaatgttacattgggatatatgcacatgctccggtaatggaaaacagagataacacagccagctttgttttatatatatagtacacagctcaaacaataataatcttctctagctctgataatttatcaatatttctgctactaattctcttcggttttttatttacaatgccgggccctcatgtgtttcagttgtctttccctccttgtttatctgtcatgtgggaattctaggtcgttttccaacaccttgaagtgttgtggctgctgcccagagcaatggaggttccacattttgaagtatgacctctccagattcttcacccaacgcatggtgtcgaatagaggacagggtaagcggctagcccccattccctaaggcagggccgaagttttgggttgtcagggccaagaganagcttcncttcgacncccaagtggtaaancacccatggccaacagtgaagggatggcagcccggtgc

SEQ ID NO: 101025 - DNA, 646 bp, Arabidopsis thaliana columbia
  unsure (1)..(646): unsure at all n locations
gacgtcgcatcgccgcgtacgtaagcttggatcctctagagcggttccctttttttttttttctgagatttaaagatctttatttcataaagtcatgtagtaatatattctccacaaatgattgattacaagagcaaaataaaccacacataatttatatgatatgataaagtaaacactcacatatacaaacacacataagatatctcacttctgtttcaagaaaaacaaaagtctagaaacaacattttttgtaaaataaaacaaagtttggaaacatttttcatttggttcttaaaacttagagaggtttgacattgaacctgtaaacgagcttcttcttcttagaggttgggttgtctactgtgagtaaaaccttgccaagctcattcactttgaagctatgggtgtaacaccggttcatcggatgggtctcatcttcctcggtttttggtataaccaccgtggtaagcatctttctcttccggganaaattcagcctggagcccattccatcccggtacccttatcnccnaaaaaggtcncatttcccaaaggttaggtncccnagttgttttntccnggggtaaaagggtcccggggggacnnccaggaaagntggttgngcgagggaanccancccatt

SEQ ID NO: 101026 - DNA, 524 bp, Arabidopsis thaliana columbia
  unsure (1)..(524): unsure at all n locations
nnnnnnnnnnnnnnnnnnnnnnnnnnnnnnnnnnnnnnnnnnnnnnnnnnnnnnnnnnnnnnnnnnnnnnnnnnttttttgggttttgtttttttttttttttttggagaggaacaatataaacaatatacgtgacacttaggccgaagctttacttgcttaaagtatgtatggtcaaatttagaatacaaaggtggcaaaacaacttttcacacaaaaagaagaaacaggataaatcaaagactcacaaaacgaaaacaaccgttgttctttgatttggtcggatttagttacagaggcttacttggtgagtttgaagtacaagatgatgaaaatggcggcaatcaatgcgatgatgatggctccaatggtccatttgttcttgttcatcctcctcggcatgtctggcaagatcttcttgctctttccaatgttatcgtctactccatgaagcgtttcgtgggcacgtaagagagactgtctctgaccgtgcaagtcttggaggattgaaacaccgatttctt

SEQ ID NO: 101027 - DNA, 669 bp, Arabidopsis thaliana columbia
  unsure (1)..(669): unsure at all n locations
nnnnnnnnnnnnnnnnnnnnnnnnnnnnnnnnnnnnnnnnnnnnnnnnnnnnnnnnnnnnnnnnnnnnnnnnnnnnnnnnnnnnatcacgtacctactaatttccaacacagtgggaccgactcttattacatttttttctgactccaatatttatagatactacaaaagcattgaaaactgctaaaacacaacattttttaccaaacaaaaacatatacacagtcttaaggtttacagttaatatggctcatgcgccttagagtaaacctctttcacagagagaagctttcattgctttcagggattcttccatatcatcacaaatcttgtgagggtctgatatgacggtaggatcatacgccaacgaaattatcattttatccgcgtaactcattaaatgtatcaacaatgcatgtgagtgtccgtaagaacttggagcgatgtaagagacaggatggccacggaaactgatttcttccatggggccaatgacgtttgggacacatgtcggtgggggttccncancgggcggaccaaataattcctgctgccgncttggnggcaaacacttttnggagganttgggngntaaaatcantagagccgcggngataggagggttcctncnngccacaaggttttggganttttnnnttnncccngccgg

SEQ ID NO: 101028 - DNA, 595 bp, Arabidopsis thaliana columbia
  unsure (1)..(595): unsure at all n locations
nnnnnnnnnnnnnnnnnnncgtnnnnnnnnnnnnnnnnnnnnnnnnnnnnnnnnnnnnnnnnnnnnnnnnnnnnnnnnnnnnnnnnnnnnnnnnnnnnnnnncacattaaaaaggttttaagaataatgaatttgacattttttttctgtttcacataaatttgatgtaacaagagaggtaccaaataagttcatctaaataaatatatatacattgttgaatcaacaaacaaaaaaatctcacctagtttcatcagaaaaatcttctgatcaacgaagttgatcgattcataactctagtttcaccatcactatccaaatcaataacattcgaattcgaagagccacgacttggtctaactcttctcataaacgaaaccattccacgaacagctcttctcaatctaccaccattaccagaacgaccaccattcctactcatctccggtgtctcatgagctctaacccaagatatccttctcggtccttcattactaccaagtccaccaccatccatctccgtcaataccaccgggaatatcctctcaccttctcttactcccgcgttaaacctaccaacagcgaaaccaccacc

SEQ ID NO: 101029 - DNA, 537 bp, Arabidopsis thaliana columbia
  unsure (1)..(537): unsure at all n locations
nnnnnnnnnnnnnnnnnnnnnnnnnnnnnnnnnnnnnnnnnnnnnnnnnnnnnnnnnnnnnnnnctttttttttttttttttgagtacaacaggtccacgttgtagaaagaccagttgtaatcaataaagtcacatcaaaataaatactttattccctcaacacatcattaactaacctcacacaactcatcaaaatattctattacaaaacaaaacaactattaaacagctaattacttaattagtaaagttacttataactccactaggctccatcgccttagcttccggtgccgggttcacatccttcgacggcgtaaccgccgttccagtaagctccagcggtaaatcattagctaaccctttaaggtaaaaagtgtagaacagttttgtcggatacacaagctgacgaagcttaacctgtccgtacgcaccttcaaagattccagagccaccagtgacagcgaggaacgtgtcttcataagtcaagtattgtccttgtacagacaagtgaccatagtcaccaaagtagaagc

SEQ ID NO: 101030 - DNA, 1309 bp, Arabidopsis thaliana columbia
ttcctcgccgccgcctcctactctctctttctctctaaattgctcaattctctcggccacagacctagacaaggatggtgactaaagcagaaaaacaattcgccaaaaatttcaacatagacgatctccctgacgtccctgccggacttcctccacatctcaaagcccagcaaactcgtgtcgtctctaaaaacaacgctcctgctcatactgcgagtgccatttactcgggtacctatgtttcttctacggaagaggacgacaatgtgaagctaggaaacttctatgataacttcaaagttgatgtggttagtctcacaaagacagatatggaatttgatatgattggtattgatgcagcgtttgccaatgcattccgaaggatccttatagctgaggttccttcaatggctattgaaaaagtgttgatagcgtacaacacatcggttattatagacgaagttcttgctcacaggatgggtcttattccaattgccgcagatccacgactttttgagtatttatccgaacatgatcaggcgaatgaaaagaacaacattgttttcaaactccatgtgaaatgtccgaaaaatagaccacgtcttaaagttttaacgagtgatttaaaatggttaccaaatggaagtgagcttctgagagaatcggaaaataaaacctcaaagccaaaaacttacacttcattcagttgcagccaagattcattacctgaatttgctaataatcctatcactccatgcgacctcgatatcttgatagcaaaactcgcccctggtcaggaaatcgagctcgaagctcatgcggttaagggcattggtaaaacacatgcaaagtggtctccagtagggactgcttggtatagaatgcatcctgaggtggttctacgtggggaagttgaggatgaacttgctgaacgacttgtaaacgtctgcccacagaatgttttcgacattgaagacatgggaaaaggtaagaaaagggcaacagtagcgcagccacgtaagtgcacattgtgtaaggaatgcgtaagagacgatgatttggtagaccatgtggatcttggcagtgttaagaaccattttatatttaacattgagtccaccggatcactgcctccagaggttctcttcactgaagctgtgaagatattggaagctaaatgtgaagctataaccgacttttgagttctggtttagttcaattttgaattgtctgtctatcaatgtttctcctcctattgataaattaccaacaaacaacattgacatatttatttatacggttgttgttc

SEQ ID NO: 101031 - DNA, 821 bp, Arabidopsis thaliana columbia
  unsure (1)..(821): unsure at all n locations
nnnnnnnnnnnnnnnnnnnnnnnnnnnnnnnnnnnnnnnnnnnnnnnnnnnnnnnnnnnnnnnnnnnnnnnntcgcgatctagaactttttttttttttttggatgtaaagccttactcatatattctaagattgtcaacaaacataagatctctctttgttacaattttccgtggtagatatacaaacataagatctctagtctctgatactttctctgtgattggttaaacaggagtgatctggtctgtaacagaagctaaaccatgcattaacctgacaatctcagtagtgtcatccaggtaatacttggccttgctaggcttttgacccgacagtacaagcgaaaatctcagctcttggggcaatcgaagggccttcagtggaactgcagatcacctcaaacatgtcttcgtcagaccggtcatctccaatacatagaacaaactcaggaagtgttcctctttcttgcatcatcgaaagcatccttctcgctataagtccctttctcacgccctgtggcttgacctcaacatagttctgtccgcgtttcactgttacaggttcattggcaaggacactttcaagatgatctagaagttccttagcttgacatgagccaaaatcagggtcagcatcctcataactccaaacaagagcagtctccttgtcttcaattgttgagccatcggttgtctcggtgtagagttccatcacaggctcggcaatttgcttccaagaacaatctactgctgccacacagttttcccactctactgccttccttagcctgtgtagtagcggacgcgtgggtcgaaacg

SEQ ID NO: 101032 - DNA, 510 bp, Arabidopsis thaliana columbia
  unsure (1)..(510): unsure at all n locations
nnnnnnnaggggacttataaaaaactttgacgtcgctatgcacgcgtccgtaagctgggatcctttaaagcggccgctctttttttttttttttttttttttttttcacactaatcaccttataaaactaatatataaggaatttgtaaaatactgaaacttatgttatacaattgtcactccctattaacaccgaccaaatagattttcatgctccttctaacattcctaaccaccaaagaaaaagaaaaaacacatttacattagatctatccctttgatttcccagggttaggtatttccaacaggccatccgcaacattctcatccgctgcggtatgttgataatgacgatgagaccacggaatcgtgctaaccgtcggaaagcaacacttgcacccatcaggacaaggtagctccggtagagtttcactcttcttgggggtccttccgtcgtgctggtgctgcaacatggcctcccaaagcggtccccaacattcgaccttgttg

SEQ ID NO: 101033 - DNA, 599 bp, Arabidopsis thaliana columbia
tctacgactcacttagggaacgctggtacgcctgcaggtaccggtccggaattcccgggtcgacccacgcgttcgcccacgcgtccgcccacgcgtccgatgggattgtgtaagcttgaaacttgactatctgggtctctcccattttctgttctcttttgtattctgagtgaaagttttgttttctgggggaaaaaattagggttcttagatggaggagatagaaggaacaaacagagcagctgttgagagttgtcatagagttcttaatcttttacatagatcacagcaacaagatcatgttggttttgaaaagaatttagtatctgaaactagagaagctgtgattaggttcaagagagttgggagtttgttaagcagtagtgttggtcatgctaggtttagaagagctaagaaacttcagagtcatgtctctcaaagtctcttacttgatccatgtcaacaaaggacaacagaagttccctcatcatcttctcagaagacaccggtactccggtctggtttccaggaattgagcttgagacaaccttcagattcactcactttagggactcgctcgtttagtttaaactcaaatg

SEQ ID NO: 101034 - DNA, 492 bp, Arabidopsis thaliana columbia
acggcgtctctccggactcacacctcatcgaaatttggccatctcatctggcttcttcccctccggcgttggataaccatcattacttctcgcgccggcttcgagtggaacaatatggatcctcgtcaattcgaacacaccgttgttgctgataatgatattcacagcattgttatgtcatatcttctgcacaactgcttcaacgaaactgcggactcacttgcttcttccactggagttaagcagcctgcaattgatcgtgataacatggagagaagaaaacaaataatacattttatactggagaggaaggcgttgaaggcttttgaactaactgaacaactagcacaagacttgcttgagaaaaacaaggatttgcaattcgatcttctatgccttcattttgtggagctaatctgtgctgggaactgcaccgaagctctcaaatttggtaagacaagattggctccttttgggaaggtcaaaaaatat

SEQ ID NO: 101035 - DNA, 795 bp, Arabidopsis thaliana columbia
ttaggtgcacactatagaagagtttatgacgtcgcacgcacgcgtacgtaagctcggaattcggctcgagatttgcaattggatcttctatgccttcattttgtggagctaatctgtgctgggaactgcaccgaagctctcaaatttggtaagacaagattggctccttttgggaaggtcaaaaaatatgtagaaaagcttgaagacgtaatggcattgctcgcttatgaagaccctgagaaatccccaatgttccatcttttgagctctgaataccgccaacaagttgctgataatctgaaccgcacaattcttgaacacacaaaccacccgagctacacaccaatggaaaggatcatacaacaggtgacagttgtgagacaatacttgactgaggagaatggcaaagatgcgtttcctccattctctctgaaggattctctcaaaggctaagatcgcaggactactccaaagtttgctaggaggaggatatgctaagcattgtcatgtaaatacaaaaagaccttgctcctctctaaagtttgcaaggttagtcttccatggccacaggcggggtttcagtttgctgttacaggagatcaatattgtgaaggacagtttcggcttggtttggtttggtttggttcagttctctaccagaagattgtttcatcaactttgtgtgagtttagtcgataaatctgtaatccatatctttggaatacacatttctctttgtaactatcgtttatgttttgatagaatacttgcaaattcaagggttttatttttagg

SEQ ID NO: 101036 - DNA, 474 bp, Arabidopsis thaliana columbia
  unsure (1)..(474): unsure at all n locations
aggtacgggtttaaagggggttgaatgaacagnacntngnccannagganccatgnaaaaactaccaaaaaggagaaggaaaaccctctcaccctcctccaccttctttcacttcttccacgaaaaccttggaggataaagcagctaaagccccaggttgattgtgaggttcaaccaaagagtaaggccgtttctttagacctactganaaaggtacatcagactcatcaagcttgtctttgctctcagatgaaatgtagtcgcctttcggattcacctttctccttagttctcctgttgaagtctgtgcgcttaatcttgatgtaccctgtccaatcatgatccactcgttatcttgccaagattgtctaacccgaatatcggatttagtcaccttgaacttcagtgaggaaccaagtaatctnnccaagaaacaaccgtttcctaaaaccttggaaacgattgccatcttcc

SEQ ID NO: 101037 - DNA, 1171 bp, Arabidopsis thaliana columbia
  unsure (1)..(1171): unsure at all n locations
ccccccctgattgaggggggaaaccataggctggttatcgatttcggggccgcttcctaggccttccagttcatttttaattccatgtttggattaataggaaccagattttcttctagattggtattccctttatcaaattggtttcgtaagaaccattaaaatctctaaaaattatttggggaccaccaggaaaggtgaaaggaaaaaaccagattttttattggttgactccaagagtagaggctggaagcgccaccgtatgactttcatgtccaatatgaatcccatgaccaccgatcggaatccttcggttcccggttcggtccactacacttaaatacttacacacgtgtatattcacctgcacacgcttattttccccaaccgccacgtgtactctgtgaaaagcaaccagctgtttcttcggagcccattctccacccgcgggagccgagaaacacacaagcattgtgtgcgtcccatctctcgagccaacgttagtaacttccacgtggactccgagagagacacgatcacacctagcgtgcgtcacacggattgatttccctgaaacggtgccgtttcttccacgaccagctataggaatcacttttggcgcgtcggctatgttgtgagtaaagcgcgtgtaactcaaaccacgcccgaacgggtacacaactggaccgtcgtagatccggtaagtccgacccgggatccgcttcgaatggaccggccgcatcgacatttctgtcattggtaaattggttaaataatcttgcggataccaagtcatcggaagctttcctccgggattagcactgccgaataagatatcggcgattgcggtaccaccttcttgacccggatacccggcccaaacaaatcgctggaattttccgatccttctcagcaaaagatatatcgataggcccaccagacatcaatactaagataactgggcctttagcggccttagcaactctagagacaagctcttgttgtttnccaggcaaaagcaaactgtttctgtccttgaactccgcttcaatagactgatccaaacccattacaagaaccgtngcatcagctccacgagccgcttnaaccgcggcatcgnacaatctatcatccatgcagtgtacgtccacgcaacccttttgatgaatgg

SEQ ID NO: 101038 - DNA, 680 bp, Arabidopsis thaliana columbia
  unsure (1)..(680): unsure at all n locations
nnnnnnnnnnnnnnnnnnnnnnnnnnnnnnnnnnnnnnnnnnnnnnnnnnnnnnnnnnnnnnnnnnnnnnnnnnctttttttttttttttccgaaaacaacctttattttaaaaaatccgaggccatacaattcaattttaaatacatcttttgaattataagaaacagattttcttctagttttgtatttcctttttcaaattcgtttcgttagaaacattaaaatctcttaaaaatattttgggaacaacaagaaaagtgaaaagaaaaaaacagagtcaagacttgatgactccaagagtagaagcttgaagcgacaccgtatgactctcatctccaatatgaatcccatgatcaccgatcggaatccttcggttcccggctcggtccactacacttaaatacttacacacgtgtatattcacctgcacacgcttcttctccccaaccgccacgtgtactctctcaaaagcaaccagctgtttcttcggagcccattctccacccggcggggcgaggaacacaagcattgtgtgcggcccatctctcgggccacgtagaacttccacgtgggcccgggagaggcggttaacccaaggggggggtaaacgggttgttttccctgaaaggggggggtttttcccggaaggattggngcnctttgggggcgggatntttt

SEQ ID NO: 101039 - DNA, 685 bp, Arabidopsis thaliana columbia
  unsure (1)..(685): unsure at all n locations
nnnnnnnnnnnnnnnnnnnnnnnnnnnnnnnnnnnnnnnnnnnnnnnnnnnnnnnnnnnnnnnnnnnnnnnctttttttttttttttaaataaacacacacacatatattaaatttaaagcagaatcacaaacacagacacaaaaagcttttgtacaaatatcaatacctaaagttaggacctcaaacctaaatatcacatggtagatatagtactacaatgttgacaaaaagaaaagctatagttctaaaataataacacaaaatattatttatttacatataaattaaagccaatgtgactacaacaacaattacaacatgatccttttgcctataaagccgccatggccgtacactcgagatgcctcggacatgtgatcaagtggtcgttggttaaaccggcggcttgcattaacgaatgtataaccgtcggaccaacgaatctaaacccacgacgaaccatgtctttgcttatagtctccgatttcgatgtcttaaccggtatcttttggcatgatgtgtattttgtggtgaccggtttgtgtttcataaacccccaaatgtatttgttgaatgaccccaaatctcttttcaccttgagaatttgtttagcgttggcaacaactgcaaggacttggctaaggttaatgccataggcgttgactattgattgtatcttcttc

SEQ ID NO: 101040 - DNA, 503 bp, Arabidopsis thaliana columbia
aggtgacactatagaagagttatgacgtcgcatgcacgcgtacgtaagccctcaagtagaaagcctacgaaatagcatcggaccaaaagacaaactcaccgagtaaacatacgcaacctgtcgtgtaagtaaaaacaatttgatagtgatctctctatgtttggtggaggaagagggcctatgggtggcggcggaggtatgttacgcgccgccggtcgtgcgatgacgaggaccggtgtagccaacggtggtattcaagatccctttgcttcttcatcatcatcgtccacgtcgtctccggctggaaacgcctctgtttcgcatgtccagaaacagagatcttcttcttctgggtcgaataatctgacgtattccgcggcttctgggttgttgttgaatcttccggtggctgcaacctccggatggagcggcggcggtcctttttcctttgttaattctggaggttatgatgattttgagtgggtttctgaggaagaagatga

SEQ ID NO: 101041 - DNA, 503 bp, Arabidopsis thaliana columbia
  unsure (1)..(503): unsure at all n locations
nnnnnnnnnnnnnnnnnnnnnnnnnnnnnnnnnnnnnnnnnnnnnnnnnnnnnnnnnnnnnnnnnnnnnnnnnnnnnnnnnnnnnnnnnnnnnnnnnnnnnnnnnnnnnnnnnnnnnnnnnnnnnaacaaaaaaatcgagacacaaattttcccatagaccaaaaaaaaagggacttagcactatcttacatttttatgggacggagtatatatatggctcctggctcatctcatcggggaagatcgataacgggttcctttactagctttggcaacaatcttttttcaatttcaatcccaagggcatttatttcaactggcaggctatgagtccatgtcctcccgactattttatttttcactagactctctggagccaaactgggggcgcccatgttttctcctgagtcacgcttgctaggctcatctgaaacccagtcctttaactgagcccacacatgctccaccaggtcgaaatgcagagaaccattacctgggcggg

SEQ ID NO: 101042 - DNA, 521 bp, Arabidopsis thaliana columbia
  unsure (1)..(521): unsure at all n locations
nnnnnnnnnnnnnnnnnnnnnnnnnnnnnnnnnnnnnnnnnnnnnnnnnnnnnnnnnnnnnnnnnnnnnnnnnctttttttttttttttcatttgaagtttgcatttggcactgatacttaaacatagttcttatatcagatggattacatactccacattgcacatttgacttcgactaaagatctgaatcagatttgaaggaaaaaagagtggtattgaataggcacaagagttccaactagtgaaatctcataaaatcaaatctaacaatgttcccatatggaggtgatataaaacacctgaggtttaaattacatacgggagatcagaagagggacagaagcaggaccttcctcttccatctcatgtgcgagctctccatagcgctcaagcacacgcatcctgcagtcttcagctgccagcactccggttgaataagcaccgtgcactgatcccgggtagcttgagctagtggcttcccccgcaaagaatagattatccaatggcactctcagtctc

SEQ ID NO: 101043 - DNA, 698 bp, Arabidopsis thaliana columbia
aattctccggggtcagacccacagcagtccggatctcctgctctcctttgcctacaagctttcacgcgggagctcaacatcagccatggcggaacagactgagaaagcttttcttaagcagcctaaggtcttccttagctcgaagaaatctggaaagggaaagagaattagaggtcgtatcttagctggtacttgccacagtgcgaaaatgcagaggaccattatcgtgcgaagggattaccttcactttgtgaagaagtatcagaggtatgagaagaggcattcaaacattccggctcatgtctcaccatgcttccgtgttaaggaaggagaccatatcatcattggccaatgcaggccattgtcgaagacagtgaggttcaatgtgttgaaggtgataccacctggggcttcttcttcatttggaaagaaggcattcactggaatgtaagctgctgctggtgatgatgttagtttatgtttctggatagagctggactattatgttttatggggaattatgcttatttgaattttcgcccacacatataaaaatttggtttgttgccttcttgttgaaattcttttttttgattcccccaatacctggaggccgtcttgcgccctacaaaatcctggaattttggtggctttcgggttccccatctttaaaacaagggggccgggtcccccctttc

SEQ ID NO: 101044 - DNA, 709 bp, Arabidopsis thaliana columbia
ttttttttttgcctctcgcattttcttcatcctttttgcctcagagctccgtggagagcagcaatcagtagccatggctgagcagactgagaaagcttttcttaagcaacccaaggtcttccttagctcgaagatatctgggaaaggaaagagacctggtaaaggtggaaaccgtttctggaagaacattggtttgggtttcaagactcctcgtgaagccattgatggagcttacattgacagtaaatgtccattcactggaaccgtttctatcagaggacgtatcttagctggtacttgccacagtgccaagatgcagagaaccatcattgttcgtaggaattaccttcactttgtgaagaagtatcaacgatatgagaagagacattccaacatccctgcccatgtctcaccgtgtttccgtgtcaaggaaggtgaccatgtcatcattggccaatgcaggccgttgtcgaagacggttaggttcaatgtgctgaaggtgattccagcgggtgcatctgcctttggtaaaaaggccctcactggagtgtaagagttttgaaagtcatgggagattttggtttgattttgatttcggaatgttttaatgttttgtttaaagatcccttttgttggagactttgattatcacagacgaaataccaatctacgcactttcgttgaacaactctactatattcaactcttg

SEQ ID NO: 101045 - DNA, 768 bp, Arabidopsis thaliana columbia
  unsure (1)..(768): unsure at all n locations
cccacgcgtccgcccacgcgtccgcggacgcgtggggcactatcgtctcctacctcctttgcctacaagctttcacgcgggagctcaacatcagccatggcggaacagactgagaaagcttttcttaagcagcctaaggtcttccttagctcgaagaaatctggaaagggaaagagacctggaaaaggtggaaaccgtttctggaagaacattggtttgggcttcaagactcctcgtgaagccattgatggagcttacgttgacaagaaatgccccttcactggaactgtttccattagaggtcgtatcttagctggtacttgccacagtgcgaaaatgcagaggaccattatcgtgcgaagggattaccttcactttgtgaagaagtatcagaggtatgagaagaggcattcaaacattccggctcatgtctcaccatgcttccgtgttaaggaaggagaccatatcatcattggccaatgcaggccattgtcgaagacagtgaggttcaatgtgttgaaggtgataccagctgggtcttcttcttcatttggaaagaaggcattcactggaatgtaagctgctgctgttgatgatgttagtttatgtttctggatagagctgaactattatgttttatggtgattttcttattgaatttttccgacattatattttgttttactctgctgaatctttttcatcccaatctgtgcctctgtttaagatctgnnnnnnnnnnnnnnnnnnnnnnnnnnnnnnnnnnnn

SEQ ID NO: 101046 - DNA, 651 bp, Arabidopsis thaliana columbia
atgatactccaggtctctacgactcactattgggaaagctggtccgcctgcaggtaccggtccggaattcccgggtcgacccacgcgtgcgcccacgcgtccgcccacgcgtccggcaaatttcaaagcatttcaaaaaccctagcctatctctctttatctctcacaacaaaatctttgaaatggcgatctctaaggcttccattgttgttctcatgatggtgattatctccgtcgttgcatcggcacaatctgaggcaccagcaccaagtcctacttctggatctagtgcgatctcagcgtctttcgtgtcagctggagttgcagcagtcgcggctcttgtttttggctcagctcttcggatctaagttactgtgatggtgatttcgtacagagattgtttttgcggtataggccattcatcattattcgtcgtctcgtgtgtattccgaagcagcttatagatctcattttctatttgtccctcttcttcttcgttttctatcttaatcttcatatctgtatgaggatattactatttctttttagagtatttgtggttttgtgattttctagacgatttcttagttatgcgatatggtttttgatatgatatgaatcttattctatttatttatatggatttccctt

SEQ ID NO: 101047 - DNA, 423 bp, Arabidopsis thaliana columbia
gatttaactgcactatataaaactatgacctcgcatgcacgcgtacgtaagcttggatcctctagagcggggggccgtgttttttttttttttggagacttgaaccaattattattattattatatatttacaaggaaaaaactacataaactatcaagaaacattagcgttgcagtaaaagaccataattccaatattgtgtcaaaaaatagattctaagacgggggtgatatataaaaaaaaaacttggagaagtgtcaattccacaaacaatagccaagccaacacggacaatcgttggtactatcgttggacatgagaggctttgttaaaggaaagagaagtaagacaaacccaaccaccccggctaaaaacgctgcactcaccaaacctttttcatttgcgtatagcacaagcaatcc

SEQ ID NO: 101048 - DNA, 548 bp, Arabidopsis thaliana columbia
  unsure (1)..(548): unsure at all n locations
atttagctgcactatattanactatgacgtcgcatgcacgcgtacgtaagcttggatcctctagagcgggggggctgggtttttttttttgggaacttgaaattttatttaacgcctgagagcgtgtgattgaaaactataaatatggtgcaataatacaagtgtaagtttaaaagaactgatccaatcctctcaaacgcagtattggctcttctgcagggggcggtatccaaggggggagatatcagggaaagcttataacacaagaaccctactttactttaactttcggccggaacaagaaacaaaacagagttcaaaacggcttcatttttaagcggacagaaacctgtttaaggtcattggcggggcaaaaacacccatccctgcaaaacccaccacgatcaacgcacgcatcacttgcccaacaggtcgtcctgaactttctgactctgcagagttctcagacttttgtttctttgatcgctcaatgttcgtccacttgttgttgctatttattttcgcgatgtttatgcaacggcttcccc

SEQ ID NO: 101049 - DNA, 474 bp, Arabidopsis thaliana columbia
  unsure (1)..(474): unsure at all n locations
nnnnnnnnnnnnnnnnnnnnnnnnnnnnnnnnnnnnnnnnnnnnnnnnnnnnnnnnnnnnnnnnnnnnnnnnnggcttggttttttttttttttttttattcaatttattccataatttatttgagaaaaaaaaagttatttgaatacaatcattttcctagacagttgtattaaatcataattatccaatttacagttcgatagttccatctccagcatagaaaagtcgacagagacactctcattagtggctttcatgatctattcaacaagtctatagtttaagaaatccagggaacagagctgaggacaagacattcctcgtattacttgacagctgttgcggctttcagaccaaagcaagtggccttggatgtctcattcacggtggagggaagacacaatggcaccacaacggcttctttcagtttactttttgtaggagcctcttcatcatagttatgaagtcgaat

SEQ ID NO: 101050 - DNA, 505 bp, Arabidopsis thaliana columbia
tacgcctgcagtaccggtccggaattcccgggttgaccacgcgtccgcccacgcgtccgtatctaataaatggcgttacaaaggcaactcctgaagagagctacttccgatatctatcaccgccgtgcgatctctctcctccgtactgatttctctacttctccttcgattgctgatgctccgccgcacattccgccgttcgttcaccagccacggccgtataaaggtccttccgccgatgaggttttacagaaacggaagaagtttctcggaccttctcttttccactactaccagaagcctcttaacatcgttgaagggaagatgcagtacttgtatgatgagagtggtaggcgatatctggatgcctttgctggaatagtcactgtgtcgtgcggtcactgccatccggatattcttaatgcgattacggaacagagcaagctacttcagcacgcgactactatttacctgcatcatgccattggtgattttgctgaagcat

SEQ ID NO: 101051 - DNA, 556 bp, Arabidopsis thaliana columbia
aaggaaaaaacactagtcgctcgctgctcttcaattttcttctcgaatctaatcgattgatttctccttcgattcttcaggagaatcactgaagcttttgcctcccaagtagaaagagatatggcaactcttgaagattctttccttgctgatttggacgagttatctgacaatgaagcagaattggacgagaatgatggtgatgttggaaaggaagaagaagatgttgatatggatatggctgatttagagacacttaactatgatgatctcgataatgtttctaagctgcagaagagtcagagatatgctgatattatgcataaagtagaggaggctcttgggaaagattctgatggagctgagaaaggaactgtcttggaagatgatcctgagtataagcttattgtggattgtaatcagctttcggtcgatattgagaatgaaatcgttattgtccacaactttatcaaagacaagtacaagcttaagtttcaagagcttgagtcgttggttcatcacctattgactatgcatgtgttgtgaagaagattgg

SEQ ID NO: 101052 - DNA, 812 bp, Arabidopsis thaliana columbia
ctctcttcttttctcatcaaacttatttctctctcgatcgcaatatatacgattccataaattctcccaaaaacaaattaagagatagaggagagatcatgaggtcaccggtgcaactccaacacggctcagacgccactaacggtttccacacgctgcagcctcacgatcagaccgatggtccgatcaagagagtgtgtctcacgcgcggtatgcatgtccctgaacacgttgcgatgcaccacacacacgacgttggtccggaccagtgttgctcctcggtggtgcagatgatccacgcgccgcctgagtccgtgtgggctcttgtgcggcgtttcgataatccgaaggtttacaagaacttcatcagacagtgccgtatcgtccaaggcgatggactacacgtcggcgatctccgggaggtcatggtggtctctggactcccggcggtctcgagcaccgagaggctcgagatcttggacgaggagcgtcacgtgataagctttagtgtcgttggtggggaccacaggctcaagaactaccgatcggtgacgacactacacgcgtcggacgacgaaggtaccgtggtggtggagtcttacatcgttgatgtgccgccgggaaacacggaggaggaaactctaagcttcgttgatactatcgtccggtgcaaccttcagtctctggctcgaagtaccaaccggcaataatctcatctttcttatataaattgcaattatgtatctaattttttttgttgttctatttcttttagatgttcgatattctttacaaaaaagaaaatttcgagt

SEQ ID NO: 101053 - DNA, 609 bp, Arabidopsis thaliana columbia
  unsure (1)..(609): unsure at all n locations
nnnnnnnnnnnnnnnnnnnnnnnnnnnnnnnnnnnnnnnnnnnnnnnnnnnnnnnnnnnnnnnnnnnnnnnnnccacgcgtccgcccacgcgtccggggcgctaaatgataaatcttctacatcaaacttgaaaattgaagctcttgtcttcaccaaattagtcttggcatcacatgcgcctcctgtttttcacccttacattaaggctctttcaagtcctgttttagctgctgttggtgaacgctattataaggtgactgctgaggcattaagggtttgtggggaacttgtcagagtagtacgcccaagtactgcgggaatgggctttgattttaaaccgtttgttcatccaatctacaatgcgataatgtcccgcttgacaaatcaagatcaggaccaggaggtcaaggagtgtgctatcacctgcatgggtcttgtgatttcaacatttggtgatcaactgagggcagagttaccttcatgccttcctgtgcttgttgatcgactgggaaacgaaatcactcgcctcactgcagtaaatgcattttctgtcattgccacttctccgcttcaaattaatctatcatgtgtcttggaccatttgattg

SEQ ID NO: 101054 - DNA, 493 bp, Arabidopsis thaliana columbia
  unsure (1)..(493): unsure at all n locations
nnnnnnnnnnnnnnnnnnnnnnnnnnnnnnnnnnnnnnnnnnnnnnnnnnnnnnnnnnnnnnnnnnnnnnnnnnngcttggtttttttttttgttgctattagataactaattgaaacattcaaaagcacaaatttttcaatccaaaattcaaattgaacatctctagtctaatcttgatttgggtggagccttgctttggctctttcgagagcttttagcctaggagcttccatacgtactctctgttcctcggaaatgttctgagctttctccattgccttcaatctattagcttccatacgggctctttgctcttctgtcagttcactgcttttatccatgttttggtcatcgctcggcaactttgaagcattatcaaatatctcattcaacatactgtcttcaaaggcatcagcatttggatcagcctcaacgctctttggtggtatgttctcttcgtcatgacttggctgatccatatcttgatcatc

SEQ ID NO: 101055 - DNA, 574 bp, Arabidopsis thaliana columbia
ctatgacgtcgcatgcacgcgtacgtaagcttggatcctctagagcggccggcctttgttttttttttgagaaagaaccccttatgctttaataaagacatgaagctaaacatacgaaatattttttacgatgcttaaatctttcatagtctaaaaatatttcacaaagcaagcaacgtaaaatttgcaattgaaaaatgaggggggagagtcgttatcagcattaaagccaggaatcacgaagaaggttcttcttagctcatctctttccaacgttttcaacaaggccaggagtggggatcttctcataacgggtgtcatctggttggctttcctcaagaacaaaccataccaagcatgtggcggatcttccagcgatcatcttggcttctaaggatcctgcgacgtgaccaaggtctggtttttacgcggctgggttccccacggatctcccctacctttcccataagagggtggagggggcgggggggccttagaaaggccaagcctttgggttcttaaattgggggggcggggtattggggggggcaccagtttgggaccaagcggcgcg

SEQ ID NO: 101056 - DNA, 676 bp, Arabidopsis thaliana columbia
ctatcacgtcgcattcacgcgtacgtaagcttggatcctctcgtaaaacgttatggttcaatatattataagtggaaactgagttcttaaatagcaatgataaacagataggcagcttcttatttagttataggtgcttggccaggagctgtggtggccgaggaccaactatggcaaacacagaaggtgatggcattacaactgagacaaagacagacacgaatcgacgtagataagactaaggcgaggcgagattgagttttacattggtttagtcttcccaccattgatgaacaaacacacctctggctctcagagtttgaagcatgttgatgcagtctgacttgtggttggaacagcggaggaaaagctcatccacgtagcatatgactcctgtttccagtaaaacagttaggaacttcatttccacttgggtttgtgttcatcttaaggactacaaagtctgcgtatttcgcagtttcctcaaaccaagcaaggaaatcgaatctctcatcttctggaaatggttctagctgttcaagcggagttatctttttaccccggtcgacgtgggttcgtctccgccaaatccggatggtaaacaaaggtgacgccgggtttcttgacataggatagcattactgaagtgttgtggtcgacaaagtagacattgaat

SEQ ID NO: 101057 - DNA, 410 bp, Arabidopsis thaliana columbia
atgctttcttcgatttgcttctgctttcttcgatttgcttctgctttcatcgcggttcaggtcactcttttcgcagccatggcgattcctttcatggaaaccgtcgtgggttttatgatagtgatgtacatttttgagacgtatttggatctgacgcatctcactgctctcaagcttccaactctcccgaaaaccttggttggtgtaattagccatgagaagtttgagaaatcacgagcatacagtcttgacataagctattttcactttgttcatgagtttgtaactatacttatggactctgcaattttgttctttgggatcttgccttggttttggaagatgtctggagctgttttaccgaggttgggccttgatccagagaatgaaatactgcatactctttcatt

SEQ ID NO: 101058 - DNA, 535 bp, Arabidopsis thaliana columbia
  unsure (1)..(535): unsure at all n locations
agggcttctctaccgtttcgttgatggtcaagagctttcttcccccaatgggcttgatggctctttggggcttataggtggctattccgcttattctcatgacgttaatgtctacttgctacctcttaaggaagtgatgagggagacaatggaaagtttcatgcgcgacctcggtttcgcgagtagattagaccttattgttatggctgcatccgtagttgccagtctgaaaatatttttattagactgcacaaccggacagctttttactgggacaagtaaccgccaattgcttccttgtgtacccgatgctttggttagatcggttcatgataccaacggcgatcagcaacaggatgccatgctgctttggttggaagaacatggccggcggttacaaaccggcactataaatgtccgtcaacagaacaatgtcaagagtatcagtttgttcccggagatttccttcccttgtgttccggctctgccggaactaaattggtggtgcaagtacggngttncgnctttttttttt

SEQ ID NO: 101059 - DNA, 673 bp, Arabidopsis thaliana columbia
  unsure (1)..(673): unsure at all n locations
aatttaactgacctatagttaactatgacgccgcatgcacgcgtacgtaagcttggatcctctagagcggccggccttggggtttttattaattttttttttttttccaggaaaaaaaccagggatatataaaatcaaattctaaatttgcaaactgaaattggtctaaaacgcaattgcgtgatttaccaaaacaacattggggcagtctcatcaatcatcatcatacacttaaactgaaactatgcacacaagttaaaaagaaagtgttacaattttcaaattagacacaaagattggagtagacagacacttgatgagttagtttctttgttccttctatcaagtggcaatcgcttttttatgagattgcatcgagaaacatacacacttagctttcatggcttcagcttcactctcatattctcggaacttgtattcctcttgtttaaacgaaggaggaaccttcccttcaccgtaacactggttacacaaactaaaccgggctttcacttccttaaaccgggatccgattaccgggtaccgacaaaccgagcaaacttggttccatgacgggttccatcggttgccncagttaagggnggaggcatataccaatcccaatcgggngcgacatgggaaaacngtaaaggcctgcncgnggtcantctgc

SEQ ID NO: 101060 - DNA, 477 bp, Arabidopsis thaliana columbia
  unsure (1)..(477): unsure at all n locations
nnnnnnnnnnnnnnnnnnnnnnnnnnnnnnnnnnnnnnnnnnnnnnnnnnnnnnnnnnnnnnnnnnnnnnnnnnntcattttttttttttttttttaacaccgaaaattgaggattttattttggacaggaacaacaaatacagagttttatgtcttatggacaatgatgttgagagcttgtactattttgagtgataatgataataactaataagcaacatatgtggaaccaaacaggaaatcagaaggcttattgctttatgggtttggcttagtcgagccattggctataacttctcctcggcttttgttgatgtcttcaccagaaacattagcaggaacagatcttccactgctggaaacgaggttcttgatggttgacttcaggtcagggtcctttagaagcgagtccaaagtcacgtgtacgcggtatctccagaagtgtttggggtttggaggatcattgattgcctcct

SEQ ID NO: 101061 - DNA, 588 bp, Arabidopsis thaliana columbia
  unsure (1)..(588): unsure at all n locations
tnnnnnnnnnnnnnnnnnnnnnnnnnnnnnnnnnnnnnnnnnnnnnnnnnnnnnnnnnnnnnnnnnnnnnnnnnnnctttttttttttttttttaaacaaacaacaaaaccatttatttgtaatggtaaaagaagaggctttattgtctataaatatgaatcatataaccaaccatctttatgcttaacattgccgtctcaacagcttcagattggtcatcgatttaaaggtgggatttttaagggaaaagcggctggtgtaggagccccgttgtttcgggatatcccaacattatgttaagattctgcaacgcttgtcccgaagctcctttcacaagattatcaatcactgagattatgatagctcttccaggaattcgatcaggaaagacactcatatgacaatagttggatcctctaacggtggggggccgaggaacaacctccttcatccaacactttgaccaaattcttcacccccataagacgccttcattggctggggtaaatcttcgggtctacccccgggagccatttcaaatatattaggcatttgcttcccccggatcatgggttgagagggggcga

SEQ ID NO: 101062 - DNA, 587 bp, Arabidopsis thaliana columbia
  unsure (1)..(587): unsure at all n locations
gnnnnnnnnnnnnnnnnnnnnnnnnnnnnnnnnnnnnnnnnnnnnnnnnnnnnnnnnnnnnnnnnnnnnnnnnntcctttttttttttttttgatgtaatcttaaatcatttacagaaaaagaaagcaatacagagaaacagctttaaagtttgaggattgatttgacagctaaaaacaatctgttttaccaaccaattctaaaatgcaaagtgatggattcttctacaggcttttacggatctcggaaacgaacaaaagttttggtgaactacgacctatctcatatgatggaggatcttacaactcttgttaagaaacttctgatggaatagaagagttactcttcttcttgatcagcttctgtgtcggcaatgtcctgaagatgagaaagagcaacttttggctttttcggtttcgaagaagcttcttcttcctcaccctcctttccatcctcagagtcctttcttttcagatccttgacatctccttcattgctacaactctctggtttcactatttccgtctttttctcattggtcaccttagctttccttgcttgctcttaacaatcttcaaggaaatttt

SEQ ID NO: 101063 - DNA, 575 bp, Arabidopsis thaliana columbia
  unsure (1)..(575): unsure at all n locations
nnnnnnnnnnnnnnnnnnnnnnnnnnnnnnnnnnnnnnnnnnnnnnnnnnnnnnnnnnnnnnnnnnnnnnnnnnnnctttttttttttttttgatagtaaataatcgacttttataagattgattctaacttctaagcactcgaaatcaaaaatgactttccgattactgtttaggagaaacttctgtttttccatgtttgttggttgacatgattacacccggatttcgaatactgaaactccaactttgaagtctctctagcacactcttggtattcttgatggtgatatcacgaatgaaccaagaaaatggcggtagattaaaaggaggatatggctgaaaatattggtccattgtcactttcgatgcaatctttccttgtccgccactacatttcttgtattcatctacactcttcggcttcttgttcttgcataagcgtactgaatctacgtatacaggctccactttatagctaccctcgaatactttcatgaacatcattttctcttttttatatttcgctgtaagatctcttctgttttcatcgacaattagacttatggggatagc

SEQ ID NO: 101064 - DNA, 579 bp, Arabidopsis thaliana columbia
  unsure (1)..(579): unsure at all n locations
tgnnnnnnnnnnnnnnnnnnnnnnnnnnnnnnnnnnnnnnnnnnnnnnnnnnnnnnnnnnnnnnnnnnnnnnnnnnncttttttttttttttttgagaacaccgactaattctctgagtttattagccatctaggtctcaagctatcaattcaaaaacagcttgattcaacaagatcaaccgaaggtagtaagatttcatatttttataatcattgcttttttttttaatctatgaattcgacgatcccttataatacccaccagtttctggtgttgacattcgaaccagtgagcttgacttgtgaaactctctttatcttaaatccaaatagctttgagatgtttgtgtagaactgagtaaacagatctccatccttcttcactcggatgaaagatgtcccaaaagaaggcagcctttggatcttcacaaattatgtacttcttctcacccttctcatccacatttgagcagtcgtaactgctgttgaccccgacacaacacggttttaacgggttcccaaacctcgaaacaccaggttccggtcctttgttcttgaaaacagtcaaaaacgcgttgt

SEQ ID NO: 101065 - DNA, 789 bp, Arabidopsis thaliana columbia
  unsure (1)..(789): unsure at all n locations
tgnnnnnnnnnntccgttnnnnnnnnnnnnnnnnnnnnnnnnnnnnnnnnnnnnnnnnnnnnnnnnnnnnnnnnnnnctttgtttctttttttttttttttattccactaataattgtctgtattaataataagggatattacacattgcatccaagccaacacatgttcagacttttttggctttggagatgttcacacttgttttgaccaatacatgttgagactttggttttgagttttctatcaaacactggtttacacttgataatttcatcccagccgagctatatttctattcacaaatatacacacacacaaactcccttaagagcatctattctctgcccatttgatggcagaccttgctagtgcatccattggatcaacacacttctttagcagaggatcatccccaggcaagaggtcccgcatctcatctgacccgagcatcaccacgtttaccgcctgcactagcagtacctgcaccgctatcctcagaagggtccgggctccttccatggcttttctcttcattgcttctatggatgggatcaccgtgtgctccattgttgccttgtctggaagcacagcctcaaatccattgctttggagtttctcctggtagaaccctgctgataacgtggcgctagtggccatcacacctacacgcagaggattcccagcttcaaggggcttcattttttgccttcttgcagttcttttagcaatgcatttcaccccatgttgaaagcaaagggaaactaaaactcccctttcacattaccct

SEQ ID NO: 101066 - DNA, 543 bp, Arabidopsis thaliana columbia
  unsure (1)..(543): unsure at all n locations
gcactatagttgagctatgacgtcgcatgcacgcgtacgtaagcttggatcctctagagcggccgcgcctttgtttttttttttttttttatttccaatcaaacccataatttcaacataacattccataaaaaaaacaaaagctcaagactccaaagtattataatccccctatattaaaaacaaaaaagctgtactgcaaaaaaaaaattgatatccttgattaagctttttcatctgtatagaacaaattttctctattccaccaaaaccgtctcagacctcatttcccggtcccggaggatcctcaggcttcgcgtttcgtctctgaaactgatcaagctcctcttgagggaaaacttcagattgaagagaaggagagatcttattaacgtgaagccacgttaggtgccagaaactgtcacttcccaaatcatcacctggtaataaaactccncggcgccttcattaccagtaatgggttcttgagccagtccgggatgagggtattgactttttcggtgcggtccctcttgaattcag

SEQ ID NO: 101067 - DNA, 525 bp, Arabidopsis thaliana columbia
tgattttgccagctctacttcgactcacatatatggaaagctggcacgcctgcaggtaccggtccggtattcccgggtcgacccacgcgtccgcccacgcgtccggtggtttgttagggaagcttgaggactagtctgcgtattttttacatatttcacagttttcacagtacagtttggctttataagagttgggatatgggaagaacttctacaaggatcactatggggttatattcatcttttaatattctccttcaatgtatttatgatcattgcaagtcatttaaaatgtatgacaaccgagcctggagtcctcccacgagattatgacgagttggatagttagaaattaccaccggaactaagtttagctcttaactaaattcacaattctttactttaagaggaggatgattcgaatacttaataaaatcacagttaagatatatgtgttgatacataggcttccagccaatatggaaataatgttaagagcctaaagtttcagcagttcttcaaaga

SEQ ID NO: 101068 - DNA, 521 bp, Arabidopsis thaliana columbia
  unsure (1)..(521): unsure at all n locations
gnnnnnnnnnnnnnnnnnnnnnnnnnnnnnnnnnnnnnnnnnnnnnnnnnnnnnnnnnnnnnnnnnnnnnnnnnnnnctttttttttttttttgttttttttgatatctcaaatgaataatttatttccttttgtattacagagtgtcagaatcagagattccttttgagatccaaattttttcaaattgatacaataatcagagaggtttggattcaaataagaacaaaaactcctgcagttttagcaatcaataagtgagctgctacttatattctgtaaccgccttgagctccaactagctgttgtaggagaagacggtagaataatcggcggaatccgcttgctttcttccacaaaaggaaagtctgtcatgtaatgaagacctctgctttcatgtctagctaacgcgctgctcaccacaagcttagcgcaacagaacaagtttctcatctcacaagcttcaagagctaccactgtttgttcccatccatgttcaaacaaaaatgtttcccattttg

SEQ ID NO: 101069 - DNA, 720 bp, Arabidopsis thaliana columbia
  unsure (1)..(720): unsure at all n locations
gnnnnnnnnnnnnnnnnnnnnnnnnnnnnnnnnnnnnnnnnnnnnnnnnnnnnnnnnnnnnnnnnnnnnnnnnnnnctttttttttttttttttttttttaagggaacaacactatcagaacacttcatccgttgattacagcttaaaggaaggagaaaccattgttctccaactcaaaaatgtaagatttacagttattgtctggatacatttcccacaaggtttgtttttgtttttcacatcaaaatgattgaaacagagaagcgataaagacagcaagtcaaaaacggtagagaagagtctgggcaatctctcgttggaggataaaggcaagtcaatagaaaccaccattccttcaatcatcctgccacctccacctccgggaccgctttcccctgtcacaactgctcagaagtccccgtcaagtctgccgccaagcctcagcctccaaagatcgtctgaacaacaagatttagatacaatgcgagaagaagaagaagaagagaagaaagaagacctaaaagccaaagatggaggggttgaagatgcaccagatgatgactttggagatttccaagctgcgggttgatttaaacttataatcttttttaccatacacaaagatcgttttataagtaatgtgactgatcaaagtttggattgtttgctactgagagcttatcttctgtacaattccaaaatacaagcctatttctctg

SEQ ID NO: 101070 - DNA, 520 bp, Arabidopsis thaliana columbia
  unsure (1)..(520): unsure at all n locations
gnnnnnnnnnnnnnnnnnnnnnnnnnnnnnnnnnnnnnnnnnnnnnnnnnnnnnnnnnnnnnnnnnnnnnnnnnnnctttttttttttttttttgatgaagtaaattttcataacagtactgatgaaaagatagttattggatacactagcttactttcttcagtactactgtttgggttagttacataactaaggcaaaattctcttctggctgctgatgacgattccttcccgcttctgatttgggccttttctgtataagtccttgagctatggtacaacaaaactggattttggagcagtcccccttgatgttcttttacctcgacaaaacccgaacaaacaaagatggatgaaagctatgactgtcttcttcatcatcctcatcatcagcatcatcagtactttacaaggccagcaccttgagcctttccaaaactgactctatgggtccatcaaagaagacaaagcttttcgcacagcaaaaccccaaaacataccatccactggaggacttac

SEQ ID NO: 101071 - DNA, 1365 bp, Arabidopsis thaliana columbia
  unsure (1)..(1365): unsure at all n locations
aggaacttgaggagcattttcatgggcttgagaggtctttgaagagaaggtttcatgagcttgaagatcaagaaaaagagtatgaaaccaaaacaaggaaagctcaagaactgttggagaaaaagaaggcagctgttgaggctaaggagaaggcggcgcttgaaaggcttcagaagaagagagacgcagctatgtttactataaacagtgctttggataagtataacaacgctcctgtcagtaaaccttctgttggtgaacgttggccacaaaatgctgtagaggattcatccaatgtctttgctgctgatagtattaccgatgataatccggatggtattgtgcaagatgttcagatctcacctgtgatgggaaattatgaggtgaaggcttatccacagttactgaaactgtgcggggatatggactcaacgggtctccataagtttgtatcagataaccgcaagaaccttgcatcactaaaggaggagattcctatggcgttcagggctgcagcaaacccagccagcttagtgttggactctttggaagggttttaccctatggaggcaccaactgctgatggaaaaaaagacgctaacctcttgggcatgcgcagaacctgtatcatgttgatggagtcccttagcatactgttatctggtctggaccgcaactgccttgctgttgttctctcacaaaatgttaagcatagagccaaaactattgcagaaggatggaatccactgctggaatctcttgacatggatgcttgcaatggtaattctttggaggctcatgcattcctgcaactgctggccacttttgctattgttgctgattttaaagaagatgaactcttaaagctgatccccatggtttcacgtcgccgtcaggcagctgagctctgccgttcacttggattagctgaaaaaatgcctggtgtgattgaagttctcgtgaacagtggaaaacagattgatgcggttaacttggcatttgcgtttgaactcacagaacagttctcacctgtctcattactgaaatcttacttgatagaggcaaggcgatcttccccccaaggcagacctggcaatgcatctcctgctgttcaggatgagttcaatgagcgggagcttataggcctcaaaaccgttataaagtgtatcgaagagcatagcctggaagagcagtacccagttgagccacttcacaaacggattctccagctcgagaaagccaaagcgggccaaaaaggggggcaaccagaacccattggaaacctctaagccaaaacgggccccggcgggggttctaaaccccgnggnttnatttncaaanaaccanttanctttnccaanacac

SEQ ID NO: 101072 - DNA, 668 bp, Arabidopsis thaliana columbia
  unsure (1)..(668): unsure at all n locations
cctactaccggtatnnnnnnnnnnnnnnnnntcactagtcacgaccacacaaacaaaaaaaatataacatttagagagagagaaaggtacagcagtggcaaactcgtaaataaagaatgtcaaaagattgcggtaaccacggtggtggcaaagaagtagtcgtccggaaactctgcgccgccataatcgccttcatcgtaatagttctaatcaccatcttcctagtttgggtcatactcaggcccactaaaccaagattcgtcctccaagacgccaccgtctacgccttcaacctctcgcaaccaaacctccttacttcaaacttccaagtcacaatctgcatctcgtaaccctaactccaagatcggaatctactacggaccgtcctccacgtcttacgctacatacatgaaccagcagatcactctacgtacggcgattcctccgacgtatcaaggccacaaagaagtcaacgtttggtctcctttcgtctacgggactgcggttcccatcgcaccttacaactccgtcgctttgggagaggagaaagatcgtggatttgtagggttgatgatacgcgccgatgggaccgtgaggtggaaagtgaggactttgatcaccggaaaatatcatatccatgttcggtgtcaggcgttcatcaatcttgg

SEQ ID NO: 101073 - DNA, 734 bp, Arabidopsis thaliana columbia
  unsure (1)..(734): unsure at all n locations
anaagattggccnactaaggccttncagtnnnctggccccccngngggttcccacctccctagggttaacncccaagttccngaagttaaagggtttnatgntggaaacccnttggggagggttccttgncccttgttgagaaggattngcncttttggntgnccaaaaccggaaacccttcggttcacaggccgcaaggattttaggaccaccagggaacctccaaatgggggaaggaaaggatgtggttttccaggaccatggaggataaagctcattggccctggcaattatccattgcccttggattctcatcatcatccctctcaatttgtgggggattcaactgcggtaaataagtctggaacatttcttcccggcgttatcgactgcgctctgtgcttcccaagatctctgagaatatcttcattcagttcgttgtgctacctttttgttttgtttttgtttttgtgatttctatattctcatactatatgtttcttcttagattgtacttcttgaaatttgttttgtataggctatatatattatacatatatgtatgcatgttcgacaatctgcaatgttgctattgctggtactgacactaattcttgcaaacccaatatttggacgaaaaaaaaaaaaaaaaaaaaagnnnnnnnnnnnnnnnnnnnnnnnnnnnnnnnnnnnnnnnnnnnnnnnnnnnnnnnnnnnnnnnnnnngtacctaa

SEQ ID NO: 101074 - DNA, 1336 bp, Arabidopsis thaliana columbia
  unsure (1)..(1336): unsure at all n locations
tacgactcactatagggaaagccggtacgcctgcaggtaccggtccggaattcccgggtcgacccacgcgtccgctctcgctccctttcaatttctccttgtattttggatctttcttacttccgtacacacaaacccaaacaaacaacaaaaaactgttgtctctctctctctttggtggaattcaaaaaatcgaattcgtggttgcgtttggtttttcttccttcttcgggtcacgagaacaatgggacaacaaaatttgatctacagcttcgtcgctcgtggtacggtgattctcgtcgagtatacagaattcaaaggaaatttcactgccgtcgctgcacagtgtctccaaaagcttccttcttcgaataacaagtttacatacaattgcgacggacacacgttcaattacctcgtcgagaatggcttcacgtattgtgttgctgctgttgaatctgttgggaggcagattcctatggctttcttggagagaggttaggaagatttcaacaagagatatggtgtggtaaggctcccactgctcaagccaacagcttaaccagagagtttgggtcgaaactgaaggagcacatcaggtactgtgtggatcatcctgacgagattagcaacttgcccaaagttaaggctcaggttactgaggtgaagggtgttatgatgaagaacattgagaaggtccttgaccgtggtgagaaaattgagcttctagttgacaaaactgagaaccttcgttcacaggcacaagaattcagaccccaaggaccaanaataagaagaaagatgtggtttgaaaacatgaagattaagctcatagtcctcggtatcatcattaccttgattctcatcatcatcctctctgttgcgggggattcaagtgtacctaaaacttgaaagaataagaagaatacgttgcgagattaccagccccatattgctctactaagctcattggaacttctcccggtatatgcccttctttatcttcctgtgttcgaggtcactctttacatatatacttttccatttgattttgttaggaacgaaatatgataacttagttctgagaaatgatacttttagggtatgcttgtctgaaatagatgtaagctgctggggtttgcttatatagaaattaggtctttctgctctcatggtgatgatatgttttctgtaatctaaaatctaatgttgagtttttgctgttttcttcaatctctttactttttattaaaaaaaaaaaaaaaaaaagggcggccgctctagaggatccaagcttacgtacgcgtgcaggcgacgtcatagactcttctatagt

SEQ ID NO: 101075 - DNA, 1235 bp, Arabidopsis thaliana columbia
  unsure (1)..(1235): unsure at all n locations
aagtcttctagatctgtagtttttttccgcgaccgcccaaaaaattctctgatcagacggtcgattggatcggagatttaaggtaaagaaaaaatggcgcaacaatcgttgatctacagtttcgtagctcgcggcacggtgatcctcgttgagttcactgatttcaaaggtaatttcacctcaatcgctgctcagtgcctccagaagcttccgtcttcgaacaacaagttcacctacaactgcgacggtcataccttcaattaccttgtcgaagatggattcacctattgtgttgttgcggttgattctgctgggaggcaaattcccatgtcctttttggaaagagtaaaagaagattttaacaagcgatatggtggtggaaaggctgcaactgctcaagcaaacagcttgaataaggagtttggctctaaactgaaagagcatatgcagtattgcatggatcatcctgatgagattagcaagcttgctaaggtgaaggcgcaagtgtcagaagttaagggtgtaatgatggaaaacattgagaaggttcttgaccgtggtgagaaaattgagcttttggtggacaaaaccgaaaatcttcgctcacaggcacaagatttcagaacaacaggaacgcagatgagaagaaagatgtggcttcagaacatgaagataaaactcatagtgctcgccatcattatcgcactgattctcatcatcgtgctctcagtttgccatgggtttaagtgttaagcccagaaaattcaaaacttctgagatctttctcactcggtacatcgtagtgccttctcttttattgttcgatcttcaatctaatgtttctgcttgaattggttttgtatagatagacatatatgtatgctactcatttgctatattgcttgcatctgatgacattgatcccttgcgaaccagtcagtacttgacaagagatccgaaactattaaatgattttgttgactgaagattgcattgtggtggtgatgataaaaatttgagattgtattgacgattatacggcgtgatgtgtgttggttactttaaatttagataagagtagtgccctctctatatcgttactagggatggtagtacatatatatacgtacgtcatattccgacccaaaaaaaaaaaaaaaaaaaaaaagnnnnnnnnnnnnnnnnnnnnnnnnnnnnnnnnnnnnnnnnnnnnnnnnnnnnnnnnnnnnnnnnnt

SEQ ID NO: 101076 - DNA, 1333 bp, Arabidopsis thaliana columbia
  unsure (1)..(1333): unsure at all n locations
nnnnnnnnnnnnnnnnnnnnnnnnnnnnnnnnnnnnnnnnnnnnnnnnnnnnnnnnnnnnnnnnnnnnnnnnnnnnnnnnnnnccacgcgtccgcccacgcgtccgcttttctttttcaccgtattctcttttagtcctcgattctctacgcgtttcagcgtcaagtcttctagatctctaaagccttcgtgctcgccaatataaatctctgagatcggtcccgtaaaatcggattcgcgtcgtttttgagtaaaaaaaatggcgcaacaatcgttgatctacagtttcgtcgctcgtggtaccgttatcctcgttgagttcacagatttcaaaggcaatttcacatcaatcgctgctcagtgccttcagaagcttccttcttctaacaacaagtttacctacaactgcgatggtcacacgttcaattacctcgtcgaaaatggattcacctattgtgttgttgcagttgattctgctgggaggcagattcctatggctttcttggaacgagttaaggaggatttcaacaagagatatggtggtggaaaggctgcaactgctcaagcaaacagcttgaataaagaatttgggtcgaaactgaaagagcatatgcagtattgcatggatcatcctgatgagattagcaagcttgctaaggttaaagctcaagtgtctgaagttaaaggtgttatgatggaaaacattgagaaggttcttgaccgtggtgagaagattgagcttttggttgacaaaacagaaaaccttcgctcacaggcgcaagattttagaacacaaggaactcaaatgagaagaaagatgtggtttcagaacatgaagataaagctcattgtccttgcaattatcattgccttgattctcatcatcatcctctcaatttgtgggggattcaactgcggtaaataagtctggaacatttcttcccggcgttatcgactgcgctctgtgcttcccaagatctctgagaatatcttcattcagttcgttgtgctacctttttgttttgtttttgtttttgtgatttctatattctcatactatatgtttcttcttagattgtacttcttgaaatttgttttgtataggctatatatattatacatatatgtatgcatgttcgacaatctgcaatgttgctattgctggtactgacactaattcttgcaaaccaatatttggacgatacttgtacttggcaatttcctgttaaaaaaaaaaaaaaaaaaaaaagnnnnnnnnnnnnnnnnnnnnnnnnnnnnnnnnnnnnnnnnnnnnnnnnnnnnnnnnnnnnnnnnnnnnnnnnnnnnnnnncct

SEQ ID NO: 101077 - DNA, 516 bp, Arabidopsis thaliana columbia
gggggaagaacccgtaatggagcgtgtcgttgagtcgggtcgtgagctacgagaaaagatgcgcgagaaactgcacaaggagaattgcatggatcgagttgcccaggatccggatcagaatttgggcgaggctcctgatgtcgggtgggtatctgacctgctcatgtaaagaaaaaaatctgaccgtatttcgaagtctcattggcttttttggatatcttccaaggaaaagaggaagggatcttagtgtgttcatattattttatttactaatctcgtattttatctgctaataagaattaattatggattttggggcctgatttttctaagatgatcgttgtatagatgtgccttagggttttaattatgaaatagtattaatataatcgtgttttataagactataatgttagattgtaaccacttggtactaatctatgaatgaatgcaaattatttttctaaaaaaaaaaaaaaaaagaaaaaaaaaagggcggcagctctagaggatcca

SEQ ID NO: 101078 - DNA, 1214 bp, Arabidopsis thaliana columbia
  unsure (1)..(1214): unsure at all n locations
nnnnnnnnnnnnnnnnnnnnnnnnnnnnnnnnnnnnnnnnnnnnnnnnnnnnnnnnnnnnnnnnnnnnnnnnnnnnnnnnnnnccacgcgtccgaaaaaaaagaactctttcgtcgactaatgtgatttattgttcaccggagtattaaagaagatgatgatcggagaaactcgcaggacttatcccactgttgaaatacctccatggccggtacttgaagagcttacaacgtcggagtttttttctccggtgatgaatagtccagattgtagcatgcttgaagctttggcggggttgcagcgttatttgccgtctaacgaaccggatccggagtcatacccggatctattgggtccggattcaccaatcgatgcttactcatgcgaccatttccgtatgtacgatttcaaagtcaggaggtgtgctcgtggccggagtcatgattggacggagtgtccgtacgctcatcccggagaaaaagctcgccggagagatccgaggaagtaccattactctggtacggcttgttctgattttcgtaaaggtggctgcaagaaaggtgactcttgtgagtttgctcatggcgttttcgagtgttggcttcatccagctcgttaccgtactcagccgtgtaaagacggtggtaactgtctccggaaaatttgcttctttgcccattcaccggatcagcttaggtttttacatactcggagccctgacagagttgattcttttgacgtttcgtctccgattcgtgctagagcatttcagctgtcgatttctccggtttctggttcgccaccgatgagtccaagagctgactcggagtcctctccgatgactcagtcactgagtcgatctctcgggtcttgttcgataaacgacgtcgttccttcgtttaggaatttacagtttaattcggtaaaatctgaccgtatttcgaagtctcattggcttttttggatatcttccaaggaaaagaggaagggatcttagtgtgttcatattattttatttactaatctcgtattttatctgctaataagaattaattatggattttggggcctgatttttctaagatgatcgttgtatagatgtgccttagggttttaattatgaaatagtattaatataaccgtgttttataagactataatgttagattgtaaccacttggtactaatctatgaatgaatgcaaattattatct

SEQ ID NO: 101079 - DNA, 527 bp, Arabidopsis thaliana columbia
  unsure (1)..(527): unsure at all n locations
tgnnnnnnnnnnnnnnnnnnnnnnncttgacgtcacgtcgcacgcgtacgtaagcttgaatcctatagagcggccgccctttttttttttttttaaggaactgtgaaattttatactataggggtcacaagacaacactaaaccatcaaattctaattggacgtctttctaagggttttacagtacaaatgaatccactcacatgagcatataaatatatttatagggggggatttttgatgaagaaacttgtaactaaggatagtaaatttgacttataagttatgcaaatatatatacattacaaaattctctcctcatataaagcttcaccatctgacctctcaagaaacagacttcaaatttacgtcatgttgcaagagtttattgagtggaacaacctgatcggtactcgacgattcactcatcatcaccggcttcatcttcttcgagcttccgttttcgccttttattccttcgttaacagagttctgatccgatacctctgcttctccaacgctgatttg

SEQ ID NO: 101080 - DNA, 681 bp, Arabidopsis thaliana columbia
  unsure (1)..(681): unsure at all n locations
acgcccnnnnnnnnnnnnnnnnnnnnnnnnnnnnnnnnnnnnnnnnnnnnnnnnnnnnnnnnnnnnnnnnnnngcnaanaaaangaanccccaaaatttaattccggccgctcgaactcaaatgattgcatctcaaaactcgctcagttcagttacacgcaaacaaacactctcggtttctaataatattacagagacaagaaaaatggaaacagataagcttggatcagaagaaaaaacagagtttattgtttagtgctttgtgattctttcaagtacttggaagtagtcggggaaggttttcctggtgcaaccaggatcgttgatggtgattggaacatcagcacaagctgcaagagagaatgccattgccattctatgatcatcatatgtatcaatctctgccgttttcacctttttgggcggagttatcacacaataatctgaaccttcttccactgtagctcccagttttctaagctctgtgcaaatggcaatcatcctttctgtctcctttactctccagctagccacatctctaatggtggttggaccgtcagcaaagagagcaacgacggcaagggtcatggctacatcaggcattttgttcatgttgacatcaatagcccgcaagtgtctcattccaaaagcatctctaggtggtccctgtcacagtcacac

SEQ ID NO: 101081 - DNA, 491 bp, Arabidopsis thaliana columbia
  unsure (1)..(491): unsure at all n locations
nnnnnnnnnnnnnnnnnnnnnnnnnnnnnnnnnnnnnnnnnnnnnnnnnnnnnnnnnnnnnnnnnccacgcgtccggctttagtgagtggaggcatagatagctgttatgctatgatgaagtgtatccaatacggtcacgagatcgtggcattggctaatttgttgccggttgatgattccgtcgatgaattggacagctatatgtatcaaactgtaggccaccagattttagtgggttatgcagaatgtatgaatgtgccattgttcagaacaagaatccgaggttcttcatggcatcagaaacttagctaccagctgactccagatgatgaagtggaagatatgtttgtcctgttaagtgaagtgaagagacagataccttccatcactgcagtatcgtctggtgccattgcatcagactaccaacgactgcgtgtggagagtatttgttcaaggttaggccttgtttctttggcatttttgtggaaac

SEQ ID NO: 101082 - DNA, 531 bp, Arabidopsis thaliana columbia
taggtgacacttacaaaatctatgacgtcgcatgcacgcctacgtaagcttggatcctctagagcggccgcccttttggtttgtttttctctgtacattatccatctcctctatgatctggagagatttaatagataaaataggttaattagccctacaaaatgacccttaatagatttatttacacatttttcaatattaggacaaaactagtcaggaaggtgaacacttaagatgggggccttttggtgcagaaactcttggaaagaccattaatttggcttctccattctcttcccatctatattttggaacaaaggaggtgaagggaagcttgagacttccgagattcctagttcctttccagggcaaaccctaactccacctccaaagagtaagaaatagctctttgattctaagctcttttccatccatctgcatgggttaaagatcatgggatctttaaaaaagagaggtatcataacgtattctctgttggggaaaccgaaaatcttccacctttggggaata

SEQ ID NO: 101083 - DNA, 511 bp, Arabidopsis thaliana columbia
tctatgacgtcgcatgcacgcgtacgtaagcttggatcctctagagcggccgccctttggtttttggttttaagccctagatcatcacaatcacataatcgtttaaaggtatgtgtaagatttggctagagcagagacatgttctaaagtgtaatgtccaagtctaccagttctatagagattcaatatcttagaagcaactcttagatcagcaaactcgcgggcttcttctggaaccctaagaaccgatcttaacgcagcgaattgcgtctctataagatttcccatgctgatttcgtcttctaagtttccggcaaatgctgaaattgtctcgtacagaactcttcgaacggcggacactataaaatcctgggtatgatctggtgcgtattgcctctttatgtttggcatcagacttggagctctcatcggataaactttctgttaaatcctgagatttgcacagtttagcccatttcttgtattcatggctcgaatttagtatcgtcag

SEQ ID NO: 101084 - DNA, 540 bp, Arabidopsis thaliana columbia
aaactatgacgtcgcatgcacgcgtacgtaagcttggatcctctaaagcgggcgccctttgggttttgggtttcgacacaaagctgatattactatatataaaaggtgttacaagatgctaactaaatgaatcaaatcatgaagccaagaaacttattaatacctgcccttacacaaaccaagaaaataaggccttttattgtggcagtttacaaagtgaaacaattccgaaattgaaaaagtagtttaaacttaagtaaaaccttgcttgtgagccagaattgttttatttgggggtttattaaaactgattgccaagttcttgttccatgttctccaaatcccatatggcaactttgccatccaatcctgaagtgctgaatcgcattactttaggactccctggctttcctcaaaaaacacaagggaatttaatgcaacttatcattgaccccccccccacgggattcaaaaaacctgtgggtggggtgtgtggggaccttttaattgacttgccaaaaaaaatttgccaaaaagctt

SEQ ID NO: 101085 - DNA, 508 bp, Arabidopsis thaliana columbia
atgacgtcgcatgcacgcgtacgtaagcttggatcctctagagcgggcgccctttgtgttttttgtttttattcaactccaattttaaatttccaagagggaaactaatacaacagagttcaacaagttaataagtttcaacattgaaaaatgaaaagaaggagaaaacacgaaaacaagatcggtagtgttattgtacattttaatagaagaatatggggatcacatcagaaaacaagggaatttatacaatttaccaaacgtggggaagggttacgatcgattcttttatctctctccctcaaactttgcttcctccaaaggctgatgagctacatcatagggtgcatgaagacccacgaatagggggtacaaaacctgcaccatggggcagataatgaatctcaagaatgctccataacccagggatccgataaggaatagattcatggcgattgaaaacgatggcaaccacggaaactagggggactccccatacctttagaaa

SEQ ID NO: 101086 - DNA, 531 bp, Arabidopsis thaliana columbia
ttgacgtcttatgcacgcgtacataagcttggatcctctagagcggccgtccttttttttttttttttttaacacgaaaacaagatcgatagtattattgtacattttaatagaagaatattgaaatcacatcagaaaacaaggggaatttatacaatttaccaaacgtagtgaagtgttacgatcgattcttttatctctctccctcattctttgcttcctccaaaggctgatgagctacatcataggttgcatgaagaccaacgaataggtagtacaaaagcatcaccatggtgcagataatgaatctcaagaatgctacataaccgagtgatccgataaggaatagattcatggcgattgaaaacgatggcaaccacggaactagtgggactccccataccttaggaacacgatatttcggaagcaatgccaaccctaaagtgcctataaaccaaataactccagtcactgtgtaagcgatccaacctttaacgcctgagttccaaagcgctgatactccaatggagg

SEQ ID NO: 101087 - DNA, 595 bp, Arabidopsis thaliana columbia
cttccggacaaaccatcttcaagatcccttacctacgtacccaaaaccggttttaaccaaagaagaacaggaggtggacgagaaaatggtgagcttgcaagcacagagtatcgtgaacaccgtggctttccctatggttctcaaagccgccttcgagcttggcgtcatcgacaccatcgctgctgcaggaaacgacacgtggctctcaccgtgtgagatagcgtgtaatctcccaaccaaacccaccaacccggaggcgccggtgttgcttgaccggatgctgagcttacttgtcagccactcgatcttgaagtgccgtatgattgaaaccggagggaacggtcgaaccggaaagatcgagagggtgtatgcagcccaaccggtttgcatgcatgttgtgagagatagtgatgggacaagatctatcgcgcctatgttcatgtagctccatacccaagtgtttttcatgacttggacagatcttaaagatgtgatactagaaggaagagatgcgtccaactctgcccacaagattgataatctttcaatacataaattcagatcaaccatgtgctgagtcgataatcgtgcaatg

SEQ ID NO: 101088 - DNA, 499 bp, Arabidopsis thaliana columbia
  unsure (1)..(499): unsure at all n locations
nnnnnnnnnnnnnnnnnnnnnnnnnnnnttttttttttgatctggggaaaccaacaagataaatatcttttcctaaagtgaaaccagagtaataaaaaggttcctgaggataaaaatcctcaataaagaaacacttagagacgatgagaagagtaccaagtaaacttgtgaacataaaaaaagtgagacagatggagagtcaactcttataagaaatagatgacctttgtctaaaaatcatcatcgtcttcctcagccatatgcttagcaagctcttcttcctgttgcttcctctctctcctcttctcatcgctttctttctccttgtgagtgttaggaggaaacctcaatggctctgacagcttcgttatgcatgttgagggcagaaagcaattcttgagttggaacgcagtttgtgggctcattcgtcgagtagatgtccccagtttctttggggaccatgcatccggttttgtgatcgattgtagcatcaatagct

SEQ ID NO: 101089 - DNA, 566 bp, Arabidopsis thaliana columbia
  unsure (1)..(566): unsure at all n locations
atggggggaagggggaaaagaanggggggaccttgtggtgacctctacaaaattatgacgtcgcatgcacgcgtacgtaagcttggatcctctagagcgggcgccctttgggttttggttttttgtgaagagatcatggatttatatttcaaaccaaaaaattcacattctagtgaacaaactatttaagattgaatctcaggaacaagttcattgatgtcaatttccactagtgtctccttcccaaacaaagtaaatcccaccgttgcctttgcagttttgcggtttagtttctttaggttcccaacaaattcagcaaatgtccctgataaaactctaactgtagaacccgctgcaagtttcttcttcttcgcctttgtttcagtagcaagtgtagcttttctcggggctcgtttcggtttagattctgctacagtctcaataacatctggattagataatgcgagaaaggcccggggacgcgtaggatactccgttttttcttaaagtttttgtggctctttaaaactcctttttgggtttctcttgggcgttcttttggctgg

SEQ ID NO: 101090 - DNA, 528 bp, Arabidopsis thaliana columbia
  unsure (1)..(528): unsure at all n locations
nnnnnnnnnnnnnnnnnnnnnnnnnnnnnnnnnnnnnnnnnnnnnnnnnnnnnnnnnnnnnnnnnnnnnnnnctttgtgttttttttttaagctaataataaatttatttatttcataatttagacaaattattacattattgacaaaaccgaaccctgatctcttgtattggtgctgaagaaactaaaacattatgaaccaaattaaaggactcaacactaacgtcctctgcaaacggcgccaaatacatatacttttcaacaatttcatatcttgtacggagacatatccaacttccgaaacatcacttaccgaacaagtacgtactgatctcattttatcacttatgatggcgaaaccacgacaagttgtttcccgacgtttttaccggggaaagagtccaacgagagcagcaggagcactctcgagtccatcagcaacatcttccacatactttatcttcccttcttttatatacgggaccacaaactccaagaacttcgagtatttgggggaagtaatcgaaa

SEQ ID NO: 101091 - DNA, 503 bp, Arabidopsis thaliana columbia
aaatttatgacgtcgcatgcacgcgtacgtaagcttggatcctctaaagcggccgccctttttgtttttttttttattgtgtgtgatacaacacaaccgtggtttaccataacaacaatacagattgtcaaacacagtaacacacaacacatgatccaaatgaccaaatgttcaggactgaggaacatacatgatattatcagtattcttggctcaaattttgggccgacatacatcaagttggtcatcaaagaattctgtgtgttcttaatttcagagctgaggcaacaccaatcggaaaggaggaatcgcataaggtcccttaagtataccctcagccatcaatctatatggcagcttcagtcatatgaacaccatcccaactcacatactttgaaaggatcggcacaacattcaggtccttgaagtcccacgtttcctacctatggggaattaaacggtccttctaaagcccaaaaggcgggaaggggttgtttataaac

SEQ ID NO: 101092 - DNA, 515 bp, Arabidopsis thaliana columbia
  unsure (1)..(515): unsure at all n locations
cnnnnnnnnnnnnnnnnnnnnnnnnnnnnnnnnnnnnnnnnnnnnnagtggtggcgagatcttggatcatcttcgcttggccgcttgggcggtggtcgtcggcatcgtcactaattaattattgtgattaagaaaaaatgctaaattgagtttcgtcgtcttctgcttctgcttaagcttcttcatcatttagctccagaggcggagctttcttctctctctgtggacgaccatggcggcggacgacggcgaccccactaaattcgctgcaatctacgactcatcctctccgtcacaccctcttctctctaaaccctccacgtccgctctcgattctccgcgtcgaagtgatcccgaatccgacccaactcagtttcttcagatctcctacaattttggcccaagaactttcaaggacatccctttcctacttctcttcgatcttctcggactctccacctttgggtntggaatcttctccatttttcatagaaataacgattacgggaactcct

SEQ ID NO: 101093 - DNA, 768 bp, Arabidopsis thaliana columbia
aaatctatgacgtcgcatgcacgcgtacgtaagcttggatcctctagagcgggcgccctttgggtttgggtttccactcaagaggttatatataatgagggaaaaacaacttatccacatcgataacacaaagtaaacccgagagaaaaaacgagacactgacgcaataatgacacagaccagaagagagttttttagttgtttttaaattaagatactcctacacgacattgtacttgcaaatccagaatgatcacaccataatgctttgttcagacgtactcgttgactcgaaaggctgtcactttcaaaacgaaatctctggttctgagcagctcaaacacacagacgtctccttctcctaagttgttctctagagtgaattcgtaccatccttgactgaatttggctctcccggctttgtagagacatcgaacaggccattgtttctccgcaagctggactttgatgaacccggagatcccacttaggtacttctcagcaaacccagaaggaagatacatgatgcaacctctgtatagataggatggtcgcagaaccactctgaagaaagggtttgttggttcgaacgttttggctgcattgatggctctctctctttcttctgcagtcacggttctctttctcgcagaagcactctcgtagaactttgaacggttctctggatcatcatctcgcggagctgatgagtttatttcctcaggatcagcatttttcttctcccttcctctctttttaggtattttt

SEQ ID NO: 101094 - DNA, 527 bp, Arabidopsis thaliana columbia
  unsure (1)..(527): unsure at all n locations
cggaanaaccgggccgacccagcgcgtgcgtttcagatctcaaaaactttttctcttttccgattccaatcttctctcgtctgctttcctcaaaggttttttcatcactttatgcttcacaagcgagctagtgaagctaacgataagaacgataataccatcatcggttccgatttagcatcatctaagaaacgccgtatcgatttcactgaatcttcgtctgataagtcttcttcgattttagcttctggtagtagcaggggttttcacggcgatagcgtcgttcagcaaatcgacatggcttttggtaattcgaaccgtcaggagattgatgaagatctgcacagtcgccagctcgccgtctatggtcgtgagactatgaggcgtctctttgcttccaatgttctcatctcggggatgcacggtcttggtgccgagattgccaagaatcttatacttgcctggtggggagtctggggccctgcatgatgaaagagttgtagagctatgggacttatcaagcaact

SEQ ID NO: 101095 - DNA, 606 bp, Arabidopsis thaliana columbia
  unsure (1)..(606): unsure at all n locations
cactatagatagactatgacgtcgcatgcacgcgtacgtaagcttggatcctctagagcggccgccctttttttttttttttttatataatcattgattccatggattattcatccctccatagttattcaaacttgattcatattcactttttacacacaacatagaattataataatactaggcattgatcacatgtaggatttgagacggggtcgcgtaagggactgcgctccatccaccaagacagtggtgcctgtcatgaagcgtgagccatcgctgatcaagtagataacagtggagtagaggtctgtgtccgggttgagccactggccgaggggtgcagcgtccttgaccagcttctgcgctcggtctcttcccacagaagctgtatactcatcatccagatgcagccctctagagatcatgttgacccgtatcttggtgcttcccgagactcatggctgatgcccggacgagctggtgaatagcggcagaagttgaagcgtaagcatcaccgccagggtaaaggcccctcccgtggcgagatggcctgaaanatgggcnccngatcanggcctnacctgnggaanctcaaaaacatgt

SEQ ID NO: 101096 - DNA, 552 bp, Arabidopsis thaliana columbia
  unsure (1)..(552): unsure at all n locations
nnnnnnnctatacatgagctatgacgtcgcatagcacgcgtacgtaagcttggatcctctagagcggccgccctttgttttttttttttttttttccttttctttttacacaagggaatcaaagttttgtattttttttcctccttacaaatccatataatccaacaaagaacacccaaatcggaaaaataggccaagcaaaatggctcaaaatagcggtccaaaacgaaaatgcggttcctcatttaacagtcgacgccacattgcttcagtaacggaccagtctgtttcggcaagaacggatcaatccgaacccaaaccaaagagaagatcgaagcgagaaggatagaccaaagaacaacaatcgtcggtgttcggttttgtctacccatcaaacctttgaggaaaggataaagatgaacaatgacccaaaacgcgaaaaacagtttcccaaaaagcggtccccaagaaccatatccattgttaatagcgtaagaaactccggcaacaacaccgaccatgttgagaataatgagagttgccggagggata

SEQ ID NO: 101097 - DNA, 684 bp, Arabidopsis thaliana columbia
cttgatgcacgcgtacgtaagcttggatcctctagagcggccgccctttttttttttttttttttaaaagataaagccacttgagaagaaaaaaaagatacatagccagaaacaaaccattaaacttttaatcattaagaccaattaacttgagaaacagaaaaagagtcttgaccaatcctacatttaccccatatatagctcaaaatccaacaattgcagcaaactctcacaagcaaatccaccccaacaaaagcacttaccccgatccatatatcacaacattgcagcaaccccaaagccgatcatcgcgcacaaaagagaacaacatacatgagaaggtttatgctggaccgcaaagataaacgagagttaagttgttatagcttgagatggcaatttcgggtggttatgctctgcttcataagtaacaataagcattgccggatcttccaaacatctctcaacatgcttcctcgctggacaacctctcatgctactacatttgtaatatcctctgggataaggagagcccttgatgggcttctgaccatattttcgccatgaataatcatcaggagggatatctgcaaccttgttacttatagccggtactctaatcgatctcctaacccgatgtttcctcttcttagcgcagtggcatcggctagagctcccgcattt

SEQ ID NO: 101098 - DNA, 522 bp, Arabidopsis thaliana columbia
  unsure (1)..(522): unsure at all n locations
nnnnnnnnnnnnnnnnnnnnnnnnnnnnnnnnnnnnnnnnnnnnnnnnnnnnnnnnnnnnnnnnnnnnnnnccacgcgtccgaaaaagcgtttcctctccttctctttccatttctctctctctcctctctcgctcgctggcttcgaggagaaaaaagaaaaattggagaaataatttaactggttctcggagaatctagggttctttttagccacgccttgctgatctccttcgtgaattcgattccgattctcacctggtcttttgtggcctaaagctcataagtttatgctagtgcaagaagttatataggaatgacatattagatttacaatgatggaagtggggttctctcttattcagtggttgatcagttctggtgctgacagtccgtttatatttggatggcttgtaactggatctgttggccttctggctgttatctacacatttcttanatggcagaaaaaacttctttaaattgggttaaagctgctgctagagagaagaagaaggtatgg

SEQ ID NO: 101099 - DNA, 534 bp, Arabidopsis thaliana columbia
ctatgacctcgcatgcacgcgtacgtaagcttggatcctctagagcggccgccctttttttttttttttttttagaagaaaagagatttgagtcgatttgtcaacgaaatgaagaagccactattggtgttttacacaacttgggagaaccaactccactttttctcacatcatttagttatctcacttgtacaattttacacacttctcttgtgagttttagttacaatcaaacaaaaatcttcatctcgctataactttgaggactttaagctaggaggctccttggaaaggcattaacaaggtatcgaaaatagcattctgtacaaacgtcttcctgaatctctcaagcaattctcctccatcatttgcctgagctgcgcaatcagccgcttcctttgccattccaatacgagcataagcctcgcctctttccacaagatcagacagtttggggatgtattttagagcttccgctttctcatctgcatcaatgcatgcctccacaaatggacgaaaccccattggtgggct

SEQ ID NO: 101100 - DNA, 438 bp, Arabidopsis thaliana columbia
agcactcgataattaacactagggacgaagaagctctcgtttagtaaattttagcttagaacacagaagaagcattttttcggatctgagatctttagatccgaacatcgtttatttcaaatcgtttattcaaggtctaaaaaaaagttttgaagaatcatagccatgtcaagaaggcaagtaaggcgtgtaggggatagtggaagcttcccatttgtaggagctctgcattcaaaatcacgttcgtctcctctgttatcagtttgccttgttctcgtgggagcatgccttctcattggttatgcttacagtggtccaggtatgttcaaaagtatcagagaagtcagcaagattacaggtgactattcttgcacagcagaagttcaaagagccattcctattcttaagagtgcgtatggagatagcatgcgcaaagtc

SEQ ID NO: 101101 - DNA, 1298 bp, Arabidopsis thaliana columbia
  unsure (1)..(1298): unsure at all n locations
atgatactccnnnnnnnnnnnnnnnnnnnnnnnnnnnnnnnnnnnnnnnnnnnnnncccgacccgaatttccgggtcgacccacgcgtccggcttcttcttcctttagtaaattcaagtgtgaggtgtgtttattgataaagtgctcattttctcggatctcagatcttagatccaaaccctcattatttcattgatccaagatctaatagcttgagcttgctgggattttagttatggcgagacggcaagtaggttcaacaagacgtgttggcgatggtggaagcttcccttttgcaggagctttacactcaaagtctcgatcttctccactactatctatttgccttgttcttgtgggggcttgtcttctcattggttatgcttacagtggtccaggtatatttaaaagtatcaaagaagttagcaaagttacaggtgactattcttgcacagcagaagtccaaagagccattcctgtacttaagaaggcttatggagatggcatgcgcaaagtcttgcatgtgggccctgacacatgctcagtggtttccagtctattgaaagaagaagagactgaagcatggggtgttgaaccatatgatattgaggatgcagattctcactgcaagagttttgtgagcaaaggtcttgtacgtgttgctgatatcaagtttcctctgccctaccgggcaaaatccttctctcttgtgattgtgtcagatgctctggattatctctcacccaagtacctgaacaagaccgttcctgaactcgcaagggtggcttcagacggtgtggttctttttgcaggtctccctggtcagcagagagctaaagttgctgaactctctaaattcggccgacccgctaaaatgcgtagcgcatcgtggtggaaccgctttttcgtccagacaaacttagaagaaaacgatgcaccaagcaagaagttcgaacaggctgtttccaaaggattatacaaaccagcctgccaagtcttccacctcaagccattacattaaccagccaccaccaaagcctactggttccacaccaaagcatatttacacgtagagccgcacgcgaaaaaaaaaaatagcgtaatcgatatttctccttgtattttgtaacaggtcagtttttatccttcaatgttgtatccgccaacacaatttttcctattcaattaaatcataattattatcaccaaaaaaaaaaaaaaagnnnnnnnnnnnnnnnnnnnnnnnnnnnnnnnnnnnnnnnnnnnnnnnnnnnnnnnnnnnnnnnngtaacgaaatt

SEQ ID NO: 101102 - DNA, 848 bp, Arabidopsis thaliana columbia
ctatgaccccgcatgcacgcgtacgtaagcttggatcctctagagcggccgcccttttttttttttttttttaatctgaaaaacgctttggtcgatccatgtttatatcggtatcaatgacattacaacagaagactcagtgaaaaagctgttcttttatttgtttttgtagaaaatctgatacttttcagagacagctacaacggagctgatactaggaggacctcatttggtttcacctaattctgtaagcaaaagccgccaatgagtgcctttctcgaatttctcatggtgatcggaaagcttcaccggcgtagcgcacattgccgagttcctcttcgatacggagaagctggttgtattttgacaatcgttcacttcggcatggagcaccagttttgatctgtccgcttgctaaaccaacagagagatctgcgatgaagttatcctctgtctcgccactcctgtgactaaccatcacaccccagcctgcagcttttgagtcaagtgctgcttgaattgactcagtgactgtcccaatctggttaaccttcaagagtagagcattgcaagactgtttcttaatagcttcagctatcctcttcgggttagtgactaacaagtcatctcccacgagttggatatccacagaggattgcaatgaagcccatgagctccaatcatcctggtcaaaaggatcttcgatagagacaattgggaaatccttgatgaattctctgtagaggtcagcaagactctcggctgacagtacgtgagctccatcgtttggctgtttcttgaagttcaaatcgtatctaccatctttcatgaaaaattctgatgcagca

SEQ ID NO: 101103 - DNA, 3241 bp, Arabidopsis thaliana columbia
  unsure (1)..(3241): unsure at all n locations
agtgaagtaacttcaaaggccctaaactcacttccttacgattcacccggtcaagcctttgtggtttttgagaagccagctggggtccctgctgttggaaagttctccaacacattgactttcgttgttaaggaggttgacccaagcacagtgtgaagcagaagatgatggagtagaagatgagtaccagctagaggatcttgaggttgtagctggagattacatggtgaaagtgggtgtctccaatttcaggaatgcgtgggaaagcatggatgaagaagatgagcgtgtagacgaatatggccttggccaaagagagagtttgggagaagctgtaaaggctgtcatggatcttcttggcatgcagacttgtgaggggacggagacaattccgctcaatgcaaggtcacacacgtgtctattgtcaggtgtgtacataggcaacgtgaaagtgttagtgagggcacagtttggaatggacagctcaaaggacattgcaatgaagctgacagttagagctgaagacgtttctgtcgccgaggccattcacgagattgttgccagcggctaaaacctcttgcgtttcttcagtatcagagaatgtcatctattcctgctgctaaacctcaaaaatacatcaactattataaatagcatagtattactttctttcttttttccttgcattattactgtcaaatacactatggaggttttctttttattttatgacggtgctttttgatttctcaaaaaaaaaaaaaaaaagattagagatcttcttctttctcctgttgcatctgaagataaaggaaacagaaagcgcgagatctgagtgacggagtaatttcaaagggaggttttcgagatcagaaatggcgcaacccctcgtgaagaaagacgatgatcacgacgatgagttggagtattctccattcatgggaattgagaaaggagcggttcttcaagaggctagagtctttaatgaccctcaggttgatcctagacgatgctcccaggtcattacgaagcttctttatttgcttaaccaaggggagtcattcaccaaggttgaagcaacggaagttttcttttcagttacaaagctttttcaatcaaaagacacgggtttgaggagaatggtctacttgatcattaaggagttatctccatcatctgatgaggttatcatcgtaacaagctctctgatgaaggatatgaatagtaaaattgatatgtatcgagcaaatgctatccgtgtcctctgccggataatagacggaacccttctcactcagattgagcgatacttgaaacaagccattgtggataagaatcccgttgtttcaagtgcagctttagtcagtgggcttcacttgctcaagacaaacccagaaattgttaaaagatggagcaatgaagttcaagaaggtattcaatccagatcagcccttgttcagttccatgccctagctttgctccatcagatacgccaaaatgatcgcttggctgttagcaaattggttggtagcttgaccaggggatctgtccgctctcccttggctcagtgtcttttgatacgttacaccagccaggttatccgtgacatggccaaccacggtcaatctggagaacgtccgttctatgaatttttggagagttgcctgcgccataaggcagaaatggtgatccttgaggctgccagggcaattactgagcttgatggtgtgacaccccgcgtccggactccagcaatcactgttcttcagctctttttgagttcccccagaccagtgttgagatttgccgctgtccggactctgaacaaggttgcaatgactcatcctatggctgtcaccaactgcaacattgatatggagagtttaatctctgatcaaaatagaagcattgctacactcgcaataaccacactattgaaaacagggaacgaatcaagtgtagaacgtttgatgaagcagataactaattttatgtcagatattgctgatgagttcaaaattgtggtcgtggacgcaataagatcgttgtgtgtgaaattcccactgaaatacagatccttgatgaccttcttaagcaacattcttagggaagaaggtggatttgagtataaaagagcaatagtagattctattgtgaccattatcagagatattccggatgcaaaggaaagtggactgcttcatctatgtgaattcattgaagattgtgaattcacatatctttcaacacagatccttcattttctgggaattgaggggcctaacacctcagatccaagcaagtatatacgatatatatataatcgtgtgcatctagaaaacgccactgtccgggctgctgctgtttccacacttgcaaagtttgggtttatggttgaatccttgaagccccggattactgttctattgaagcgttgcatctatgacagtgatgatgaggtccgtgatagggcaacactatatttgagtgttcttggtggtgatggtactgttgacactgataaagagagcaaggatttcctatttggttccctggaggttcctctagtcaacatggaaactagtctgaagaattatgagccctctgaagaagcttttgatatcaactccgtacctaaggaagttaaatctcagccccttgcagagaagaaagcccagggtaaaaagcccactggtcttggtgcaccaccagctgcacctgcttctggttttgatggctatgaaagacttctctcatccattccagagtttgccgcctttggaaaacttttcaagtcttctttacctgtggagctaactgaagcagaaacagaatacgctgtcaatgttgttaagcatatctttgacagtcatgtggtgtttcagtacaactgcactaacacaataccagagcagttgttggagagggtcaatgtcattgtagatgcttcagaagctgaggaattcagtgaagtaacttcaaaggccctaaactcacttccttacggttcacccggtcaagcctttgtggtttttgagaagccagctggggtccctgctgttggaaagttctccaacacattggctttcggtgttaaggaggttgcccaagacaggtgaggaggaggtgntgggtagaaggtgggcccnctgggggcctttaggtttagctggggttcatgggaaggggggtccatttaggattgggggaacatggtagaagtaccgttgcggtttcctnc

SEQ ID NO: 101104 - DNA, 420 bp, Arabidopsis thaliana columbia
ataccatttagattagcagcgaatttcaaacggagatgtcagaatcagtgattcagggatcgaatccggatcgggttttatctccgacgagctcgaaatcagtgacgcagacggtgaacgggtcgcatcaattcgtgattcaaggatacagcttagcgaaagggatgggtatagggaagcacatagcgagtgataatttctccgtcggaggttatcagtgggggatcttcttctacccggacggtaagaatccggaggataattcgtcgtacgtctctgtttttatcgcattggccagtgaaggaaccgaagttagggcgcttttcgagctagctcttgttgaccaaagtggaaaggggaaacataaggttcatagccattttgagcggtcactcgatggtggcccttatacactcaaat

SEQ ID NO: 101105 - DNA, 568 bp, Arabidopsis thaliana columbia
actatagttttagctatgacgtcgcatgcacgcgtacgtaagcttggatcctctagagcggccgccctttttttttttttttttttttttttttttttttttttttttagaaaacaaattaaaggtcttgaacccaaatttggaacagagttttgaaaattgggaatgagtctatacatatatttccggatacatctcagtttggtctaataataagtaccaaacagaaattaccaagaacaatacatattcagctattaataacatcgattagtaatatcttgattcatttcatttttaatataacgttttcccaaaacccctgatccgattcaaaaccctacttcttggtgagtctctctctcaagatcttcacacccatatacctgccaagcatcataaccgtggcttgaggatttgtcccgggacaataaccaacggtcgacatatcaatgactctaagccggtcgataccaataactttttaatccccatcgaccactctgcccacaacgcatcctccatggtaatgccaaatggttgtaactgtatgttggcaaaattcctc

SEQ ID NO: 101106 - DNA, 553 bp, Arabidopsis thaliana columbia
acctatattagagctatgacctcgcatgcacgcgtacgtaagcttggatcctctagagcggccgcccttttttttttttttttgtcatgtaaaagtctaaattgcattgaggaccaaatcacaaaaaacagtcactaaagctaccaaaagctataaagtagtaaaagtacatataagaaaaagactaactattccgattttcgttttgatttggtggaagaagatggtcttgatgataaagggaaaacaatctcagaaacgttttgaaaacttcctctatcatacaaattccgtttcgctatagcgtcggctttgacttcttcttcacgggcagaggatcttccacaaagcccgaagcatttgctttcagctgatggcttctttagttcacatgacatcccggccttgagagcagcagcgctcgccttagcttcactgagcttcttatttaagcttatatactctctccacttaaacgtctcattagttggtgtgttggttaagcagagatttgcatggtaagcgaagataccagcgaggaggagagaaacaa

SEQ ID NO: 101107 - DNA, 590 bp, Arabidopsis thaliana columbia
  unsure (1)..(590): unsure at all n locations
nnnnnnnnnnnnnnnnnnnnnnnnnnnnnnnnnnnnnnnnnntatactagagctatgacctcgcatgcacgcgtacgtaagcttggatcctctagagcggccccccttttttttttttttttgatcaacaccagcttattgaatttatactagaggcagaaattaaaaaccagttactacttggcaagagtccaatacattgaaatcgatccattaatcgacaattcgatgtatgaaaatgtatatatttagagcagacccttcttctgaaaactgatgatgcaatcatcaaacatctcaggtagtgacttgaaggatccaaatcccaactcatgtatcttccttgtatccatactatgtggactattgtctccttctttgttactacacttgttctcaaatgggtaattaggatacttatttctcatcaactcaatgatctcagaccaatgagcaacagaactcgaacatatgattctccctgatgctttaggctcttccatagccaatacatgtgcagcaacaacatcatttgttggttttggtccaagcaatggaccaaccacaaacgaaggattcacaacaaccca

SEQ ID NO: 101108 - DNA, 1408 bp, Arabidopsis thaliana columbia
  unsure (1)..(1408): unsure at all n locations
ccaaagaccaaatctcatttcttcttcttcttctttttccacattttctgattagcagatcaaatgatgcttgttcgatctgtatttcgatctcagttgcgaccctctgtctcgggtggtctgcaatctgcttcttgctattcttcattatctgctgcttcagctgaagctgagaggactatcagagaaggtcccagaaacgattggagtagagatgaaatcaagtctgtttatgattctcctcttcttgacctcctcttccatggagctcaggttcatagacatgttcataacttcagggaggtacaacaatgtaccctcctctccataaagactggtggctgtagtgaagactgttcatattgtcctcagtcttcgagatatagcactggagttaaggcacaaagactcatgtctaaggacgctgtcattgatgctgctaagaaggcaaaagaagctgggagcacacgtttttgcatgggtgctgcttggcgagatacaattggacggaaaaccaacttcagccagattcttgaatacatcaaagaaataagaggcatggggatggaagtttgctgcaccttaggcatgattgagaaacaacaagcactagagctaaagaaggctggcctcactgcttataaccacaatcttgatacttcaagagagtactacccaaacgtcatcactactagaagttatgacgatcgccttgaaactcttagccatgttcgtgatgctggaatcaacgtttgttcaggaggaatcatagggcttggtgaggcagaggaagacagaataggtttattacacacgctggcaacacttccttctcaccctgagagtgttcccattaatgctctacttgcagtgaaaggcactcctcttgaagaccagaagccagttgagatatgggagatgatcaggatgattggaaccgcacgtattgtaatgccaaaagcgatggtgagactgtctgctggtagagtccggttctcaatgtccgaacaagctctctgtttccttgctggtgcaaactctatcttcaccggagagaagcttttaaccacaccaaacaatgattttgacgctgaccagctcatgttcaagacattaggcctcattcctaaaccgccaagtttctctgaagatgattctgaatcagaaaactgcgagaaagttgcttccgcttctcactaatatcattatccactttttttttttgtttggagtcgggacactatagagcagtcccttttactatgtagcatggtttgacgattttgtgatatcatttttcgttaatcgttattcgaagatgtctagatttctcatctgannnnnnnnnnnnnnnnnnnnnnnnnnnnnnnnnnnnnnnnnnnnnnnnnnnnnnnnnnnnnnnnnnnnn

SEQ ID NO: 101109 - DNA, 432 bp, Arabidopsis thaliana columbia
  unsure (1)..(432): unsure at all n locations
nnnnnnnnnnnnnnnnnnnnnnnnnnnnnnnnnnnnnnacccacgcgtccgtttttattttctttctttttttttttgttagtttttttttttttctttcttcatctcgtgaacgatatagtacctgaaccctagcggaggaaaatcaaaaattgtctaggagaaacaaacagagatatctttctttctttttatcagtggggaaaaaaaatgcagaatccgagactgaagcaacatcagcagcaacaacaacaacaagctatgatgcagcaacaagctctgatgcagcaacactctctttaccatcctggtgttttggctcctcctcagttagagcctgttccaagtggaaaccttcctcctggttttgatcccagtacttgccgtagcgtgtatgttggaaacatccatacacaggtcacagagcctttg

SEQ ID NO: 101110 - DNA, 926 bp, Arabidopsis thaliana columbia
  unsure (1)..(926): unsure at all n locations
agcttctttgtgaccgacgattctttggatcaattgaaggctcaattactcgagaaatcgggtctgaatttcaccacattcgaagctcttggtgcttacatttggcgtgcaaaggtaagagctgcaaagactgatgaaaaggagaatgtgaaacctcgcgtttcgataaatataaggagattgatgaatccacctttgcctaaaggctactggggaaatggatgtgtgccaatgtatgctcagatcaaagctggagaactcattgagcaaccaatctggaaaactgcagagctcataaaacagagcaaatccaatacgagtgatgaatatgtacgctcctttatcgacttccaagagctgcatcacaaagatggaatcaatgccggtacaggagtgaccggattcacggactggcgatacttggggcattccacgattgattttggatggggaggacctgtgacggttttgccactatcaaacaagttgcttggaagcatggaaccatgttttttcttgccatattctactgatgctgcagctggaagcaagaaagacagtgggtttaaggttttggtaaatctgcgcgaatctgcaatgcctgagtttaaagaggccatggataagttccacaaaggtgaatttgccctgtcttgatcaccgacaaaacgacctccatagatgcccaataaaacacaaacacaaaatcatcaaccatttgtacaatttcgatttcgtcactgaacaaatgttttggagctcagtgtatttgatttgaagagcgtccattaagagaagccttaccctatgtttcacagttatcgcttctgtcaaaaaaaaaaaaaaagnnnnnnnnnnnnnnnnnnnnnnnnnnnnnnnnnnnnnnnnnnnnnnnnnnnnnnnnnnnnnnnnnnnnnnnnnnncaa

SEQ ID NO: 101111 - DNA, 902 bp, Arabidopsis thaliana columbia
  unsure (1)..(902): unsure at all n locations
cccacgcgtccggtaaatataatatataagatcgatctcacttttggtcggaataagaagctattggatcgctgacagataatccgatcagattcagagagttttatcgatcagatcattttttctcaatgacgaaaaaggcggtgcttattgggatcaattacccaggaaccaaggcggagttacggggatgcgtcaacgatgttcgtcgtatgtacaaatgtctcgttgaacggtacggcttctccgaggagaacatcaccgttctcatcgacaccgatgaatcctctactcagcctactggcaagaacatccgccgcgcgcttgctgatctcgtcgaatctgccgattccggcgacgttcttgtcgttcattacagtggacacggtacgaggttgccggctgagactggtgaagaccgatgacacttggtttcgacgagtgtaattgttccttgcgacatgaatctgattactgatgatgattttagagatcttgtggacaaggttcctccaggttgcagaatgacaatcatttcagactcttgtcacagtggtggcctaatcgacgaagccaaggagcagattggagagagcactaagaaagaagccgaggacgaagatgaatctgaagaatcttcttcaagattcgggtttaggaagttcttgcgcagcaaagtggaaggcgccatcgagtctcgagggtttcacattggagggaacaagaaggatgaagatgaggcggaagaaatcgagactaaggagattgagcttgaagacggagaaacgatccatgccaaagacaaatctcttcctctgcagaccttgattgatattctcaagcagcanacagggaatgataatatcgaagttgggaaaatcaggccaagcctttttgatgcg

SEQ ID NO: 101112 - DNA, 819 bp, Arabidopsis thaliana columbia
  unsure (1)..(819): unsure at all n locations
caagctggaaatgaaaaagaaggtgattaaatggaatgcttgccaaattggcttcagggtttcttaagggtaaactaaacaatgaagactatgtaaaacccgttatcaagacacacgttggaagtaaaaaaagggtttatgcggtgggatcaaaaggttcggtttccgcttccagacagcgggatactgttcagcccgggtccaacccgatcagccttctgctgatccgactccagcggggaacccaactgaggcttatggccgcgatgagccatccgatacaggcgatattggaggagccagacggtgagatatcaaacagagaaatggttacaagggctaggaaggcattgaagaagcaagggtttactcagcagccaggtttgtattgccatgatggttatgccaacgctcctttcatctgttgaaaacagaggttttattgaatgttttttactacgtacgacacgttgattgaagtttctggtcggaaaaataagcctgttttttttttttgctgtttgatggcatttatgtaatttacaagttatgtgtgttgtgttctgtgaaacactaaaattcttcttgttttattgagatctattatgttggttgtgaaattattttttgtttttcttttcttgttaactctctgtattctgcacatcaataagaaaaagtttttttttaacggaacataaaaaaaaacaaaaaaaggnnnnnnnnnnnnnnnnnnnnnnnnnnnnnnnnnnnnnnnnnnnnnnnnnnnnnnnnnnnnnnnnnnnnnnggannnnnnnnnnnnnnnnnnnnnnnnnnnn

SEQ ID NO: 101113 - DNA, 915 bp, Arabidopsis thaliana columbia
  unsure (1)..(915): unsure at all n locations
atgatctagccagctacctaatacgacttctatagggaacgctggtacgcctgcaggtaccggtccggaattcccgggtcgacccacgcgtccgcccacgcgtccgctcaagcagcaaacagggaatgataatatcgaagttgggaaaatcaggccaagcctttttgatgcgtttggtgatgattcgagcccgaaagtgaagaagtttatgaaagtgatcttaggtaagcttcaggctggaaatggagaagaaggtggattaatgggaatgcttggcaaattggcttcagggtttcttgagggtaaactaaacgatgaagactatgtgaaacccgctatgcagacacacgttgggagtaaagaagaggtttatgctggtggatcaagaggttcggttccgcttccagacagcgggatactgatcagcggttgccaaaccgatcagacctctgctgatgcgacttcagcggggaaacaactgaggcttatggagcgatgagcaattcgatacagacgatattggaggagacagacggtgagatatcatacagagaaatggttaccagggctaggaaggcattgaagaagcagggggttactcagcagccaggtttgtattgccatgatggttatgccaacgctcctttcatctgttgaaaacagaggttttattgaatgttttttactacgtacgacaccgtgattggaagtctggtcggaaaaataagcctgtttttctttttgctgttgatggcattatgtaattacagttatgtgtgtgggtctgtgaacctaaaatcttcttgttatggaatcatatgtgggtggaaatatntttggtttctttctggaacctttgatttgacacattaaaaagttttttacngacaaaaaaaaaaaagggggcgctaaaga

SEQ ID NO: 101114 - DNA, 370 bp, Arabidopsis thaliana columbia
aatgaagttctttacattgctgcaaacactggtaaacttatattctgacattacaagaatattgaactataaatccttccttcttgtcactgctaacgattgaggattgatttttttgcgtagaacgtggtgggagtattataacatgtgatacaaaattatggaaaagaaaatggtcgaagcctataaaaaagaactctatatcagcttttaatgtctcagctgatgggaagcttcttgcaatgtaagtttatctgtcttctcacttttgggaccaacagataaggataatactgtttttggtagtcataatattttcttaatgcagaggaacccttgaaggagatgttttaatacttgaatcgacaag

SEQ ID NO: 101115 - DNA, 1447 bp, Arabidopsis thaliana columbia
gagacagacacggaggatggcgaatcagagtacagagacgaatcaaccgtcgaatatgcagacttacggtgtaccgatttacgccgccgactggattccggaggtagatgtcagatccaaaatcataatggatccggagaaatctgaagatgatgatgagtcgtcttcttcttcttcttcttcccggagctgcatcgttttgtccggcggaggcggagagggacgaagtggaatctctaatgtcatattaatatgccgtgttgatctaaacaccaattctctctcggaacaacctctgggtaggcttgtggttggctctgatctgccttatcggatggctgttcatcctcgggaaggtggtcttatttgcgcgttgcctaacagttgcaaactgtttcattgggaagacattatgagccgagaggataatcaggctggtgagtcggaggaagtgattaaagagttaagagatgttggacaacagttggctctggcgtttaatccggaggggtctgttcttgctgctggtgcggaggatgggactttgagggtttttaaatggcctagcatgaatactttacttaatgagtcccaggctcattcttcagttaaatgccttactttcagcgaaagtggtcaatttcttgtatctcttggcggtccagtttgtcgagtttgggacgtgaatgcttctgctgctgttgccagtctatcaaaagagaaggacgagatgtttgcctcctgtagattctctgtagacagtgcaggcaatgaagttctttacattgctgcaaacactgaacgtggtgggagtattataacatgtgatacaaaattatggaaaagaaaatggtcgaagcctataaaaaagaactctatatcagcttttaatgtctcagctgatgggaagcttcttgcaataggaacccttgaaggagatgttttaatacttgaatcgacaagaatgcaaactatccaaatcgtcaagaaagcgcatcttggtttggtcacagcactgactttctctcctgattcaaggggattagtgtcggtatcttttgactcaagggcaaggctgaccatgattgaacaaaagggggacaaacctggagtaaggtggtggctactggttttattgatagtgttgctatacgtggttgcatactattatatgaaggcaaagggtatcataccttagaaaggcctttaagtgaccacacaggacgatacagcggaatggcttgtaaccaacatatcatacgattacgctttgagttagctttttatgtttgacatctaccagaaacttgcttgctttatatcaataaaacatgtaaactaacactaaaacagcaaaagttacaatttgtttcctcttttttttttttgtagacatagtaaactagaaaactattatcatatgatggatcagtaagactctttcttc

SEQ ID NO: 101116 - DNA, 586 bp, Arabidopsis thaliana columbia
  unsure (1)..(586): unsure at all n locations
cnnnnnnnnnnnnnnnnnnnnnnnnnnnnnnnnnnnnnnnnnnnnnnnnnnnnnnnnnnnnnnnnnnnnnnnccacgcgtgcgcccacgcgtccgcccacgcgtccgcccacgcgtccgcacaaaaatggcgtcgacgaagccattgattgtcgcagcgaagacgctccgaaaccggatccacttccgatctggatccacatctactggtccaagccggtgggcgacaccgggtcacgaagaacgacccaaaggatatttcatgaaccggactccgccgcctccaggacagtcgcgcaagtgggaagattgggagcttccatgttacatcacaagcttcctcacgattgtaatcctcggagtgggtctcaatgccaaacctgatctttcaatcgagacctgggctcaccagaaagctcttgagcgcctcgagatggagaagcttgcatctgccggagattcatctggttaatcccaaaacttgggagatatgattcaatggttgatctggtatgtatgtgttttgtttgtttttccggggatttgaggagattttcccatttatgatgatgatcacgaatactagt

SEQ ID NO: 101117 - DNA, 906 bp, Arabidopsis thaliana columbia
  unsure (1)..(906): unsure at all n locations
tgatctgccnnnnnnnnnnnnnnnnnnnnnnnnnnnnnnnnnnnnnnnnnnnnnnnnnnnnnnnnnnnnnnnnnnnnnnnnnnnnnnnnnnnnnnnnnnnnnnnccttttttttttttttttttttttttttttttccttataaaaagattttcttcttcattaaaattgtttaacataacaacattttttatcaaaacaacatctaatgttacaagtcaacatttcaaacctaaagctgaatgaaatagtttcaaacaaacaaaacagaatatgaattaagatatgatcaagccctaaaaacgaagaagttaccttgaagaagaaggaaaaacaaaggtcacagttttgttgttatatacacgatcaatgaagaaaaacaagagcttttcaaactttatctgatcgtgacaaacttattggttccatgtctagcccaatgagacttcaaatcaatcgcattcccaaagctataaccttctgttgataacttctcaagaaccttcttaaacgcgccttgactcatcttcctacccgaaatcccttgcaccccgtcgcttagtactcaccgggtaatggatacaccgaaaatgttagtcgtgcaacaagcggattgccatccgccgcaaccccaccggtaacattgttgaggagttccagtacaagtgcaaaccggtacaggtaaaccagaaatgtccatactcacaccgttaatcacaagatcaacactcttcttaaccggtttcacacgctgcttctgctgctgctgctgaacattgttgttagtaacatctctctcctctttcggtttacgcatcttcttagctttcggtaccgttggtgttgcgatgctgcctctcatctttctcttcttaccagtctgctcttcacaaggagcagcaggagg

SEQ ID NO: 101118 - DNA, 588 bp, Arabidopsis thaliana columbia
tcagctcgacacgcacacggccccccccgccggaaatattaggtacaacttacaagattatgacgtcgcacgcacgcgtacgtaagcttggatcctctagagcggtcgccctttttgttttttttttataaactgtaacttttagtattgacttacttagtaattgaaggctagtaattggagtctaaaacaattaacatacatacaggcggacacagcagaagacagaacatattggtaagtggtaacaaacacttaaacggttgatcgaagtttgaacatagagagcgagagaggagagaacacacgacaacatttatagtctgagtcctttccttcaacgaccagagagactaatctgttgatagtttttatcaacagactctttaacagcatcaaccactagctgcgtctttcgggctaatactaggcccagtacccatcaggctttgcaccattgttcttgatttctccaaccaatcgagcaaactctctcaccatacatgccttttgtggaagctctgtcttaaccgtatgctcactcgggggactaacccacgcagtcacaaggtcattgaaccaagcttt

SEQ ID NO: 101119 - DNA, 521 bp, Arabidopsis thaliana columbia
  unsure (1)..(521): unsure at all n locations
nnnnnnnnnnnnnnnnnnnnnnnnnnnnnnnnnnnnnnnnnnnnnnnnnnnnnnnnnnnnnnnnnnnnnnnnctttttttttttttttaagaattctcttttagtaaaataatttattacatggaggaattacaatatgataatggggtaaatatgcccaaattggtaacaattgaataccagtttgaatagataaaagcatttggtaacatttaattattcatagcaaggcggcaaatcatctggtggaggcagaatctgctgatttggctctctaccattcttaacaatgaacacaacattcataccccacgtttgatgtctatccaagtgacagtgcatgaaccaaacccgggattatcagctacgaatctgatagcgatccaaccattcctaggcacgggcattgtatttttatacggtggatcgaagagattatatcttgacgacggaactttttaattatggtatagttcccgaaccctactccaccacatagaagctaaaccatggagatgcat

SEQ ID NO: 101120 - DNA, 672 bp, Arabidopsis thaliana columbia
  unsure (1)..(672): unsure at all n locations
cccagttccgaaactggaacctagttcacctgttcttgatccagattcctatgtccaagagattctgcaaatggaagcagaatcatcatcatcatcatcaacaacaacgtcacctgaggttgagactgtctcaaaccggaaaaaaacaaagaggtttgaagaaacgagacattacagaggcgtgagaaggaggccatgggggaaatttgcagcagagattcgagatccggcacagaagggatccaggatttggttaggcacttttgagagtgatattgatgctgcaagggcttacgactatgcagcttttaagctcaggggaagaaaacctgttctcaactttcctttggatgccggaaagtatgatgctccggtcaattcatgccgaaaaaggaggagaaccgatgtgccacagcctcaaggaacagcaacaagtacttcatcatcgtcatcaaactaatgggggaatagtgatgagaaggaagtatatataggttaatatcttaagtatgtgaagcatcatgtatagagccaagaacctgttagactagtgtactgaaaagaactcttgcaaaatatgtactaaagagttcctgtaacgcggccgcgaattcttgcagcgcggtgcatccactagttagagagcggccgcctccncggtgcagctccagc

SEQ ID NO: 101121 - DNA, 647 bp, Arabidopsis thaliana columbia
  unsure (1)..(647): unsure at all n locations
anttgtcagatccatnccanagatctccaggggaagcagatcatcttatctccaccnccaactcacttgggttgagctntcccnacccggagaaanccaaagnggtttgaagaaccgaagacattacagaggcntgagaggngcccatgggggaaatttgcagcagagattcgagatccggcaaagaaaggatccaggatttggttaggcacttttgagagtgatattgatgctgcaagggcttacgactatgcagcttttaagctcaggggaagaaaagctgttctcaactttcctttggatgccggaaagtatgatgctccggtcaattcatgccgaaaaaggaggagaaccgatgtaccacagcctcaaggaacaacaacaagtacttcatcatcgtcatcaaactaatgggggaatagtgatgtttaattagtatatataggttaatatcttaagtatgtgaagcatcatgtatagagccaagaacctgttagactagtgtactgaaaagaactcttgcaaaatatgtactaaagagttcctgtaacaatggaacttctgtgttttctcttgtcttaaagagcttaaggttctaggaccaatattnnnnnnnnnnnnnnnnnnnnnnnnnnnnnnnnnnnnnt

SEQ ID NO: 101122 - DNA, 603 bp, Arabidopsis thaliana columbia
  unsure (1)..(603): unsure at all n locations
gcttcaaacaccacttgcagtttttcttattctcctgtcttgtctaaagaaaaaagagagaggaagaaatggagacttttgaggaaagctctgatttggatgttatacagaaacatctatttgaagacttgatgatccctgatggtttcattgaagattttgtctttgatgatactgcttttgtctccggactctggtctctagaaccctttaacccagttccgaaactggaacctagttcacctgttcttgatccagattcctatgtccaagagattctgcaaatggaagcagaatcatcatcatcatcatcaacaacaacgtcacctgaggttgagactgtctcaaaccggaaaaaaacaaagaggtttgaagaaacgagacattacagaggcgtgagaaggaggccatgggggaaatttgcagcaggagattcgagatccggcaaagaaaggttcccgggtttggttaggcacttttgaggggtgatattgatgctgcaagggcttttgcctatgcagcttttaagtcaggggaagaaaactgtnnaaacttcctttggtcagaagatnttcccgcattntccgaaagggggcccgtttg

SEQ ID NO: 101123 - DNA, 556 bp, Arabidopsis thaliana columbia
tccgcgcctctacgctcggcccccgcccccggaaatattaggtacaacttagaagattttgacgtcgcatgcacgcgtacgtaagcttggatcctctagagcggccgccctttgtgtttttttttttttttttttttttaggcgaaattgttcacgttaggaaacatagaatcataaagttggctcaaaaagtgaccaccgataagtggataattccattcaccaaaaaaaaagaaaagattttgtttttcttctacagagtaaaaaataagacgcggcatcaaaacagagatagccccaaaacaatttcccaaaaccccccttaaccactatcccaacatcattagacagagcaaagaggaagacccgcaactattctttgaaacctttactcaaaacattgacgacagagagagagagacgcacgagtagtgatgatggaaaagcctttaaatttatgattagagcacgagtcttgcgatcattccttgagtccagcgtgcagtgaccttgagatctttatcctgtgattcgggacactcattgaggaacttat

SEQ ID NO: 101124 - DNA, 540 bp, Arabidopsis thaliana columbia
gcattggtgcaccgccgggggcgcgcccccccgcattattgggtacactctacaagattatgacgtcgactgcacgcgtacgtaagcttggatcctctagagcggtcgccctttgttttttttttttggaaattggaatacctatttttctttgttcgacattgagaagaaactgaagaacacttacattaacattacaaatacaaaccctaccactcccttgttgggttagtactagcagtttacttaaacaacaagaaacttcttctacattgaagggtatatggctcatatctccttaagagccttcaacacatcaagcatgttagggcgcttagctggcgtttcagcaagacagagcatagctatctgaagcagacgaagctgagagttcttcaaagccccagatactagcaggggatcaataacatccacagctttcccttgggtgatcttctgaatcgcccaaccaaccaagttccctccttcactctacttaaagtctggaccggttgggttttttcctgggacaagctccaa

SEQ ID NO: 101125 - DNA, 1701 bp, Arabidopsis thaliana columbia
cgtccgaataataaccaaaaaagaaaaaagaaaaattccaacaagaaaaaaaaaagaaaaagaaagttgattcttcgcttaggcttgaaatctctccaatccaaatctcaaattaaccttccatcgtcatctctttccctttttttttcccactttctttgcgaatcgcgagatctcggaatcgcatccttgattttgggatactgttttttttttttttaatcttgtttcattttcacgtgaaattcttagctgctagaactggacttgaatttcaacgagaattttggagattttttttttgtttgggtttttcctttctgttttgtgtgtttggaattagggttgtcgagcgagaatggacaagtacgagctggtgaaagacataggtgctgggaattttggagttgccaggctcatgaaggtcaaaaactctaaggaacttgttgccatgaagtacatcgagcgtggtcctaagattgatgagaatgtggcaagagagatcattaatcacagatcacttcgccatccgaatataatccggttcaaggaggtggtgttgacgccaacccatcttgccattgccatggaatatgctgctggtggtgaactattcgagcgtatatgcagtgctggaagatttagtgaggatgaggcgagatatttcttccagcagcttatatcaggtgttagctattgccatgctatgcaaatatgccatagagatctgaagctcgagaatacgctcttggatggaagtcctgctccacgtctgaaaatctgtgattttggttattccaagtcctctctgctgcactctaggcccaaatcaacagttggaactccagcatatattgcacctgaggtcctttctcgaagagaatatgatggcaagatggctgatgtatggtcttgtggtgtgactctttatgtcatgctggttggagcatacccatttgaagaccaggaagaccccaagaacttcaggaaaacaatacaaaaaataatggctgtccagtacaagatcccggactacgtccatatctcacaggattgtaaaaatctcctttcccgtatatttgtcgccaattcactcaagaggatcaccattgcagaaatcaagaaacattcatggttcctaaagaatttgccaagggaactcacagagacagctcaagctgcatatttcaagaaagagaacccaaccttctcccttcagaccgttgaagagatcatgaagatagtggctgacgccaaaacaccgcctcctgtttcccgatccatcggaggttttggctggggaggaaatggggatgcagatggaaaagaggaagatgcagaagacgtggaggaggaagaggaggaggtggaagaagaggaagacgatgaggatgaatacgataagactgtaaaggaagtacacgcaagtggagaagtgagaataagttgatattttggtttttggtctgtgtaagaaagaagtcgtcgttggtttgttgaaactgaaaagtctctgttctcgtgtttgcctttacaatgctttggctaaggttttggttctggttttggagattgtaaaatttgcagtataagatgaacaaacagagaggttgatgatgagaatgagtcctttgctacgcatggtactatgaacattgtgacctccaataaatatttttgtaaattagattttattttccg

SEQ ID NO: 101126 - DNA, 562 bp, Arabidopsis thaliana columbia
ttacttgccgtatgtcgggcgccgcccgggaattatgggaacaacttagaagattatgacgtagcacgcacgcgtacgtaagcttggatcctatagagcggtcgacctttttttttttttttttaacacacaaaagaaattgatagtgtaaaataaagaaacacactgaaaaacaaaacccacatatacaatagtactgtctactcttacaagagcttattaaataggaaaaccataactaacaagtttcgaaaactccatcactcccggagttatctcataatctgtgattctagtcaattatatataatcccaaatgccttaactttcatgattttagcgtgtgattgattgcacgcccactagagaaacaacctgggtctgcctgacggaagtatcggttccgtaatggccaagttacctatggactcctccgttgtcaccggataaaattaccttggctgaccttgccgaaccaaattttcaatttttgcggatctaaacaaattaaacaggttataccggaaacctaaaaaacttcggatcaaaagtttaaaaaatt

SEQ ID NO: 101127 - DNA, 504 bp, Arabidopsis thaliana columbia
taggtacactatagaagattatgacgtcgcacgcacgcgtacgtaagcttggatcctctagagcggtcgccctatgcgttcgtaatttttctttttttacccataatatttttttgggatcgaatgggaacttattcatcaataaactcacataacacacattaacaaaatataaatcaataaaattgatcttagagaatacaaatgttacaatattacctatcagctaaacaaagaccacaaggataagaacaaatgaacaatgttggactatgggtgttgctactgttactgtgacaggtatcacgatgaggcaaatgtcaaggaatcaaactttatgaaacttgtatttctgtcccaaattgaatcgagatattgggtcactaaacccccttttaaagaagtgtgttaaacctttaaaaacttggtttcagccctaattcatttggtttgccttccaggggggtagatttttggaaaaaaaaacctttatggccatgttac

SEQ ID NO: 101128 - DNA, 483 bp, Arabidopsis thaliana columbia
gccttcgttaacctggattcctttaaaccggccgcccttttggttttgtgttttttaattttttgggccggaaaagactaaatggatggatgatttttgtcattggaccaccctaaaaaatgttctcaaaagatgcaagaccttccacccaaaaaaaggaggagggataaacccctcagctcaggggctcgaatcctttttatcccatgttacaacagagattcacacagttcgcaatctgtctagaggagctatgtagatgggtcatagttttaggggggttaaagctaaataaaaggcggaggggcaaataaggagtgacccggggagaggtttttagagcctttattggccattagcattgttcttcttgagttcctcgttctcctgacgcagcgcatcgatccttgactggagaatactgatcatagcttctgcactcatcatttcaagcttgaaagtttctctttcaacagacatctg

SEQ ID NO: 101129 - DNA, 527 bp, Arabidopsis thaliana columbia
  unsure (1)..(527): unsure at all n locations
cgatttcnnnnnnnnnnnnctatagaagagttatgacgtcgcacgcacgcgtacgtaagcttggatcctctagagcggccgccctttgttttttttttttgatgataatatacgacaatggatcagcctgaaaatgttcccaaaagatgcagaaacatccaaagtaaaaaaggataaaataaaaagacctagttggttggctccgttccgttttatcctaattttacaacagagattcataaggtttctgatccgtctgaagaagctacatccatagctcatactattaagaagattacagctaagaggcaaagaagaagaagaagaagaagaagacacctggagagatgttgcggtggtttaactagcttgtccactggcgttcttcttcttaagttcctcgttctcctgacgcagcgcatcgattcttgactggagaatgctgatcatagcctctgcactcatcatctcaagcttgaaagtttctttttcaacaaacatctggtgaacactacttttggagatca

SEQ ID NO: 101130 - DNA, 522 bp, Arabidopsis thaliana columbia
cctgcaggtaccggtccggaattcccgggtcgttcacgcgtcggcccacgcctccgcttgctccgacacgacaacaaatccagattttgagcttacggaaacttgagaaggagaaaaaaatgtcgaacatagacatagaagggatcttgaaggagctacctaatgatgggaggatcccaaagacgaagatagtttgcacagtacgaccagcttctcgcactgtttccatgatcgaaaagcttttgaaagccggtatgaatgtggctcgcttcaacttctcacatggtagccatgaataccatcaagagacactcgacaacctccgctctgctatgcataataccggcattctcgctgctgtcatgcttgatactaaaggggcctgagattcgtactggtttcttgaaagatgggaacccttatccactgaaggaaggtcaagagattactataaccactgattatgacattcaaggagacaaatcaacgatatgcatgagctataaaaagcttgcttttggt

SEQ ID NO: 101131 - DNA, 706 bp, Arabidopsis thaliana columbia
  unsure (1)..(706): unsure at all n locations
nnnnnnnnnnnnnnnnnnnnnnnnnnnnnnnnnnnnnnnnnnnnnnnnnnnnnnnnnnnnnnnnnnnnnnnnnnnnnnnctttttttttttttttttatcactcttaatcaaactacaaattaagcaagcatttcttgagttttgaaacaaaacactgttttacgtgttcacagcaacatcaagaacaacaacaacaacaacatgaccgttttacaatacagccaaaaggcaaaagcttagtctgaaaatacaaaatacaataaatctcacacaaaggaccaattgatgaacacaaagcagatgcaatgagcattttcttcttcatttagtactttccaagcaactgctctctcatacgaaactggtctccccatgcttgagagacatatcccgccttgaaggcacgcgaagccctgttgcatgatctgtgggaactcagagcaaagagtctttcttccattgtcatcaaatatcttctctaaagagatgtcttgaagagcaactaatgtagtctccagcatgtcaagtcccgcctggtttgcaaatgtgaagacgggcaaggccttcattgagcagcagattatagcatcagtgtggtgccaaggtcttaggccagatcattgcggcctgttggtaagagccaacnctgngccngaactggatcacggaggttggtnggnccagggggacatgggcgttgaggga

SEQ ID NO: 101132 - DNA, 587 bp, Arabidopsis thaliana columbia
  unsure (1)..(587): unsure at all n locations
aantcccccaangggaaaancttnggnntgaaanncaaatnnaaaaacncccncnaaggnccaatttnntgacccaaaagnaattcaatggggatttnccccanaattagnactttccaaagaaattcnttttaaacggaaactggcccccccatgccttgagaggacatanccccgccttgaaggcacccgaanccctgtttgcatgacctgtgggaactcagagcaaagagtctttcttccattgtcatcaaatatcttctctaaagagatgtcttgaagagcaactaatgtagtctccagcatgtcaagtcccgcctggtttgcaaatgtgaagacgggcaaggccttcattgagcagcagattatagcatcagtgtgatgccaaagattcttaagactagattcattgccgtcactgtttgatttaagtagctcaacacccatgtagcccctgtaactctggcaaatccaacgagcaagtgtttgggcttcaggagtacccaaaggagtgcgtagaccaacttgtgagctgatatgagaaggagaaagagccaatgctactctctgcaccgatgatatgatac

SEQ ID NO: 101133 - DNA, 795 bp, Arabidopsis thaliana columbia
caagatcgtattaaagtttctaccgccattgatatgactttgattggaaactctttccctccttcctccggagagtttcgtggtgacgttagatggtatatcgatcccgtcatcgggtttcttacgagtacgaactcagcgttactagccaacatctatccttacttcagctacgttgacaatccacgtgacatatctctctcttacgctctcttcacttctccttccgtcgtcgtatgggacggctctcgtggctaccaaaacctctttgacgctttacttgacgttgtttactctgccgttgaacgctcaggcggtggatctctcccagtggttgtttccgagagcggatggccttctaacggtggaaacgccgcgagtttcgataacgcgcgagctttttacacgaatcttgcgtcgcgtgtgagagagaacagaggaacaccgaagagacctggaagaggagtggaaacgtatttgttcgctatgtttgatgagaatcaaaagagtcctgagatcgagaagaattttggtttgttttttcctaataaacaaccaaaatttccgatcacattctctgccgcgagagacggtacggcggttgagtgatgattttatatgctgagatttatgtgaataattgggagattatcccataaaaggttccaaataaagacaaatttcaaataaaacctgttagtccaagttaaattaaaaaaaaaaaaaaaagggcggccgctctagaggatccaagcttacgtacgcgtgcatgtgacgtcatagatcttctatagt

SEQ ID NO: 101134 - DNA, 604 bp, Arabidopsis thaliana columbia
  unsure (1)..(604): unsure at all n locations
gacactatagaagagctatgacgtcgcatgcacgcgtacnngtagcttggatcctctagagcggccgcccttttttctttttttttgtttttaatctataaattgttttatgattccaaatattaaagtcataacacaacgacgtaagcaaccaatgtataattttgtgcagtaattactaaaacaaagaacagtgccatacggtaaagccaaaaaagaccgtagaattcaacatcacaacacgaaaccacaacacaataaatggattccatcatctgattgatttaccattccctgtttttatgtacacatccttcctgcttttgattatctttcttcaatcgctttcaaagtcgtcttcatctccaaatgagaacacagatgcatcagccgccataaccttgaactcactctctgagcttgaagaagcattgaccccagccccagagggtttttctgttgcttcacccttgctcacagttactccttgccccggctggtgaggatcctttggtttccggaaatggcccttccccggcgctttaggccnnaaaggggnttcaacnggggcccttttggctnggggggttnaaaaaanccgtna

SEQ ID NO: 101135 - DNA, 493 bp, Arabidopsis thaliana columbia
ggcatttacgcgtcagtgagagtggagtatataacaatctgaagctgaagaagaagaattgagagataacgagagatagtttcttcttcatccaaaagaatccaatcttttcctcaaaagatagtttctggatcgaacgacaatggagattttctactacttggtgtttggggttttgggtctcgtcgtcgcggcgttggagcttagcaagaacaacaaggatcgaatcaacacttcttcagctttcaattctttcaagaacaattatctccttgtctattcgctcatgatggcgggtgattggttgcagggtccatatgtgtactatctttatagtacttatggatttggtaaaggggacattggacagcttttcattgctggttttggttcctctatgttgtttggtaccatcgttgggtctctagccgacaaacagggtcgtaagagggcatgtgttacctattgtatttactatatattgagctgcatc

SEQ ID NO: 101136 - DNA, 1280 bp, Arabidopsis thaliana columbia
  unsure (1)..(1280): unsure at all n locations
nnnnnnnnnnnnnnnnnnnnnnnnnnnnnnnnnnnnnnnnnnnnnnnnnnnnnnnnnnnnnnnnnnnnnnnnnnccacgcgtccgaattgctgaaggtgtggatttcattgctgtatcgtttgtcaagtcggctgaagtcattaatcaccttaaaagttatcttgctgctcgttcccgtggaggggaaattggagtgattgcaaagatcgagagtatcgattcactgaccaatttggaagaaattattctagcatcagatggggccatggttgcaagaggagatctgggagctcagatacctcttgagcaagttccagcagctcaacagagaatcgtccaagtctgcagagcgctgaacaaacccgtcattgtcgcttctcagctactggagtccatgattgagtacccaactccaaccagagcagaagtagccgacgtgtctgaagcagtaagacaaagatcagatgcattgatgctctctggagaatcagctatgggacaattcccagacaaggcgctcacggttctaaggacagtcagtttaagaatcgagagatggtggagagaagagaaacgtcatgagtctgtgccgcttcaagccataggctcttcattttcagacaaaatctcagaagagatctgtaactcagctgctaaaatggctaacaatcttggagtggacgcggttttcgtttacacaacgagcggacacatggcatcactggtctcccgatgtcgcccggactgcccgatctttgctttcacaaccacaacctcagtgagaagacgcttaaacctacaatggggacttatcccattccgtctcagcttctcagacgacatggaaagcaacttgaacaaaacattctcgttactgaaatcaagaggtatgatcaaatctggtgacctcgtgatcgcagtctcggacatgctgcaatcaatccaggtaatgaacgtcccgtaattctctctctttatacaatttcgcaatcccgcaaaagagtgttttgtttcctacttttgttactgtttttagactactcttacattagattccagaggcatcatcatcttcggtttgttaacaacagtaatgtgtaagctttgtttgtagtgtgtactgtttgtttttggttttcaataatatcagtaatcttattcaaatattcgattcnnnnnnnnnnnnnnnnnnnnnnnnnnnnnnnnnnnnnnnnnnnnnnnnnnnnnnnnnnnnnnnnnnnnnnnnnnnnnnnnnnnnnnnnnnnnnnnnnnnnnnnnn

SEQ ID NO: 101137 - DNA, 472 bp, Arabidopsis thaliana columbia
cccacgcgtccgctgaaaactcttttctctccacctctttctctcttaccccaaacacaaaatctcctctttaatggatatatcgcctctccgatctcattcttcctcgtttttatctgccaaactcttattgctcttcttcttttgtagttttcgtgcttcttcgatttcttcttcttcagttgtttcccatcgtcgtaatccttctagctttcggtttctttgataattccctttgaattcgtttttcttcttctttcaatttccgcaaataatcagccgccgataagataatcatggggaggaaatctcagcgtaagaacgcgacaatgtttgatagtgatgatgatacaagtagtgtaagctcttcctccaccatgccatctgagagattgttgaatcctggtatggatgaagttactgttctcaaggatgctttggtagatcaacccttgatgctctctatgagaaa

SEQ ID NO: 101138 - DNA, 559 bp, Arabidopsis thaliana columbia
  unsure (1)..(559): unsure at all n locations
acgactcactatttggaaagctggaccgcctgcaggtaccggtccggaattcccgggtcgatccacgcgggcgtttctcatctcgccggtcaacttttgagagagagaagaagaaaaatgcatttgagtgagaatgaaggtgtcgaaggtaacaccttcgtggtcactggaggtcttggcttcgtcggtgcagctctctgcttagagctcgttcgtcgtggtgctcgccaagttcgctcttttgacctccgtcactcttctccttggtccgatgatctcaaaaacagtggcgttcgctgcattcaaggtgatgtgactaagaaacaagatgtggataacgctttagatggagcagactgtgttttgcatcttgcttcttatggtatgtctgggaaggagatgcttcggtttggtcgttgtgatgaggttaacatcaacgggacttgtaatgtcttggaagctgcgtttaaacatgagattacaagaattgtgtatgttagcacttacaatgttgtgtttggtggtaaagagattctcaatggtaattanaggttttgcc

SEQ ID NO: 101139 - DNA, 545 bp, Arabidopsis thaliana columbia
  unsure (1)..(545): unsure at all n locations
cggacgcgtgggcaattcgttaccattgctctgtttttcaaactctgtgaactcataatatgagcttttgaagaactgcttaacgatgagcttagttctcagattcaggcaacatttatctcaaacctcatccagattatcacttctttctcgaatcggcggttaccggagttacacccaaccggcgaagattgaagatgaagaagaagaagaattcgatcagagaaagctcccaacagattacgatccagctacttttgatccaacagagcatcgaagtccaccaacggatcgtgtattcagactcgtagacgggatctcatctctaacattattagcaatctccgagcttggttcgattataatgaaggaggaaggtatgacggagttaccaacagtcgctgttatgaaacctngggctngtggtngtgttngtgtttggtggtggtggtgggatggtgagtcaaagtggtntnagtaagnagcttaagtggggaggcanttttttantnaagttggggcttttaagnatctctaggtnagtc

SEQ ID NO: 101140 - DNA, 1118 bp, Arabidopsis thaliana columbia
  unsure (1)..(1118): unsure at all n locations
tcctcctgcggtaccggtccggaattcccgggtcgacccacgcgtccgagacgatgacgacattcatggctcctcctccagcagcgacttcccttgccttccatcctcaagacaataatataattgctatcggaatggatgactcttctattcaaatctacaatgtcagagttgatgaggttaaaagtaaattgaaaggtcatcagaagagagtgactggtttagcattctcaaacgtgctaaatgttcttgtttcctctggtgctgattctcagctttgtgtatggagcatggatggatgggaaaaacaagctagcaaacagatacaaattccaagcgggcattcaccaaatccacttgctcatacacgcgttcagttccatcaagaccagatacatgtacttgttgtccatgccagccagttagccatatatgaggctcctaaattagagaacatgaagcagtggataccgaaagagtcaagtggttcagtcacagatgcagtatattcatgtgatagccagtcaatctatgcagcctttgatgatggaagtgtgagtatcttgacggcaacaacattgcaactgaagtgccgcattggtcccaattcatatttgccttcaaacccgagctcgagagtatatccagccacagttgcagcacatccgtctgaaccaaaccagtttgcagttggactaaccgatggtggggtccacgtgatcgaaccaccaggtccagaagggaagtggggaatatccgcaccaccagaaaacggagcagggccaagcgtctcctcagctcccgggtcagatcaacaaccgaggtgaggtctggtctgttcaccaagctcgcaccatgcagcctcccaagttattattataccctttgagaggatagctctgagattgtaggttattatattgtcttactcaattcatagtaggtgaaaggtgaagcagcagtttcttccattaattctagtgttttactaaatggtttcatttgagattcccttattagtaccaaaaaaaaaaaaaaaaaaaagaccnnnnnnnnnnnnnnnnnnnnnnnnnnnnnnnnnnnnnnnnnnnnnnnnnnnnnnnnnnnnnnnnnnnnnn

SEQ ID NO: 101141 - DNA, 712 bp, Arabidopsis thaliana columbia
  unsure (1)..(712): unsure at all n locations
gcgtccgcccaatttgtctgtctctcttttgttttctctgctaacagatctctctaaatatctgttacttttgttcatatctttttacttttcaaactactaattttcctttcgcttcttctattaataacaacactctctctctcagacttcttttcttttttttctacggcgttgattcattcgcaatgacctcagtttctgtgtaccataattgacctagcagattctgtttttaatggtagattctgacccggtggaatttccgccggagaaccgccgtggacagctcttcggcaaatacgaggtcggaaaattggtgggatgcggcgccttcgcgaaagtgtaccacgggaggagcacagcgacgggtcagagcgttgcgatcaaagtggtgagcaagcaacggctgcagaaaggaggactcaatggcaacattcagagagagatcgctatcatgcaccgtctgcgccacccttctatcgtgcgcctgttcgaggtcctcgccaccaaatccaagatctttttcgtcatggaattcgccaagggcggttgagctntttcgccaaagttttcaagggcagggtttttcgggggttcttagccgncgttatttcnagcaaggttatttccccgtcggttatttcnctcccggggatttttaccgnnttttaaccggnnattcctcnttncgggagcngntttaagcttt

SEQ ID NO: 101142 - DNA, 1467 bp, Arabidopsis thaliana columbia
tgttttgcacatacacacaaaaataaaaaagactttatatttattaacttttaaatcacacggattagctccggcgaagtatggccgtcgtcttcatcttcttcctccatcatcagatttttccttaaatggaagaaaccaaacgaaactccgatcttctccgttctcgtgttttcctctctggcttttattgctgggattgggaatttctcaccgctctcttgctttttagttgctgattctttttccttcgactttctatttccaatctttcttcttctctttgtgtattagattatttttagttttatttttctgtggtaaaataaaaaaagttcgccggagatgacggctgtgacggcggcgcaaagatcagttccggcgccgtttttaagcaaaacgtatcagctagttgatgatcatagcacagacgacgtcgtttcatggaacgaagaaggaacagcttttgtcgtgtggaaaacagcagagtttgctaaagatcttcttcctcaatacttcaagcataataatttctcaagcttcattcgtcagctcaacacttacggatttcgtaaaactgtaccggataaatgggaatttgcaaacgattatttccggagaggcggggaggatctgttgacggacatacgacggcgtaaatcggtgattgcttcaacggcggggaaatgtgttgttgttggttcgccttctgagtctaattctggtggtggtgatgatcacggttcaagctccacgtcatcacccggttcgtcgaagaatcctggttcggtggagaacatggttgctgatttatcaggagagaacgagaagcttaaacgtgaaaacaataacttgagctcggagctcgcggcggcgaagaagcagcgcgatgagctagtgacgttcttgacgggtcatctgaaagtaagaccggaacaaatcgataaaatgatcaaaggagggaaatttaaaccggtggagtctgacgaagagagtgagtgcgaaggttgcgacggcggcggaggagcagaggagggggtaggtgaaggattgaaattgtttggggtgtggttgaaaggagagagaaaaaagagggaccgggatgaaaagaattatgtggtgagtgggtcccgtatgacggaaataaagaacgtggactttcacgcgccgttgtggaaaagcagcaaagtctgcaactaaaaaaagagtagaagactgttcaaaccagcgtgtgacacgtcatcgacgacgacgaaaaaaatgatttaaaaaactatttttttccgtaaggaagaaaagttatttttatgttttaaaaaggtgaagaaggtccagaaggatcaacgcaaatatataaatggattttcatgtattatataatttaattagtgtattaagaaaataaaacagatgttgaagttttattgttgcttaatttatgtcttcataatgtaaaaaaaaaaaaaa

SEQ ID NO: 101143 - DNA, 403 bp, Arabidopsis thaliana columbia
actagcaatgcagaaagctcttcatctactccagtcagcagtgaagaacttaacatttcttctcacctccggaagtttactttcaatgatcttaagctatctactagaaatttcagacccgagagtcttcttggagaaggtggttttggttgtgtctttaaaggatggatcgatgaagacggtactgctcctgttaaacctggtactggtcttacggttgcagtcaaaaccttaaatcctgatggacttcaaggtcacaaagaatggcttgctgagattaatttccttggtaaccttctccatccaaatctagttaagcttgttggttattgcattgaagatgatcaaaggttgcttgtgtatgagtttatgcctagaggaagtctggagaatcaccttttca

SEQ ID NO: 101144 - DNA, 516 bp, Arabidopsis thaliana columbia
agttccaaagtcaattattaatttctaaaacgtcaattatagtaatcaagaaataaaagtttctaaaatgataatacagagttgttaatttagaaagaaaaacttgaaaaagacgggattttgtacattaataatacactgtcacattaagaccagtagattgactcataagacgtcgttcgcttcacaactctcagatcgaaatatctaaaaactttatagataaatctcaaccgtccaaagtgccatgccattaagttcctctatcactttagatatttgcttttttttcctctgtatcagaaactacgtcgttttcaacaatcgtaagtgacttctgatacgtattgcataaactcagcatcgttctcaatcccagtcataggtctccggcgccaggaactacttccagatccacgcttccgtttccttctctaccggggaaacgccgagatcttcccgtcggatttattcggggccccccgtttctcacagctaacggtttttccccatccg

SEQ ID NO: 101145 - DNA, 1055 bp, Arabidopsis thaliana columbia
  unsure (1)..(1055): unsure at all n locations
atgatactccnnnnnnnnnnnnnnnnnnnnnnnnnnnnnnnnnnnnnnnnnnnnnnnnnnnnnngtttacaccttcacactccacccgtccgcccacgcgctctctttctttctcagattaatcgctgagaagaagcaaccacctggagacggcggagatggcagggtacagagtggaagatgactacgattacctcttcaaagttgttcttataggcgattctggagttggcaaatccaatctcctttccagattcactaaaaacgagttcaatctagagtctaaatccaccattggcgtcgaattcgccactcgtaccttaaaagtcgatggcaaagtcgttaaagctcagatttgggacactgctggtcaggagaggtaccgtgccatcactagtgcatattaccgtggagccgtgggtgcactcctagtatatgatgtaactcgccgtgcaacatttgagaacgtagatcggtggttaaaggagctcaagaaccacacagatccaaacattgtagtgatgctggttggtaacaaatctgatctccgccacttgctagctgttcctacagaagacgggaagtcctatgcggaacaagaatcgctctgcttcatggaaacatctgcccttgaagctaccaatgtggaggacgcatttgcagaggtgttgacacaaatttatcgcatcacaagcaagaagcaagtggaagctggtgaagatgggaacgcctctgtcccgaaaggtgagaaaatcgaagttaaaaacgatgtctctgcgctgaagaaactcgggtgctgctcaaattgaagcctttttttgttttcactgttgagagagaattataacccccatggtccattgtttgattatgtccttgttttgtaacactatcgacatttgtatgagttttagaccatacactacataatgtttatttaactttatttcaaaaaaaattggtgnnnnnnnnnnnnnnnnnnnnnnnnnnnnnnnnnnnnnnnnnnnnnnnnnnnnnnnnnnnnnnnnnnnnnnnnnnnnnnnnnnnnnnnnnnn

SEQ ID NO: 101146 - DNA, 506 bp, Arabidopsis thaliana columbia
  unsure (1)..(506): unsure at all n locations
atgatatcgccgnnnnnnnnnnnnnnnnnnnnnnnnnnnnnnnnnnnnnnnnnnnnnnnnnnnnnnnnnnnnnnnnnnnnnnccacgcgtccgagaaaatgtctcactcgttttgccttataatatttctttcaacaacaacccaaatctacaaaaaatcccaataaaaaaaaacttcagtctgtttgacattttgtcgaacacttggacggcatcacaaaaagctctaaactttctgactaccaatggcggattcgtcttccgacaaggagaagaaggaaaataataagcagcccgtgtatcgtggagtccgtatgaggagctggggaaaatgggtatcggagattcgcgaaccgaggaagaaatcgagaatctggctcgggacttttccgacggcggagatggctatgcgtgctcacgacgtggcggctatgagtatcaaaggaacttcagccattctcaatttccctgagctctctaaacttcttccccgacccgtttcgctc

SEQ ID NO: 101147 - DNA, 782 bp, Arabidopsis thaliana columbia
taaacccaattgttatcctccccaaaccaaacggtcaaacctcactcaccatgagacaccttagctcacctccatggcctctcctccttctcctcctcctctcttctttcacctccggcgaatcctctctgtccgcagaaaaaaacaaattgcacaccggtggtctcagtagacagagttttcctaaaggattcgtgtttggaaccgccacgtcagcttatcaagtcgaaggcgagactcatcaagacggtcgtggcccaagcatttgggatgccttcgtcaagattcctgggaagatcgccaagaatgccacggctgagataacagtggaccagtatcaccgttacaaggaagatgtggatttgatgaagaaactgaacttcgatgcttacagattttccatttcatggtccaggatattccctgagggaagtggtaaagtcaactggaaaggagttgcttattacaatagattgattgattacatggttcaaaaagggattacaccttatgctaatctgtaccactacgatcttccattggctttggaaaacaagtataaaggcttgcttggtagacaagtagtgaaagattttgcggattacgctgagttttgttacaagacatttggtgatagagtgaaaaattggatgacgttcaacgagccgcgtgtggtagctgctttaggttatgataatggtattttcgcaccgggtagatgctcaaaagcatttggaaattgcactgaaggaaactccgcgacagagccatacatagttact

SEQ ID NO: 101148 - DNA, 546 bp, Arabidopsis thaliana columbia
cagctctatacgactcactatagggaaagctgtccgcctgcagtaccgtccggattcccgggtcgacccacgcgtccgcggacgcgtgggcggacgcgtgggccttttccccggaaaatttatttgctgatttttcttccttccatcgccacttttcctggaaaaaaaaactaaatttcgtctctttctttaagctaaaggagctttctgtgatcaattttttctatatttctgtagttgcgttcttatttcacgcgctttgtgatttgattatttaagccactaatggcttaggatctgtatattatcacttcatgaattctcgttttctcggataagttgttaagtttctaaattagggaattttaggaattagggcttttttgggtttgtatgtgtgcttgattgggtaagaagatggctgcagttataagaaagttattacctttcccatcaccgaatcctaaaagggataatcgagaaagtgacgatgatgatgaaacaagtagtggctatcgaatcgaatattcattcgccagtgagtat

SEQ ID NO: 101149 - DNA, 514 bp, Arabidopsis thaliana columbia
ggtctgatttaggcgcactatagaatagcttgacgtcgcatgcacgcgtacgtaagcttggatcctctagagcggccgcgctttttttttttttttcccaaatcaatggtctctaaaattaacatacagctctctcgtggagattttgaaacataaggagtcataaattcgtatacactctcgacccatctcaaatacttttcagtattaggcttggtcttatcttcttcttcactccaataagctaaatattggatctcataaagattaccttctctatgtgggaaatggtttttcgttatccgcaatttcactcattttgccaccaaatggagtgagtatgatctttgcaagccgagcctcgggcgcctcgaatcgtctccaaagatactgaatcgcggttttaggtatcggttcttcgatgaaatcatcttttcccttgaaagatcttgacgttcgtttccgtttcgcaagaatttccattgattctccttttataaaccagagaacagac

SEQ ID NO: 101150 - DNA, 797 bp, Arabidopsis thaliana columbia
  unsure (1)..(797): unsure at all n locations
nnnnnnnnnnnnnnnnnnnnnnnnnnnnnnnnnnnnnnnnnnnnnnnnnnnnnnnnnnnnnnnnnnnctttattttttttttttttttttgcaagggaaacaaatttgactatttcaaatatcattaacatatttcataattggtatactttgttcatcacagaagaaatccattggatcaacatttgttttaactctcaccaatctatcgaaattgttcttgaaatacttcactccccaaacctttgcttcctcgtactttgtcttcatattcaaccccagatacattccccaatcaatggcccctaaaattaacataagcccccccggggggattttggaacataaggggtcataaattcgtatacactctcgacccatctcaaatacttttcaggattaggcttgttcttatcttcttcttcactccaataagctaaatattgaatctcataaagattaccttctctatgtgggaatggtatttcgtaatccgcaatttcactcattttgccaccaaatggagtgagtatgatctttgcaagctgagcctccggcgcctcgaaatcgttccagatatactgaatcgcggttttaggtatcggttttttcatgaaaaccttctttttccccttgaaaagaaactttgacggttccgtttccccgttttcccaaggaaattttcccaattgggaatttcttcccttttttaataaaaccccaagaagaaaccaaggaactttcaaattcccaaaacttccatttttcttcctctacaaaatattttcccaaaatct

SEQ ID NO: 101151 - DNA, 584 bp, Arabidopsis thaliana columbia
  unsure (1)..(584): unsure at all n locations
nnnnnnnnnnnnnnnnnnnnnnnnagctatgacgtcgcatgcacgcgtacgtaagcttggatcctctagagcggccgggcttgttttttttttttttttaatattacattgaaaattatcattatcatttcgttcttattcatagtacaatcgatgaagaactaattcacgtgaatcaatggtctaaatacttcactggaacaagtacaagctcacttttttgctcacagtaagtccaggagcttcttccatatcgatatcttcgactaccatgccttctggtaacttccaatcaaaatgatacaacatattagctaggccaaactccaccattgttgttcccatgtacagtccaggacaaattctcctaccactcccaaacgacaacaactcaaagttctgtccttttgcatcaatgttactatcattaaacctttcggggagaaacatttctggatctttccatgtatcaggatcacgcccgatagcccaaacattcacatgaagccgtgttttggccgggatcgggttgccttggtctcaattccaggattccttttctggaaagaaaaggggtggaggat

SEQ ID NO: 101152 - DNA, 531 bp, Arabidopsis thaliana columbia
  unsure (1)..(531): unsure at all n locations
nnnnnnnnnnnnnnnnnnnnnnnnnnnnnnnnnnnnnnnnnnnnnnnnnnnnnnnnnnnnnnnnnnnnnnnnnnnnnnggcttgttttttttttttttagtacgaaatttctcttaacgaagctattaaatatccattgggagattctgatctattttagtatttctttttttgatggatagaatctgcagcggatgcacaaacttgatacctgtcgaaatagcgttaaagattgctgctaagatacgtgcaagggagagatttgctgtgtatatagtcataccgatgtggccggaagggccaccggagagtgaaacggttgaagagatactttattggacgagagagacgatgtcaatgatgtatcaaatcattggagaggcgatatgggaagttggagacaagtcgcatccgagggattatctaaaacttgcttctggcttgcaaacaagagaagagaagagagaatggggactcttgaagcagtttccgcccccccccccaaaaccgcttccctggaaatccccaaag

SEQ ID NO: 101153 - DNA, 396 bp, Arabidopsis thaliana columbia
cttcgccatcatgtccttaaattatctctttttaatgaatggagcgataaagctctcacctttatgcctcctcctactttttccacttaatcatcccacttccttcttcagatgtaagcaatgttgcctagagtcctcctctgattcagatttcgttgctgaatcttttgtaaaactctgttcttcgtatgtcgagaagccaaattcagggaatttagggttttacaaaaaaataaaaaagagtttctttttttggatgatggaatcgaattactcaggtgtggtcaacggctacgatgtgagtttcttaccaacttcgattccggatcttggattcggtgttccttcttctagtgattttgatcttcggatggatcaatactatcaccaaccttc

SEQ ID NO: 101154 - DNA, 817 bp, Arabidopsis thaliana columbia
  unsure (1)..(817): unsure at all n locations
acnnnnnnnnnnnnnnnnnnnnnnnnnnnnnnnnnnnnnnnnnnnnnnnnnnnnnnnnnnnnnnnncttttttttttttttttttaataataattttttttgtttctttcataaattatgaataatttaaaagcaaaggaaggtgatgggcttcttttatcattgcttttgttcccattgtgtggtatgaaaaaaaggagctgattttatttgtttggtgactaagaataaaaggagtattttttgttttctaattgataattgttattgtggtgtcctttccttttaaagaccaaacaagccggaggatattctcacgtcacacaagtgcacatgaccttccttcattgttgtatcatcaaactcctttgggctgttctgtgactcataatgtcaccatatttactccattgcctgctaatttacataattatctgtgctttcataattacagaagaaggtatcaaagatttaaataataaagctccatatgtggtttttctaaggtatcactagaattgaggatgccttgggtatgaacaaatgacatatcgacaatctgggttccttgaaaggatcaatacttgttgggatgattaggttgacgtgaagaatgaggatactcaaccaaattccattcaccgatagagtttttatcctttttaacatcaggaaactccaccatgtagcttggatctcgattcggaacattataatagctactgttccacgttgttggctgagtatgagaactgttaagcaaggtgctggaacttgaggagttcaaattccacacggatttgttcggctcgtgtct

SEQ ID NO: 101155 - DNA, 517 bp, Arabidopsis thaliana columbia
  unsure (1)..(517): unsure at all n locations
nnnntnnnnnnnnnnnnnnnnnnnnnnnnnnnnnnnnnnnnnnnnnnnnnnnnnnnnnnnnnnnnnnnnnnnnnnnnnncttttgggtttgttttgattgaatagttttttcttaatcagctacagaagccttacataaataactctgaatcgttcataagactatctctaatattctaaagctggatgcacatgctggtgaacaaccagcatacctgacggatgagcagctgaagcattgattttgcctttcctccgatcaactagactaataccagcggccgactggtgtaacggggaagacccaccggttgtagtattagagtggtttcctagatcagatgtctggggcaaggattctcctgatttatatttggcaagctccagatatcttctctgaagttcagcctttaagaggttattctcttccacctgctgcttgattggggcttctgctgcttcaacagctttgataacttgaaacaagctatcgtttttaacgtcgttttcatgggaa

SEQ ID NO: 101156 - DNA, 573 bp, Arabidopsis thaliana columbia
aagacgcgtgggcggacgcgtgggcggacgcgtgggttgccctctggcgttttctgtcttgagctaaagaaataacaaataaaccgaaaaaaataaaaatagaaactttttttttttgtttatttgttctttctccaaaactccttttttttctcaccattatctcatgaacgtgagtggaggctctctgagtagagagagcctacccttgaaaataacctagggaggtctccaattttcaagctttacccattcaaaagaatcgtccttttttcctatttctgactttgagctatgatgatggtccattcgatgagcagagatatgatgaacagagagtcgccggataaagggttagattccggcaagtatgtgaggtacacgccggagcaagtggaagctctcgagagagtttacactgagtgtcctaagccaagttctctaagaagacaacaactcatacgtgaatgtccgattctctctaacatcgagcctaagcagatcaaagtttggtttcagaaccgcaaatgtcgtgagaagcagaggaaagaagctgctcgtcttcaaacagtg

SEQ ID NO: 101157 - DNA, 506 bp, Arabidopsis thaliana columbia
  unsure (1)..(506): unsure at all n locations
nnnnnnnnnnnnnnnnnnnnnnnnnnnnnnnnnnnnnnnnnnnnnnnnnnnnnnnnnnnnnnnnnnnnnnnnccacgcgtccgctattttctacgaacttcagaatctttcgtctctcttaattatttttctcaaatttctcgaaacatctagttttcttttcaaccagccaatcatgggtagtgatcatcatcatcgaaagctccacgttatgttcttccctttcatggcttatggtcacatgataccaactctagacatggctaagcttttctctagcagaggagccaaatccacaatcctcaccacatctctcaactccaagatcctccaaaaacccatcgacacattcaagaatctgaatccgggtctcgaaatcgacatccagatcttcaatttcccttgcgtggagctggggttaccagaaggatgtgaaaacgttgatttcttcactgcaaacaacaatgatggttaaaaacggagatgatcgtgaaattcttttttct

SEQ ID NO: 101158 - DNA, 721 bp, Arabidopsis thaliana columbia
  unsure (1)..(721): unsure at all n locations
gccnnnnnnnnnnnnnnnnnnnnnnnnnnnnnnnnnnnnnnnnnnnnnnnnnnnnnnnnnnnnnnnnnnnnnnaccacgcgtccgcccacgcgtccgcggacgcgtgggtcttagttcagggaggaggctcgagaacagtgccccatatctgaaagctgaagctaagaatctggacgttcgtgtttaaaccgacgacgtatttgaaattggctttgaaggaaaggtgaaattaatggcggaatcgtcgtcgccgtcgcctactgaagagatcgttcggttgattaagcgtttaagcgcttacgttgctttcaaaatgtcaagccttttctccactacatcgattcgaaatctggattcaagatcaattggtgcgattgcggggcttgcgattgcggtgatatttacgtggagggcgataagaacgcccggagagcaacgtcagagaaggcagccgaagcgtaggattcacaatgctgaaacgtctagtgctgctgctgctgcttctcagtcgaatctagcttcttcggttgctccggaagtttcttcgcctcgtgaggataattcgggtcaaaattgttggttgaccagtnctttcaacccngttaaacctcctttggggaaaatagtttggcanaancttngttaagganggaggaacaatccgnntctttgggaattttttggacaagnccgaggctnccnaaanagngccgttggttg

SEQ ID NO: 101159 - DNA, 932 bp, Arabidopsis thaliana columbia
  unsure (1)..(932): unsure at all n locations
ctcactatatgggaaagctggtacgcctgcaggtaccggtccggaattcccgggtcgacccacgcgtccgcccaagtcagaaaaagtagaataagaagaagaagaagaagaagaagagaaagagagtcagagacgacgacggacgaaacgacgctattcttacgctttcttcgatcgtcgatttgattttttcccttccttcttatttttctcggttgaagtagaagataaagcatcgatacatgatggctgattgataagagttttctccggagaggttcggagttttttttttagaaaggaaacattaaaaaagatggcagtctcttttcctcgtcttccgaggtggttgtgtggtggtagtaacactaaagatagagagaagaaagagtcaattcctaaaggatcttcttcacttagtccttcactgaagaagactactactagtaagactggttcttcctcttcatcagtgaagaagaccaagagaggatggattggaagaggaggatcaggatcaggaggggaagaggataagattgggaatgtggtgtttcctgaacctgatgatccagagtggtcaattggttgggttgagccacatggaccaggttttaaagctgaggatgatgattgtggtggctttgtggttttggttcctctttacaagaaagttatggatggttcagggaatcagattccgaatggcttcttctctcctgctgctcctgatgggaagaacatggaacagtggctgtcgtctatggggaagctataaattggagattgggaagaataagactagttctctgttgtttcagtatcgagatttaagcatcgaataatctaaaaaaaaaaaaaaagaannnnnnnnnnnnnnnnnnnnnnnnnnnnnnnnnnnnnnnnnnnnnnnnnnnnnnnnnnnnnnnnna

SEQ ID NO: 101160 - DNA, 962 bp, Arabidopsis thaliana columbia
  unsure (1)..(962): unsure at all n locations
nnnnnnnnnnnnnnnnnnnnnnnnnnnnnnnnnnnnnnnnnnnnnnnnnnnnnnnnnncaaaaaaaaagaaaaagagagagagagcagcaaccccagcagcatcgaagatcgtcgatcgtcgatcggttgctctctttcattaatcagatctaattgatacccaagcttcttcatcggaggccgtatctcacgaggaaacatgggcggtagatttggagtcctcctagtcctcttcctcttgagctggtcttgtcatgctacaaacccgattcttctcgaaccattcgaatcagctcatgatgacaaccaagtctgtgaactatgtgacaagtatgtcacgctagtcattgattaccttcaagactacgacaaccagaatgaactcgttgaggcccttcatatcagctgctctcagattcctcctctcaaaaaacagtgtctttcaatggtagatcattacacccaacttttcttcacacaagtctctactatcaaatcagaccaaatctgcaaacggcttaacctctgtcaagctgtgacaccggcctttgcctctcaaggccatcaaggaaactgcgaggcttgccgcgagactgtctctgaggttgtcaccaaactcaaggatcctgagactaagctgaagataattcggttacttctcaaggaatgcaagtcgcttaacaattaccaggacaagtgcaagaagatggtattcgagtacgggcctctgatgcttacggatttgcagaagtttctggagaagaaagacgtgtgcactatcctccacgtctgtccaggtccagccacccaccgtgactacgttcctgcggtggagtcattggcagattcgtaaattcggccaccttggttttgtcgtcattcacactaataccatgccatgatcgtgatgctaatttaatttggtaacccggtggtcatgtacaatcctgattgatatatt

SEQ ID NO: 101161 - DNA, 373 bp, Arabidopsis thaliana columbia
aattgctttttaagctttcttaccattaggaccattaagagctttccataaaagcatcacaacggctgcaacagttaacaaatacaaggacgagtacagaaactggttcaggagtcatcatgcctcagaactgcatagcaccaaggcctgaagaagatggtggagtcatggttcaaggtttgccagatatgtcagacacgcagagcaagtctgtactagccttccctacgattacttcacaacctggtctccagatgtctatgtatcccataactctcaagtttgaggaggttgtgtacaaggttaagatagagcagacaagtcagtgtatgggatcatggaaaagcaaagagaagacgattttgaatgggat

SEQ ID NO: 101162 - DNA, 663 bp, Arabidopsis thaliana columbia
  unsure (1)..(663): unsure at all n locations
ctgcggtaccggtccggaattcccgggtcgacccacgcgtccgctctgacaaagcttctgctgaggcagctcctgcttctggagactgtgatgtaaacatgcaggacgccaaagacaccagtgatgcaactggtactgacaatggtgttccagagtctgctgagaagccggtgcaaatggaaactgattcaaaggctgaggctccaaagaagaaggtgaagaaaacaaatgtaccactgtctgaattggtctatggtgccttgaaaactgtggaggtcgaaaaggcagtggagaaggaatttgagatggctttgcaagacagagttatggaagagaccaaggaccggaagaatgctgttgagtcttatgtttatgatatgcggaacaaactgagtgacaaataccaggaatatatcactgactcggagagggaagcattcctggcgaatctgcaggaagttgaggattggttgtatgaagatggggaagatgagaccaaaggtgtttatgttgcgaagctcgaggagctcaaggaggtgggtgaccctgttgaagtgcgttacaaggagtcattggaaagagggtcggtcattgatcagctttggttactgtattaaccgccatccagaggaggcaattatnnnttnnggtnccccaggtttt

SEQ ID NO: 101163 - DNA, 578 bp, Arabidopsis thaliana columbia
  unsure (1)..(578): unsure at all n locations
cnangggccttttttaaancccccnaggtnnccccttnattnccnnaaaccaaaggttttnacccggttttggaaccaaaaccttgcnccgggnaaaaccnccaccancagnccncgttcccaagtttnccacaccggttttttgncagctgacgtaaaaaaccaagccagagccattggacaagttttgcagccctataatgaccaaaccaaaacccgccgntaaagcagaggcaccacaagccaagggaggtgagcaggcggatgagggcaagagtgagccagagcaaccagcttctgcccgaagcaatggaagactgagaatcccgcggaaggtagtacctaaatgaatgacgagaccgagatggtgttgttgtatcgattttgttttaatttacctagtggaaccactttttgtagtttcgctattatcccccaaacgattctatatttagttctccctttcgacattttttaggaggtatattttttattgtctgttccttgtggtttcattttagtttgaaggtcttgttactttatttttgtttgtctctataatgattgttgtgtgtaaa

SEQ ID NO: 101164 - DNA, 606 bp, Arabidopsis thaliana columbia
  unsure (1)..(606): unsure at all n locations
agatctccagctccctacgactcatatagggaaagctggtacgcctgcaggtaccggtccggaattcccgggtcgacccacgcgtgggcacgattacagatttctcaccttcacccagatttcggtggaagcttccagaacgcgaacccctctcgcgatccaggttgctatcgaacacgtgggacgccccagtactgaagaacacaaagcctaacaatgagtgtagttggttttgattttggaaacgagaattgccttgttgctgttgcaaggcaaagaggtatcgacgtcgtgcttaatgatgagtcaaatcgcgagactccggctatcgtttgctttggtgacaagcagcgcttcatcggtactgctggagctgcttctaccatgatgaaccccaaaaactccatctcacaaatcaagcgcttaattggtcgccagttttccgaccctgagcttcaaagggatatcaaatcccttcccttttctggcactgaaggccctgatgggaacccttggtccaggcaattatttnggnganattangcctttacccgntcaggcatgggatgatgtgccaactgnaaggattnngggaaaattgaaaac

SEQ ID NO: 101165 - DNA, 3103 bp, Arabidopsis thaliana columbia
  unsure (1)..(3103): unsure at all n locations
gcttacgacaacctctcctgctcttcgttttctctctacgacgataaaacccagatttggttcaagcttccataactttaaacccctctcgcgatccaggttgctatcaaatacttgggaggcctcagtattattgaataacacaggctgacaatgagtgtaattgggtttgatttcggaaacgagaattgccttgttgccgttgcaaggcaaagaggtatcgacgtcgtgcttaatgatgagtccaatcgtgagacgcctgctattgtctgcttcggtgacaacgagcgcttcatcggcactgctggagctgcttctaccatgatgaaccccaaaaactccatctctcaaattaagcgcttaattggtcgccagttttccgaccctgagcttcaaagggatatcaaatcctttcccttttctgtcaccgaaggccctgatggctatcctttgatacatgctaattatttgggagagaagcgagcctttaccccgactcaagtcatgggcatgatgttgtctaacctgaaaggtattgccgagaagaatttgaatacagctgttgtcgactgctgtattggtattcctgtttactttaccgacctccagcgtagggctgttctcgatgctgccactattgctggcttgcatcccttgcgcttgatccacgagactacagctacggctttggcatatggtatttataagacagatttgccagagagtgaccagctcaatgttgcattcattgacattggacacgcaagcatgcaagtctgtattgcaggcttcaaaaaaggacagctcaaaatcttgtctcacgctttcgatcgctcccttgggggaagggactttgatgaagttcttttcaatcattttgctgctaagttcaaggacgagtacaagattgacgtctcccagaatgctaaggcttctctcaggctccgtgctacatgcgagaaactgaaaaaggttctaagcgctaatcctctggcaccgttgaatatcgagtgtttgatggatgagaaagatgttaggggtgtcatcaagagggaagagtttgaagagatcagcatcccgattttggagcgtgtaaagaggcctctagagaaagctctctctgatgcaggcctcactgttgaagatgtacatatggttgaggttattggctctggctctcgtgtccctgctatgatcaagattctaactgagttttttggtaaggagcccaggcgtacaatgaatgcaagtgagtgtgtgtcaaggggatgtgccttgcagtgtgccattctcagtccgacctttaaagttcgcgaatttcaggttcatgagagcttccctttctcaatttctctcgcttggaaaggagcagcttctgaagctcaaaatggaggagctgagaaccagcagagcactattgtttttccgaaaggaaatcctattcctagtgtcaaggctctaacattttatcgttctggaacattctctattgatgtgcagtacagtgatgtgaacgatttgcaagcacctcctaaaatcagcacatacacgattggtcccttccagtcatcaaaaggcgagagggcaaagctgaaagtgaaagttagattgaacctgcatggaattgtctctgttgaatcagcaactcttttggaagaggaagaagttgaagtatcggtcacaaaagatcaatcagaggaaactgctaagatggactctgacaaagcttctgctgaggcagctcctgcttctggagactgtgatgtaaacatgcaggacgccaaagacaccagtgatgcaactggtactgacaatggtgttccagagtctgctgagaagccggtgcaaatggaaactgattcaaaggcagaggctccaaagaagaaggtgaagaaaacaaatgtaccactgtcagaattggtctatggtgccttgaaaactgtggaagtcgaaaaggcagtggagaaggaatttgagatggctctgcaagacagagttatggaagagaccaaggaccggaagaatgctgttgagtcttatgtttatgatatgcgaaacaaactgagtgacaaataccaggaatatatcactgactcggagacggaagcattcctggcgaatctgcaggaagtggaggattggttgtatgaagatggggaagatgagaccaaaggtgtttatgttgcgaagctcgaggagctcaagaaggtgggtgaccctgttgaagtgcgttacaaggagtcgttggaaagagggtcggtcattgatcagcttggttactgtattaacagctacagagaggcagctatgtctactgatcccaagtttgatcacattgaattggcagagaagcaaaaggttttgaacgagtgtgtggaagcagaagcatggctgcggggaaagcagcagcagcaggacacgcttcccaagtatgccacaccggctctcttgtcagctgacgttaaaagcaaggcagaggcattggacaagttttgcaggcctataatgaccaaaccaaagccggcggctaaagcagaggcaccacaagccaagggaggtgagcaggcggatgagggcaagagtgagccagagcaaccagcttctgccgaaccaatggagactgagaatcccgcggaaggtagtacctaaatgaatgacgagagcgagatggtgttgtatcgattttgttcttaactctttttgatttacctagtggaacctctttttctggtttcgctattattcccggaaaaaatctatattgttaattcttccttttcgaaaacaatttttaggaagcatcttttttcttattgttccttgtggttttgtttttaatttgaaagtcattttttctgctcctctatatccctattatggagtgtacccggattcgttttatgttcccctgggctgtttttataaacagcaaattaaatgcaatttggttttcttnnnnnnnnnnnnnnnnnnnnnnnnnnnnnnnnnnnnnnnnnnnnnnnnnnnnnnnnnnnnnnnnnnnnnnnnnnnnnnnnnnnnnnnnnnnnnnnnnnnnnnnnnnnnnnnnnnnnnnnnnnnnnnnnnnnnnnnnnnnnnnnnnnnn

SEQ ID NO: 101166 - DNA, 413 bp, Arabidopsis thaliana columbia
gacaaagttttttggttgggatacatatgattcttttatgcagcatgatgtacaagaactcaacagagttctctgtgaaaagcttgaggacaagatgaagggaactgttgtggagggaacaatacaaaagctatttgaaggtcaccacatgaattacattgagtgcattaatgtagattacaaatctacacggaaagagtcattttatgacctccagcttgatgttaaaggctgcaaagatgtatatgcttcttttgacaagtatgttgaagttgaacgccttgaaggagacaacaaataccatgcagaaggacatgatttgcaggatgcaaaaaaaggtgttctattcatagactttccaccagttcttcaacttcagctcaagaggtttgaatacgattttatgagggaca

SEQ ID NO: 101167 - DNA, 536 bp, Arabidopsis thaliana columbia
  unsure (1)..(536): unsure at all n locations
ccngacaagacaaactgcaatgggtggcaagaaactgccaagctcaacaaacattcatgcctctatccgtagacagatgtagaagagaggaactgttgtgtcctctttctaaacatagaagatagctaaaatccacatcgaaaaatcacacaagacaacaaatagtaacaacagagaagataaaagttcaataagaggacgataagataagttttcctacactacttaaaccaacacagagcatcctcttcaagtctttaagccatttttaaaccacaaacactcatgaactcatcatcatcattttctcttcttcgatggcggctggcgaacatcatcatcatcttcctcatcatcgtcttcttcctcatcttcattgtcctcatcctcgtcatcattatcaccctcctcatcatcgtcatcttcatcatcgcttcctcctccaccattggtcacaggatcatcctctggatcagcttcttcttctccttcatccccttcaccccctgagaaatcttcatcattagcatcatcct

SEQ ID NO: 101168 - DNA, 673 bp, Arabidopsis thaliana columbia
  unsure (1)..(673): unsure at all n locations
cgatttattgaggcgacctatagaatagcttgacgtcgcatgcacgcgtacgtaagcttggatcctctagagcggccgccctttgttttttttttttttttttttttttttttttaaaaacaaaagattagtttattaataaattcataatgaatatcaataaactacttacaacaaaaaagtattcctaactaagataaagatctttgacaaaaaaaaaaactaagataaagatatactataatctaaacaattatattctgttttaactaaaggtaacagaggtttttaattgtttgatgaattggacatcttcaattcttccaacccaatgcctttagctcgctctgcttcaattccacatgcttccctagcccaagatctgaaggaagtctgaatccacctatacggacacgcttcaatgaatgaacctcaagcccagcatttttcactaattccctgacttcatgatttcttccttcgggaaccactatacgcagccttgctcttgggaaatcatgcggcttgggcatcaacccaactggatctgggcaacaggggcctccttccaccattgggccttcccggaagccataagggcggtggggaatcccggaaccgggggaaaatcctcgggaacagtgaggggggaaggtctgggggancccccttg

SEQ ID NO: 101169 - DNA, 569 bp, Arabidopsis thaliana columbia
cagctctctacgactcactattgggaaagctggtcacgcctgcaggtaccggtccggaattcccgggtcgacccacgcgtgcgtgaaagctttgttttgagttattttcaaagctaataaaaggagtgcttttatatttgatctaagtattcaaatctttaaagttgtggctaaacttcagtttgtgtttgcttttgtttatcaagattgttcttagactttttcgagttaaaaaacttgtgtgttggagtcatcatcgtgatcaatggaaaataaagttgagaaggagattacttgggtgattaaaaatttctcttctctgcaatctgcaacaatatattctgatatattcgttgttggtggctgcagatggcgttgtcaggccttccccaagggatataataaggctgattatctttctctgtatctcgacgttcctgataaagaatctttacctattggatgaagaagccacacaaaattttcttttactttagtaaataaaatttcgggaaaactctccaaacttaaagagactcagcagtggtttgataagaatgctcctgact

SEQ ID NO: 101170 - DNA, 694 bp, Arabidopsis thaliana columbia
  unsure (1)..(694): unsure at all n locations
cccacgcgtccaacacaacctctcttctcactctatatactcccaaaatggcttataactaccgttttgccattcttctcgttctcctctccgccaccgtcggctttaccgcagccgcgttgaagcctccggttcgaaccttgaacggaaacattactcttaatctcatttggtacggaaaattcaccccaatccaacggtccataatcgtcgatttcatccgctctatcagttctgtcaccgccgccaaaggtccatccgtcgcgtcgtggtggaagacgacggagaagtacaaaaccggcgtttcaactcttgttgtcggtaaacagctcctccttgagaattaccctctcggaaaatccctaaagagcccttaccttcgtgctctgtcaagcaaacttaacgctggtggtgctcggtcaataaccgtcgtcttaacggcgaaagacgtcaccgttgagggactctgtatgaaccgatgcgggactcacggggtcaaagtcaagttcccgttaacagtggagcttacggtgtgggtcgggaaacttttgaaaacgcagtttccctgggttacttncgggttggncngttttcattaagcctgatcttacggngccnnaatttttcggccgnttaggttnnacctaannggngncgtcggtagtttncngggattgtttataaaanantnggg

SEQ ID NO: 101171 - DNA, 634 bp, Arabidopsis thaliana columbia
  unsure (1)..(634): unsure at all n locations
attatatgttaaactctctcccactatatatatgtatcctccttcttctgtatttctcacattggttaccaaaccctgtggggaacacacccacacgtgcgcacacacacaaagacactgcctcctctcaaaatatgcttcttcacgactcttctcgtggcggcggtttcagcggcggctgctgatttcaacactgacgtcaacgtagctgggggaaatggccgtgggaagatactcagcaacggccagctccttactctctccttagacaaatcctctggttccggtcttcaatccaatacagagtatttgggttggaaagattgatatgcagattaagctcgttcctgggaactctgcaggaacagtcacaactttttacctaaaatccgaaggtcccacttgggatgagattgattttaagttcttgggnaatatgagtggagatccttattactttncacacctaatgtttcactcaagggtaagggtgncaaagggnaccatttcatctttggtttggcccaaccggcaatttccacattncttaanccntggnccntnaaggattatnttgccgngggggaaancccttggggggttaaaccttngggctctnggggnttntttnaag

SEQ ID NO: 101172 - DNA, 1257 bp, Arabidopsis thaliana columbia
  unsure (1)..(1257): unsure at all n locations
nnnnnnnnnnnnnnnnnnnnnnnnnnnnnnnnnnnnnnnnnnnnnnnnaacaagcgtccgcccacgcgtccgcccacgccctctccaaaacacacccacacgtacgcacacacacaaagacaatgtctcctttcaaaatattcttcttcacgactcttctcgtggcggcgttttcagtgtcggctgctgatttcaacactgacgtcaacgtagcttggggaaatggccgtgggaagatactcaacaacggccagcttcttactctctccttagacaaatcctctggttccggttttcaatccaaaacagagtatttgtttggaaagattgatatgcagattaagcttgttcctggtaactctgcaggaacagtcacaactttttacctaaaatccgaaggatccacttgggatgagattgattttgagttcttgggtaatatgagtggagatccttatactttacacactaatgtttacactcaaggtaaaggtgacaaagagcaacaattccatctctggttcgacccaaccgccaatttccacacttactcaatcctctggaaccctcaaagaatcatattgaccgtcgatgacacacccattagagagtttaaaaactatgagtctctcggtgtcttgtttccaaagaacaagccgatgaggatgtacgcgagtttatggaacgcagacgattgggcaacaagaggcggtcttgttaaaactgattggtctaaagctccattcatggcttcttacagaaacattaagattgactcgaaaccaaactccaattggtacactcaagaaatggattcaacaagccaagctagactcaaatgggttcagaagaattacatgatctacaattattgtactgaccataggaggtttccacagggagctcctaaggaatgcacaacaagctcatagaatctcaaattatattctatttatttatctacacttcctctctttcttttatgtgaaaattgtgaatgctctgtttatagcttgtctattatgtccgagaatttctttttctgtttttgattcttttcgttgtatatctttgtccaataaaggaaatgatgtgtctttactcttatagatatgtataaaaagatgtccctgttttatttgttaaaaaaaattgtttatgataatgatagttcttttaaaaaaaaaaaacaaacaaaagggcggccgcnnnnnnnnnnnnnnnnnnnnnnnnnnnnnnnnnnnnnnnnnnnnnnng

SEQ ID NO: 101173 - DNA, 1282 bp, Arabidopsis thaliana columbia
  unsure (1)..(1282): unsure at all n locations
ggaattcctcgagctacgtcagggctcatttccatcatcttcgtcttcgtttgttcccctgagatagagataagagaatttcgagagattcgagagaagagacgatgggtttccaagatctcgaagctggtactcgatctccggcgccgaatcgttttaccggtgggagacaacagagactttcgtctcgtggggatccatctcaggaggtcgccgccgggattttcaggatcagcacggctgtcaattccttcttccgcctcgttaattcgatcggaacacctaaagatactcttgaattacgagataagctgcaaaagacaaggttacagatatccgaattggtgaagaatacttcagctaaacttaaggaagctagcgaagccgaccttcatggatcagctagtcaaattaagaagatagctgatgctaaactggcaaaagatttccaatcagttctcaaagagtttcagaaagctcagagacttgcagctgaaagagaaataacatatactcctgtggtcacaaaagaaatacctaccagttataatgcacctgaactggatactgaatctttaaggatctcccagcagcaagctcttcttctacaatcaagaaggcaagaagtggtgtttttagataacgagataacattcaatgaagcaattattgaggaaagagagcaagggattcgagaaattgaagaccagattcgtgatgtgaatggcatgttcaaagatctagctcttatggtgaaccatcaaggaaatattgtcgatgacatcagctctaaccttgacaactcacatgctgcaactacacaagccactgttcaactcagaaaagcagctaaaactcaaagatcaaactcctctttgacatgcctacttattctcatttttgggattgttctactcattgtcatcatcgttgtcttggtctaagcatcaaacatataactccaagcttcaatcttcaagcatcaagcgaatctatggaaactatacaaagacccattaaagatatatatctaatgtacagattctttatactccatcttccccattcaaccaaattgatcttaacttctcatcgtgtgaatgtttaatcaatgtattactccatcataaggatcttcatgctcaaaagaaataaccataagaaaataatcttgattttttggtnnnnnnnnnnnnnnnnnnnnnnnnnnnnnnnnnnnnnnnnnnnnnnnnnnnnnnnnnnnnnnnnnnnnnnnnnnnnnnnnnnnnnnnnnnnnnnnnnn

SEQ ID NO: 101174 - DNA, 413 bp, Arabidopsis thaliana columbia
gaaaaaaaaaattgacaaacaaatataaaatccctatgaacaactctagagaagaccagtggttacaacactatgagcaacaaaatattcaagagattactccgtgcttcaacgccattaacatcgcgtcatcgtcgggatcttcccttggagacggtggtgccgcggcacatgaagctgctggaaggagatctagggcttcgaggagagccataccaacaaccctcctaaacgcaaaccctagcaatttccgagccctagttcagaaatttaccggacgttctgccggaggtgaatccaaccgcagaaaaggtccagtgactttggatttcgggtctcccactacaatctccaaagaagctatctttccagtctcaagcgatcgaagtaataacaatcttgatcatgtggtc

SEQ ID NO: 101175 - DNA, 582 bp, Arabidopsis thaliana columbia
  unsure (1)..(582): unsure at all n locations
gtcttattccacgatcattagcaacaccagcttcctctctctcgcttcaaagttcactactcgtggatctcgtcttcagtgtacagtatcaatggctcgatctgcggttgatgagacatcagattcaggagcttttcaaagaactgcatcgacattccgtaacttcgtttcaaaagattccaattctcagtttccagctgaatctggtagataccatctttacatatcgtatgcttgtccatgggcttctagatgcctttcatacttaaagatcaaaggacttgacgatgcaataagcttctcgtctgtaaaacccatttggggaagaaccaaagaaaccgatgaacatatgggatgggtctttccaggttcagataccgaagttccaggagctgatcctgaccatcttaatggtgctaagagtgtaaagggacctctatgagattgctnagccaaactacaccgggaagtatactgttcctgtctgtgggttaggagcnaaaactnntgttacaacgnggtcagaataatccggntgtcaacactgngtcaatcatattggggaanctntnttntnttnnt

SEQ ID NO: 101176 - DNA, 558 bp, Arabidopsis thaliana columbia
  unsure (1)..(558): unsure at all n locations
nnnnngatttaggcgacactatagattactatgacgtcgcatgcacgcgtacgtaagcttggatcctctatagcggccgggcttgggtttttttttttttttttttttttttttttttttttttttttcaaactaaaccggcccaatgtcattttaagggttcaaatttgatagcaactacggaaccacaaaccatttacacttaaccaaacaactaattggtctttaggcgggagcaagatcctaagaaaaacaaagaaaaggtttcttaacctctgcaataatctgactgacacatttcggtacctctttagggtatcgacccaaatcaagaaactggaagggagttttacaatgaactgctacaaaatgggcagagatggcttccaaattgggaggatgacatcaacaatccctccttaacctcccacagaaactactcctgctgggtgcaaggaaatggaaaatactgaacaaggagcacagtgaatttgaaaaagcaaagctccatttaagtcgaaacgtcttagaagtggttctgctcctacagtcaaaatt

SEQ ID NO: 101177 - DNA, 505 bp, Arabidopsis thaliana columbia
  unsure (1)..(505): unsure at all n locations
tgatatnnnnnnnnnnnnnnnnnnnnnnnnnnnnnnnnnnnnnnnnnntgataatggcgtgatacctttttctctcctctcaacaaacgcgcctctaatctctcaatcttctccaactccaatttcttgcaattcactccaacttcttcttcatcttcttcttctctctctctctgagattctagatttcgtttctcacgttttcttcaccaaatatgggaacctgcttctccagctcaactaaatccacggctgagatctctccctttgacctcgtcgtcaaacctcctcctccttccgccgccgccaccgcaccaccaacccaacgaatccccaccgcgaaaacagaaacatcgacggtgagcttcaccgcaacagtgagattatacggaccacctaacagtctagtgacgtcgtatctccgtttcgctcttctccacaagaaagttccgctccgtttcgttccatcggaagaccaaaaaccgacgattcaagtcggatcgga

SEQ ID NO: 101178 - DNA, 788 bp, Arabidopsis thaliana columbia
  unsure (1)..(788): unsure at all n locations
nnnnnnnnnnnnnnnnnnnnnnnnnnnnnnnnnnnnnnnnnnnnnnnnnnnnnnnnnnnnnnnnncttggggtttttttttttttttttctttcctttacaaaatatttcactagatctgaaacctctcctgtgtcaactctaaattctaatatccgctttgttaagggcttgtacaaaaaataacagaggtccacaagaaatgatccttctgcaaaaagaaaacaaagagtgggtttaaaaggggcaagagagcaaaaaaaggaaagatcccaaatcccaaaatccggatgaagcttcaaaaaatcttccatgaaagatgatatcagatgattgaagttgattctgaaaaacgcgggtactttcttctcgagcatcgatgttcccttgaagattggtagttgcacttctctcggggacctctgtaatcgatgttcagtcatctttgtgaatccaaaatttatttgtccagatagactcagtttcttcagctgctgggagaagcaagttctcaccattcagagaggaaagaagattctcaacgcacaccacaacagcccttgaaagtagccccttccctgatactctcggcttgtagctacaataggaagttctgcaactttctgaccaaatatcctaagcagcgcggcagaaacaattagggaattcaccatcaggacccacgcgtccgcccacgcgtccgcggacgcgtggnnnnnnnnnnnnnnnnnnnnnnnnnnnnnnnnnnnnnnnnnnnnnnnnnnnnnnnnnnnnnnnnnnnnnnngaag

SEQ ID NO: 101179 - DNA, 507 bp, Arabidopsis thaliana columbia
  unsure (1)..(507): unsure at all n locations
attgtnnnnnnnnnnnnnnnnnnnnnnnnnnnnnnnnnnnnnnnnnnnnnnnnnnnnnnnnnnnnnnnnnnnnnnnnnnnctttttttttttttttaagtttaaagtcactttgtaatataagtatcatcatgtaactcaattgtcataggatttgatccaatcagtacatacaaatatctaattacaactatgagctcttgcttgtcccaactatatataacattctcagtattcatatacttgagctgcttttagtgaagcaagttcatcgcaatccactggcatccacccgattgattgtttctcgttatcgtagattatcatctgatcttgcatcgatatatcgccgatgaggtttaggttctggagacctatttctgtgccattcaagattcccaaacatacattccccttcatagaaatgattagataagcttctgggggtatctcaaacagagtttttgatctccagcctgttttgaagctaagagctagaggcttgaaa

SEQ ID NO: 101180 - DNA, 525 bp, Arabidopsis thaliana columbia
  unsure (1)..(525): unsure at all n locations
nnnnnnnnnnnnnnnnnnnnnnnnnnnnnnnnnnnnnnnnnnnnnnnnnnnnnnnnnnnnnnnnnnnnnnnnnnnnnnnnnnnnnnnnnnnnnnnnnnnnnnnnnnnnnnnnnnnnnnnnnnnnnnnngctttaactttgcatgctacaaatctttaaatccaagagagggggttaaaaacaataatgaagagtatgaaatcaggctcccgaaattgatactttgactaggtaaaaaaaaaaaggttagagggagttgatataaatgtaatgggaatgaaacaataataatcctttatatacagagaaacaatatgtcaaataaagactccctaatacaatttgctgaagcctgaagtgacccctgagtctcccaatcgggggaacaacaccttttttttaatcaaaacctggaggggcgatgtgattttgcggaatgaaacccacacaaagggtgcgcaacaaaaggcctatgcaaaaactgacaaggctctgaccactccattggggacccaagggaaggcca

SEQ ID NO: 101181 - DNA, 437 bp, Arabidopsis thaliana columbia
caaagctgctcaattttggtctgcacattgattatgtgtcggacagagactatcgagtaatacccagtagtcaattatctggtttttgatcgattccatcaaaatttgatcttttttcttctctgaagcgaaagctctcgcctttacattttcgccaattgtgcaaatttactgttccacaagttttcaaaatgaaggcgatcttcaaccgtagagttgtcgtcgactcatcttcgcgtctcaccaagctgctcgcgaatccaactactcattctcacctgaatcgtcaaactttcacttctctctataaaccaaaccagagccgccattttcgaacacactatcttccttcaagcccgtcgtctcctcccgtgagccgctttgacccttctcagctatggcgatcggagaaaattcgtgggtttttcgcgagcgct

SEQ ID NO: 101182 - DNA, 527 bp, Arabidopsis thaliana columbia
  unsure (1)..(527): unsure at all n locations
nnnnnnnnnnnnnnnnnnnnnnnnnnnnnnnnnnnnnnnnnnnnnnnnnnnnnnnnnnnnnnnnnnnnnnnnnnnnnnnnnnnnnnnnnnnnnnnnnnnnnnnnnnnnnnnnnnnnnnnnnnggaaaaattagtttataattccctacaagtattctgaaccacaaaaacacacgaaataaaaggcagagctacaaagaacaaacactaagacatatatgggtttctcctactatacataaaacacacaagtcataatcatcatcctcaaaacaagcaacgtcaagagatgaatcataatttggggagaaagacaatgcaatttctaacttcaaaaaaaaaagaaaataaaacaatacaaatcctttgaattaccaacaccattaggccttgagaggctttgtagacttggcagattttctcttgaggacaatgacccaagtaacaacttccaagagtaacgtgatgcctcctaaggtcccaatcacagcgatataagccgtcttgtaagtatgctttggattcaaa

SEQ ID NO: 101183 - DNA, 500 bp, Arabidopsis thaliana columbia
  unsure (1)..(500): unsure at all n locations
ccggcannnnnnnnnnnnnnnnnnnnnnnnnnnnnnnnnnnnnnnnnnnnnnnnnnnnnnnnnnnnnnnnnnccacgcgtccgcggacgcgtgggcggacgcgtggggtagaggtagctcctcagttccagaaccaggagatgaagttcatgagactgaccaaaaggaacactatcctcttcttccctgattcagttcaagaggtcatgaatttcaggacagtcaatgggtcatgtgaaggaattgaagatcccgatcatcccttcagtagtgaaaggcctcgattcggcctcatcccggcaggttcaactgatgcaatagttatgtgcaccacaggagctcgtgatcctgtaacatcagcgctgcatatcattctaggtagaaagctcttccttgatgcaatgcaggttgtgcggtggaaaacagcatcaacctcgacgattggaccttattttcgttatgcagcctcattcgctggatacgggttttatggtgatgtc

SEQ ID NO: 101184 - DNA, 537 bp, Arabidopsis thaliana columbia
  unsure (1)..(537): unsure at all n locations
ggtgcactatagnaagagttatgacgtcgcacgcacgcgtacgtaagcttggatcctctagagcggccgccctttgcttttttttctctttaattggaatccttgtatgtatacaatatcatccaaattttagaggaaacatgttaccttcacatatttttggacactgaaacaattgcatgtataaaactataaatgaaaaacttagcagcagcgacatttcaacatatcgatgcaggtgtagggtcttgatctatcctcgagttcaaacgctgtgggaagtgagtctagattatagtttccgcaacagacgttgtataggttcctccgaattcctctgctaaacggatgcactcgtcccggaatattcctcatgtatggaatacgtcttcgtctcacaagttcataagggctttgatttgtcaaaattaggggagctgggaaaaatcaatagaaagccccacaaaaatcaaagagatcgccaatatgacaagcagcagtatgataattgcattcttccaccaaggttttgctaca

SEQ ID NO: 101185 - DNA, 846 bp, Arabidopsis thaliana columbia
aaaaaacgctcgtcttcttcttcttcttcttcttatattacttcttcctcccacacagacaaattttgtaacgaagacgggatcgcgataagatcccggtgatcgaaaagccctaagaagtaatttttcaagggaaagggacttaaagatgcatacttttggttacagagcaaatgctctgctcactttcgcagtcacggctcttgctttcatttgcgcaatcgcgtccttctcagacaaattcagcaaccaaaatccttctgctgagatccagatacttaatatcaatcggtttaagaagcaatctcatggtaacgatgaggtcagcttgacactggacatatcagcagacttgcaatcactttttacttggaacaccaaacaggtttttgttttcgtagcagcagagtatgaaaccccaaagaattccctgaatcaggtttctctatgggatgccattattcctgccaaggaacatgccaaattccggattcaagtctcaaacaagtacccgtttcatcgatcagggacagaatcttcggggcaaagacttcaacttgacattacactggcatgtcatgcccaagaccgggaagatgtttgctgacaagatagtcttgcctggttacagtttaccagatgcatacagatgatgaagattgaataaaacatcaaacctagtccaagactttttgtatttcagttttctgaaaagttttagactttcttttattccaaagaaaactaattcaaaagtactattgttctcttagaatcaaacaaaactattctttttagtgatcttaattagttgttaatgaggtgaaaatcacgacctcttaattt

SEQ ID NO: 101186 - DNA, 575 bp, Arabidopsis thaliana columbia
  unsure (1)..(575): unsure at all n locations
atacacctattcagggaccgggccgggaattcccagggtggcccacngcgttcaccacccaaaagaaaaaacacacacacatcttagagagatgaaagagactaattttggcgagaaaacgcgcgttctggtagttggtgggacgggatcattggggaggaggattgtaagtccgtgtttggctgagggacacgagacttatgttctccagcggccggagattggagtggacatcgagaaggtgcagctccttctttctttcaaaagactcggcgcacatctcgtggaaggctcattctccgatcaccaaagccttgtctctgccgtaaagcaagtcgacgtggttgtctccgccatgtccggtgtccacttccgcacccacaacatccccgttcagctcaagctcgtcggagccatcaaaggaggccggtaacgtcaagcgttttttacccatcaaaattttggatggctccnccacgtttcgggcatnccattcccccggagggaaaattttntcaaaaaatgggaattcggattaataaggccggggttttcaaaaaacngggggttttttc

SEQ ID NO: 101187 - DNA, 547 bp, Arabidopsis thaliana columbia
  unsure (1)..(547): unsure at all n locations
nnnnnnnnnnnnnnnnnnnnnnnnnnnnnnnnnnnnnnnnnnnnnnnnnnnnnnnnnnnnnnnnnnnnnnnnnnctttttttttttttttattaaaaatggtaatgtggaatatataatactcgagtgttattatcttaagcaagtttagtagtaccgaaatcatatattaaagaaaaaaaggcttaaaagaaaaagaattgtgcactattcaactcatattattcgtcaaatgaaactctgtaccggagcggatagttctagttcatatgcagcttggtaaaactctgcagcttgctgtgacaagccttgcttctttgcaacgtgccctagcttcatccatgcatcatgatttctcgggtctaaccttaaggcattcatcagaaaacttttagcggttggaagtgattcatctccagatttcatcatgacctctgctatagaaacaatgctaggtacgtgatctggttcgatcgagagcgaaaggaagaaggatattaaagcctcttcatgaagtgatttagcttctagacacaaacctgtttcat

SEQ ID NO: 101188 - DNA, 2026 bp, Arabidopsis thaliana columbia
accaaacttttgagaagcattttcgcttcaattcaataaaaggcgaaaaatctctcactgcactttatctcgagagctcagatctccgatctagagcctttcgcttctcctcttctgttcatataacaactgaataatgtcgatctccgcccaaaatccggatatttccggcgatagacaatccggccaagatgttcgtactcagaacgtgatggcttgtcaagctgtttctaatattgttaagacctcacttggtcccgtcggcctcgacaagatgttggtggatgatattggtgatgtgactattacaaatgatggtgctactattcttaggatgttggaggtcgagcaccctgctgctaaggttcttgtcgagttagctgaacttcaagatagagaagtcggtgatgggactacatctgttgttattgtagctgctgagttgttgaagagggcaaatgatttggtcaggaacaaaatacatccaacatcaattatcagtggatataggctagcaatgagagaatcttgcaaatacatagaagagaagttggtgaccaaggtcgaaaagcttgggaaagttccattgataaactgtgccaaaaccagcatgtcctccaaactgatatctggtgacagcgacttctttgccaatttggttgtggaagccgttctttcagtaaagatgacaaatcagcggggagagataaaataccctatcaagggcattaatattctgaaagctcatggacaaagtgcaagagacagctatttgttaaatggatatgcactcaatactggtcgtgctgcccaagggatgccattacgagtgtccccagcaaagattgcttgccttgacttcaatctgcagaagacaaaaatgcagctgggtgtccaagttgttgttaatgacccacgagaacttgaaaagatccgtcaaagagaagctgacatgacaaaagagcggatagagaaacttctcaaagctggggccaatgtaattctgaccacaaaggggattgacgacatggcacttaaatactttgtagaggcaggagctattgctgttaggcgtgtgcgcaaagaagacatgcgtcatgttgccaaggcgacaggagcgactctggtcaccacttttgctgacatggagggcgaagaaacatttgatccagctcaccttggatctgctgatgaggttgttgaagagagaatcgcagatgatgatgttatattgataaagggaaccaaaacaagtagtgcggtctcgttgatcttaagaggtgcaaatgactacatgcttgatgagatggagagagcactgcatgacgctttatgtattgtcaagaggacccttgagtccaacacggtggttgcgggtggaggtgcagttgaatcagcattgtctgtgtatctggagcaccttgctacaaccttgggctctcgcgaacaattggccatcgctgaatttgctgatgcgctattgattataccaaaggtgcttgcagtaaacgctgctaaggatgcaaccgaattggtagctaaactaagagcgtaccaccacactgcacaaaccaaggctgataagaagcactattcaagcatgggacttgacctcgtaaacggaaccatccgcaacaatttggaagctggagtgatcgaaccagctatgagcaaagtgaaaattatccagtttgcaacagaggcagccataacgattctacgaattgacgacatgatcaaactggtgaaggatgagagccaaggcgaagaataagcaaagctcagctcctctttatccgccttatcatccttagtgtgtgtttttgtccgcattttcagctcctctttagcttcttttttgcgctgtaacaatgtagcctctgaaagagctgtttctgtttatttttcaactctctcgtttcttgctcactttttacttcaagaaatttttgctttttgtcgggtaacgcatgtaatgaagttgggctttcgtctcttactgtttgaatttatggtgtagtttttg

SEQ ID NO: 101189 - DNA, 510 bp, Arabidopsis thaliana columbia
  unsure (1)..(510): unsure at all n locations
gtgnnnnnnnnnnnnnnnnnnnnnnnnnnnnnnnnnnnnnnnnnnnnnnnnnnnnnnnnnnnnnnnnnncttttttttttttttttatcggtaaagctcaaaaacttcaataaatcaaaactaaaccgtaccgaaccgttgcgaacaaatattacacatactgtattagtatcattaatcactcttgctctttgcctaaataacaatttaactgaaatgtaaaccagcccggcttgtgatttataagaaaagaatggaaatcacaaaccggtatggtcagtaaacttgcttacaacctcttgttccatttccacaagttggtggcaaaaagcttcaacgtctttcacctcttcttcaaactcaaacctaaactctctccactgatactcatctccagcttcttgttcactcggtaccttccccaacaagtggaaacctttcctatccactgataccatataagcatcccttgggtttatttcaagaaaatataaacagaaaagaatcaag

SEQ ID NO: 101190 - DNA, 586 bp, Arabidopsis thaliana columbia
  unsure (1)..(586): unsure at all n locations
nnnnnnnnnnnnnnnnnnnnnnnnnnnnnnnnnnnnnnnnnnnnnnnnnnnnnnnnnnnnnnnnnnnnnnnggttattcctcattttaatttattttcaacatatacgaatacgattcaattaagaatatcaataacacacttcaaaacacacacaagaataagccaagtcctccaacaggattaaaataataaaaaattacattcgcatggatgtatcttcaaccacaagtaaacgaccaaaccatgccactattctcttagctgcgagtcacttgcttcggttccgcaccacgtagagtaccgatccaagcaggtggctgcatcccagtctgctcataaaccgtatcaagaaccggaggcaacatcttgtaaagtccagctatatccttcatagcattcccactaccaccaccctgttctccaccatggttccaaacactaatcttgggctgcaagtctctaaccgccatcgcattagtcttagcgatctcttgataaataccattggtaatcatcaagaagctctaggcaagatagacattntgaaaggnctaangggnntaganagcctgngctaggaaggg

SEQ ID NO: 101191 - DNA, 696 bp, Arabidopsis thaliana columbia
  unsure (1)..(696): unsure at all n locations
ttaggtaccactatagnaagactatgacgtcgcatgcacgcgtacgtaagcttggatcctctagagcggccgccctttttttttgtgtgttttttttctgaatttacagatatatttcgatttcacaaatgaatttcaaacaataagcaatacaaacatacacaagtggtgcactaaaccctttggaaactctgcaaatttaattaagaatctatactcacttgaatcaatcacactctaagcatctataacactaccagacaccggttcttgtaaaccggaatcttctgaagaaacagtaaccagactcgagccgttatgttcttcttcattgtcgttatcatcttcttcgtgttctgatacagagctacaatccatctccttctccggtatatcgagctgtacactctctggtaactctgtattttggttcccaatcgatggcattcccaagttctctcttttaacgacgtttaacacaaatccgttactcgttctctcaggctgtagaagatcaccttcagtaactgttatgcttgaagtgcttgttccaagattgtggctattgccggttgatccgatatccgaatgagccgctatggttcggggtgngaaacggcncaggggangctggaatnggggnaaaaccntgcatgatgcgacaggctgaaancatgctttagnnngggcctaagt

SEQ ID NO: 101192 - DNA, 525 bp, Arabidopsis thaliana columbia
  unsure (1)..(525): unsure at all n locations
nnnnnnnnnnnnnnnnnnnnnnnnnnngacgtcgaacgcacgcgtacgtaagcttggatcctctagagcggccgccctttttgttttttttttttttttttttttttttttttctatccacaacaattatatttctcaagcaatccaagaaatgagatatgaacatagtaaggttaagtttctgaacattacatatctgaccgagttcaggaaagatgctcatccttcgcggtatcgagaaccgggaactcctgaagatgctcctcaagactgcagtcactggtgcttacccggagtaccggacacatggaacgagattctctatgcgcagcttttggcaatgaattaccgaacaaagtgaatagaggtacaaggctatattgcttccttctactcataatgctatttcctctacgccttcttcgctctcggtttcatttgtttgcaggtccttgattttctcaagctgtctcaataggttcaacctttcggacccgtatgtggaaggaatcaggcctggtacat

SEQ ID NO: 101193 - DNA, 519 bp, Arabidopsis thaliana columbia
  unsure (1)..(519): unsure at all n locations
nnnnnnnnnnnnnnnnaaaccaggaggttttcaaagactatggagtgaagaagacgaaatcttagtgttacaaggaatgatccacgcctccgctgatacagggaagtctccttatgtagatactaatgcgttttacgatttcttgaagaaatcgattagctttgaggttagtaagaatcaattcatggataagattaggagtttaaggaagaagtatattggtaaagaaggaaggaacgaacctagttttgtgaaagctcatgataagaaagcttttgaattgtctaagtttatttggggacctaaaggaatagctcttgattctaatgttaagtcgaacggtgtatcgaaaaagagtgtggcgaagaagaagattgattctgttaagcaagagttggtgtttgccggtggttcttcaactaatggtaaaaaagttgaagaagatggtggtgatgatggatgtgattggtttgataactcgtctcttgttaggatgattgctagtttgggtgttgatga

SEQ ID NO: 101194 - DNA, 709 bp, Arabidopsis thaliana columbia
  unsure (1)..(709): unsure at all n locations
nnnnnnnnnnnnnnnnnnnnnnnnnnnnnnnnnnnnnnnnnnnnnnnnnnnnnnnnnnnnnnnnnnnnnnnnnnnncttggggtttgggtttttttttttttttttttttttgttgtttnttttgggggcggagaacttttcatttcaaacaaaacttatgaggttacactcttttacattacagccacaactttgaaacagacaaagagaatttcccgttttcatccccaataacgaacaaaaaatcaaatgctcttcttctcaaactacaacaattgataaaaaaaacagctcaaactcgcaggctaataataacctgagcgaatttcatctctctctcctccctaacaggatggattctctctaccaatacaataacaaaaaactaccaaaaactgggattttgaagaagctccaaaattcagagaacgagggcgactttctcatgagatatcagaggagatggattcgctatcaagggctcgtaatggtctgcttcaccaccacaccaaccagtgcctttnatgaatnggaaggctggggcttcaagnacttcacttcttggtttgtgaggaggangnccacacagttcttttctctaccatccatctgatccatgggttgaccncatagggttctcgtttaccnagtggctggnncnggttgtntgtatccaacgngtgaggcctntggttatttagnnacctc

SEQ ID NO: 101195 - DNA, 694 bp, Arabidopsis thaliana columbia
  unsure (1)..(694): unsure at all n locations
atagaagagctttgacgtcgcatgcacgcgtacgtaagctcggaattcggctccttctttgtatatttttttttttttgaccatggcggaggaatttggaagcatagatttactcggagatgaagatttcttcttcgatttcgatccttcaatcgtaattgattctcttccggcggaggattttcttcagtcttcaccggattcatggatcggagaaatcgagaatcaattgatgaacgatgagaatcatcaagaggagagttttgtggaattggatcagcaatcggtttcagatttcatagcggatctactcgttgattatccaactagcgattctggctccgttgatttggcggctgataaagttctaaccgtcgattctcccgccgccgctgatgattccgggaaggagaattcggatttggttgttgagaagaagtctaatgattctggtagcgagattcatgatgatgatgacgaagaaggagacgatgatgctgtggctaaaaaacgaagaaggagagtaagaaatagagatgcggcggttagatcaagaagaagaagaagaagaaaaaaaaaaaaaaaggnnnnnnnnnnnnnnnnnnnnnnnnnnnnnnnnnnnnnnnnnnnnnnnnnnnnnnnnnnnnnnnnnnnnnnnnnnnnnnnnnnnnngcgtagtgacctggagtatcat

SEQ ID NO: 101196 - DNA, 500 bp, Arabidopsis thaliana columbia
ctatgacgtcgcatgcacgcgtacgtaagcttggatccctctagagccggccgcccctttttttttttttttcaccccgcttctttcttgcctctgaaattccatgtcaagattcccttttttgcatctcaagatcttccatgtcggcttccaaatgattctttctgcatcttgaccccatccatttccctcttcaaattatcccttgaggtcatctcttctctcttcagcctatgcttttcagatatttgcaaatttctcagttcctcgttttcttcagcaccttcattttgctctctagttatgttagccctcttcttatccaaagcttcccactctttctcaaatctttccttatcttgtttcagttcttcacgttccttcaagagcagctcctcctcttgcttaactttatctatctgctgcttcagttcagactgcagcctcagaaactcgactctctcttcttttgtaatcctaagactttcatgttcttcacg

SEQ ID NO: 101197 - DNA, 503 bp, Arabidopsis thaliana columbia
gtgacactataaaaaactatgacgtcgcatgcacgcgtacgtaagcttggatcctctagagcggccgcccttttttttttttttttgattttaaaaaagcacttataagatacgacgtggacgagcccaaatagacaaaaacccattttaatgctaattcacacagaccaaagaaacaaaatcggaggaagaaactacagacaatgctcgtaataatacacaattaaggatctctagcaaccctattgaaagtttgaaacaaactaatcacagcttcttcaagtgttcttggctttagtagcagcagcatgagatttgaaccatggaatccacaccgaagtggtcttctgatatgctctataagctccagctctggattgttgtttcaccatccgacgctcgacaaggatcgttacattgaccagacacagagtattgcccaaggcaccaatcaaagcccacccttgaccaaggttccaagcaaaattttaccaatgcccacc

SEQ ID NO: 101198 - DNA, 432 bp, Arabidopsis thaliana columbia
gtccgctgctgaattcttcacgattttccaactgggaccgctccacttagacggaaacacttccaaagctgcagacaaatgggtgtctatagacgagtatttggatggctacttggtggaaaggaagaacagatatgggaaaaacatggaagtgatcgatgtcggaatgcaagagataaaaacttacttcaggctcttcttgttgtcttcagtacttctgatgttcatgttctgttccaggatagcgaagagcaagtatagtagaaactccatgcctgtcttgccatgaaactaatggaggaagctctcatttaattaacccttgtaagttagtaattcttttggttgcgaaacttgtattcctcattttagaaatgttgtgtctcatgaaaagacaacataattctttggatttgtgatatattcttaagt

SEQ ID NO: 101199 - DNA, 2793 bp, Arabidopsis thaliana columbia
  unsure (1)..(2793): unsure at all n locations
tcgataagctagatatcgaattcgcggccgcctcaaacctcagattatataattaggctaaaatctgataaaccaaaaaatgtatcagagtgagtgctaaagagaactttgtgttgacctctctttccctcctaattccttagggttcctcgatttttctttttcaccgaaacaaaaaccttattcctccttctctttctctgtctatctttctctgtacgttttattcactttcctccacgtggatttgcataaaagcatgaaaatttgttgatgggtttctcttcgacatccagattctagcttccaattccgtaattctccgttaaaaaaccctaatttcatcgaatttactctgatctgtgtagaaattagggagtgaagtgtccgcaagtgtttggcaatgtcggatgacatggttttgcatttctcctcgaattcttctaatcagtcggatcactctttacccgacaaaatcgccaagcttgaggcccgcttgactggtaagaccccttcctcggccaagccaccacaacaacaacaacagcagcagcagcaggtctctctctggtcatctgcttctgccgctgtcaaagtcgtcacttccacaccgccgggattgtccgaaacctctatcagtgattcagacgacgagaatactggagatttcctaatccgagcaaatacaaaaaagcgccagaaagttcaagaatctaacaacttcagtgttgttgatcatgttgagccacaagaggcagcatatgatggaaggaaaaatgatgctgagtccaagacaggccttgatgtaagtaagaagaaacaaggtcgaggtcgggcttcgtcaacaggtagagggcgtggttctaaaactaataacgatgtgacaaaatctcagtttgtggttgcaccagtatcagctgccagtcaactggatgcctctgatcaaaaggattttaggcctgatggacagctcaggaatggtgaatgctctctccaggatgaagacttaaaatctttgcgtgcaaaaatcgctatgctggaggaggaattgcgtaaatctcgacaagattcttctgagtatcaccaccttgtcaggaatcttgagaatgaggtaaaagatctgaaagatcaggaacaacaagggaagcaaaagacaactaaagtaatctcggaccttctcatatctgtttccaaaactgagagacaagaagcaagaacgaaagtcagaaatgaatctttgcgattaggcagtgttggtgttctcaggacaggaacgatcatagctgagacatgggaggacggacaaatgttaaaagatctgaatgctcaacttagacaattgctggaaaccaaggaggctattgagagacaaagaaagttacttaagaaacgacaaaatggtgataagaatgacggaactgacacagaatcaggagcacaggaggaagatatcatccctgacgaggtttacaagtctcgtcttactagtattaagcgggaagaggaagctgttttgcgtgagagagaaaggtacacattagagaaggggctacttatgagggagatgaaacgcatacgagatgaagatggttctcgtttcaaccatttcccagttttgaatagccgctatgctcttctaaatcttcttggtaaaggcggatttagtgaagtctataaggcatatgatttggtggaccatagatatgttgcgtgcaagcttcatggtttaaatgctcagtggagtgaagaaaagaagcaaagttacatccgccatgccaacagggaatgtgagatccataaaagtcttgtgcatcaccacattgttcggctttgggataaatttcatatcgacatgcatacattctgcaccgttctggaatattgtagtgggaaagaccttgatgctgtattaaaggcaacatctaatcttcctgagaaagaagcaaggattatcattgtgcaaatagttcaaggccttgtatatctgaacaaaaagtcacagaagataatccactatgatctgaagcctggtaatgttctctttgatgagtttggagtagcaaaagtaactgattttggtctaagcaagatagtggaggacaatgttggttctcaaggaatggagcttacatcacagggagctggaacatactggtacttgcccccagaatgctttgagcttaacaaaactcctatgatctcatcaaaggttgatgtatggtcagttggtgttttgttttaccaaatgctgtttggaaagcgaccttttggacatgaccaaagccaagaacggatactaagagaagacacaatcattaaagccaaaaaggttgagttcccagtaacaagacctgccatctcaaatgaagcgaaggatttgattcgacggtgtctaacatataaccaagaagataggccggatgttctaacaatggcacaggatccatatcttgcctactctaagaagtgagattgtgtagtcttcaaaaacaaaccagagatgctaaaagaccagatcctagaatattttttggtatagcttataaagtttctgttttgtttgtctaaatattttatctcccggccccttgaaccatattaatttcgggtgaagttaatgtgtcttgtcttccttttattatgtaacatgttatgtatatttttcatgttttataatagaagaaagctgaaagttggaaaaaaaaaaaaaaagnnnnnnnnnnnnnnnnnnnnnnnnnnnnnnnnnnnnnnnnnnnnnnnnnnnnnnnnnnnnnnnnnnnnnnnnnttcattc

SEQ ID NO: 101200 - DNA, 403 bp, Arabidopsis thaliana columbia
tcgtcctcggctacaaactcttgatcaggaggaagagctttcagtacctgagatcaaagctgaaatggagaagtcgcttcaatggcttgtcccgttcgctgaaaacaccaccaaagcacatcaaggcttcggatgggtaggtgaatgggcaaattcaaggatagagtttgggaaaggaaaaggaaaaggcgagaacaacgggaatccaacacgacttcagacgcttcatcatgcggataaaccaatagttgattcatatgtactcgaactcgttgtatggcttcatcgactaatgaagtcatcaaagaaacgtgctcacggcgttaagcttcaagaaaccaaccatgtctctccacccaacaacagaaccatctccaacacgcaactatcactctcccctgac

SEQ ID NO: 101201 - DNA, 889 bp, Arabidopsis thaliana columbia
  unsure (1)..(889): unsure at all n locations
atgggcaaattcaaggtaagtctctatcagctactgaagttttaaattttgaatcttcaaactgatctagcaaactacgaattggtaatttggaatacaggatagagtttgggaaaggaaaaggaaaaggcgagaacaacgggaatccaacacgacttcagacgcttcatcatgcggataaaccaatagttgattcatatgtactcgaactcgttgtatggcttcatcgactaatgaagtcatcaaagaaacgtgctcacggcgttaagcttcaagaaaccaaccatgtctctccacccaacaacagaaccatctccaacacgcaacttatcactcttcccctgaccttcacctacaaaaaaccagctctctctagaagacaggttgttgttagacagagtccaaagtataagatttggtccaaatctaagtaaaagtcaagagttagtcggcttgaagaagaccaagaaaggattcaagatttgggcactgagtaaaagtacaggaaactctccaaaagttgatctttcagataagaactcttcaagtgattgggatgcccttaatggtttggatttcgctttccaataggcgcaacacgttcggtttgagaaccggtttttgatcaaattcttcggtattaatagataaattctatcattcttgtatataaacccagcatataagcccaaaccagtgatgtaatagttgatccagaaccaaagcccctatatggttggtttagttggattttgtgtttcaggtcaactactttcttttttctctcnnnnnnnnnnnnnnnnnnnnnnnnnnnnnnnnnnnnnnnnnnnnnnnnnnnnnnnnnnnnnnnnnnnnnnnnnnnnnnnnnnnnnnnnnnnnnnnnnnnnnn

SEQ ID NO: 101202 - DNA, 712 bp, Arabidopsis thaliana columbia
cagctctctacgactcactattgggaaagctggcacgcctgcaggtaccggtccggaattcccgggtcgacccacgcgtgcgggcttcatcgactaatgaagtcatcaaagaaacgtgctcacggcgttaagcttcaagaaaccaaccatgtctctccacccaacaacagaaccatctccaacacgcaactatcactctcccctgacttcacctacaaaaaccagctctctctagaagacaggttgttgttagacagagtccaaagtataagatttggtccaaatctaagtaagagtcaagagttagtcggtttgaagaagaacaagaaaggattcaagatttgggcactgagtagaagtacaggaaactctccaaaagttgatctttcagataagaactcttctagtgatttggatgtccttgatggtttggatttcgctttccaataggcgcaacacgttcggtttgagaaccggtttttgatcaaattcttctgtatttatagataaattctatcattcttgtatataaacacagcatataagcacaaaacagtgatgtaatagttgatacagaaacaaagacactatatggttggtttagttggattttgtgtttcaggtcaaaaaaaaaaaaaaaggacggccgctctagaggatccaagcttacgtacgcgtgcatgcgacgtcaaagctcttctataaggcacct

SEQ ID NO: 101203 - DNA, 656 bp, Arabidopsis thaliana columbia
cgactcactactgggaaagctgacccgcctgcaggtaccggtccggaattcccgggtcgtcccacgcgtccgcagacacactcgcgaaaatggcggctcactcttcttgcaactttgctttgacgaatccgatcatctcacaaatcgattctttctctaagaagaaactatctgttccattatacttcttctctacaagaaaagcattgacgaatccttggttaggcgttgttgattcatccctctctctcacttctccagtctccgctctacaaactaatcgcccaagaagaatccataaatccgccatctccagcttacccaccgcgaatccagatttagtggtttctgatgcgaaaaagcccaaatggtcatggagggcaattaaatcatttgcaatgggagagcttgaagctaggaagctcaagtatccaaatactggaactgaagcacttctcatgggtattttgattgaaggaactagttttacttcaaagtttttgcgggcgaataagattatgctttacaaagtgcgtgaagaaacggtcaagttactaggaaaggcagatatgtatttttttagcccggaacatcctcctttaactcaagatgcacaaagagcacttgactctgctctggatcagaatctaaaagca

SEQ ID NO: 101204 - DNA, 836 bp, Arabidopsis thaliana columbia
  unsure (1)..(836): unsure at all n locations
ttgnnnnnnnnnnnnnnnnnnnnnnnnnnnnnnnnnnnnnnnnnnnnnnnnnnnnnnnnnnnnnnnnnnnnnnnnnnnncttttttttttttttttttcatcattatatatatgataacactttattaaatttcaatacataacataattttgtaacgatcatatctaaaataaattgtagtctctctactcccctaaaagaaccttgtcaacgaccatctgaaaatttagttccgacgaaccataaataggcttcgtcgcttcctcagccaagcgctgccactcttcggccttttgcctcattttctttcctttgtctccgtccatgagttctctaaccaactcctcaacctcctccctcctcacatctccaccgatctccatccccacttcccattcatcacaacaatatttacaatttgtttgctgttccgcaaagaacggccaacacaccattggaactccaccggagagactctccaaagtcgaattccatccactatgcgttaagaaccctccaactgccggatgagaaagaactttttcttgaggacaccaactcggttagcatccttcggttagccgtctctattagaaagtccggcggaagcattggcacatcaccggctactaaatccggcctaatcacccacaaaaaatcttttttggtcgctgctaaaccccaagcaaactccacgagttgtttcgcactcatcactgttatgctaccgaaattaacataaacgacactgtttggagacttagtatcaagccaatccaaacactccatctcctctctccacatattcgttcctatctgtccgatgtcactttcc

SEQ ID NO: 101205 - DNA, 435 bp, Arabidopsis thaliana columbia
atttttgtgagtgaagagatttagagtaatcatgggtttaactcgaaatttcattttatggattcttttgtcatctctcttcacggcgattcaactaacgtcgtctcaacgcaacactccaccaccacgctctaaagacgccgatctctgcaacggcgtgttcgtttcctacacttacttaaccggtaccaagattaaaccaaacgacacgaagaaccagccgtaccggttcgaatcagagatcacggtcctaaacaacggccgcgacgagcttaaatcgtggcaagtctttgttaaattcgcccaccgcgagattcttgtttcagcgaccaacgctgttctctctgacggttctagcctcccggctagcgttgagaacgggacaatcttcgccgggtttccatcggcggatttgaagacggcgatcatgaccgc

SEQ ID NO: 101206 - DNA, 586 bp, Arabidopsis thaliana columbia
  unsure (1)..(586): unsure at all n locations
cctacgaaggtcgcacggtcatcgcatnaagcttgtatcatcgaaattacgcccgccccccccgagcctggtttagttgaccacatagatgtttcaaacaaatcagtagcaaaagtctacgtgaggagcacaccgaaagaccaacaaacaactgacgttgtccatggtaatggtaacggtattcctgctaaaagaactggtggtcagtataagtactacttcaatatcggtagtgttgattcttttgaggagaaactcgaagaagctcaagaagcgttaggtgttgatcgtcatgaatatgttcctgtcacatacgtctctgaaatggtctggtatcaagagttcatgaggtttgcaccgactttgttgctcttgggtactctgatctatggtgcgagacgggatgcaaggtggattggggtgtaggaggaactggcggtaagaatggtccgtggattttcaatttnggcaaagntaccaataacgggngctggtaaacatccaggntaaggtttntttnaaggattttccttgntttnccggggntaanaagaantttttgggtttnnccattccctangcccgc

SEQ ID NO: 101207 - DNA, 523 bp, Arabidopsis thaliana columbia
  unsure (1)..(523): unsure at all n locations
tgnnnnnnnnnnnnnnnnnnnnnnnnnnnnnnnnnnnnnnnnnnnnnnnnnnnnnnnnnnnnnnnnnnnnnnnnnnnnctttttttttttttttttgaagcctagaaccacggcccaatatgttttgatggccacacaaaaaaatcttgatacatatattcgtgtcccagtctgggataaacagtactgctaaagttgcatgtttcattttattcttaggaatacataagaaagttgtataaagtgaagatattaattttagatattccttgctagtccatttgataggaggatgagttggatagaaaatgatggtaccaaagagcagaactcttgaggtgtcgtttaagtccatcttgaaaatcaacgtagaccaatccgtatctatatttgtaaccaaattcccactcaaaatcatccattaatgaccatatataatatcctctcacatctgctccttgactgactgcttctagaagagcagtgagatggagttggtgatatttgatctttgcctcgtcat

SEQ ID NO: 101208 - DNA, 866 bp, Arabidopsis thaliana columbia
  unsure (1)..(866): unsure at all n locations
nnnnnnnnnnnnnnnnnnnnnnnnnnnnnnnnnnnnnnnnnnnnnnnnnnnnnnnnnnnnnnnnnnnnnnnnncttttttttttttttttaaaaaaactgtggtttccaagtttcttacttaacaacactttaatatgttggctttgttcacaatctatcagagactatcagagtatacaaaagggaggctgctttaatttcatgagagtcgcttgaaaaatgggcgactttgactttgaatcttgactttttcatcgatgtccttgtccttgtggtggcggctgctgctgctgttgccgttgcggaccgtagccaccaggcccacgcagcctgtggtccgtaaggggggggattatagcccaacaacccctgtttggtgctgggtccatggtatagttgggttggtaagggttcccaggatcccccagcctcaggatttccatatcccaccaccataagcaacttccaccagggttcccaaacagggcccattagccataaggcactcggtttctggagttagcaatctctgctcgaagcttcctccaggtcccgagccattgcaactaatttatgctccataattttgccatgctcgtagttttccgcgtaccctttcttctcataatcaatagccgctcttgcgcgttgcagctcttgctttgtgttctcaatttctgcagttaacgttggtatctgctgcaaatctgctgtaagtctagctaaatcttgagtcatcaggtgaacctgactcgttagttcctgtctacctgaagtaaactctttgatatccgcacggatcttttgaatctcagctcgcatagcatcgacttcacgcaattccatttcggatcgcatagattta

SEQ ID NO: 101209 - DNA, 1888 bp, Arabidopsis thaliana columbia
  unsure (1)..(1888): unsure at all n locations
ccggngcggaaataccggggcggcccaagccgtcggacatttcacttttaattttctagaaaaattgctttcgtcttgtctcttcaatgcctctgtatcgtccttaaaccctaaacaagaccccatccgccgccaccggtcaacctctctcctccgccaccgccccgtcgtcatctcctgtaccgccgatggcaacaacatcaaagccccgatcgagacagcggtcaagcctcctcaccgtaccgaggataacattcgagatgaggctcgtcgtaatcgttccaacgccgtgaatccattttcagctaaatacgttccgtttaatgcagctcctggatccacggagtcttactctctcgacgagatcgtgtaccgtagccgctccggtggtttgcttgatgtcgaacacgatatggaggctttgaagcgattcgatggcgcgtattggcgtgatctcttcgattcgcgtgttggtaaaagcacatggccttatggatcgggtgtttggtcgaagaaagagtgggttcttcctgagatcgatgacgacgacatcgtttcagcttttgaaggaaactcgaatctgttctgggcagagagatttggtaagcagtttctaggtatgaatgatctgtgggtgaaacactgtgggattagtcatacaggaagtttcaaggatcttggaatgactgttttggttagtcaagttaatcgtctgagaaagatgaaacgacctgtggttggtgtcggatgtgcttccaccggagatacttctgctgctctatctgcttactgcgcctccgctggaatcccatcgattgtgtttttaccggcgaacaagatctctatggctcagctggttcagccgatagctaatggtgcgtttgttttgagtattgacactgattttgatgggtgtatgaagctgattagagagataactgcggaattgccgatttatttggcgaattcgttgaatagtttgaggttagaagggcagaaaactgcagctattgagattttgcagcagtttgattggcaagttcctgattgggtgattgttcctggaggtaacctaggaaacatctatgccttttacaaagggtttaagatgtgtcaagaactgggacttgtcgataggatcccgaggatggtctgtgcacaagcagctaatgctaatcctctttacttgcactacaagtctggttggaaggacttcaagcccatgactgcaagtaccactttcgcctctgcgattcagatcggtgaccctgtctccatcgatagagctgtgtacgctctcaagaagtgcaatggtattgtagaagaagccacagaggaggagctgatggatgcgatggctcaagcggattcgacaggaatgtttatctgtcctcatacaggtgttgctctaactgctctgttcaagctgaggaatcaaggagtgattgcaccgactgatcgaactgtggtagtgagtactgctcatgggttgaagtttactcagtctaagatagattatcactccaatgccatccctgacatggcttgcagattctccaatcctcctgttgatgtgaaagcagatttcggagctgtcatggatgttctcaagagttacttaggaagtaatacacttacgtcataagagacaagaccataatctttagctgttttgttttttgaaaacttttagacgtttgtttgcgttactcttcaactcatctctctgtgatctttatctgtttctcagttttccaataaagttctatcgcaaagtttgaatcattttaaaaaaaaaaaaaaaagnnnnnnnnnnnnnnnnnnnnnnnnnnnnnnnnnnnnnnnnnnnnnnnnnnnnnnnnnnnnnnnnnnnnnnnnnnnnnnnnnn

SEQ ID NO: 101210 - DNA, 500 bp, Arabidopsis thaliana columbia
accattgtcaaagatttgctattgccattcagattttctttagtctttcccacatttcttcttcatgcttcaaacaatacatttgagcacgaagaaaatataactaccattcaacttggatacaggcagcaacagttgtaccgacatgccccgtattctcatttttcagctaaagaagaagaccaaaaggttcaaaagacccctccctgggtttcccacatttttccttgacattgattactaggaaaagcagaggttctaagagtctcctgtgtctcatcggtaagcttccttcttggcacactaagaacaaaggcagcctgatcccaagttgcagcaactgatgtaattctgtagccattttcccatcggcgatgtataccttcactggggtatagaaaatctagttctataacctgatcagaaaaagaagccccacgagacattacaattccccatttctatccagcagttgccattgatgtaacataaaacccttc

SEQ ID NO: 101211 - DNA, 1008 bp, Arabidopsis thaliana columbia
gttgattcagtctcactcttcctcagtagagctcccatcaatggcttcaatcaacctcttcctctacgccttccttcttcttctctctcacgcttcagcttcaactgtaatcttctacaacaaatgcaaacacccagtgtggccaggtatccaacccagcgccggtcaaaacttactcgccggcggtggttttaagcttccagctaacaaagcccactctcttcaactcccaccactctggtccggccgtttctggggtcgccacggctgcaccttcgacagatctggccggggtcactgcgccaccggagattgcggcggttctctctcctgcaacggtgccggcggtgaacctccggccactctcgccgaaatcactctcggccctgagctagacttctatgacgtcagcctcgtcgacggttataacctggccatgtcgattatgccggttaaaggttcaggtcaatgtacgtacgccggttgtgttagcgatctaaaccagatgtgtccggttggtttacaagtccggtcacgtaacgggaaacgtgtagtagcctgtaaaagtgcttgctctgccttcaattcaccacagtactgttgcaccggcttgttcggtaacccacagtcttgcaaaccaacggcttactccaaaatcttcaaagtcgcttgtccaaaagcttactcttatgcttacgacgagccaaccagtatcgccacatgttccaaggctaactacatcgtcaccttttgccctcatcatcgccattaaattagccagtaaagaagaagaaacatttctctattagcaacaaactcttgtcatgtttcgaattcttgagtttctatatctacttttgtaacactatgattgaatgcagatcctattatcaatatcaatggaactcaaccaacttagtgatgtgtcttgtgagtgttaatccccaaattctaaatccttttatgttcagtggcttatgtactagacaatgcaagattaatgctatt

SEQ ID NO: 101212 - DNA, 436 bp, Arabidopsis thaliana columbia
gaaaaagattcacttctccggcgagcaatttcaagtttctcggtaatggcgatgtcttctggaactctcaggatctctgcgaccttagtatctccttatcatcatcaccaccgtaatcgcctctcattaccttcttcttcttccaaggttgatttcacgggattcataagcaatggcgtaaacagtttggaaactcagaaatgtactcctggactggcgatcagccgcgaaaacacacgaggtcaggtgaaggttcttgcaaggaacaccggagactatgaactatcaccaagcccagcagagcaagagatagagagctttctctataatgccatcaacatgggtttctttgacaggttaaacttggcttggaagataatattcccatctcacgcatcaagaagaagctccaacgcaagaattgcaaagcagcggc

SEQ ID NO: 101213 - DNA, 675 bp, Arabidopsis thaliana columbia
  unsure (1)..(675): unsure at all n locations
tgcactatagatgagctatgacgtcgcatgcacgcgtacgtgagcttggatcctctagagcggccgacctttttttttttttttaatcaaagaagagagtggattaatagtctaatttgagattctcttacaataaagatagattacatcaaagagtttaggttttaagagatttaagcttttgccctcttttttttcttcttcttcatcagcaacgaaccagacctgacagagacggaagaagagggaaatagacaaattaggtgatgatctgttctaccaccacaagttcctatacacaaaatcaatttttgttgatctctctatctcacactcccatatatcctcagagaaaaagagagagagacaagacaaagagctcttcagattttccaaagacgaaaaaaacgaatcctcattcatgatattagccaatggttcagggttttgagacgcggctcagtaaccctaaccccgatcctaaacctcaagatcctgacccttcaggctgtgttgcaattccgagatcctggaggagtttctgcagctacttgctntgatgttnttttacactgtgttctatggctctgtcattgggtgtcgaatcattagactcgaacgggttacggtcctctgttagatgatccgggagtagaaaaaccggtctcatgtcga

SEQ ID NO: 101214 - DNA, 462 bp, Arabidopsis thaliana columbia
acactatagacgagctatgacgtcgcatgcacgcgtacgtaagcttggatcctctagagcggtcgacctttttttttttttttattaattaccgtttttattattagataatcacattattccatatcctttccaatcacgaggtccatacatgtttataatccataacatattaaatacaaacatacatcaaaaggaacctttggttacaagatccccaaaatatctgaaaacccaatcgatgaaaattattcatcaccatcgaccgaagcagtacattttgttgtgttctatgatatataatatatattgataaataaaatcaatagtagtaaaaaggacaaaagggtggtgggagcaccgtgtcgggtatgtttctggttaagtttggcttaatgttgaaagtgttaaagactttgcccattccagcgaacacatccacagactcaccactcattcttt

SEQ ID NO: 101215 - DNA, 661 bp, Arabidopsis thaliana columbia
tcaagctctattctgactcaatttatggaaagctggtacgcctgcagtgtaccggtccggtatacacgggtcgacccacgcgttcggtcactgacacagcatcagtaggtgtagctgttagtgataatggagtaagcacgaatgtggtgcagcatgaagctacggcagactctgaggatacagatgctggttcgccccaaagaacagatgagagtgaggcaatgagtgaagatgtgaacaaaacacccctaagggctgactcggatggtgaagatgatgaatcagatgcagaacatcccgggaaagtctccattggtaagaagctttggactttcttgacgacgtagcccaatctttgatcagagaatgtagctaatcttcttctgttgacaatattagtgttttgcttcttgatctttagtagctacttaggagggcttgtgttaatttcgtttggatattttttcaccacaatgtagtgttttctttctagctttctaccacttagttgctatcttgttaaagatgatcttcaagaaatctccattcttttggtatgttttagatgatgatttatttatttaaaaaaaaaaaaaaagggcggccgctctagaggatccaagcttacgtacgcgtgcgtgcgacgtcatagtcttctata

SEQ ID NO: 101216 - DNA, 502 bp, Arabidopsis thaliana columbia
  unsure (1)..(502): unsure at all n locations
ggtgnnnnnnnnnnnnnnnnnnnnnnnnnnnnnnnnnnnnnnnnnnnnnnnnnnnnnnnnnnnnnnnnaccttttttttttttttttctcttaactactctctgcttatttctctaactttatctcacagagtgatatccgaagcttcttttgcttggtgtcaaattgaagtgtgggaaacaaaagttggcaaactggtgaagcaatggctttacacttgaaatgaaaatacaaaaaaaaaaaaaccagaaatatttttggtagcaagttaaaaagatttgtgtagccttgccttctgatttattgaaccaatcatctccttgggaagcaagattctatggaagtgttactttgagttcttttctgtctgctccaaacgactcaactccgcagtctttcacgtacatgtttgtgaatagctcagatgcatctggtatcgggcttctccttgagctgagctacggacgcatctactgttttcctatctctttctncatgaccc

SEQ ID NO: 101217 - DNA, 789 bp, Arabidopsis thaliana columbia
ggcagggagtacattgttgatctcatgggagatccaggcacgcttatccccgctgatgcagctggactacaaatggactttgatgattctgtctactctgccagtcccagagatgttgattcatctcatgtagcttcttccagcagtggggtcgagagctcaattgaagaacacacagaatcttggtcagcggaacatcgttctaggaccaagggttcccgggaggaaaaccaatctgcaggtgccgcgcgtccgatgattccaaatattagggaagctgtgggaagtcaaaaggctcctgttcaacatctttccagcaagcctactcattctttcactcatgccagatcaccttcgtggactgaaggtgttagctctccagctggacgcaggatgaaagtcaaagatgtttcacaatatatgattgatgctgccaaagagaatccacaactagctcagaagcttcatgatgtgttacttgaaagtggagttgtagctcctcgaaatttattttcggaagtctattcagagtcaatggaggcaacaggtgaaatcaaatctgtggctgaatccaatgatgagaaagggaaagattttggaacaatccagcaaggaagaaaccagagcaaccttggccctgtgaggtttttgcctcctcttccaagaccgcaatctaaagcaattacccatgacctacgtgaacattcaggatctggactcggtcatttgtctgaacattgcaatattgatggtcactctgattcctcacattctgaaacatctactgac

SEQ ID NO: 101218 - DNA, 1196 bp, Arabidopsis thaliana columbia
tcggacgtaaataccctccatatcatctccggcccttcctatatttaaacaccatcatacatctctccctcctttgtctcgtcttccatgtccgatatatcgttaccagagaaagagagctcagagatttagttagcttaatttttcttttcgttttgaaattaaggaagtgattgttatcaccggaggagagagagaaaatgttgggaattttcagtggagctatagtatcgccgccggaagagttagtggctgccggaagcagaactccgtcgccgaaaacaaccggatcaactttagtaaaccggttcgtcgagaaaaatccatccgctgtttctgtacaagtcggcgactatgttcagcttgcttacagccatcacaacgagagtcctctccggcctagatcatttggagctaaggatgaaatattctgcttgttccaaggctcacttgacaacctaggaagcttgaaacagcagtacgggcttgcaaaaaacgcaaacgaggttctcttggtcatcgaggcttataagactctccgtgacagagctccttacccggctaaccacgttgttgctcacctaagtggcgatttcgcctttgtggtctttgataaatcaacctccactctgtttgtagcctctgaccaagttggcaaggttccattgtattggggaataacagctgatggctatgtggcatttgctgatgatgttgacttactaaaaggtgcttgtggcaagtctcttgcgtctttccctcaaggctgttattactcgacggcattaggtgggcttaggagcttcgagaaccctaagaacaagatcactgcagttcctgctaatgagggagaaatttggggagctaccttcaaggtggaaggagcaacagttcttgcagattgaaaatgaaagagaaacacaaaagaagtttcatgtctcttaaagctctcgaactgtaacagcacaaacaaaaaaaaatatgtaggaaaaacaaaaagctgttctatgagtacttgaagctatcaatggttggtgataatgtgtgtagtgttgtatctctcttatgtcttatgcttctttgtacagcacgtgtgtgtcttctggtgttattagtgtcttcttcctaataagttaatgtctctgaaacaaaaatctaccttctcttgaaaaaaaaaaaaaaagggcggccgccga

SEQ ID NO: 101219 - DNA, 545 bp, Arabidopsis thaliana columbia
ctatagaagagctttgacgtcgcatgcacgcgtacgtaagcttggatcctctagagcggcccccctttttttttttttttcgtgtgcatgaaacttggttatatgaaactgaattttcacaacagacgtttaaatgagtgaaaaaacatattctaaattattgggtcacgagtctccttaacaaattccaaaagttttacaaaagcaagaaccatcaactctgagagtatactgagattcaaatcaggttggttgcacggttaagtgaaagttttactcgacttcagccaagtaatcatcgatttctgctggtgttagcaccctgaaaactttgtcagtaccgattttgccaatctcgatgtttttgcttgagatttctccctcgaaaccttccttcaatgtcaatattgccgtgtgaatggcatcatcaagttccatatcttctgtgtacctcttctcaagaaacgtctttgcattcgaaacattctttcccattgcagaagctttccatgagaaataagagccagatggatccacttgataca

SEQ ID NO: 101220 - DNA, 562 bp, Arabidopsis thaliana columbia
  unsure (1)..(562): unsure at all n locations
nnnnnnnnnnnnnnnnnnnnnnnnnnnnnnattcnnnnnnnnnnnnnnnnnnnnnnnnnnnnnnnnnnnnnnnnnnnnnnnnnnnnnnnnnnnnnnnnnnnnnnnnnnnncttttttttggcaaggaaaataataacttcagcttttattactggtcaatgaagacaataattgtgaaaaaaatggcagcaacttaaagctgacaaaaacattaataaaattaccaagaagaattaagctcatctccttttttgattccttgactaaattataaattagaatgataaaatgataagagtggttagagactctgattgagacacaaagtgatatcctggaacaccttgagcctcttcttgtccactttggtttctgttcctaaaacagcagccatgatcgcatcttcaaagtctttattgtctggtaatccacactccgttgctttcttctccattgacaatctccttctcgtgcttgtgtttgtctctccctcatgatcaccaccaataccactcaacatccccatcccttggctcgacgatctcgttctcttcagcttctc

SEQ ID NO: 101221 - DNA, 515 bp, Arabidopsis thaliana columbia
  unsure (1)..(515): unsure at all n locations
atacggctgcgagaagacgacagaaggatacggctgcgagaagacgacagaaggatacggctgcgagaagacgacagaaggggacacacgagaaagaaaaagctcacaactttaacctttctggagagagaagaacaaaagagggagagggagagaaatggaaggcaaagaagaagatgtacgagtgggagctaacaagttcccggagaggcaacccatcggtacatcggctcagtccaccgacaaggactacaaagagccacctcctgcgccactgttcgagcccggcgagctcagctcatggtcttttctacagagccggaatagctgagtttatcgctactttctttgttttctctacatcacttgttttgnccttaaatggggnttaggnggcaccnaacaatgtgtnttctttttgggattccaaggttttcngnttgggctttttgggggggnaaaaatctttttggcccttggnnancntgaaccccntgggantttcaagggggggc

SEQ ID NO: 101222 - DNA, 542 bp, Arabidopsis thaliana columbia
  unsure (1)..(542): unsure at all n locations
tacgactcactttagggaaagctcgtacgcctgcaggtaccggtccggaattcccgggtcgccccacgcgtgcggaacaaaagagggagagggagagaaatggaaggcaaagaagaagatgtacgagtgggagctaacaagttcccggagaggcaacccatcggtacatcggctcagtccaccgacaaggactacaaagagccacctcctgcgccactgttcgagcccggcgagctcagctcatggtctttctacagagccggaatagctgagtttatcgctactttcttgtttctctacatcactgttttgactgtaatgggagttaagagagcaccaaacatgttgtgcttctgtttggaatccaaggtatcgctttgggctttttgggtggcatgatcttttgctccttgtttctactgttactgcctggaatttccaggtggacacatcaacccctgctgttaacattccgtccggtctccgctcggtccggaaattttcccctgaaccaaaaacaatgtttcctcnatgaattattc

SEQ ID NO: 101223 - DNA, 1268 bp, Arabidopsis thaliana columbia
  unsure (1)..(1268): unsure at all n locations
nnnnnnnnnnnnnnnnnnnnnnnagggggcccaaaactggacccccccggggggccctcaagactaagggatccccccgggctcaggggataaagaaaaagctcacaactttaacctttctggagagagaagaacaaaagagggagagggagagaaatggaaggcaaagaagaagatgtacgagtgggagctaacaagttcccggagaggcaacccatcggtacatcggctcagtccaccgacaaggactacaaagagccacctcctgcgccactgttcgagcccggcgagctcagctcatggtctttctacagagccggaatagctgagtttatcgctactttcttgtttctctacatcactgttttgactgtaatgggagttaagagagcaccaaacatgtgtgcttctgttggaatccaaggtatcgcttgggcttttggtggcatgatctttgctcttgtctactgtactgctggaatttcaggtggacacatcaaccctgctgtaacattcggtctgttcttggctcggaagttatctctgaccagagcagtgttctacatgattatgcaatgtcttggagccatctgtggtgccggagtcgtcaaaggtttccagccaacgccgtaccagactctcggtggtggtgctaacaccgttgctcatggctacaccaaaggttctggccttggtgctgaaatcatcggaacattcgttctcgtctacactgtcttctccgccaccgacgccaagagaagcgcccgtgactcacacgtcccgattttggcgccgctcccaatcggatttgcagtgttcttggtacacttggcaacaataccgatcaccgggaccggaatcaacccagctagaagtcttggagccgcaattatctacaacaaggaccactcttgggatgaccattggattttctgggttggaccattcattggagcagctctagcagcactatatcaccagattgtcatcagagcgattcctttcaagagcaagagttagagacacacagaaagattccacggtccagaatttgttctttagtagtttctttgcttatctatctaatgtagcttgtgttttgcaatgtaatgagcctttcaagaatatgtatttgggaattttctaatcagcttttgtctatgtaaaaactatgtgtttcttttttcttcctatactcgtccaaagggcgaccgctctagaggatccaagcttacgtacgcgtgcgtgcgacgtcatagtcttctata

SEQ ID NO: 101224 - DNA, 387 bp, Arabidopsis thaliana columbia
aaggtattgttgagcaagtccgtgatggcagcaccattcgggtttatcttcttccggaatttcagtttgttcaagtatttgttgctggactccaggctccatcgatgggaaggagacaatcaacacaagaagctgtcgttgatcctgatgttacagcaacttcgaatggagatgcttctgctgagacgcgtggccctctaacaacagctcagagacttgctgcctcagcagcatcgtctgttgaggtttcctctgatccgtttgcaatggaagccaagtactttactgagcttcgtgtgcttaatagagatgttcgtattgttcttgaaggcgttgacaagttcaacaatctgattgggtcagtatactattccgatggggatacag

SEQ ID NO: 101225 - DNA, 554 bp, Arabidopsis thaliana columbia
  unsure (1)..(554): unsure at all n locations
cgattaccnnnnnnnnnnnnnnnnnnnnnnnnnnnnnnnnnnnnnnnnnnnnnnnnnnnnnnnnnnnnnnnnnnnnnnnnnctttttttttttttttaaaaactgaaaaagttatggttctttttgtcaaattgtttttatttatatataacaaaaaaaaaaaagggaggaaaaaaatcatgaccggttgatttggttggattatggaatcatcttaaccatcgcctataatcgctagtagaagcaggtgatatctctccaccaccaccaagagactcagtacaacaagaagagtaatttgattgttgttccaatgcacccaattgtgagccacctatactcttgaaacttggactccttaaactctgaccatccatttgctgcggcagcggtggaactggaaacgaaagccgttttctagctgaactgatacgttctttctcgggtgttgaaggccgttgccttggtgcactctgagaccggattctagccttagcagattccgtaatcgccatgtagtttggcaatgcagcatttgtagcagtagtagtagt

SEQ ID NO: 101226 - DNA, 795 bp, Arabidopsis thaliana columbia
  unsure (1)..(795): unsure at all n locations
nnnnnnnnnnnnnnnnnnnnnnnnnnnnnnnnnnnnnnnnnnnnnnnnnnnnnnnnnnnnnnnnnnnnnnnnnnnnnnnnnnnnnnnnnnnnnnnnnnnnnnnnnnnnnnnnnnnnnnnnnnnnnnnnnnnnnnnnnnaacggatcaacgagatcaaacttttgataaaacaacattaatcgctagaaggaatttgatttttctaggccttatcaaaaaaaacaaaagggcgcaaaaaaaaacaaaaatttttatcccatcctatgttgacgtcacaaaacaaagaaattgttataggcttagggttcggacaagtgggggcctaagcctatcttccgatcttaatccttctggaaccaaaacaacaacatcttgaaccataacctgactcaagcgcgacgcgttcgcgtgttgtacacgacaatccatttccattaacgcactcatcaatgccgacgggggatgggtcacattctctgtctgaaccctaattatggcttcttctccgacgatcttcacttgcacttccaagtcagagcctctggtttgattttgnaagggttctgggttaacttgggtactcaacggaagacggagacgtattgctgctgctggttgnctaattaactggtctccggcancttcaatttcctggatcncagnttcgagatcancgatttnggattaaagcttcccagnacgaangcgngggnaaaaggacgcttggccatcggaactttggacgaggccgaaacgnaacggggtaagtcccccgnggtncgtcncggggaaagg

SEQ ID NO: 101227 - DNA, 564 bp, Arabidopsis thaliana columbia
  unsure (1)..(564): unsure at all n locations
ccgaattacnnnnnnnnnnnnnnnnnnnnnnnnnnnnnnnnnnnnnnnnnnnnnnnnnnnnnnnnnnnnnnnnnnnnnnnnnnnctttttttttttttttgccaagaacaatccggaactgacgttcacaaattctctttgaagtatcaactctgaaaccatatttcaaaatctgattacaatacaaaatggacaaaggtgtttaaagttttagcagtcaaaaaatgtgttttaaataagctatttttcctctgatatcttaaaacataggtgaggagcttatgccacttgtttacttgtttttcttcttcccagctgatttcttctgaccactcctcttgaattttttgaacttggtggtggcaagtgcttctgcagcgctcttgccttccattttctttgccatcttgaccacacttgacatccctctcactgcaactgcccgttgctctggtctacggctcatcatcttgcgatcgagtggccaataggcatatggttcaagtttatctttcttcttaagatcgccacttgcctttttgcttgcatactctctgcctgtgt

SEQ ID NO: 101228 - DNA, 326 bp, Arabidopsis thaliana columbia
caaattctctggagctggagggtcaacccacccccctccttcttccaacctaaacctctcttctatgcgaacttcttctctaccaccgtcgtctccgccgccatgtcccctctcctcctcctccgtcctcacagtcgtctccctcctctcctcttccctctctcagccctcgcctccttcagcgattctgatcgattgtggcgcctcttcctcctccgtaatcgacggccgacaatggcaacccgacgagactttcgtctccagcggcacaccaaaaaacgtttccgatcaagtcctcgacgaaatcttattcactgttagatctt

SEQ ID NO: 101229 - DNA, 444 bp, Arabidopsis thaliana columbia
gttatttttgttttgtaaatttggcaaaaactccctccaaaaaaaaacttagttgactgagaaaactaagcaaaaagatctccgatcggaatcttcttattcgccatggatgctctttctcaggcgatcagttccgggatctccgttccttacaagaacaattcttcttctctcgttccttctcacggactcacctccttaatcctccggaaatcgagatctccggtgaatccctcatcacgatctcgcgtctcggtgcgagcttcggagattcaacacagcaaaacctcagcttcatcgatcgatctcagcgatccagattggaaattaaagtatgagaaagatttcgagcaacgattcagcatacctcacatcactgatgtcttacctgatgctgaagccattcgttcaacgttttgtcttaagatgaggtctccgacggaa

SEQ ID NO: 101230 - DNA, 547 bp, Arabidopsis thaliana columbia
  unsure (1)..(547): unsure at all n locations
cgaatgcnnnnnnnnnnnnnnnnnnnnnnnnnnnnnnnnnnnnnnnnnnnnnnnnnnnnnnnnnnnnnnnnnnnnnnnnnnncttttttttttttttttttttacaaataaagttcgtttgttggctaattagacattagtttagtcaaatcacaatcacatgtatacttccatacctagaaacttagaagactgacacaaaggacaagagctaagcttcctctcacactccttacacaaacacatatgattacatggcaacaacaacatacacatttctctcactccacaaaacctgcacatcatcatcgtcttcgtgttattgttgctgttgtctctcccattgaagcaagaagctgtgtcatctacttcactgtctccacatccttcaatgctatctcttggccgaccttgagctcggtcaagattgtagttgagtgcagcaatcatattctcgttgtactttgcacgttgctgccatgcctcagcttccattgtcagctgttccattcgcacctcgagttccttgttctttcggtttatcctc

SEQ ID NO: 101231 - DNA, 731 bp, Arabidopsis thaliana columbia
  unsure (1)..(731): unsure at all n locations
gaataggtctnttcatgataatcctatccactgaagcagtcaccaaaatcatcgatctcgcactgctgtcaccaccacaatgctttgaaggagatggttccagcaagagcgtcaagatcttcaaccaatttacccagtacgaatctcattccaaggattcctatattgttctcgaagaacanaatcagaaganaacttatagagaattgacgttcggcttgagacggagatttagccgtcaattttgactgagaagcgtcgtctccggtaggaatttcgaacatattacgacgagcttcccaaagcgcattagtcaccggagaatgatacattccaggccataagctaattggtttccgcattgaagatcctgcatcgatcgaattttgatcaggattttcatctgacggtaccgtcgaattccacatcttctgagacctcgtagccggaatccaaaatccatcaccaagtttcccgcggtttctccgtagagaatgggagagaagctttcccgctgaagatctcatggatctacgatgacggaagcagagaattggagaggtacaattttcctttatgaatcgatagaatctctcattctttccttttgcctgttctctcgttgtgagctaagtgccggacgcgtggctcgacccgggaattccggaccggtacctgcaggcgtgcnnnnnnnnnnnnnnnnnnnnnnnnnnnnnnnnnggaagaatcat

SEQ ID NO: 101232 - DNA, 549 bp, Arabidopsis thaliana columbia
taggtgccctatagaagactatgacgtcgcatgcacgcgtacgtaagcttggatcctctagagcggcctccctttttttttttttttaatcccatcaccatttttatatacaaaacctgtgattttatctcgttggagtcttcaccaaccataagacaactaaagacactcaaaatatattttaaagaaaaaaacttgcgataataacttaactttttatctgggaaggtctctgaacaggaacaacggagtattcacattcttcctctcctcagttcccggaaatgagagtgataacgacagagaagctgccacttcggcgtcatcttcttcttcttcatctgctttctgtttttctttattcatactattattactttgttcaccagagttgctacttctgcttaagaaaggtaatagtcccattgttgcttctgttgtttcctcagctcctaatgccagctccagattcgggactgtaccgcttattaaacgtctattgttgttattctcgtcattgcctagtgggctgagattatccaccatttc

SEQ ID NO: 101233 - DNA, 625 bp, Arabidopsis thaliana columbia
  unsure (1)..(625): unsure at all n locations
ttccnnnnnnnnnnnnnnnnnnnnnnnnnnnnnnnnnnnnnnnnnnnnnnnnnnnnnnnnnnnnnnnnnnnnnnctttttttttttttttgacacaaccctgtttttttttttttaatatgaataataataatattattcaaacagtttgctactctctccctcaacttcttgaaatccctttcttgagatctaaagagagagttttgtatgctttaaaattaagaaggttaaagaaaaaaagagaagaaaagaaaaaaagttgattaacatattgattaaaacatgagaaccagagtctctctgagagatcatcatcatcatcatcatcaattgatcagcatcactgtcttcctttctttgcacagcaaggcgggcatttatactgcttgatgctctctgctttagccggagttatcttgacgcattttccatggtaccaacgttcacaaacatcacagcaaatccagaactcctcatttgtgtaatgacctccacagcttccacagagagtgtctccatgctcgtcttcttcttcctcctcctcatagctctcttccattagtttcggtgttgagctctttgtctgcccgtctattgatctcttagtgccatttctggatttg

SEQ ID NO: 101234 - DNA, 541 bp, Arabidopsis thaliana columbia
  unsure (1)..(541): unsure at all n locations
nnnnnnnnnnnnnnnnnnnnnnnnnnnnnnnnnnnnnnnnnnnnnnnnnnnnnnnnnnnnnnnnnnnnnnnnnctttttttttttttttaaggttgaaaagcttacttatttaatcatcaatttaaagattctgacaaacacaatagaaaaatctgtgagataagcaagtctatttaaaataatgagaagaaaggaacattgtcaaatagagttgattacttctcccagttggctggtcacttctcaacgacatttttgtcatacaaatactcaacgaattcatcaatcaggtaaggccatgctccttctgcatcgtaattcgacagcactgggtcgaccatccttgaaaattccagtagctgtgcccatgtgtccttagatatggccttgttatgacgatcctgcaagaaatcacaccagtgagttaccaaaggccactctctttctgcaaagagcaactgccacatcccaatcgctgtgtctaaggcaagagatttctgccccttctctttcgcccacccaaaagcaaagttgtatatc

SEQ ID NO: 101235 - DNA, 555 bp, Arabidopsis thaliana columbia
acgactcactattgggaaagctggaccgcctgcaggtaccggtccggaattcccgggtcgatccacgcgtgcggtacaaactggcacaagttctgaggatgacttgaggatcaagtttgaggagctcaaaggaaagttttatggattggctgaacagaatgaaatgctggagcagtccttgatggaaaggaatactttggttcagagatgggaaaaactcctggaaaatattgatatccctccacagctacactccatggaagtggaaaacaagattgaatggcttgcaagtacaattacagaggctacacatgaccgggataatctccaacagaagattgataaccttgaagtctattgtcaatcagtaactactgatttggaagtctcacaaaagcaagtaggtgatgtcgagggaaatcttcaatcatgtgttagtgagagggtgaatctttctgaaaggctggaaagtttgattggtgatcatgagagtctttctgcaaggggcattcaccttgaagttgagaatgagaaactgcagaatcaagtgaaaga

SEQ ID NO: 101236 - DNA, 535 bp, Arabidopsis thaliana columbia
  unsure (1)..(535): unsure at all n locations
nnnnnnnnnnnnnnnnnnnnnnnnnnnnnnnnnnnnnnnnnnnnnnnnnnnnnnnnnnnnnnnnnnnnnnnnnnnnnnnnnnnnnnnnnnnnnnnnnnnnnnncctcaagaacccttcattatattatatatatatatatatagatacattatatattgtttctataatatacagagatctaaaacagttagctccattatcacccatctgcttcttcattttcctttctaacgaaaaatccgtcaaaaaacaatgttatgtcatctcatgttgcagcattggggcttcccgagtctctgcagcttatcccacatgcaaatcatctggcgaggcgactgataatgagcggtgaagtagtcttctatgcaaccaaactgacagaacttgaggctgtgaaccactgccactggtctagtctcgttgaacttctccacccacattcccatgctcacatcttccatcttgaataatcttaatcgcttttgttcaaaatcatccgacatgaccttagctacatcatatgacaagatgtaa

SEQ ID NO: 101237 - DNA, 552 bp, Arabidopsis thaliana columbia
  unsure (1)..(552): unsure at all n locations
gattacnnnnnnnnnnnnnnnnnnnnnnnnnnnnnnnnnnnnnnnnnnnnnnnnnnnnnnnnnnnnnnnnnnnnnnnnnnctttttttttttttttcttgaatcaaatattatttcgtttcacgagaattcagtacaagtgaataaatgtctgttagtattgaatgaatgcaacatgatatggctagactagagaaatgagctatgaccgcctccgagtggtattcttggaagaaacactgcagatgcctcaaggcatgaacaataactgaagccaatagctggtatgcagagtagtaatccacagtgattgaccaagacaggaaggctttttcttgcagcggctgggatcaactttaaggacctgagagctttttgtgaggatgaaatagaatgatttgaggttgagcattttgaaagctcagctagatataaccagtcgggttcaaccatgtgccgaacctccattgatgtagcagtactcactggacaatttctgcagtctgcttcattacattggtggtcacttangttccatctgatgagaaaacgg

SEQ ID NO: 101238 - DNA, 543 bp, Arabidopsis thaliana columbia
  unsure (1)..(543): unsure at all n locations
nnnnnnnnnnnnnnnnnnnnnnnnnnnnnnnnnnnnnnnnnnnnnnnnnnnnnnnnnnnnnnnnnnnnnnnnnnnnnnnnnnnnnnnnnnnnnnnnnnnnnnnnnnnnnnnaaggggataagaaattttgaactgatcagtttaatctttcacataagcggcaaaaacaaacaaatagccaattgtaagctatacactaagtcacctttactagtagtaaattgattttcggtgggtcaggccaaacaatcataagactctctcaggcaccattattgaataagaaacttactcgatggcgtgcttatcagattgacgagacgtgtaatgtgcagaaagcaaaacgagagaaagaaaagcactcgccacaaaaattgcatcaaaccatcgatgatagaaatcaaactgaatatctccacccaacacatctgttatgattcccctgtactcatttctcaagctttttctgataagaagaattgaagacaaaaagtacattcccatgatttcagataggaaaagtacaacattgcttgaagaccc

SEQ ID NO: 101239 - DNA, 522 bp, Arabidopsis thaliana columbia
  unsure (1)..(522): unsure at all n locations
nnnnnnnnnnnnnnnnnnnnnnnnnnnnnnnnnnnnnnnnnnnnnnnnnnnnnnnnnnnnnnnnnnnnnnnnnnnnnnnnnnnnnnnnnnnnnnnnnnnnnnnnnnnnnnnaaacggaagttaatgatgtaacttttattgaagaggggacgactctctcgggtccgtactgaaccatggagtttccaagttttaagagggttttagtatttttttttataggggcaatgagtctgattacaaaggaccctcatttccttcaatagtctatcattcttcctctcagtatagcctccgccttacgcacttctctcaccggtccaatcacaaatatcttatcaggtggaccctttgcccctccaattagaatttccgcgttgcaagcttccttaatggcgaggatcgatgctcctttccttccaatcacacgtcccatctttcctggtggaacatcaagcactgacaggatctcttcttcaagacattgatcttctgacttcaggttatctggaattggaggaa

SEQ ID NO: 101240 - DNA, 547 bp, Arabidopsis thaliana columbia
  unsure (1)..(547): unsure at all n locations
nnnnnnnnnnnnnnnnnnnnnnnnnnnnnnnnnnnnnnnnnnnnnnnnnnnnnnnnnnnnnnnnnnnnnnnnnnnnnnnnnnnnnnnnnnnnnnnnnnnnngcacaaaagcagtaatatattataggcttgagcttgttacttcacatatttgttctgttccacgcaaaagccgtttttagattgctccccccatcctaagctagacaaaatttggcagccgagtatttttcaactttacataaagatttctctattcatagacaaaaaattggaagcatatagaaggttggttacatccaagctccccagccagggaacatatgggacaaacgatctgtgtcaattgcgtcttgtattagttgctgtgcctggccatgtatgcttctcatctcaccaccctcgtagccatcaagtttttgcttgacacgcatcaaggcacgtgttgcatccttgtttccctcgaactcctcttgtaacccttccaagttcatgccatcataatcttcagtttccttctgtctttgcaaagcctttaagggggacaa

SEQ ID NO: 101241 - DNA, 799 bp, Arabidopsis thaliana columbia
  unsure (1)..(799): unsure at all n locations
acgacgtcgcatgcacgcgtacgtaagcttggatcctctagagcggccgccctttntttttttatttttgtttgcattatcggatcaatctttttgcacaaaaattcaagttatttatacaacttattttgcaaccaaactcgcttactgatttagcaaatagaaacaacatgcaagatattgcatccaaatgaaagaaaaaaagacgaacacacccgatgactcatggtcgacaacacgatttagaagtgatgtcatgtgatgctaagatgcgatttagatgtttgtaatgatgtgactttattttgacacaagcaaagttgtgaacattaagaaaacatagtgattgagaagcaacgagatgttggctcatcaatcttgtagtcgttcatagcataattacaagcattcttcaccacaacttagtaaaccatatttcataaaaccatcatctatcattttccatttcttcacatcttcgacattgagtagtccatcgcttccacgagaaaatctgcatcgtccttggtgaagcagagaggtggtgtgattctaaagacatttccaaagtagcctccttttccaatcaacacacccaattctttcatttgatccataatgtgcagagtctcggcggttgcaggagtcttaagcttgcgatcactcaccagctccactccaagcatcagtcctcttccccggacatccccgataatctcgtgtttttctttcagctgtgtgagtttttctttcagataggatccaaccattgcagcattttcctgaagcttctctttct

SEQ ID NO: 101242 - DNA, 537 bp, Arabidopsis thaliana columbia
  unsure (1)..(537): unsure at all n locations
nnnnnnnnnnnnnnnnnnnnnnnnnnnnnnnnnnnnnnnnnnnnnnnnnnnnnnnnnnnnnnncttttttttttttttttttgggaagaatgatattgtgtgattggctattatcatcgtaaggctttttgtgtgtgtgaaattccaatcataattgaaacagagcttttgagttttataacacaagagaaaaacaaacgacatataatccttgaagctgtttggccccatcacatgatacagcaatttggcgaggactccagcatctctggggatatttggccaagacttgcgaaatcaaaccccggatcaatctctttaactatatcactcgggggttgtccacattcctgcatcttttgcatgatctccattatcttagatgaattgttaggttcattctcgtacactgcattgagttcttctattagtttggactgttgtgaatatcgtttgtagtcttccttgcttagactggcttcattctcttttaagccatttcggatatcttgcgccaagttccttcattggttcgtg

SEQ ID NO: 101243 - DNA, 552 bp, Arabidopsis thaliana columbia
  unsure (1)..(552): unsure at all n locations
nnnnnnnnnnnnnnnnnnnnnnnnnnnnnnnnnnnnnnnnnnnnnnnnnnnnnnnnnnnnnnnnnnnnnnnnnncttttttttttttttttttttgatatccagtaataacatttctctgttacttttactgttttacatggactagcaaacattagtaaactaataataacctcttgaaaattgggttaaaaaaaaagtaaagaggtcagaaaagaagaaaaatatttaatgttttaactttttaacccgaaaatagaaaaattagaatttttttgtttagtgattttctttgaacagtaaagctaatcccgtgacgacctttgcttctttcttcactgactctgccacgtcatcatcatctctaccaacagacgtaatcggagacttcaatggcggcaacaagaccttctcctcgaaaatcagctcaatctccgaagaatctagctccggttcagctacgactttcgcggcagaagtaaccgtcggctttttttttcgcggagtttcgagtgtaggaagatagccacttagcgcgcatgtaatcagcttt

SEQ ID NO: 101244 - DNA, 592 bp, Arabidopsis thaliana columbia
  unsure (1)..(592): unsure at all n locations
nnnnnnnnnnnnnnnnnnnnnnnnnnnnnnnnnnnnnnnnnnnnnnnnnnnnnnnnnnnnnnnnnnnnnnnnnnnnnnnnnnnnnnnnnnnnnnnnnnnnncccataagggttggctattatttaaaccaaagattgtaaaggttacaagagtggaaactcaactttcagactgcagacaaaaacaaaataaagataaaagcccaactaaaagaaagcccagttgaaataagaaacccttttaggaagtaattgatgtagtccaacgcaaaaccacatgtaagttatcaagcgaggttgaagcacgtgggcagaagaaacatttgttatcacggccaccgccgatttggttagtcatcgcagggaactccaaaactaccaggaaccaccaagacttcaagcttgtccgatggagcaacaccaaattcagagaatcccatcaatcttcttcatcttcgaattcgcaaaggaaaatctcccctgggtagtcatatcatgatcttcaaacgacattagcgtagaaccttaagccatcggnccccnnggnngncccgggattccggccgggacctnaaggggaacagtttcccnaa

SEQ ID NO: 101245 - DNA, 560 bp, Arabidopsis thaliana columbia
  unsure (1)..(560): unsure at all n locations
attgtannnnnnnnnnnnnnnnnnnnnnnnnnnnnnnnnnnnnnnnnnnnnnnnnnnnnnnnnnnnnnnnnnnnnnnnncttttttttttttttttatctattaaccataggttacttgtactgagatggacaagaatactctccgagtctaacatagaagctagaaccaataataaaacaaggttaaagcaacgaccgaaattgttgcaaacacaaacttgcaatagataagagacaattacaaaattaccgctattaacttgacgcaaataggtgaccgtcaatggtttcacaacttacttggcaaattagtgacccaccataagtgactaatacttgttatttagaacatacgataattcgacggaagatccaaatatcggagacaagaacttgatcgtagcttgccacaagcgagagattggtgagtcgaagacaattccacgaagattttgggagattgatgattggtcacgttccaataaaggcatagtgacgttgaaaggaaagccttaaccatagatattctcggattggtacacacggcttctaaaaagat

SEQ ID NO: 101246 - DNA, 588 bp, Arabidopsis thaliana columbia
  unsure (1)..(588): unsure at all n locations
gatattnnnnnnnnnnnnnnnnnnnnnnnnnnnnnnnnnnnnnnnnnnnnnnnnnnnnnnnnnnnnnnnnnnnnnnnnnnnctttttttttttttttttgaatatgaaatgtaaatcactctaattcgaatattttagttcaaagatgaagacaaaaaaaagaatgggaacttgtgagccctctttagtctctagttacacttacactaaaaacaaagtacacagtaactaccggtaaccgtaagaaatccaatccaagccacaggtagacttccccggttactacaaaaccgctttttggcaaacgttctacaaaaggcggtcatgctgaagcaacagttgtagtagagtgagagctaacggtgccaatatgggaagatggtagctaaagatgatacgtgcgtttgcgtttcctcccaatggacttgcgggtcctaacgcatccggaggaaagtttccattagtagcgtttgcgtttaagcttcccgtatatgcacatgttctatagctaggatctctagtcgtagtgatagccgtaccatcaaagtcacaagttccacctgcacttttcatcttctggtaatagtc

SEQ ID NO: 101247 - DNA, 502 bp, Arabidopsis thaliana columbia
  unsure (1)..(502): unsure at all n locations
nnnnnnnnnnnnnnnnnnnnnnnnnnnnnnnnnnnnnnnnnnnnnnnnnnnnnnnnnnnnnnnnnnnnnnnnnccacgcgtccgaaacactttatcaagagattcacttagctcttcaggcgatgatgcttcaagcttcaatggttcaatggtctcttctagcttcgcttcgccttcagacaaaccgaagcataagtcaatctctccttacaaattcatatcttctcttatcatgaattctcctctgaggaaatggagaggaagtgagactaagaacaagcccaaacctcagcctctaattcaatgcttcacttacaacgagatttcaaaggccacatatgattttcaccaacggaatatagtaggcataggaggctactctgaagtgtacagaggagatttatgggatggtagaagaatacagtgaagagattagccactgagagtggtgacatgaacaacgagaaagagtttcttaccgaacttagcatcataagtcatg

SEQ ID NO: 101248 - DNA, 728 bp, Arabidopsis thaliana columbia
  unsure (1)..(728): unsure at all n locations
nnnnnnnnnnnnnnnnnnnnnnnnnnnnnnnnnnnnnnnnnnnnnnnnnnnnnnnnnnnnnnnnnnnnnnnnctatgcgttttgtcttttttttcgatctgattgattgtgggaacaaaaaccttcccaacttgtcttttattaaccatcaaatgcgagtacaacttttaatccaatccactacacatttataagagatttggcataactaagtgattcgaaaacagattaaactagaaccgtcatttaggatgttgaggagcagggatgattccccattttctacgaacttgctccaagtcttcactaaagggacgctcatagtacacacacatgaggtcagtgcattgtcttccagcacgaacagcccaaggaaggtaatgcttcaagaacattgatctttgcttctcgttgaacctcacagtacctccaatcacagagagcatacacatcggaagatacatttgctcaaactcgataactttcaaagacgactcgccgataagattcgtaggaaggccaaacagagtgggccanaagccggganttcgngngnccgtgtcggcacgtaagccaattnatccggcnccaagattttaagggggggggttatcngggggaagttctaggcccccgattngcaatgggnccaaaggtttcnggggcccacagccnatgtngnaaacngggggccaaaaagccccttnggtttattncanaattaaggg

SEQ ID NO: 101249 - DNA, 543 bp, Arabidopsis thaliana columbia
  unsure (1)..(543): unsure at all n locations
ggtgnnnnnnnnnnnnnnnnnnnnnnnnnnnnnnnnnnnnnnnnnnnnnnnnnnnnnnnnnnnnnnnnnnctttgtgttttttttttttattagagttggtcccaatcatatcaagctacatagatccatccgatagacattctgaacttaaagccgaactaagtcataacataaaactaaaacttaagacaacactgataaacagtcttttactcagtagacaccttcacattcatcatcactattcactagtgagtctcctcttagggttttgagacaaagagaatcagctcgtgttgtttgatgaatgaaaacttgcaagtgtctccaactgctagaggatattcttgagccaaacctttccatccagcagagaagcttgatttcgtccctgacaccacgtaaaccacattccatgacttcttcatatttgggtgatgtatcttgaaaatcgttctctgcttcggcatatgaatactttgaacagatttcgggaaccacatgtagatgaggtatgattttttgataaacatggagaattc

SEQ ID NO: 101250 - DNA, 395 bp, Arabidopsis thaliana columbia
gacccacgcgaccagcttgatccagattcggttctgatcggagctgccatggaacgcatcatcggcggcaagtacaagctcggacggaagatcggcggtggttccttcggagagattttcctagctacgcacgtcgataccttcgagatcgtagctgttaagatcgagaacagtagaacaaagcatcctcagcttctctatgaagctaagctatatagaactcttgaaggaggaagtggaattccgcgcataagatggtttggagttgatggaacagagaatgctttagtgatggatttgctcggtccaagtctcgaagatcttttcgtctactgtgggagaaaattttcaccaaagacggtcttgatgttggctgatcaaatgctaactagaat

SEQ ID NO: 101251 - DNA, 518 bp, Arabidopsis thaliana columbia
  unsure (1)..(518): unsure at all n locations
nnnnnnnnnnnnnnnnnnnnnnnnnnnnnnnnnnnnnnnnnnnnnnnnnnnnnnnnnnnnnnnnnnnnnnnnnnnnnnnnnnnnnnnnnnnnnnnnnnnnnnnnncctagagaggtgggggtttactattttgaagtacatcgaaacatatgataaaaagtgatcaggaaacattttttggcaatggggtttaataatgctactgaggcatatttgcgtataaaagagtaaaaaagagtttaacttcaggcaaatctcggatgagttgcaagaaccggttcttctccggctcagctgaaatctccggcatggttttctcaatctgtggtaatagctttgccaattgcatccctgtggccagaccggtctgcgtttccatctcctctactaacgcaacggcacaacacttgagtgagatctctgctacattcgaaaaatcattgcttgtgagtacttcccgtgtctcggttatgagtagatgaaacttggtaacagttgcatcagaagaggaaacatca

SEQ ID NO: 101252 - DNA, 566 bp, Arabidopsis thaliana columbia
agctgaaacaatatgttattatttctcatacagtgttctttgacaaatatgaaggagatattagaaacaattgacaaactgagaggatacaaaaaatgtaaatcagaaatccgggaagtaatagaggcgcactttggccattgttacaacagagatgatacaataattaatttaatgaggtgataaaaataagaaagtaaagaaatttcagaaagaagcctgaaaaaactgagccttttagggttattagaatcgaaaaaagcttacccggagtttgcttttgtttccgtttgctttcttgaataataaataaacgaatcatcagtttcacagcttcacagaaatgtgaacctctctctcgcagctgaggctcagcgatctaggtgcagctgttcaagccacgcatcaagaatgtcgctctcacgagtgtccactgttgtgaggattcacactcgaaccaccttgagtcaatggccttgcaccattcatgttcacaacacggtttccgttcctaggtgatgaagagtcttttaacatctgctgagcccatgaaacatctgccggac

SEQ ID NO: 101253 - DNA, 553 bp, Arabidopsis thaliana columbia
  unsure (1)..(553): unsure at all n locations
taggtgacactatagaagatctatgacgtcgcatgcacgcgtacgtaagcttggattcttttgaacgggcggcctttttttttttttttggtaagaccaaaggaaattcgggataattctattttaattccaggtataaatttaggcgggaaatttcaacttttggtttttccggagaggaattaaggttggaaggtaaatgaaggaaaattgattccgagtcagaaggtaaattcaaggagaaatggacttcatcaatgggtcatcgttcaaaagagactcagtgtcagtaaaatcggcttcttcacaggtgactgcttcttcttctttattgtttatagatgcacttgatgaagcctcattttcacggaagccctcaacaaccgttaggagtctacggtattgatccccgtgcttcctgggtattgaaccatcgacttaacacgagtcagagcctcctgtagcctttcccctgtttgctttcctccccctttaagataatcaacctcccccgtggatccctaggaatatactganaagggggtccggtccc

SEQ ID NO: 101254 - DNA, 783 bp, Arabidopsis thaliana columbia
  unsure (1)..(783): unsure at all n locations
tnnnnnnnnnnnnnnnnnnnnnnnnnnnnnnnnnnnnnnnnnnnnnnnnnnnnnnnnnnnnnnnnnnnctttttttttttttttttgaacaaataaaaaagttatatattgttaagacgaaagaaaatagtgaataattctatttcaatccaagtaataaattaagcggtaaatatcaactatggtatttacagagaagaaataaagttagaaagtaaaagaaggaaaaatgaatacgagtcagaaagtaaaatcaaggagaaatagacatcatcaatgtgtcatcgttcaaaagagactcaatgtcaataaaatcgtcttcttcacagttgactgcttcttcttctttattggttatagatgcacttgatgaagcctcattttcacggaagccctcaacaaccgttaggagtctacggtattgatcccgtgcttctgggtattgaaccatcgacttaacacgagtcagagccttctgtagcctttcctctgtttgttttcttccctctttaagataatcatactcatcttcctgtgggatcctaggacatatagctgatacaggcggttccggttccacggttttggcgactgcattgcgtttaaaccctctcaaaccattacctttgcgtctccaacgcacaaatgattttctcgagtaatcccacagaccagatgactgtttcgtatttgttccggacctgatgtcctctcacatgagcctgaattttaaacgattctttgtcggataaaaagaaactcttttctcttttttcaacccac

SEQ ID NO: 101255 - DNA, 526 bp, Arabidopsis thaliana columbia
  unsure (1)..(526): unsure at all n locations
nnnnnnnnnnnnnnnnnnnnnnnnnnnnnnnnnnnnnnnnnnnnnnnnnnnnnnnnnnnnnnnnnnnnnnnnnnctttttttttttttttaagttctaaccatacatatactattcacttgtataaaataatcaagtcagtgttttcccgacataactcgtgtgacctatttatgtatgcaatttcaacaaattatcaaagtaaggatacctattcaagcgtatattaactatatatacattaacaccatttcccaattcctggagtttagagcttgagaatcaaaggcagaggtagaggtcacgagcaagaaacaaagtagacgaagaggcacgaagaacccacaaagaatagatcgaagataaacccagtgagctatactagacgagccaaccagagaccatttggctgtagaaatttccctagttgaagaaaactattggatttgacttgccaagatctaaaattgcacaaagtcaatctttttcctgaaaatgacaatttgttgctcatgaagggatgtttg

SEQ ID NO: 101256 - DNA, 518 bp, Arabidopsis thaliana columbia
  unsure (1)..(518): unsure at all n locations
nnnnnnnnnnnnnnnnnnnnnnnnnnnnnnnnnnnnnnnnnnnnnnnnnnnnnnnnnnnnnnnnnnnnnnaccttttttttttttttacaaatgaaatgatgtttttgcagaaaacttgaaacaagaaagacaatcctccaacaatatgatataacacccgcatgactcacactaaagattcaccacatttaagtgtgactcttatggcattcatcaaactttgacagaaccgacatactcaaatgcatattccaggggaatttgatttggaagcactggaccaaaccactcgaccttcccccaaatctctccactatcacttctttcaagtgcaatcatcgcacaccacatcatcgttttatgaaagccaagaccatcaccagaagccacaaacttatcccaaaacattaccattttcccaccataatccgccaacgtaacactggcatgacgaacaaacttatgcagttctctcataccattcaacaaacttctccaagttcttgccttagtgtca

SEQ ID NO: 101257 - DNA, 747 bp, Arabidopsis thaliana columbia
  unsure (1)..(747): unsure at all n locations
nnnnnnnnnnnnnnnnnnnnnnnnnnnnnnnnnnnnnnnnnnnnnnnnntccttttttttttgtantttggatgtaatatggatactttagctaccgtacttgaaaatctccgcaataaacatgaaattcgaataaagttaacaaaatttttacgaatcctacaccagaaacttgactgcgtctgcaacaactttctcgataataaagagacctaagagttgacatatagctcaccatccaacattgaaaattctaggatttctagacccacgggttcttcttcgctgattttgaactcaatccagagcttgttttcgatttcagtttctttgctttaccacgaatcctgttcctgggaggtttcagcttgtatagccgaaccatccaatggtgactcgtgaaaacctcttcgaaatgtgtaagcttaaaatgcttcttcccaatctctgtccgcctcacccgatcataacctttaccatccgtctctacaaacctgtagtaagagagcttgtacataaggctgttcaacattgttggagtggcctcagaatcaatccggtattgcccatctctcagataatcagcttcctttatatgtggaaagacgccgtctccaatacgaaccatccacagaaacttgctgatgtcatcactagggtaaccaataagaccaccaaagacgacaagaacctatttcacattcaaggagttgaaaatttcccacgccgccttttctggagatgaca

SEQ ID NO: 101258 - DNA, 517 bp, Arabidopsis thaliana columbia
ttaggtgacactatagaaagactatgacgtcgcatgcacgcgtaccgtagcttggatcctctagagcgggcgccctttttttttttttttggattaacatctcaacctcatcgttgagatggatgttgattattattattaggaataactaaaaccaaagaattctttataagttataacaatgaaattacttcatgggtttttggataaagatatctcctatgcatatatatctagtatacatttggaacaggtgatgaatatcaactgaccctgtttcttagatagaagagatcttcatgttatcgatcttttcttgagtttccatgtcgatcacattctgcaatgctccttcaccagtcaagaaactcggttgatttgtcgatgcaaggagtctagcccacatcctatcagttaacttcaccgtatttgtcacttccgtcacctgagaaattgggatgtaagcatgtctactgttaactggtcctacagtgaaacctgagtacccagccattgc

SEQ ID NO: 101259 - DNA, 528 bp, Arabidopsis thaliana columbia
  unsure (1)..(528): unsure at all n locations
nnnnnnnnnnnnnnnnnnnnnnnnnnnnnnnnnnnnnnnnnnnnnnnnnnnnnnnnnnnnnnnnnnnnnnnnnncttttttttttttttttaaaagaagcattgttcattatttatacaacaagaacgcataggtcactattaacaaatcaaatgtacgcactatcgaggggatttaagttcgtcaatatgacatttgctacgtgggccttgcgtacgaatgaattgacggtaacgatcgtatgtggtggaggagtagagagcaggtgaatctacggtcactagctccttcaatggctcgataggaacattgccctttgggttggagaaaaatgccaatgacaacctctcattttcagggttcacgatcactctgtgttctacgcttttgtatattgaattgctcagcatctgaatttggtcacccatgttaacgatgaaagcatgaggagctggttcgactgtgatccaagcgtcgtcggatccacggacctgaagactggcgacttgttcgtccggcaagagaatg

SEQ ID NO: 101260 - DNA, 512 bp, Arabidopsis thaliana columbia
  unsure (1)..(512): unsure at all n locations
nnnnnnnnnnnnnnnnnnnnnnnnnnnnnnnnnnnnnnnnnnnnnnnnnnnnnnnnnnnnnnnnnnnnnnnacctttttttttttttttttgatcatcaccaacatcatcaacatcatcatcaaagaggaaaatgggtacataaattaaacaataaaaaccttgtctctcaaatttctcaagtaattaattaagctaaattaaaaccctagtgatcaaagaaattcaagattcatggttggccttgttcatgatgaaacgaagactgcggtggtggaggaggaggagcctgatgatgatgaagtggtgaaggcgacttaccaagagtgtgtttgttggtatgtaaccaaaccttaagaacttggctcggaacaccagtctcctgacaaaatctctgaatcacttcatcgtcttgtctctgaattctccatccaatcctctcagctaaagctaacatcctttccttttgctcagccgtaaacttaggcctatgcctgttcctaatgcctcctc

SEQ ID NO: 101261 - DNA, 414 bp, Arabidopsis thaliana columbia
catatctctaatacgagaagaaaaaggcgaaaacctcgccaatccgattacgcgaaaaatcaaagaatctttgtttgatttttgatttttaggtttttggatatggcgtcggagcggatcttgaaggaattgaaggatctccagaaggatccacctacatcatgtagcgcacgtcctgttgctgaagacatgtttcactggcaggcaacgataatgggtccttcacagagtccttatgctggaggtgttttccttcgaaccatccatttccctcctggattacccattcaagccttctaaggtggcctttactacctaggtgttccatcctatctttaacagcaaccttttcatttgcactttacattttttaatctactattttttcttcttcactcatccattttttagcct

SEQ ID NO: 101262 - DNA, 592 bp, Arabidopsis thaliana columbia
  unsure (1)..(592): unsure at all n locations
aaaaccaaaaacgtgaattcggagttatgattttggatcttcttcccgtctttatatataatttcctgggttatgtttttcttcttcttagttcatctgaccattggattggttttcgattgcagagtcttcaattggaatttggatcgtgggattttggaaatggcatcgaaacggattttgaaggaattgaaggatctgcagaaggatcctcctacttcatgtagcgcaggacccgttgcggaagacatgtttcattggcaggccactataatgggtccatcggatagcccttattctggaggagtttttcttgtaaccatccatttccctccagattacccatttaaagcctcctaaggtggcttttaaggacgaaggtgttcccatccaaacattaacagcaatggaagcatctgcctcgacatcttgaagggagcagtggagtccctggntttnacaattttccaaggtgctgctatcgatctgtcctttgtaaacggttccaanccagtgatcctttggnccctnngnnggttcaatttcaaggnaggcaggncaagttngggncnttttttggnccnggncccaa

SEQ ID NO: 101263 - DNA, 499 bp, Arabidopsis thaliana columbia
  unsure (1)..(499): unsure at all n locations
agaagaaaaaggcgaaaacctcgccaatccgattacgcgaaaaatcaaaggtttttggatatggcgtcgaagcggatcttgaaggaattgaaggatctccagaaggcatccacctacatcatgtagcgcaggtcctgttgctgaagacatgtttcactggcaggcaacgataatgggtccttcagagagtccttatgctggaggtgttttccttgtaaccatccatttccctccggattacccattcaagcctcctaaggtggcctttaggaccaaggtgttccatcccaacattaacagcaacggtagcatttcgcctcgacatctttgaagggagcagtgggagtcctgcggttaaccattttccaaagggtgctggctatccgatctggttcctttgttcaaccggtccccaaaacccggctgntccctttgggtcccccgaatngggtttattgttcaaaaacggtcaaagnacaagaaggggnncnctttaacg

SEQ ID NO: 101264 - DNA, 660 bp, Arabidopsis thaliana columbia
tacggctgcgagaagacgacagaagggggagaagaaaaaggcgaaaacctcgccaatccgattacgcgaaaaatcaaaggtttttggatatggcgtcgaagcggatcttgaaggaattgaaggatctccagaaggatccacctacatcatgtagcgcaggtcctgttgctgaagacatgtttcactggcaggcaacgataatgggtccttcagagagtccttatgctggaggtgttttccttgtaaccatccatttccctccggattacccattcaagcctcctaaggtggcctttaggaccaaaggtgggtgctgctatcgatctgttctttgttaaccgatccaaacccggatgatccttttgggtgcccgagatagctcacatgtacaagactgacaagaacaagtacgagtccactgcacgaagctggactcagaagtatgccatgggctaaatggaaaatcccacctactaaattatctctttatgaagaaaaaaatctgccttaatttctatgtatgattcgatagacatctctttgtgtccttttaactttctgaagacaggaccaaatgaagtgggtcttgttttaaacgaaacaaaaaaaaacatcatctttgtgaaaactagaatctgatcatcccctgttgtttcttct

SEQ ID NO: 101265 - DNA, 720 bp, Arabidopsis thaliana columbia
  unsure (1)..(720): unsure at all n locations
ccggnnnggaagggccgacccgagcgacccaaaacgtgaattcggaagtcttcaattggaatttggatcgtgggattttggaaatggcatcgaaacggattttgaaggaattgaaggatctgcagaaggatcctcctacttcatgtagcgcaggacccgttgcggaagacatgtttcattggcaggccactataatgggtccatcggatagcccttattctggaggagtttttcttgtaaccatccatttccctccagattacccatttaagcctcctaaggtggcttttaggacgaaggtgttccatccaaacattaacagcaatggaagcatctgcctcgacatcttgaaggagcagtggagtcctgctctcacaatttccaaggtgctgctatcgatctgttctttgttaacggatccaaacccagatgatcctttggtccctgagatagctcacatgtacaagacagacaagaacaagtacgagtccactgctcggacctggacccaaaagtatgccatgggctgacacaaatactgtccttaaggaagagccctaataattaaactcttcttatttctatgtaatgatcttttatagacttgtctgtcttataaaatttgtgaagacaggatcagataagaaattatttgatctccattctatggaattgtaaaacgtaaatcatcaannnnnnnnnnnnnnnnnnnnnnnnnnn

SEQ ID NO: 101266 - DNA, 801 bp, Arabidopsis thaliana columbia
aacccactatagggaaagctggtccgcctgcaggtaccggtccggaattcccgggtcgacccacgcgtccgacgagaagaaaaaggcgaaaacctcgccaatccgattacgctgaaaaatcaaaggtttttggatatggcgtcgaagccggatcttgaaggaaattgaaggatctccagaaggatccacctacatcatgtagcgcaggtcctgttgctgaagacatgtttcactggcaggcaacgataatgggtccttcagagagtccttatgctggaggtgttttccttgtaaccatccatttccctccggattacccattcaagcctcctaaggtggcctttaggaccaaggtgttccatcccaacattaacagcaacggtagcatttgcctcgacatcttgaaggagcagtggagtcctgcgctcaccatttccaaggtgctgctatcgatctgttctttgttaaccgatccaaacccggatgatcctttggtgcccgagatagctcacatgtacaagactgacaagaacatgtacgagtccactgcacgaagctggactcagaagtatgccatgggctaaatggaaaatcccacctactaaattatctctttatgaagaaaaatctgccttaatttctatgtatgattcgatagacatctcttttgtccctttaactttctgaagacaggacccaattgagtgggtccttgtttaaacgaaaccaaaaaaaacctcatctttgtggaaaaaaaaaaaaaaaaggcgggccgctctaaaagattcaaacttaccttcc

SEQ ID NO: 101267 - DNA, 818 bp, Arabidopsis thaliana columbia
ccacgaattccccaccaccatctctattttcttcctttcccctaagtcttggttcttcttctctctaatacgagaagaaaaaggcgaaaacctcgccaatccgattacgcgaaaaatcaaaggtttttggatatggcgtcgaagcggatcttgaaggaattgaaggatctccagaaggatccacctacatcatgtagcgcaggtcctgttgctgaagacatgtttcactggcaggcaacgataatgggtccttcagagagtccttatgctggaggtgttttccttgtaaccatccatttccctccggattacccattcaagcctcctaaggtggcctttaggaccaaggtgttccatcccaacattaacagcaacggtagcatttgcctcgacatcttgaaggagcagtggagtcctgcgctcaccatttccaaggtgctgctatcgatctgttctttgttaaccgatccaaacccggatgatcctttggtgcccgagatagctcacatgtacaagactgacaagaacaagtacgagtccactgcacgaagctggactcagaagtatgccatgggctaaatggaaaatcccacctactaaattatctctttatgaagaaaaaaatctgccttaatttctatgtatgattcgatagacatctctttgtgtccttttaactttctgaagacaggaccaaatgaagtgggtcttgttttaaacgaaacaaaaaaaaacatcatctttgtgaaaactagaatctgatcatcttctgttgtttcttcttgtggtgaaattatgatttgatgttaaaggaattc

SEQ ID NO: 101268 - DNA, 524 bp, Arabidopsis thaliana columbia
  unsure (1)..(524): unsure at all n locations
ggatgttannnnnnnnnnnnnnnnnnnnnnnnnnnnnnnnnnnnnnnnnnnnnnnnnnnnnnnnnnnnnnnnnnnnnnnnnnncttttttttttttttttgattataatcgtctacactagcctttcctcttatcataatcaatgtcataagttaaaacaaataaatcgaaaacaaagactgttacaagattacatgatgaagcaaatgtatgaaagaatcagaaaccggcaaggtatcgatatcattcggtttttcgccttcttttaccaacgcatctttgtggtggtgaacgtttgtttcttgggtttgctttgaatttgacatctttcgtctttccctgcatcttcttgtactctcttgatctcaaaactgcttccaagatgttcatgtcttcccggatctcatgtctagaaagcgacgttaagctcgggagtatctctttttggaagttcttcattcttctccctcttctcagcttgagtccaatctctttgttattatctcttgcgatgttattaagtt

SEQ ID NO: 101269 - DNA, 329 bp, Arabidopsis thaliana columbia
  unsure (1)..(329): unsure at all n locations
aacaaacgtctgctccctttggacttgaagctgcacagccttcgaacttaaagaggaagggcaaaagaacgttggcttccatggnaaagccagtgagttgcttcatcagtttggagtccatgtcatgccactcaccaactgaacacattacagctacctccttcgcttccatcgaacttgttaatgtgatctcttgaaaataacctgttatacctatgatggttatgcctatctatgtttaaatgtttttaagcgttctcttttgtgatgttggtctttatataatgttacgtatgatacatttgaataaaggtggttgattccatccc

SEQ ID NO: 101270 - DNA, 516 bp, Arabidopsis thaliana columbia
  unsure (1)..(516): unsure at all n locations
nnnnnnnnnncactatagaagattatgacgtggtatgcacgcgtacgtaagcttggatcctatagagcggtcgacctttttttttttttttaaacaaagggttcttcttgaagctgattcgataatccaaaagtaaaaaaagtatttgaagttaaggtctcattattgcttttgagacgttggcattgccagagatactgaagttggaatatctttccactgttgtgtaacagttttgatctgagtgaaaaagtccactcctgctttgccatagaagttaagatctcctgcgaatgaggccttgttcccggtgaaggaaaagaacggtaatggaaccgggattggaacattaataccgatctgtcctgcttctatgtccatctggaactttcttgctgctgccccggacgacgtgaaaatcgcagcaccgttcccatacttgtttttatttattatagatatggcctcatcaaaactgtttgcctgcatgcacacaagaacagggccaaatatttc

SEQ ID NO: 101271 - DNA, 552 bp, Arabidopsis thaliana columbia
  unsure (1)..(552): unsure at all n locations
nnnnnnnnnnnnnnnnnnnnnnnnnnnnnnnnnnnnnnnnnnnnnnnnnnnnnnnnnnnnnnnnnnnnnnncgcctttttttttttttttgattcttgaagggtggttcttttataaatatatacaatatggtcaatacaacagtaaataaccagaatgggattggccttatggatggtcttattctcaactaaacttctcattttttgaattaaagaatatgggggttctattccacacagagaacacatcactttaaaaaccccatatcttgagactcgaataaacaacaattattttaagctttctataactcgagaccactcttggaacttggacttcttcaacattcttggaactttatatacctgggaagtaacatctgggcattaatggtcaccaagaggtgctgatgatgaacggttcaagagcctagccttctttgatgccctaaccgtcttcagaggcatcatcagcttttggctctctccttcaacctctgcaaacttgaggcttagctgagaataacggtcatgcatttccctaagctct

SEQ ID NO: 101272 - DNA, 523 bp, Arabidopsis thaliana columbia
  unsure (1)..(523): unsure at all n locations
atgtnnnnnnnnnnnnnnnnnnnnnnnnnnnnnnnnnnnnnnnnnnnnnnnnnnnnnnnnnnnnnnnnnnnnnnnnnctttttttttttttttcccgaataaaaatctaaaaaaaatacattaaacaacagattcaactacacaaaaggaagaaagtcaatctgttttttccccggtttgcttggactaagttttacaatcaataaagagggtcccaatttggagagatcattcaattgggttgccctaattaaggaaattaattagtcctttttcatcttgagatttcacaagtgggacttagccctatttgctccatctcccagcttttctttgaggctaccttctcatgccttggtacataatcctatttttttcaaatccacagaagttaaaaaaaaaaaactatacagaaaatagtcaaacaagtaaagaaaaaagtgaaaaagcaacctcaagtttcttgacaagttctttagcagaaggagcagatacaatgatatgacgagcagttggtgaaatg

SEQ ID NO: 101273 - DNA, 446 bp, Arabidopsis thaliana columbia
cccacgcgtccgcgttttttctctgctccagggggaaattaaaaaagtggaaccttttcatctcctggagcgatcaatttctttttcatcatatcgctgactctcgtcttcgtcgtctttgatcgtatcgaggaattgggtttagttcgattcgatcatcagctatctcaatttttctggggattgttctaaaggtttctagtgacttgtttaaagtggttggtattggataatgccttctctcatctcacagcaatggcaggagaggactagtggattcttttcttcatcaggaacgaagcttatggaagcagggcagactgctggtagttttgtcggggaagttgctaaggatgcgaaagtgaatgttgcagatgttgcataaagagttgggtcgttgtttaaaagccggtgggcaattcttcaacaacctgcaactagacatg

SEQ ID NO: 101274 - DNA, 699 bp, Arabidopsis thaliana columbia
  unsure (1)..(699): unsure at all n locations
aanaaaggnttttnncnagggggccantttttcggggnttnggccccnttttttcccaanccntttgggttcntggaatggccccccccccntgngggtttcccccaacntcncnatttcaaaggccccaaaacntntcggggnattggaccattggccaatagaccgggttncaggttcttccacttcctggtcccctccctttttcttccttcttcaacttcatacctttctgactggtctgcctctgttgaactggtgtctgtttcacaagcagaagccgcgacatcacatatctcaaaagctcttcacggtgagagaatgtgaaatcaaggtgagcatactcaaactcattaaacgatacatcgacctcggcatctctcatcacattgtagtgtttcttcaccatagaggaacggatcaccttgtcgttccttcccgctactaaatccacaggcacatcgatgaacttgtaagactcccctagatcaagcggttcaggagagccataaacctccatgttagctgatctgcttccataatcatacatcctgaatttaccggtgtgtttgatctgagcaagatgttgcgccacacggaaggagacagctggcatgtcgttcatgttgtagtgaggcaatcctaagactccgacccaattcgagctgtctccaccaactacataactcattagagttt

SEQ ID NO: 101275 - DNA, 518 bp, Arabidopsis thaliana columbia
  unsure (1)..(518): unsure at all n locations
gcaanaaaagttccgagatttggccgaaanggngaaaaaatccgggtattggccccaaaaaaacctntcttnctctaaaagnactacaaanattncaacntgccnatttncctgaagaagnttttacttcccagtagnggctaaanccaaagaaaggnctgatgacaattcccaatccaagcccaatagccacaagtgacggaaccccaagttagtttctctgtgagccttggaactttctctttcaaagcctccctgcaagacccaataaacgctgtgtaacttcccatcgctataactgtcccaaccagaaacattatcaaaaacgcagaccctgctaaccgtgatgggagagctaatgcaggcaaaacaatcatcagagcatccggtggcaacccgtgaaccactccagttgcaaatgtagcaaacccgatcttcttctttttgggcagtggtaaggcttctttctctgttgataccatgctgatgtcggtttctaaagcgacacaaggttctgg

SEQ ID NO: 101276 - DNA, 737 bp, Arabidopsis thaliana columbia
  unsure (1)..(737): unsure at all n locations
nnnnnnnnnnnnnnnnnnnnnnnnnnnnnncatgacgtcgcatgcacgcgtacgtaagcttggatcctctagagcggccgccctttttttttttttttttttttgaaacaagaatgactttttagttaaaatttgataatattacaaagtatggttacatgcagttgatcgataattcagaaccaaaaccaaacttcttttaaaaataaggaaaataaaaagaatcaccaaatggttttctccgagaggagtttctgaagcaagattacgagattttgttcgtacaggtgacaataatacgagtgatatggacccaaaaaaacctctctttcttctataagaactacaaagatttcaacttgtctcatttacctgaagaagcttttactttctcagtagaggctaaaaccaaagaaagggctgatgacaattcccaatccaagaccaatagccacaagtgacgaaacccaggttagtttctctgggatccttggaactttctctttgaaagcctcactgcaagacccaataaacggtgggtaactttccatcgctataactgggccaaccagaaacattatcaagaacgcaggccctgttaaccgtgatggggagaaccttatgtcagggcaaaaacaaattatttaagaggcattcccgggtggcaaaccccgttgaaacccaccttccaagttttgcaaaaaaggtgaggtcaagagacccccgaaaacctatca

SEQ ID NO: 101277 - DNA, 505 bp, Arabidopsis thaliana columbia
gtgacactttagaagatttatggacgtggctgcccgcgtccgtaagctgggatcctttagagcggccgccctttttttttttttttttatgagttgacaacaattctcactaaccaacggatactgggacaagtgggacacttactaacctatgaacataacttttttccctgagaactagctattttgctaagatatcagttcagaatgtaagacaatcagaacttggtatgccaatcattacaaacaattagtccaatcttctccttctccataataatgctaaattaggagaacttctaacagatgatcacgtaaaggtactacttatctatagactcatgggtacctcatgagtaccattagcctccgggtattgccggccttgacctccatatatatcatcggtgttggttgcataacttgcagccaatccaggacttggggttggagctgcctcagcagctgcatttgcttctctagctttagtctccagatcaaccaa

SEQ ID NO: 101278 - DNA, 495 bp, Arabidopsis thaliana columbia
atgacgtcgcatgcacgcgtacgtaagcttggatcctctagagcggtcgcccttttttttttttttttgcactagaccgaccatttcttgcaattcaattaaattacatcatcctacgatacatcaatatacacccaactgagaaacgctatattacaatttactctattttctggtttatttccctaggtgaaaccaaattacaacatattgaaaggaaaaagtcagaaaattcagacacttctcctctctgcagaaaattcaccttaggttataatggtgctgcaggtgtggagccacaactatccccacccagtgaatcgggtataatcacctgcacaaccttaggagcaggttcgggttcactggttccacctgattgaaccgaaggaaccactgatgaagttgaggctcctctcttcatttttggcttggtattttcttccatatatttcacgacctgagagatgcttccacaatgtccatgaaacaacg

SEQ ID NO: 101279 - DNA, 623 bp, Arabidopsis thaliana columbia
  unsure (1)..(623): unsure at all n locations
nnnnnnnnnnnnnnnnnnnnnnnnnnnnnnnnnnnnnnnnnnnnnnnnnnnnnnnnnnnnnnnnnnnnnnnnnnctatgtgttcgttattagacttactttcgtcgttttggaacagctttcttgttttatcttcaagttacaaacatatcacgagacgatcgtgtttagtaagagaacaaacaacaacacaggacatcagatttacacatgacgtagcacaagctgaagctgatccacttctggaccaatgagatccataataatgttccctacacttggaagccactggcgtgaggaagatgatccggaaactgccattgttgtggatgatgacgacgatgatttatcacagaggtatggcactatatgctgcttcatgtctgtatgagatatctgaagatgatttccagagacgttaacgaacttcacttttccagcttcatctaagggtctcaaccaatccagtcttcagtatatagcttggnccctgcggcggaagaatggncttgaaagnccatcaggtaatatccaaccatgnggtccttanggaccanatgggcatcccaantataagccagtccccacncggaccccctaaagcggttttgccggagcgtgncc

SEQ ID NO: 101280 - DNA, 705 bp, Arabidopsis thaliana columbia
ctatgacgtcgcatgcacgcgtccgtaagctgggatcctttaaagcggccgccctttttttttttttttttgagagggattttggaacagtttttttgttttatcttcaaggtacaaacatatcacgagacgatcgtgtttagtaagagaacaaacaacaacacaggacatcagatttacacatgacgtagcacaagctgaagctgatccacttctggaccaataagatccataataatgttccctacacttggaagccactggtgtgaggaagatgatccggaaactgccattgttgtggatgatgacgaccatgatttatcacagaggtatggcactatatgcttcttcatgtctgtatgagatatctgaagatgatttccagagacgttaacgaacttcacttttccagcttcatctaaggttctcaaaccaatccagtcttcagtatatagcttggtctcttgcggcggaagaatggtcttgaaagacccatcaggataatatccaaaccatgaggtttctttaggtatcaatattgtgtcatgctcaaacataataagcacaagattctccaaactcgagaacctctccttataagtcgagtttttgactggaagttcgttgtttagctttgggagaaacctacagccttccatgtaacccgctatgtcagttgggattttgagaaaaccgctaggagca

SEQ ID NO: 101281 - DNA, 531 bp, Arabidopsis thaliana columbia
aggtgaactatagaagatctatgacgtcgcatgcacgcgtacgtaagctcggaattcggctcgaggtgaaatgttggtttctactttatgaaagatcaaaaatgtcccgagaatcaaaatagcctgagccttgtgacacataccctttggcagctggtggttttgaagggggttgagaatcgattaccttctgagctatctggtggaaatgaagaaaaggggttgctttagctcgttcactaatttgtgatacaacaaaagaaggccatagagccagaggtgctgttgtacgatgagccagctgctggacttgatccaattgcatcaactgtagttgaagatcttatacgtgactgttcacatgacagactaagatgcaatgtggaaatcctgaataattgcgtcttattttgttgttacccatcaacatagcaccattccaaagagctgtagacagtttatggtttttgtatgaaggaaggatcgttttggcaaggaatgacacattgaattcacaccctcaactaatcc

SEQ ID NO: 101282 - DNA, 488 bp, Arabidopsis thaliana columbia
taatacgactcacttagggaaagccggtacgcctgcaggtaccggtccggaattcccgggtcgacccacgcgtccggcgatgagtgctattcctgctctatccaaaccatcggtacaggctattatttttgtgccacgtgtgataaaagggtccacaaagaatgcgtcgagtgtccacttgagattagttatcctacccacaccaaacattctcgccaactcctctattccaaatatagatttgaccattgcatctactgtagaaaaagagcaacctatatgatttagttttgtgctctttgcgacagttatatgcatgtcctttgtgctcagtcaaaaatacccttttttatagaccagccaaaaagacatgaccatactctcacccttttccctagacaagcttccttaacctgcaatatttgtggtttgataaataaactccatttcacctacgtttgccctatatgcgatttcgtagcccatag

SEQ ID NO: 101283 - DNA, 595 bp, Arabidopsis thaliana columbia
acgactcactatttggaaagctggaccgcctgcaggtaccggtccggaattcccgggtcgatccacgcgtgcgactaaactcaaatcttcctctcagtttctcccactcttcttcctcaaccttccgatttatcggattactctaaaatacccaaaatggaatctcatggaaaaacccatcagaaagagcacgataatgatctctctccgaaacccataacgttgtcaaagtattcgaaacgggtcgagttaaagactctgcttgatcggagcgaccgcggcgcaggattggctgggaaaagggttgtgattggtggttgggttaagtctgctagagcgggtaagaaaaattctcctcctcctcctctgcctgtagttgccgccccttcgccgtcgagtggtggggatcaagctcatacgacggccaacattaggtgcacggagataatccaatcgaaaatgaatattttcaagagatttttcgatgtactgagccggtggtggtaagacttatccaatctttgataagacagaactcgccggtcagaaggccgtgccaccaccggagtatgttttttacttcttgatcagtgat

SEQ ID NO: 101284 - DNA, 657 bp, Arabidopsis thaliana columbia
  unsure (1)..(657): unsure at all n locations
cnnnnnnnnnnnnnnnnnnnnnnnnnnnnnnntctctctctaatcttttttttttcttccttgttctctatctccccgcgtccgtcttcttcttccttctcctttctctgtttatttgcttcgtttcctcttctctttctccgattctttatccatcttcgctcagatcttccccgtttcaactctttggatccagattctcctcctttttatgtaggtaacacgcatatcaagtgttaaagagtcaagatcacaaaaagttctatcgggtgatctgggctgctttcttttgtaatctaattgcagaaactttgctctgacttggatagcttcgtaaaaggttcaatctttctccgtttttcatcaatgagtagtaactaatctggaaatttgttgggagagaaagggcacattgcactgctattgctagagaacgtttctgcatccatgctggtagagagcatgcgtggatactgtgttttgggtgatgcccctgacaaaattagttcccgatgcattcggcgttgtgacgatatgtctagtcgctctgctagttcttttgggtctcctttgcatcgcttactcgttctatttccagtctcacgttcgtaagcaaggctatattcaacttggttacttcagtggtccctggattat

SEQ ID NO: 101285 - DNA, 687 bp, Arabidopsis thaliana columbia
atgagaataaggagaagagatgaaaaagagaatcaagaatacaagaaaggtttatggacagttgaagaagacaacatccttatggactatgttcttaatcatggcactggccaatggaaccgcatcgtcagaaaaactgggctaaagagatgtgggaaaagttgtagactgagatggatgaattatttgagccctaatgtgaacaaaggcaatttcactgaacaagaagaagacctcattattcgtctccacaagctcctcggcaatagatggtctttgatagctaaaagagtaccgggaagaacagataaccaagtcaagaactactggaacactcatctcagcaaaaaactcgtcggagattactcctccgccgtcaaaaccaccggagaagacgacgactctccaccgtcattgttcatcactgccgccacaccttcttctcgtcatcatcaacaagaaaatatctacgagaatatagccaagagctttaacggcgtcgtatcagcttcgtacgaggataaaccaaaacaagaactggctcaaaaagatgtcctaatggcaactactaatgacccaagtcactattatggcaataacgctttatgggttcatgacgatgattttgagcttagttcactcgtaatgatgaattttgcttctagtgatattgagtactgcctttag

SEQ ID NO: 101286 - DNA, 704 bp, Arabidopsis thaliana columbia
cttctttcccgataaagaagctctcgctttgtgttgtccgtccttcttccaggttttctcgtctctgacgcatggcttctaagaggatcttgaaggagctcaaggatctgcagaaggatcctccttcaaactgcagcgctggtccggtggctgaggacatgttccattggcaagccactatcatgggacctcctgaaagtccgtatgccggaggagtgtttttggtttctattcatttccctccggattatcctttcaagccaccaaaggtgtcttttaagactaaggtgtaccatccaaacatcaatagcaatggaagtatttgccttgatattttgaaagagcaatggagccctgctcttactatctccaaggttctgttgtcgatttgctcgctgttgactgacccaaacccagatgatcctcttgtgccggagatagctcacatgttcaagacagatagatccaagtacgagtcaactgcgagaagctggacacaaaagtacgcaatgggttgatgatataagacaaagcaaaggatatgttattgcgcatcggaataaaataataacttaaaaaaaatgcacttgtttggtttatcaaacgttagcaagtatcgaacaacttagctgctcttactcctcttctgttctgatcactataaactagtattaatttcgaaaaaaaaaaaaaaaaaggaattc

SEQ ID NO: 101287 - DNA, 528 bp, Arabidopsis thaliana columbia
tgattctgccagctctatactgactcacattagggaaagctggtcacgcctgcaggtaccggtccggaattcccgggtcgacccacgcgtccggaagttattgcttgttcttggactacttgtttgttcgattgcgttcgcggtagtagccataatcaaagctagatcattgaaaaaggcgagtgagtcacgggcttggaggttaacagctttccagagactagacttcacgtgtgacgatgtcttggattctctcaaagaagacaacattataggcaaaggaggagctggtattgtctataaaggcgtaatgcctaatggtgatctagtcgcggttaaaagactcgctgcaatgtctcgtggatcttcccatgatcaccgcttcaacgcagagattcataccttaggaaggataagacacagacacatagtgaggcttctcggattttgctcataccacgagacgaatctacttgtctatgagtacatgcctaatggtagactctgcgaggtgcttcacgggacgaa

SEQ ID NO: 101288 - DNA, 518 bp, Arabidopsis thaliana columbia
cagcactaatacgactcactttagggaaagctcgtacgcctgcaggtaccggtccggaattcccggtgtcgacccacgcgtccggacacacctcaccgagactaccattaggaaggataagacacagacacatagtgaggcttctcggattttgctcaaaccacgagacgaatctacttgtctatgagtacatgcctaatggtagtctcggtgaggtgcttcacggtaagaaaggaggacacttgcattgggacacacgttacaagattgctcttgaagctgctaaaggactctgttaccttcatcacgattgttctccattgatcgttcacagagatgtcaaatcaaacaacatcctccttgattcaaactttgaagctcatgttgctgactttggtctcgctaaattccttcaagattccggtacttctgaatgtatgtctgcaatcgctggctcttacggctacatagctccagagtatgcgtatactttgaaggtagatgagaagagcgatgtg

SEQ ID NO: 101289 - DNA, 762 bp, Arabidopsis thaliana columbia
agctatgacgtcgcatgcacgcgtacgtaagcttggatcctctagagcggccgccctttttttttttttttgacccataaactgtgaatacgtgctcactcagtttggtttgatattaccgcatacatatgtgtgactccgatcataaaagttctacgtataacagttgaaacaaaagaaatcaaatttttcgtgggaggcatggcaagctcgcactctctcactcataatcggttccaaaatagcggtctccaatctcggccataccaggaacaactcggaactcgtcgtttaaaccgagctctatctctgcagtcacaatctttatccttgggaactttttgcacaccacatttactccttcaggtgcagatatcaaattgagaaatatgatgatggattcaggcacgcctttacttatgagcagtcttatcgatggcaccgccgagattcctgtcccgaggattggatccagtaaaagcacatgcctttctgaaatgtctgagggcaggttctcgaagataaactgttgaccattgtcgccttctttatgaataagaatcttcccaatattgatgcctttgcagcatgctctaacagcgttcttcatactctcaccgcttctgagaactgagacaccacacagtttcttacagaagtcctcaccccgaatacacagatcctggtggaataaccacttgtttttttttaaagggaaagtgtcctaggtcatgttcaacggacaaacgggttaatcgaacg

SEQ ID NO: 101290 - DNA, 504 bp, Arabidopsis thaliana columbia
  unsure (1)..(504): unsure at all n locations
agctccnnnnnnnnnnnnnnnnnnnnnnnnnnnnnnnnnnnnnnnnnnnnnnnnnnnnnnnnnnnnnnnnnccacgcgtgcgatttgctaatattaaacactttttcttttagaaaaaaaaacaaatatggccgttgattcacctcttcaatctcggatggtttcagcgacgacttctgagaaagatgtgaaagctctcaagttcattgaagaaatgactcggaaccctgactcggttcaagagaaggttcttggagagatactgactcgtaactctaacaccgaatatctgaaacggttcgatcttgatggtgtcgttgatcggaaaacgttcaagagcaaagttccggtggttacgtacgaagatttgaagccggagattcaacgtatatccaacggcgattgttctccgatcttgtcttctcaccccatcaccgagtttctcacaagctcaggaacatctgctggtgagaggaaactaatgccaacaattgaagaagactt

SEQ ID NO: 101291 - DNA, 455 bp, Arabidopsis thaliana columbia
tgaaagacaagtatattttcttatttactatataaagtaatttcactttctcagatcccgattcctcttgatcatcgtcttcttctaccaaaattgttgcgcgacaatggagaaatacaacagtttatcagattttctcaaggagttctacatccctacgtacgtcctctcggcggaaacagaagaggaggaggaggaggagagtcgtcctacacctgcgagccccgtccttgtcttcatcaactccaaaagcggtggtcagttgggtggcgaactcattctcacctaccgatctcttctcaatcacaatcaggtctttgatctcgaccaggagactccagataaagtgctccgcagaatctatcttaacctggagaggctcaaagatgatgatttcgctcgtcagattcgggagaaattaaaaatcattgttgcaggaggtgatggcactgctg

SEQ ID NO: 101292 - DNA, 634 bp, Arabidopsis thaliana columbia
cacatttacagcattctcccataaaaagaagacatagagaaagttataccaaaaatatggatacaatagaagaatgaatacgaggtacacatgacgacatgtctcttcttgtcctttattccatctcattcattcatcctaccatcttcttcttattcttttttgctttttttttgcagcattccgctgattatatcatgttttaccaagaaaaacgaaatcgaaaccgaaggagaaccaattcgggaacctcttttcttctttttatctttatgattccattttctccaacttttattccttagcaacgttgtcatgtgtcccattcgaataattgaaatgtcatagtagtttggcttagacggtgtagtgttggttaagattatcatatgtcaagacccttgagcttcactaccgactcaacgtggcctttgagagtgtgcacttctcttagcctagcaacttctgcacgtttcttagcctgttcagcgatctcagagagctcggtgtaggttgccgtgtcttcgaacattgactccggcggtttaagtccatggagcgtacgttgagctagagcccattgagcctccctttctcccctaccgtagtctttcttggtcgtgaatgcagtcct

SEQ ID NO: 101293 - DNA, 802 bp, Arabidopsis thaliana columbia
cgtaaccctaagcggacggagcaatgctctgctagatctatctttctttcaattcttcaccagagatcgtcgagactcaccattgaaatcgaagaaacagcaccaatttccacttcaccaccgaaagagagagacagagaggataataaaaggccgccatggatttagatcaatggatttccaaggttaaagacggccaacatctctctgaggacgagcttcaacttctctgcgaatacgtgaaagaaattcttattgaggaatcaaatgtacaacctgtcaacagtcctgtcaccgtctgtggtgatatccatggccagtttcatgatcttatgaaacttttccagaccggaggtcatgttcccgagaccaattacatatttatgggggatttcgttgatagaggttacaacagtcttgaagttttcaccattcttttgcttcttaaagcaagacatccagccaatatcactcttttgcgtggaaatcatgaaagtagacagctaactcaggtgtatggtttctatgacgaatgccaaaggaagtatggtaatgctaatgcttggagatattgcacggatgtttttgaactatcttacactttcagctattatagatggcactgttctatgtgttccatggtggcctttcacctgatgtacggacaattgaccagataagattgattgagcggaattgcgaaataccgcatgaaggacccttctgttgattcttatgtggagtgatcccgaaggatattgaaacaggggctgtcagtccacgtggagccggtttgggcttt

SEQ ID NO: 101294 - DNA, 675 bp, Arabidopsis thaliana columbia
  unsure (1)..(675): unsure at all n locations
gtacactatagaagagctatgacgtcgcatgcacgcgtacgtaagctcggaattaggctcgagtcctcctcttacgtaaccctaacgaagtcgaagattctctggtagatctatctcgattcgattcgattcctcttttttcccagaaaagtcgctattgaaatcgaacgaaagtgttgaagattttaccagtcagaggtatatatatatagagagagagttatggatttggatcaatggatttccaaggttaaagatggtcagcatctctccgaagacgagcttcagcttctctgcgaatacgtgaaagagattctgattgaggagtcaaacgtacagcctgtaaacagtccagtcaccgtatgtggtgatatccatggccagtttcatgatcttatgaagctttttcagaccggaggtcatgttcccgacaccaattacatttttatgggggacttcgtggatagaggttacaaccagccttgaagtcttcactattcttttacttcttaaagctagatatccagccaatattacactttttgcgcggaaatcatgaaagtaggcagctaacgcagggttttgaaagttctgattntgtactacatgtggcaatgtcatgtcagatgtagacatcgatgttagctaagatgcattntatgtgaatcaagtatt

SEQ ID NO: 101295 - DNA, 385 bp, Arabidopsis thaliana columbia
  unsure (1)..(385): unsure at all n locations
agaatgcagagattgatcttcgccggaaaacaacttgaagatggcagaactttggccgactacaacattcagaaggagtccacactccacttggtcttgcgtctgcgtggaggtatgcagatcttcgtgaagactctcaccggaaagaccatcactttggaggtggagagttctgacaccattgataacgtgaaagccaagatccaggacaaagagggtatcccaccggaccagcagagattgatcttcgccggaaagcaacttgaaggatggagggaccttttggctgcctttcaaacattnaggaagggggtcccacaactttattttggggcttcgcgtctgcgttgggagggttttcaanntctttngggnaaanattttt

SEQ ID NO: 101296 - DNA, 640 bp, Arabidopsis thaliana columbia
  unsure (1)..(640): unsure at all n locations
gcagatcttcgtgaagactctcaccggaaagactatcactttggaggtagagagctctgacaccattgacaacgtgaaggccaagatccaggataaggaaggaatccctccggaccagcagaggttgatctttgccggaaaacaattggaggatggtcgtactttggcggattacaacatccagaaggagtcgacccttcanttggtgttgcgtctgcntggaggtatgcagatcttcgtcaagactttgaccggaaagaccatcactccttgaagtggagagctccgacaccattgacaacgtgaaggccaagatccagggcaaggaaggcattcctccgggccagcagcgtctcatcttctgctgggaagcagcttttngggttggccgtcctttggccggcttcaacatccagagggggtctactcttcacttgggcccccgtctccgggggggtttctaaaaccttggctctctctcttatggttacttgaaccaaagttcatgtatcggttcanctagtacttttgggtgggtttatgatttttggggcaatgttcaagccncctgggtaaannaaattgntncggcctaatnntttnccgntttttttnnaaanccccttttttttttnaaaac

SEQ ID NO: 101297 - DNA, 636 bp, Arabidopsis thaliana columbia
  unsure (1)..(636): unsure at all n locations
caaatacccaaagagctcttcttcttcacaattcagatttcaattttctcaaactctaaaatcaatctctcaaatctctcaaccgggatcaagatgcagatcttcgttaagactctcaccggaaagactatcaccctcgaggtggaaagctctgacaccatcgacaacgttaaggccaagatccaggataaggaaggtattcctccggatcagcagaggcttatcttcgccggaaaacagctggaggatggccgcacgttggccgattacaatatccagaaggaatccaccctccacttggttctcaggctccgtggtggtatgcagattttcgtcaagaccctcacgggaaagacgattactctttgaggtggagagttctgacaccattgacaacgtcaaagccaagatccaggaccaaaggaggggtatctcctccggacccacccagcagagtttgatcttngccctcggaaagcagctttggagggcttggcaggaacttttggctgactacaaacatttcagaaagggggtccnncantttcaactttgggctttgcggtcttncgtttggnnggttttcaanantcttcggtgaaaganntttttacccgggaanngcctttccncttt

SEQ ID NO: 101298 - DNA, 1202 bp, Arabidopsis thaliana columbia
  unsure (1)..(1202): unsure at all n locations
acgcctgcaggtaccggtccggaattcccggttcgacccacgcgtccgcccacgcgtccgaagacgacagaagggcaccatcgacaccgttgaggccaagatccaggatcaggagggcattcctccggatcagcagaggcttattttcgccggcaagcagctagaggatggccgtacgttggctgattactctatccctgaaggaatccaccctccacttggtcctcacgctccgtggtggtatgcacattttcgttaaaacccttaacgggaaagacgattactcttgaggtggggagttctgacaccatcgacagcgtcaaggccatcatccaagacggcgagggtattcctccggaccagcaagaggctgatcttcgccggaaagcacttgggggatggcagaactcttgctgactacaatatccagaaggagtccacccttcatcttgttctcaggctccgtggaggtatgcagatctttgtcaagacgttgactggaaagactatcactttggaggtggagagctctgacactatcgacaatgtcaaagccaagatccaggacaaagagggtatccccaccggaccagcagagattgattttcgccggaaaacaacttgaagatggtagaactttggctgactacaacattcagaaggagtctacacttcacttggtgttgcgtctccgtggaggtatgcagattttcgtgaagactctcactggaaagaccattactcttgaagttgagagctccgacaccattgacaacgtgaaggctaagatccaggacaaggaaggtatccctccggaccagcagcgtctcatcttcgctggaaaacagcttgaggatggtcgtactttggccgactacaacatccagaaggagtctacccttcacttggtgctaaggctccgtggtgggtttctaaaaacttatctctgttatgaatcagaagaagttcatgtctcgtttcatttaaaaactttggtggtttgtggttttggggccttgtaaagcccctgatgaataaattgtccaactatgtttccgttcctgtgttatacctttctttcgtaatgagtaatgacatcaaacttcttctggaaaaaaaaaaaaaaaaaaagagnnnnnnnnnnnnnnnnnnnnnnnnnnnnnnnnnnnnnnnnnnnnnnnnnnnnnnnnnnnnnnnnnaac

SEQ ID NO: 101299 - DNA, 995 bp, Arabidopsis thaliana columbia
gcctgcaggtcccggtccggaattcccgggtcgacccacgcgtccgattttctcaaactctaaaatcaatctctcaaatctctcaaccgtgatcaagatgcagatcttcgttaagactctcaccggaaagactatcaccctcgaggtggaaagctctgacaccatcgacaacgttaaggccaagatccaggataaggaaggtattcctccggatcagcagaggcttatcttcgccggaaagcagttggaggatggccgcacgttggcggattacaatatccagaaggaatccaccctccacttggttctcaggctccgtggtggtatgcagattttcgttaaaaccctaacgggaaagacgattactcttgaggtggagagctctgacaccattgacaacgtcaaggccaagatccaagataaggagggtattcctccggaccagcagaggttgatcttcgccggaaagcaacttgaggacggcagaactttggcggattacaacatccagaaggagtctacgcttcatttggtcttgcgtctgcgtggaggtatgcagatcttcgtaaagactttgaccggaaagaccatcactcttgaagttgagagctccgacaccattgataacgtgaaggctaagatccaggacaaggaaggcattcctccggaccagcagcgtctcatcttcgctggaaagcagcttgaggatggacgtactttggccgactacaacatccagaaggagtctactcttcacttggtcctccgtctccgtggtggtttctaaaccttgtctctctctcttatggttactgaaccaagttcatgtatcgtttcatctagtactttggtggtttatgttttggggccatgtacagcctctgataaataattgatcgactatgtttccgtttctttcatctttcttttctttcaaacaaccaaatcggaacttattctccattcgcaattatctctttcgattcacttttgtc

SEQ ID NO: 101300 - DNA, 698 bp, Arabidopsis thaliana columbia
  unsure (1)..(698): unsure at all n locations
gtctgcagtaccggtccggaattcccgggtcgacccacgcgtccggcagatcttcgtgaagactctcaccggaaagactatcactttggaggtagagagctctgacaccattgacaacgtgaaggccaagatccaggataaggaaggaatccctccggaccagcagaggttgatctttgccggaaaacaattggaggatggtcgtactttggcggattacaacatccagaaggagtcgacccttcacttggtgttgcgtctgcgtggaggtatgcagatcttcgtcaagactttgaccggaaagaccatcacccttgaagtggaaagctccgacaccattgacaacgtcaaggccaagatccaggacaaggaaggtattcctccggcaccagcagcgtctcatcttcgctggaaagcagcttgaaggatggacgtacttttggccgactacaacatccagaagggggctactcttcacttcggtcctgcgtcttcgtggtggtttctaaatctcgcctctgttatgcttaagaagttcaatgtttcggtccatggaaaactttgggggtttgtgttttggggccttgtataatcccgggggaataagtgccctactatgttccgggggggatttnaacccgggggcccattnttaagggcnnccggggggccactttnccctnanggggaattctttc

SEQ ID NO: 101301 - DNA, 1795 bp, Arabidopsis thaliana columbia
  unsure (1)..(1795): unsure at all n locations
atgannnnnnnnnnnnnnnnnnnnnnnnnnnnnnnnnnnnnnttagggaaagctcgtacgcctgcaggtaccggtccggaattcccgggtccacccacgcgtccgcaatttctcaaaatcttaaaaactttctctcaattctctctaccgtgatcaagatgcagatctttgttaagactctcaccggaaagacaatcaccctcgaggtggaaagctccgacaccatcgacaacgttaaggccaagatccaggataaggagggcattcctccggatcagcagaggcttattttcgccggcaagcagctagaggatggccgtacgttggctgattacaatatccagaaggaatccaccctccacttggtcctcaggctccgtggtggtatgcagattttcgttaaaaccctaacgggaaagacgattactcttgaggtggagagttctgacaccatcgacaacgtcaaggccaagatccaagacaaagagggtattcctccggaccagcagaggctgatcttcgccggaaagcagttggaggatggcagaactcttgctgactacaatatccagaaggagtccacccttcatcttgttctcaggctccgtggtggtatgcagattttcgttaagacgttgactgggaaaactatcactttggaggtggagagttctgacaccattgataacgtgaaagccaagatccaagacaaagagggtattcctccggaccagcagagattgatcttcgccggaaaacaacttgaagatggcagaactttggccgactacaacattcagaaggagtccacactccacttggtcttgcgtctgcgtggaggtatgcagatcttcgtgaagactctcaccggaaagaccatcactttggaggtggagagttctgacaccattgataacgtgaaagccaagatccaggacaaagagggtatcccaccggaccagcagagattgatcttcgccggaaagcaacttgaagatggaagaactttggctgactacaacattcagaaggagtccacacttcacttggtcttgcgtctgcgtggaggtatgcagatcttcgtgaagactctcaccggaaagactatcactttggaggtagagagctctgacaccattgacaacgtgaaggccaagatccaggataaggaaggaatccctccggaccagcagaggttgatctttgccggaaaacaattggaggatggtcgtactttggcggattacaacatccagaaggagtcgacccttcacttggtgttgcgtctgcgtggaggtatgcagatcttcgtcaagactttgaccggaaagaccatcacccttgaagtggaaagctccgacaccattgacaacgtcaaggccaagatccaggacaaggaaggtattcctccggaccagcagcgtctcatcttcgctggaaagcagcttgaggatggacgtactttggccgactacaacatccagaaggagtctactcttcacttggtcctgcgtcttcgtggtggtttctaaatctcgtctctgttatgcttaagaagttcaatgtttcgtttcatgtaaaactttggtggtttgtgttttggggccttgtataatccctgatgaataagtgttctactatgtttccgttcctgttatctctttctttctaatgacaagtcgaacttcttctttaaaaaaaaaaaaaaaaagaaaaaaaaccaaaagagcggccgctctagaggatccaagcttacgtacgcgtgtagccccgtcaagctcttgtannnnaatcg

SEQ ID NO: 101302 - DNA, 523 bp, Arabidopsis thaliana columbia
  unsure (1)..(523): unsure at all n locations
nnnnnnnnnnnnnnnnnnnnnnnnnnnnnnnnnnnnnnnnnnnnnnnnnnnnnnnnnnnnnnnnnnnnnnnnnccacgcgtccggagaaaaccaactctggagaatggcgaatctaccttcttctctctccatgggcacacctttcggtggtcctagcacctccgcacaaaatcctaccggagctccggccaacaaagatcgcaatttggcctctgctgaacagttggtactcgatctcagcaatcctgaactcagagaaaatgctcttctcgagctttccaagaaaagagaattgtttcaggatctggcgcctttgttgtggaactcttttggtaccattgctgccttgttacaggagattgtatcaatctactctgttcttgcacctccaaatctgactcctgctcagtccaaccgtgtttgcaactcgctcgctcttcttcagtgcgtagcatctcattctgacacgagaatgttatttctcaaggctcatatcccgttgtacctttatcccttccttaa

SEQ ID NO: 101303 - DNA, 476 bp, Arabidopsis thaliana columbia
  unsure (1)..(476): unsure at all n locations
nnnnnnnnnnnnnnnnnnnnnnnnnnnnnnnnnnnnnnnnnnnnnnnnnnnnnnnnnnnnnnnnnnnnnnnnnnnnnnnnnnnnnnnnnnnnnnnnnnnnnnnnnnctcaaactatgtagctttgatagtttcacgctatagcaatgtttaatcttatacttggacaacaaggtatcgcccaaaacttgtgatacaccaaaattactaaccctagtttaaaaattccctaaagccgtctaagcgagatcaactctcgttgctttttcttgcattcccaccgaaaataacagatcagagtaagggaaaagacttgcacaatctctgtgaagctacttcaatggtggacatgtcagagaaagagatctgcaaattgttacgcctcggatcttagatcattaaagaagaaaatattagatggcagaatggtagatcactcatcatccgatggcaaagtcgggctttttgagcagctctc

SEQ ID NO: 101304 - DNA, 484 bp, Arabidopsis thaliana columbia
  unsure (1)..(484): unsure at all n locations
nnnnnnnnnnnnnnnnnnnnnnnnnnnnnnnnnnnnnnnnnnnnnnnnnnnnnnnnnnnnnnnnnnnnnnnnncttttttttttttttttcgaaattgatattaaagaattatggcgctgttgttgggtatcaaatgtgctgagtttctacatgtatgatggatcatcaatagaaagacagcaaaaagaaatagaggaacaaatgagaaaaggtgaagagttgaaatttctgctcaaacctattccctacctacgccctttgcttgaatcttcatatgctttcttcgcccaatgcacatactgaacagatgaaacttaatacgtatgacttgttagaggtctgagagacatttcccactgatgaagtcaatcactttggtaagtgactcatcaagtttggcagtgactgcagctaagttctccaaaaattcttcagaagttggtctattgccatccacaatatcagtcacaccttttattagaa

SEQ ID NO: 101305 - DNA, 749 bp, Arabidopsis thaliana columbia
  unsure (1)..(749): unsure at all n locations
gaagnactatcccatggagctccattggatgaggctcaccatttagtactttgactagctgctgcgagtctgaagctacaacaagttttttgaatccaagatctgctgcgtgttggatagcgagagagagagccgatgcttttgccaataagggagatctgatgttcatcgctgcagctttatgatgggattccaaatggttcgaatggtccacaaaaacccaaccgaaaccagcctgtaaggtctcttctctccacccacccgtctcgagaacattgaatcgtgtctaaatcgatctctgagggagatatacctggaatcacgatcttagatttcgatgcttggatctgagctcctaaccattctgtggattgagaaatagattgggatatgagatccatactcgagatgtgtttttgctcaaaaattagcttgttcctgcaattccataggttccacaagatccaaatgggaagttgtccttgtccaattccgattggtggaagggtaacgaggagctttgagacttccaaaccctgtttcatacttgtgatccgggaagcttgaagcgtggttttgaaaggagaaagatcccagaccttagaagcaaatgggcagaggaaaagcagatggagaattgattcagcctcgtcgcagtgaggacagagagcaagcggatttataccacgcagcctcaggttttcaccaactgggagagcattcttcatgggtttccagaggaaaatttt

SEQ ID NO: 101306 - DNA, 507 bp, Arabidopsis thaliana columbia
  unsure (1)..(507): unsure at all n locations
nnnnnnnnnnnnnnnnnnnnnctcgcatgccccccttccttagcctggattcctttgaagcggccgccctttttttttttttttattaaatattcgattactcaaattgtacttataacatcaacaagagctttacaaatataaaaacttcaattgtaatggaatttgaagctataaatgtctccatagacatgagtgacttgagtgacttggaacagatccaagttcaggcaatcaaaactcgcatactcggtaacattcctatgttacaagcctacatgatatggtttggctaacgacgcatcatctcatcgggcatactcggaaggtattagtattacgatatgatcaaacctcgagctcgactgaatatagaaccatgaagaaagagctacaagctctcaactctttcgctccatcattagatcaacacactagtcccactagagatttcttcatcttcttcgataaactcgagtgattcaccataatactcatgagcatctt

SEQ ID NO: 101307 - DNA, 670 bp, Arabidopsis thaliana columbia
  unsure (1)..(670): unsure at all n locations
nnnnnnnnnnnnnnnnnnnnnnnnnnnnnnnnnnnnnnnnnnnnnnnnnnnnnnnnnnnnnnnnnnnnnnncttttttttttttttttcgaaagtcaaaacatattattatgggtgaaatctcagttcaaaacagatattctacaggtgaaatctctcataagttaaagctacataagagtcccaaaaccccctttttttttaatatgtatctgtattaaaagcacaaagcggaaggctctaatagatcagttttttaacaatggaaactaatctctctctgtgctgcctcatttctctgctgaatgtatcaagtttcaaagccaagaaaatatctatctgtgtatgtcttcactcttcaccaaccctactcttgtggcggtgttagaacccactgttcttcagactcgttaccattaactagcacagcaccatccgtagagtcagcgtccaccacaacagcctcttcttccacattctgctgtctcccatcacgantctcttcctgnacgatcctcctcctcctcttcctctccatcttccccctcttcccaaactcggtgngaanatccccctggtcaagngngcctcttccncaattggaaaattcaaaaggatcactaaagtggatgacntgntggangnaaaaaatcccgnnggggggggggcnc

SEQ ID NO: 101308 - DNA, 865 bp, Arabidopsis thaliana columbia
  unsure (1)..(865): unsure at all n locations
nnnnnnnnnnnnnnnnnnnnnnnnnnnnnnnnnnnnnnnnnnnnnnnnnnnnnnatatccaatgacaacttaagcttctactaagatgacaagtacaaaaaagttacaaaaagctagggccatttttaacacattaatctataagatttgagggttataagcaaggcaataaactatacgagattacatgttgagtggttgaaaaatgttgagaaaatgagaagaagcttcattttttttctatatcatgctcagaggaggtagaactgagaatagagataatccctgattttgtaatagtcttcacacaacggtccttctatcaaaatttgctgtggacccgatgctcctcccttttgacccgtcggtccaacctttcgtagagtgacatattcaccacaacgtaaagctcctccacctgcaaattctacctgaacacccttgctcgacagaaactgcttgaagtctgcgattttcagatcacctactagaacaggtttgtgtggcgaagcagcacctggcatcggtagtagagacctcatgtccctctctgtcttccctacttcggaatccacccaagctacttctgaatctcccagcttcttgaagatcacattgctcatcagcttttcagaaagttggaccttgtaagcacataaatcagaagtcacatcgaccgtttcctctatttgaggagcatacacgtgtggacagatgttgttcaagcagtgttgcttcaaatgctctgtagcctcagctatcgcgtgcaccaaaacaagttttaaaggagaaacatgcgcaatcattgacttgattgagcggccatctgaccgaccttcatagtccattttaacaagtgaacaac

SEQ ID NO: 101309 - DNA, 508 bp, Arabidopsis thaliana columbia
  unsure (1)..(508): unsure at all n locations
nnnnnnnnnnnnnnnnnnnnnnnnnnnnnnnnnnnnnnnnnnnnnnnnnnnnnnnnnnnnnnnnnnnnnnnnnnnnnnnnnnnnnnnnnnnnnnnnnnnnnnacaaaaagattatagatatatggcgaatggtcataatcaaaattttcaatttagcaaaattcaaaactcttccaagggcccattgaataaatgatagatagcagaactggtgagaactaaaacaatgccgtacattacgtgcacatcaagtcaagttcctcataagtctgctttgagtttggagctaatttctccatcgatttgaatatctggtccatgttagacttcagatttaaactccccattaatgcaacagatgggactggcttcatcttcctctgcatcttctgctcttccttctctaacatcataagcttcctttctatatcctttacgctgccattaacattccttctgtcttccaattccatcctctggttctccacctgatggtttacgtgcatca

SEQ ID NO: 101310 - DNA, 498 bp, Arabidopsis thaliana columbia
  unsure (1)..(498): unsure at all n locations
nnnnnnnnnnnnnnnnnnnnnnnnnnnnnnnnnnnnnnnnnnnnnnnnnnnnnnnnnnnnnnnnnnnnnnnnctttttttttttttttctgcttcttcatctttcttcttcttgggccgagcaacgtacttatgggactcctcaagctccttctccagcttctctatgaactcactcgtatgttcaagcgattgctcataccgatatttctccaaagccttatctttagagagagtatcaacaggagacatcacttctggtctcacatagtttttcccacggtacaacacaatggtgttggtaggtttgacatcaatcacaatgcccttacttaaccgagcaagctcttctgcatactcatgaacctgcccgggtttggtgcagggcttgcaaataactttaacagtctcatgctttttccaatgaaggggccaattcaaaaccacaccttcaaacacttcttgtcttccgacaaggaccaaggtctttctcttctca

SEQ ID NO: 101311 - DNA, 663 bp, Arabidopsis thaliana columbia
  unsure (1)..(663): unsure at all n locations
atnctgggtagggnttgaaaatggcatgatatcgcgttcagagngcaaaatgcgccattggtttgatcatatttgagagattttagaggctagtgatgtagggcattcatgacttgtcactttatattatgttcactgctcccccttgtgattgcttacagtgtttcgttggtctaccatgggcaagtgatcagatgagaacagcacacagcaaaagcagatgagtgctgaagcagaagctaatgaagtttaattacaagcctgttccaggaagaactagtagtcattctttgaggttcttcaggtgtaacacttgtcagaactcagaactcaattttcatttccaacatgtacaaacaaagcttgtaacaattcacaacttaatcctatctgctgtaatttcggcacaatgcaaactgtaatgcaacaagatggtacttgttaataccaaagtagaaaaataaatgtagtagtgattattttagacaaatccgtggttttaatatttctataactaacacactcgaagtttctctgctgtcacattacatggagttttgatattgcaggcctagtgaaatatggtggctttgctttgatcaattttcatgaagtatcttcaaacactggacaggatcaagctctaccatctgcgagctccat

SEQ ID NO: 101312 - DNA, 637 bp, Arabidopsis thaliana columbia
  unsure (1)..(637): unsure at all n locations
aggtagcactatagaaagactatgacgtcgcatgcacgcgtacgtaagcttggatcctctagagcggccgcccttgagtcctcgacggtatcgataagcttgatatcgaattcgttttaatatttctataactaacacactcgaagtttctctgctgtcacattacatggagttttgatattgcaggcctagtgaaatatggtggctttgctttgatcaattttcatgaagtatcttcaaacactggacaggatcaagctctaccatctgcgagctccatctgttcgtgtagcaatgtaatttctcagagaaggagactgggtaagaccatctggtgcaactgtggtgttctgagttccattcttctgcttcatccttctgcgtgctatgtaacctctgacccaaggagtaacatcctcgttggtcttaatcatgatgaagaagatgatgcggtagatgataatcatgctaagaatcacactgaggttaatccattttgatcgatgcaagtcgatcttgaaagacgttctcaaggccatattcaccccggattcttgaaagcactcccttggctgtcaaacgtcaagcctctaagttatttgggcctgccctttagggcccanaggtggaggtngtc

SEQ ID NO: 101313 - DNA, 845 bp, Arabidopsis thaliana columbia
accggtccgcaattcccgggtcgacccacgcgtccgaacaaaacacaaaaacaacaaaaaaaccatttccccaaaaaaaaaaaaccaaaaacagaggatgaaacaaaaccagagcaagttcttgagaataatctcaacacctctaagagctttaggcaaggcacgtgatttctacgtgagaagcatcaccggttgcgcagctcgtactcaatattcctcctccgcctccgtctccgctccttttccaagaagccggagctcctcctccgccgccttctcctcctccgcatcatcccggagaaccaccgatttcgggatagatgaagattacagcgagctagtgagagctgcgtcggtgaggagtttagggcacaagaatgagatagacatgttgatacaagagaagctgcaacagcagaagcaacagaagcaaggagggttgcctaagagctcgagtgctgggatggcgaggatagaggaagaggaagaaacagaggaaggatctgtgaatccgaaggtgaagaagactaagaaagtctctgatcttttgtatcctcgtagcaaatcttacgccgttactactagtacccctatcttgtaacttctcttcttcttttttcttcttcttaattttagtattttgtggattgattatcatttttctagctcgatttttcgtgcactgtgaaatactattttcttagcttgattttaataattttgtggattgattagaaataaataactaaacctactctaaaaaaaaaaaaaaaaaacaagggcggccgctctagaggatccaagcttacgtacgcgtgcatgcgacgtcatagctcttaaagagt

SEQ ID NO: 101314 - DNA, 1347 bp, Arabidopsis thaliana columbia
  unsure (1)..(1347): unsure at all n locations
cgtcttcaaggcaactgcagaatgattactttgagaatctatctacttcgtttaggtgtttgattgatttgattccaagcagtggaaatgataagttagagattagcaaattgcttgtagatggtgctaatggtgtaggtggacagaagattgagaagctaagagggtctttgagtaatttagatgttgagattcgtaacacagggagagatggtggtgtgcttaatgaaggtgtaggtgctgattttgtgcagaaagaaaaggttttgcctgtaggatttgggtttaaggaaagttgggatgaggtgtgcgagttggatggtgatgagatcgattggttacttttacagtccttcagatcctctgaaaaggttgagctacttggcggtgataagattctgtctttgtttgctctcttcatcaaagagcaacaaaatgctctggagcatgatgaagaaaggaagcagtctcgtcttgctgatgtgcagacacttacgcgaatggtgcgtctacagattacctaaagcatttgggtttagatgctgtttctgctgaaactggagttaagcatttacacgagaaagcagcagagtttgatattggaatctactttgaagctaatggccacgggactattctcttctcggaatctttcctatcttggttagtttccaaacaaaaggatcttacggctaaaggtcagggtggttctgaagagcacaaagctgtttctagactaatggcggtgagtaatctgattaaccaagcggtaggtgatgctctaagtggagtgctcttggttgaagtgattctacaacacctgggatggtcgatagagaagtggaatgagctatacaaggaccttcctagcaggcagatcaaggtcgaagttccagatagaacagcggttgtgaccacaagcgaagaaaccgaggctctgagacctatggggattcaagatgctattaattctgaaatcaagaagtactcgcgtggcagagcttttataaggccatcgggtacagaagatgtggtgagagtatatgcagaggcttccactcaagaagatgctgattctttggctaattctgtggctcagctcgtcaaaagcttccttggttcaagctaaagaaccatctgaatttctgcaagagtatgttaatgggagatttttttaattttcttgttcacctcttagcttttacatcttttgtgtaacccgaatgacaagttttcttctcagcttcttttgatttaaaaaaaaaaaaaaaagnnnnnnnnnnnnnnnnnnnnnnnnnnnnnnnnnnnnnnnnnnnnnnnnnnnnnnnnnnnnnnnnnnnnnnnnnn

SEQ ID NO: 101315 - DNA, 655 bp, Arabidopsis thaliana columbia
  unsure (1)..(655): unsure at all n locations
nnnnnnnnnnnnnnnnnnnnnnnnnnnnnnnnnnnnnnnnnnnnnnnnnnnnnnnnnnnnnnnnnnnnnntgcccttttttttttttttttttagagggtgaagatttcatcttgaggtttagtagtacaaccaagttttgattaaccaaaaaaaaaaaaaatcaaataccaaagctcaccttctctccctgtgaaaataaataaacaagccaattccgaaaagaatatttactttttcacttttctatgttgaaaacaattaaacaaatccatctttctcctctgggagagccttcgcttccactggagagactgtactttgttgaaaaacccctgctaactccaacttttaacagtcgtttagagaaagcaaaaggctttcaacgaaatcaacaacacacatgttaatataacaagagtcttctggttcaggctgggcaatgtgtcaaatgaaattcacccggatgagctcgacttactaccttctttctctggatcttcaatctgcgtcggtagtagattcaaaaagcttccttggtgggttgttgccccaccagatgtttcgtcttcaaagagagatttaatagacggcctttttggcttattgctcttcttcttcaactcagctatccctggtatttggtcatcatttac

SEQ ID NO: 101316 - DNA, 501 bp, Arabidopsis thaliana columbia
  unsure (1)..(501): unsure at all n locations
nnnnnnnnnnnnnnnnnnnnnnnnnnnnnnnnnnnnnnnnnnnnnnnnnnnnnnnnnnnnnnnnnnnnnnnnnctttttttttttttttttttgaaaatgcctatcttcaggtctggtctttattatatagaaacacacaatggactttctcttactaaacagtagcaaaagctaagatgacataaagaacaactccaaagaggaacacaaagtcaataatctatctcagaacattaaacatattctcttcctctactttctaccattcagctcttccataaacttgttcacatcattataagaggaccctccttcttccacagcggctttagccatctcgcccagcttcttagcccatagccgcctttcctctgccttctcaccaccaatcacttcccttactgccttctccacttgtgctctactaatcaactttccttttttcaccaactcggtagctccaacgttcactcctattctcaacacttttgtcaatagct

SEQ ID NO: 101317 - DNA, 601 bp, Arabidopsis thaliana columbia
  unsure (1)..(601): unsure at all n locations
agaaactgagaaagaagttttatttattaattaatggcggaagagaaaagctacaagtacgtgatcattggaggtggtgtagccggcggttacgcggcgagagagtttagtaatcagggcctgaagcctggtgaactcgcaatcatttccaaggaaccagtgcctccttttgagcgtcctgaactaaccaaggtatatattgacctcgaagtcaatccgacccttgcaaatatctatgtttgtgctggaactggagaagcgaagcagttaccctaactggtacaaagagaaagggattgatctaattgtgggcacagagatagtcaaagcagatcttgcttcaaagacacttgttagtgatgatggcaaaatttacaagtaccaaactttgctaattgcaaccggttctactaacataagattntcagaaattggcgtccaagaagcagattgttaagnatatattcttacctaagggnaaatcgcggnttagtgntgagctttccctttgctatngaacntntatnttgcaaagggggaaagggccgtccatcattgggcggncggtttctnaggggcttnagntaaggtcnttnnntta

SEQ ID NO: 101318 - DNA, 518 bp, Arabidopsis thaliana columbia
  unsure (1)..(518): unsure at all n locations
nnnnnnnnnnnnnnnnnnnnnnnnnnnnnnnnnnnnnnnnnnnnnnnnnnnnnnnnnnnnnnnnnnnnnnnnnctttgggtttttttttttttttttttggatatatgtgccactatgtaaatcatttagttaacttataattgaaacaagaaatgttatgtgtgccactatgtaacttttattagtgcatatataaaggaaatagcgtttaataaatcgactgctattctaaaactagcatgataattaattatgatcactaagcttcattctaacaaatcagtttatagaggacaagaaagcttataattactccaccttcttttgtctttttgtttgcgaaagagaaatatctgatggcaaaaaagcccaagaagacctcctctctacacctttaaagtttatgcaaatttagaaacaaacaaaacggaccactatagctaattatcttatatagataagatatgtagaaggaggggatatacatatgtataataacaatcttgatatataactt

SEQ ID NO: 101319 - DNA, 583 bp, Arabidopsis thaliana columbia
gttctcaggaatcacctttttgtgggcatcatctctatcaccattgtgctccaggtagtcatcgtcgagttccttggaacatttgcctcaacgactaaccttgattgggagatgtggctcgtctgtatcggaatcggttctatcagttggcctttggcggtgatcggaaaattgataccggttccagaaactccggttagtcaatactttagaataaaccggtggagaaggaactcatcaggttaataattagtttgaaaagagaaaacagtttaataccaaaggtggcttttagtggtacttgtgaatacgtttacctcttttctctcagtattttcgcaaacggcatcttcggtttaatacagataaaaaataaacctatttttgtttagtggttaagcttgttacgttaatccttaaatgctcaaagtccggagtaatctaaacgaagtgacttattgtgtcccaagtaaaaaagcaatctctatacaaagaggcttcattttaaaaaaaaaaaacaaagggcggccgctctagaggatccaagcttacgtacgcgtgcatgcgacgtcatagatcttct

SEQ ID NO: 101320 - DNA, 393 bp, Arabidopsis thaliana columbia
tagaagagctttgacgtcgcatgcacgcgtacgtaagcttggatcctctagagcggccgctttttttgtttttttttttttttttttttaggcaaattcatattttttgggcaatattatatcagaattggtctattgcttatcttgttttctcaagaaacttcacatctcacattgcataatcaaggccattttaccaaaataccatgagtcaaagaccatgctcctaatctgtttggttaagtctctaaggccaaatcttcctctaatcattaagctctacaactgctacatcattcttaaggatctgtgaaatgtaatcttttactttctcgctaacttgaggatctagcgctctctctgcaagatcgtaaaacaaagtactaccctcag

SEQ ID NO: 101321 - DNA, 642 bp, Arabidopsis thaliana columbia
  unsure (1)..(642): unsure at all n locations
nnnnnnnnnnnnnnnnnnnnnnnnnnnnnnnnnnnnnnnnnnnnnnnnnnnnnnnnnnnnnnnnnnnnnnnnnnnnnnnnnnnnnnnnnnaaccgccgaagaccagttgcttgctactaagtaattatatgtatacatactttgaatctggtgttaaaaaaaattcacatgaagaagtatggttctgtttgtattcactaaaaagtaaacaaactactctccttgatctcatatatggagaaagcaacagacaaagcacaagaagacacggtaaccaacttataagatgagggaagctctcactcaatctgcgtctccaagaccatcacttccatcgcctctctttgtaatttctgtgaactgagagtttggtttcttcttctgtgatgatgccacctctgcgtttctcctcagaacagctccaggtgatggatatggtcgttgttgaaacagaggacccgaagcagttgtatcagcggctcgcggttgtactcctttcagtccaacaacccagcctccccgtggagcatctgagtaagagctcgggnccatnggatccaatcatcatcttcggntgagacgctttttgccaatacttttcanggnggttgaacgggcccgatcggaccttngcaaaacccc

SEQ ID NO: 101322 - DNA, 701 bp, Arabidopsis thaliana columbia
  unsure (1)..(701): unsure at all n locations
ttgtnnnnnnnnnnnnnnnnnnnnnnnnnnnnnnnnnnnnnnnnnnnnnnnnnnnnnnnnnnnnnnnnnnnnnnnnnnctttttttttttttttgtggttaagactttttatttggtgaaggagtaaaatgtgtgtttggccaaatgagtaaatctctatttgggaagataacaatgatttcagtatctcagccaatccaaatgagtggatgttttgaaacagtttgctattcgcgggagaatttcacagcttcaatcacagcagagaagtcgagatctcctagtcccaagcttctcgccttcttaaaagcctcgtttgcagccgcggctacaggcatggaaaccgcgttttcatcgccaagagcaagagctagcctcatgtctttctgctgatgtttcaatggaaatgctggtgggtaactactcttgttcattgaaggtcctttccccttgaacatcgggttagtcattgctcccagatccagaatatccaaaagagtgtcagagctaagtccactcttgtcagccaatacaagcccctcagagaatgcattcatcatgcttcccattatcatgttcactattagcttcattttagctccgtttccaacttgtcccagtaaaacgatctcttccccaagacatcaaaagctgggattgattcctcaaagagtgccttgtcaccagcagcaaggataatg

SEQ ID NO: 101323 - DNA, 1084 bp, Arabidopsis thaliana columbia
gctgtttctgccgtcgatcaaccgttgaaaatcatcaccggagctgatgactttggagcgagcctcaaggacgcgatggtaacacacctccgctctctcggcatagacgtggaggataccggagtgtcctcttactactctgctggatctgaagtcggtcgccgcgtctccgcttcatcgtcttccgaagttcgcggcttagtctgctgcggcaccggcgtcggagttgcgatgttcgccaacaagttcccgggcgtctacgcagccacttgtctctccgtcgaagacgccgtcaacgctcgatcaataagcaattgcaatgtcctcgcattctccggcatcaaaacatccccggaaaccgccttggaaatcttcgacgcttggatcaaaactcctttcaaatctccttgtcctgcgtccggatccgaaccatggagctcagttatctcttccttcctcgacaattctctctccgagatgtctcagattggaaagtcaaccgccggcgattcaacaaccaagaagatcgatgaaacaaccgcgtcttgcgtaatttgctgcttggcgaagaacagagagttcactccagtggacatcatgccgggaggctcgatgaagatcgttagagagacgccgacgtcggcgattgtaagattcaaagcgggaagtgtggaaccggcgcatcaccacacattcggccatgaccttgtagtcataaagggaaagaaaagtgtgtggaatctgagcaagaaggagagagctgatctcgttgacggcgattacctattcactcccgccggtgatgttcaccgagtcaaatatcacgaagacactgagttcttcatcacttgggatggccattgggacatattccttgacgaagccctcgaaactgcaaagaaagccatcgaagaagaagcttgaaggtgtaaactttgtgtagtactctcttcttttgaatgttgtaagttctgagagtaaactttcttaaattgatgtactttgtaagaatctttgatttcaaaagatggtgtaatattacaaatactttctcttatgaacactatataaagggtttctacat

SEQ ID NO: 101324 - DNA, 667 bp, Arabidopsis thaliana columbia
  unsure (1)..(667): unsure at all n locations
nnnnnnnnnnnnnnnnnnnnnnnnnnnnnnnnnnnncaagctaannnnnnnnnnnnnnnnnnnnnctttttttttttttttttttgtcaattatataccgacattttccaatagactcatcaaaaatacaacaagataatatcttttaaaaccatctagcgtacatcaagtatttttggcgcgcgatgatctttctttctatgatgcaatacaactgtaacaatgtttatcatccaaatctagttaaataattaagagtaaacagctacaaaaatggctcttctttttcttctccatatgcattttgtctatacctaaaaatattattcatttcatttttctcctcttcttcagttacatttgttgctgagagtcacagtattgtggatacttacaactgcaaggatgatttctcaccttccgtaatgtgaaagatacccttctagaacttcttctgatcactttatccttcaccttgtcaatcttgtgatgtggaatgtagtgattccaagcatatcgtgcttcaccggataataagagcatagaccgaggaggaagatataaggcctttttgatgcaagaggagtcacccgacttctcagcatcggtagttgaggctttccatgtggaaacagagtatcttctgaattccataatacaaggacca

SEQ ID NO: 101325 - DNA, 596 bp, Arabidopsis thaliana columbia
  unsure (1)..(596): unsure at all n locations
caaaaccaaaaagaaaaaaaaaaatcaaaacagaagcgagcgaagaggacggagggagaggatcttcttccctctttctcttatctactttctcttctaaatctctaatcttttgaaaccctaaatcaaagttttgtttttttttatcaactggggaagaagaaaggtgtaacctttatataaccatggattccggtgacgcgacatctttgcttttgacgaaaattcgaagcttggagccagattatgctcctaagattattgggtatttgcttttacatgattttggtgatagagacttgatgcatctggctcgtggacctgaatcgattttgcagtcgactattttcgaaagtgaagagtcccttgggggatttcccccaacaatcggcttccttcnaatccgaaggcncctccccggtgaanccaaacggcggccccccctaaagggaaanggaagccccacccaaagggggtnaggnttccggaaaaaccccgggnttncccttttaaaaccccccggggnatnaaaanggnnccnggggaaangggggaanccccaattcccaaaaaccgggtngnaccttggtccnngc

SEQ ID NO: 101326 - DNA, 844 bp, Arabidopsis thaliana columbia
  unsure (1)..(844): unsure at all n locations
ctttaaatacttgacgtcccttggcacccttccgtaacctgggttcctctagagcggccgccctttttttttttttttttttttttttgtcctttgcttattttcattacaattcattgactttttatttggctgtcactttggcatttgcttgttttgattacaaaccaataaaaatagttaaacatgaaacatatgaaattgatgcaaaagatggaaagataaaataagtcaattcacttagcccatccataagacacacctgatgcatttcccttcaagaagtagctggaatgcgtcgttgatctcctcgaatttcatctcatgtgtcacaaacttatccaattcaagttcattgctcaagtagcgtttaagaagaattggaatgtgtgttttagcctttaaacctccaaacaacgaacccatcagaatcttcccatggtgaagaacatcaaacgaatctaaacatatttgtgaacccggcttgtccacccctaaagttattgtctttccccatccctgtctacagcaagcataagcttcttgaaccaaagaactacttccaacacattcgaagcaatagtccgctcccccatcagtcatctcattgatcacctcgctaacacggtttttctcacatgtcatagagtttacaaactcggtaactccaaatttctggccaacttggaatttggtagggtttatatccacaccaatgattctagaggcaccacaaagtctcgcaccctctgcaacctagaaacattccggacgcgtggnnnnnnnnnnnnnnnnnnnnnnnnnnnnnnnnnnnnnnnnnnnnnnnnnnnnnnnnnnnnnnnnn

SEQ ID NO: 101327 - DNA, 539 bp, Arabidopsis thaliana columbia
  unsure (1)..(539): unsure at all n locations
tannnnnnnnnnnnnnnnnnnnnnnnnnnnnnnnnnnnnnnnnnnnnnnnnnnnnnnnnnnnnnnnnnnnnnnnnnctttttttttttttttttcaaacaacatttcacaatacaaatttcatcaacaaatgtggcaacgtttcaacaaaaaaattaaacttagacaaatcgaaattttataaatttacatacaacaataatgccatttttattaaatcaagtaaaaagaatcagtattattattacttatggtttttcttgagtaacacaccaaacttcttcaacattttgctagtctcaatagaatctgttctttcctcatcattgttcagtatagaaagctgccgtctcagcagctttcctccattgctcacattgaatcttcactcttttaagctcagcttccatggcttccgtgtttgcggtttccactttcttctccattgcactccttagaatctgcaactccatctctttatccattaaactccctctcacttccatcaaatccgattctagcttcttcaaatcgcccgta

SEQ ID NO: 101328 - DNA, 692 bp, Arabidopsis thaliana columbia
aagagctatgacgtcgcatgcccccgtacgtaagcttggatcctctagagcggcccgccctttttgtttttttttttttttttttttacatacaacaactaatgccccatttttatttaatcaaccgtaaaaagaatcaccgtattattattacttactgggtttttctttgagttacacacccaaaccttcttcaacaccttttgctagtctcaactagaatctggtcttttcctcatcatttgtctcagtatagaaagctcgcccgtctcagcagcttttccctccactttgctcacattgaatctttcactcttttaagctcagctttccatgggcttcccgtgtttgccggtttccacttttcttctccatttgcactccttagaatctgcaactccatctctttatccattaaactccctctcacttccatcaaatccgattctagcttcttcaaatcgcccgtagattcgtcttctttcaccttctccattaactctttgcgcaacccttcgatttcatctttggttctgttcaattcttccgttaactctgcttctctctgtgaatatcttgatttaaccgcctctgtttgttcgtatgcgcttcttatctgcaatgtgctctgtatatactcttcttgatacccttgctctgctgcttcaactgcagattcaattgtgtatctc

SEQ ID NO: 101329 - DNA, 660 bp, Arabidopsis thaliana columbia
  unsure (1)..(660): unsure at all n locations
tgatacttcnnnnnnnnnnnnnnnnnnnnnnnnnnnnnnnnnnnnnnnnnnnnnnnnnnnnnaaaacaccggtccggaatccccgcgtccgcccacgcgtccggtacaacccaacacactaccgtgaacctaaattttacacaaagcttttcaaagaatgccatatgaatgacgaagatgggaattcgtatgaactctctttggttagctgtaaatgcattggagcttatgtgagaaacaaaaagaaccagaaccagatatgctggctttggcagaaagtcagttcggataatgataggggcttccaacgcttcttggacaatgtccagtataagtctagtggtatcttacgctatgagcgtgtctttggagaagggtttgttagcacagggggactcgagacaacaaaggaattcgtggatatgctggatctgaaacctggccaaaaagttctagacgttgggtgcggaataggaggaggggacttctacatggctgagaactttgacgtggatgttgtgggcattgatctatctgtaaacatgatctcttttgcgcttgaacacgcaataggactcaaatnctctgtagaattcgaagtagctgattgcaccaagaaggagtatcctnataacanctttnatgttatttntagcaggg

SEQ ID NO: 101330 - DNA, 594 bp, Arabidopsis thaliana columbia
  unsure (1)..(594): unsure at all n locations
nnnnnnnnnnnnnnggccgccctttttttttttttttttttttttacagggtttccttttctctatcacattatcaaaatcccaaaatggttcctcaaaaactctgatttgccatatccaattattcttcatgacctttcccaataaaagagagtaataattacagagagatctaatgtttatcctatatgagaaaaagtacctgtgtgtgtttcacagtttcatcatacatcatcatgctcagagtgttttggtgcggtcatatgtagataggtttaatatcatttggtccaaaacttgctgagcatgttggacacttcttttgtcgagttcctgtgagcttttgcacacatgggttgcagaacaaatggtagcacttcgtaatcaccacctcttttgggcgatcgttgcaggccttacacttcagaatttctttaaattcactgagttcttgtcggagcttttgaatggccgatgatccttctatgagagaccgaagacgagaaactttctttttggctatttccatttcctcctctatccttctcctattgaacctttcaatctccagtttcagttctaatgccccataat

SEQ ID NO: 101331 - DNA, 1883 bp, Arabidopsis thaliana columbia
agtacattttaacaaagcggattgctcatctttattcatccaagcctcagccacaagaatttacagttctggtcagtggcgtccctcttgtatccgggaacagtattagtgagacagtagaaaactttttcagggaatatcattcttcctcgtatctttctcatatagttgttcatcggacagacaagttgaaagttctcatgaatgatgctgagaagctgtacaagaagcttacacgagtaaaatccggaagcatatctcgccaaaagtctaggtggggtgggtttctagggatgtttgggaataatgttgatgtggttgaccattaccaaaagaagcttgataagttagaagatgacatgagattgaaacagtctttattagcaggagaggaagttccagctgcttttgtttcctttaggacaagacatggtgctgcaatagcaacaaacattcagcaaggaatagatccaacacaatggctaactgaggcagccccggagcccgaagatgttcattggccatttttcactgcatcgtttgtgagaagatggatctccaatgtagtggtgcttgtggctttcgtagctcttttgatcctatacattgtccccgttgtattggttcaaggtcttgctaatcttcaccagttggagacttggttcccttttctaaaaggaatattaaatatgaaaatcgtgagtcaagtgattacgggatatcttccgagtctcattttccagcttttccttcttatagtaccacccattatgcttctactttcctcaatgcaaggattcatttctcatagccagattgagaaatctgcatgtatcaagcttctaatctttactgtatggaacagtttctttgcaaatgtactgtccggatctgccctttatcgtgttaatgtgttccttgaacctaagactattcctcgtgtgcttgctgcagctgtgccagcacaggcatcgttctttgtatcttatgttgtgacctctggatggactggtttatcatcagagatcctccgtttggttcctcttctttggagtttcataacgaaacttttcggcaaggaagatgacaaagaatttgaggttccttcaactcctttctgccaagaaatcccaaggattctattttttggactcctcggtataacttacttcttcctttcgccattgatactgcctttcttgttggtctactattgtcttggatatatcatctaccgcaaccagctcctaaacgtatatgcggccaagtatgaaactggtggaaagttttggccaatagttcacagctatactatcttctctttggtactaatgcacattattgcagtcggattattcgggcttaaagagcttccagtggcatcttctttaacaattccccttccggttctcacggtccttttcagcatttactgccaaagacggtttttaccaaatttcaaatcttatcctacccagtgtctggtaaacaaagataaagcagacgagagagagcaaaacatgtctgaattctattcggaactcgttgttgcttaccgagatcctgcactttcggcatcacaggactcgagagatatctcaccttgagatcacctttttacttgagctattgaagtttgcttatgttgaagctgttggtttactatacctggtgcaatccatgaaagaacacactaaaccggttgtcttgtacattgggtcttaaccgagaatcaagcggtttttgtcttgtacatttgcttacacttggcttgtgtaaaaaagaaaaaaagtttatgtcaatgtatctctctaaaccggtttaagacggtacaaactttttgaaagatgccaaaacaaaacggtggttaataattttaccac

SEQ ID NO: 101332 - DNA, 565 bp, Arabidopsis thaliana columbia
tgatacttcagctcacgcgtccgaaaaaaaatcggaactttgggatttatggtaagacaccgaagaacacacagccattcctctttattgaccgcttccttctttctctgtcacatacgaatcggggaaatttggatcccgatcgtgatctttagtttggtgaatttgagctggaattggagcttaaaggatcggttttttgactgatctaattgttttgaggatcggtctttcataaagttgttgtctttgaagcttttttgactggtgaggacgaaaaagttgtgattttgggaattagggttgttttgtttcgaattcgccatggatacgagcaggagagctgtggaatcgtattggaggtcgcggatgatagatgcggttacgtctgatgaggacaaagttgcgcctgtgtacaaattggaagagatctgtgacctccttcgttcttctcatgtcagcatcgtcaaggagttttctgaattcattttgaaacgtcttgataacaaaagccccattgttaagcagaaggctcttaggttgataaagtatgctgtgggaaagt

SEQ ID NO: 101333 - DNA, 478 bp, Arabidopsis thaliana columbia
actatgacgtaccatgcacgcgtacgtaagcttggatcctctagagcggccgcgcttttttttttttattttcaaaattaacagatatataatcatttacttttattgtaaacgtggaaatacaaaaataaacaaagatgtaatcgtttactgaacaataggatcaagagaggataagagagcagataatcttttacaataagattgagtcaaatttcatctaatagaccaaaatacacctccatccccaattcctcttctactactttgatttcttttcctttctaaacaaaaagattttaacgtttcaattcgttgtgtcttcctagtttagtaagacttcgtactgtacattggttacgagcctaaacaacagcgggttagatattcttttagtgccgctttatgtacagtaatctaataacaaaagcaaatggttcttttaccttctgttgctacttctggtgctgtaatttag

SEQ ID NO: 101334 - DNA, 478 bp, Arabidopsis thaliana columbia
tttaggacaactatagaattactatgacgtaccatgcacgcgtacgtaagcttggatcctctagagcggccgccctttttttttttttttctttgtaacatatagctttactcattttcagggggcatactatatggataagctgcatgatcataaggttacacatttatgataaaagtatactgacgtcacacacaaaagatagataaacctatatatactgatcatggtaagtccttatttatggagtttaattatagaaaaagagaataacttctctgaaaattcataattttcttatgatcaaaagggtaatgttgaactgaaattaggaggctgtgttccaacgctttctcttaaaatcctttccatctctgctgcactatgaatattccctcccctgaaatatatcccgttggctcaatatccaaagaattaaggtcgtaacatgcacttgccgctgagagtttcatggaca

SEQ ID NO: 101335 - DNA, 451 bp, Arabidopsis thaliana columbia
  unsure (1)..(451): unsure at all n locations
tactatgacgtcgcatgcacgcgtacctaagcctgggtcctctagagcgggcgcccttncttttttttatttttttttttttaaccttgagactgtaaatatcattaaccgtggtatcacactgggagttaatttcctgggggagttcattccccaaacgccaaaagagacttcatgggggttggaagacttgttggtttagtccagagaaccccaatggacaaaaggactccaccacctcgtttttgtttaccttagtctggtccaaaattagacagtattgccaaagaccaaaccattcccttacccggacgaaagccaggggttatacttatactactctacgtttcgagatttggaacctggattagtgaaagaaaaagataaacctgggggcttcatcttgcaagcgttttttacaggaacaatggcaccggtttggctacaaagg

SEQ ID NO: 101336 - DNA, 774 bp, Arabidopsis thaliana columbia
  unsure (1)..(774): unsure at all n locations
agcgtggaacaatttaatattgttcacatcaagaaatatctgaacaacgatacatggtgattacagtttgctccattttggctgtgttttttccgttttttttgtttgggtgacgttttcggtatgttttttattacattacaatgtcacagtccaagcttcttaggcctgaggaaagtggtgccctttttcaagccagggcctgaaatctgttgctgctgctttgcccttttttttctctctctctctttgcttctcagctctgactccacctgatctcttctcagtttctccatctcttcctccattcctgatttctcttccttctgcttttttttatgctccaacatcgatgtatccgagtccttgaccgagaagaacataggccctaactcagccagccaatgcggctcaaccgatgtcgcacactgcatgtactcctttgtggtcaagatcagttcatggtacaccacatagtccggtgtgtatcccagaccgtacagtgcactgctagggtgcaaatggcaaggcatcccggttctgcagttcacatactccccaacaccttttaatctagctgagttgtggaaatacgctgaacagatggnttttctcacaatatnccaatccggtccaaacgacctggggtcaattttcagtggcttggggaatccanaagtggggtnttaccccnaaaggttttcaaaactttcnttgagggaagggcatggacaagnccccaaagnangccttccangggnaagnaanngggag

SEQ ID NO: 101337 - DNA, 521 bp, Arabidopsis thaliana columbia
gactcactttagggaaagctggtacgcctgcaggtaccggtccggaattcccgggtcgacccacgcgtccgctttcttcactgtagaatccgtcgaccaaacaactagctccaatggcataatgagcattgtagtttgcaatttcttcttccgtgaagaagaagaagatggctttggagaaagaggaagaagcgtcacaaaacggtgcgttttgtgtccttgatgggctctattgcgaggaagaaaccgggtttgtggaggacgatcttgatgacgatggagatttagattttctcgagaaatctgatgagagtgttgtaaagtttcagtttttacctcttttggatatgttcttatgggatgacgatgagattctgagtttgatttcaaaggaaaacgaaacgaatccatgttttggggaacaaatcttagatggctttttggtttcttgtaggaaagaggctttagattgggttcttagggttaaatctcattatgggtttacttcattgacggctatt

SEQ ID NO: 101338 - DNA, 577 bp, Arabidopsis thaliana columbia
tactatgacgtaccatgcacgcgtacgtaagcttggatcctctagagcggccgcccttttttgtcttttttttagtaatagcaaatttataacgatacaaaccacgtggaagtaattaaaataagtacttaaccacaaattacaattaaccggtaaaagaaaacaaacagtttcctaaagcaagaacataaattgttcacttggtcatatcatctgataacgcatcaaatgatgaaacgccaaacgcatattcatcagacgccagacgcaaattctctagcaaagttttaaacgaagaactttgtatagcatcatgagcaatcagccttggaaactcaatttgttgttttctcagtagactgactgctcgtgatgttatatcatttttctctaacgctggaattccacgtggcgtaatttcattggctcaatggaaaccggcggagccaagtgctggagcccaatagtccgcgccgttgtcgctgcctacttggagtgtgcatgagattgggacaagacataaacctcgaacttctcagatctttcttaggctcttcacttgcattttgattgtccg

SEQ ID NO: 101339 - DNA, 577 bp, Arabidopsis thaliana columbia
acgactcactatttggagagctggaccgcctgcaggtaccggtccggaattcccgggtcgatccacgcgtccggttttccgcatacttttcatggagattaaccgtggtggccatcccaacacttgttcttcttctaatcccagggttgatctatggcaaataccttgttcacttatcaaagaaatcttttaaagaatacaccaaagcaaactccatcgtggaacaggctctaagctccatcaagacaattctttcattcacagccgaaactcaaataatcaagaaatactcggaagtcttggaaagacacaaaaagcttgggttaaagcaaggtcttgccaaaggtttagccgtgggaagctcagggatttcattcaccatttgggcttttcttgcttggtacggaagcagattggtgatgcacaaacaagaaaccggtggacgcatttatgcagctggtatctccttcgtcttgggtggaatctctctagggacggcactgactgaaataagatacttttccgaggcttcagttgcggcagctcgaatatgttcaagaattgatagaatttcaga

SEQ ID NO: 101340 - DNA, 701 bp, Arabidopsis thaliana columbia
  unsure (1)..(701): unsure at all n locations
nnnnnnnnnnnnnnnnnnnnnnnnnnnnnnnnnnnnnnnnnnnnnnnnnnnnnnnnnnnnnnnnnnctttttttttttttttttttacttaaatgttaaatttccatttgatctccgtagggaagaaacacaaataggatccgatcaaaaggacaatccaagagccaaaatggagaaagcagcgtctcttagttgtagcaaaggatacaagccataagtattacaaaatcaaggatattttctgtaactggaacagaacatttgatgtggttacatcatgtcttaaccggcctcacaagccccaaaccagatccactacccaaatgcttgtactccttagcctcaagatgatcgtcgtgctcagcgaaacccgtgcctcctttctttaacccaaccaagttcctatccttgccaggtttgtcacacacatgacagactttgtcgacgggcataaacttctcagcacacttcttgcagaaaacatgtccgcatgagcttagtgccacgagggacattgtgttggtgagagtgactttgcagctcgggcagatgtaggatttatgataagagcttgaagatgctgattttgtcttggtctcttcctctttgctgttgtcttctgtgaaacgaatcgcaaagaagttcttaagcttgagcttgtctttgccctctggacagactgtgtgagtttctggagcatt

SEQ ID NO: 101341 - DNA, 424 bp, Arabidopsis thaliana columbia
cactatctctctcttaatcgatcgatgaagatcaggtgcgacgtctgcgataaagaagaagcgtcggtgttttgcacggccgacgaagcatctctctgcggcggctgcgaccaccaagtccaccacgctaacaaactcgcctctaaacatctccgtttctctctcctttatccttcttcttccaacacctcctctcctctctgcgacatctgtcaggataaaaaagctctgttgttctgtcaacaagatagagctattttatgcacagattgcgattcatcgatccacgctgcgaacgaacacacaaagaaacacgataggtttcttcttacaggggttaagctctctgcaacatcgtctgtttacaaacctacttcgaaatcttcttcttcttcttcaagcaaccaagatttctctgtccctg

SEQ ID NO: 101342 - DNA, 391 bp, Arabidopsis thaliana columbia
tgcagaaaagtacccaaatatattttcccagagttcagtttttgggaggtttccatattttctgccgagcttagttatatccgtctatgctactgcggttctcatcgcttgctggtggcttcctgaaactcttcatacacgttgtagaattgcacaagggagacttaatccaacagagctaaacgatgatgaaagtagaggaggaggacttgatgaacagaaaataattaataagccaagtctcttgaggaatcgtccattgatggctatcatcattgtttattgtgttttttccctccaagagatagcatacaatgagatattctcactctgggctgttagtgaccgaagctatggaggattgagcttctcatctcaagatgttggtgaa

SEQ ID NO: 101343 - DNA, 642 bp, Arabidopsis thaliana columbia
atacccatggaagaagatcaccaagtgcttatacaggagaacacatctcaatcatcttctcctgtaccggaaatcaacaacttctctatacatccggttatgcaagtctttcccgagttcccggtaccaacagggaatcaatcatacggacagcttacttcatcgaatctcatcaatttggttccattaacttttcagtcaagtccagcaccgctttctctcaacctctcactagcttcatctaatcttaatgaaccatctccttcaatgcatccagcattcaacacgattggagtcgcttagagcttatcctaaaggtgaaaatctgcaacacaccctgtttgtttctttgctgtacagataggtcttgactttgttataaaaaaattcgtcaaatttatgtatttggctaaaaaaaatctgttgaaaagaagaataataaacagagtttggagataggacttaagtggggttttagggttcataatcatcctgtgtttttccttccatgtttggaagttgttgtaatactctctaagttcattcgtgtggatccatcaaaacttataaatcatattaacgttaaaaagaaaaaaaaaaagggcggaagctttaaaggatcccagcttacggacgggggca

SEQ ID NO: 101344 - DNA, 618 bp, Arabidopsis thaliana columbia
cttaaatcgatcacaatctactcacttttgaagtaactatagtaagattgatcagcaagcaaaatatggctcaaaaggttgaagcaaaaggagggaaaggaggcaaccaatgggacgatggatccgatcatgacgccgtgaccaagattcaggttgcagtaggcggaatgggaattcaatacattcagttcgattacgtcaagaacggacaaaccgaacaaactcctcttcgtggtatcaaaggcagtaccattccaactgatccgtttgtgattaaccatcctgaggagcatctagtttctattgaaatttggtataaacctgatggtcttattcaagggcttaggttcatatccaacaaaaagacttctcgtttcattggatacgatcgtggtactagatcatttctccaagttcaagacaagaagatcattggctttcatgggtctgccggagacaatcttaattctcttggagcttactttgctccgttgactatcccattgactcctgccaagccgctaccggcacttggtagtgatgattgaacagcatgggatgatggtgcttactttggggctaagaaggtgtacgtacgacaagcccattatggtctat

SEQ ID NO: 101345 - DNA, 519 bp, Arabidopsis thaliana columbia
  unsure (1)..(519): unsure at all n locations
nnnnnnnnnnnnnnnnnnnnnnnnngacgtcgcatgcacgcgtacgtaagcttggatcctctagagcggccgccctttttgtttttttttgcataatggtcatttgatgatctcatattcccgttgatatttaatatttgggtcaaagcataagaaacatctgaaattataaaggaattcccacatataaaaagtatccattcaagaacacgcatataaacgaaagaccaacacaagtttactattttctttctttactaacctccaaaaaacggtgtctttctctggcgatcctcaagaagtggtgattgcctatccgaaggcattaattctttcctcggagactccgcagttactccattgctctgaacacttgtgataataggttcagggccacctaactgctgtaatgtagacaatgaatggctctgaggatccctaaactgtatctggctctgcctgtttgatataaaatcgctcatctggttgttcgcatcaccatttatatttgccttaact

SEQ ID NO: 101346 - DNA, 770 bp, Arabidopsis thaliana columbia
  unsure (1)..(770): unsure at all n locations
acaataaccaaaaagcccatcattgggtaaatcttcacatcgggacatggacggcgaaggggaagggagcggaatacggctgagcaagagattcgctggcgggaaggtcaccggcggtagcttcagaagtcgattacaagaccaaatccggtaccgcttggagccactctttcctgaatcagaagccatggcatcctctttcttatcccaatcagcgccgcaaatggatcgccgagcagactcatgcccaacacgatcgaagagcggaagaggtggctcgccagtttgcgcaagagcaggaatttttcaagcaagcagctcttatctcgaagaaagaaagagagaagatcgcaaacgatgaaagctgtgagctttatgtatgttcgtccacctggctatgatcctgaaagtgccaaagcagcagaatacaaggatgagaaacacaagggtcagggttcttcaactcaggatccagtggcggacgacaatgttggttctagaccagaagaatcacaaggtgggggagaacgcacacaggaaaggaagaaaccacgacccaaagatgtgtttggtcgtgctcttcctactgaagaagaatttgaggttcttaaaaatgcaccaaggatggagactggtattcctgggagagtaaagccatttncagttgaagtgcgtaattgtgnaatntcttganatgtgggaacttttggnacccaaagcgggtgatccgtnactncccntttaaagggtgcagtaantcccaantnnag

SEQ ID NO: 101347 - DNA, 521 bp, Arabidopsis thaliana columbia
  unsure (1)..(521): unsure at all n locations
cgattgtnnnnnnnnnnnnnnnnnnnnnnnnnnnnnnnnnnnnnnnnnnnnnnnnnnnnnnnnnnnnnnnnnnnnnnnnnnnctttttttttttttttatcatcatatatacatacaactacaaatctacaatcatcctcctcttcatttcaaaatcaattccacatcaagatgttttggtacccttaaaatagacatatgtagaataagttaccaatctgtgtatatgttaactatattggaatccgacctctatgcccctaattaaacccatatgtatatatatacacacaataccacagcccgtaaacgcttaacgtgagaatggtggtggttgaggaacaaaagattgaatagggtcatgaagggtttggccccccgcgcacccctctcgggccgcttcacacatcatattacttgttgctaagttgcatccatcttctttgaacacaaaaccagaaccgttgcattgtttctgaaacgagaaactacanagttcaacttcaattttcccctgcatc

SEQ ID NO: 101348 - DNA, 538 bp, Arabidopsis thaliana columbia
  unsure (1)..(538): unsure at all n locations
nnnnnnnnnnnnnnnnnnnnnnnnnnnnnnnnnnnnnnnnnnnnnnnnnnnnnnnnnnnnnnnnnnnnnnnnnnnnnnnnnnnnnnnnnnnnnnnnnnnatgggcacaattcctttacttatatataagtacatgtcttcatttaaaacctctacagataactgcgttcagtttattgttggaacagaaagtaggctgaacatacacacaacaattaacatatatctatacggtataaagtgaggaagacgaacacttaggcagcataagtttgcttgagatactcaacaatttctgcaccctcaaacatcgcgactccagtgtttggatcttccaggtaaggcacctgaaagtgaccagctttctcaagcaatacctgccgtttggggctaccacgagcacaactgcgctgaatgtgtggtaactccagttctacaagaacttcgcgtacaagcttacaaaacggagaaccctcatatgcccagaattcgagtggcttaggtggtagtttcgctggtgtgtacaagttaccctttcc

SEQ ID NO: 101349 - DNA, 529 bp, Arabidopsis thaliana columbia
ctataaaagactatgacgtcgcatgcacgcgtacgtaagcttggatcctctagagcggccgctttttttgttttttttttttttttttttttcgaacacttgtttatgttattaatgtgcgtgcgaattaaaccccaaacaaatcatgtaatggtcaataactcaatatgatgtaactgatgactctccctttccaaaagtttgatttagattcatcatgaaatagtaatgacaggtcttttgcattcgacttatttagctttgcctttgccttttcctttgcctggacctttcttagcgtctagcttagcttgaatcctagcagctgcagcagcttttgcttcttctctctttttcttatcatcctctttcgcagctgcagcaatctctctctgcttcttcagatcttctagcctggctctctcttcagaaacacttccaacactagcacctttcctcggtctacaagcaaccaattccacctcgaaaatcaaagttgcatcaggtgggatgtcgggaggagacccgg

SEQ ID NO: 101350 - DNA, 519 bp, Arabidopsis thaliana columbia
  unsure (1)..(519): unsure at all n locations
atgatctggccnnnnnnnnnnnnnnnnnnnnnnnnnnnnnnnnnnnnnnnnnnnnnnnnnnnnnnnnnnnnnnnnnnnnnnnccacgcgtccgcaccgccatctaaacaccactccttcacctgagccgcggcgaagaaggtggaagcgaatctattagattagggtttatacgattataggaggacgaaatcagaaagacgagctagaggaagctgcgatttttctggaagataaacaatggcacaagattcagagaagagattccaccaaatcatggataaactctttaccccatcgaaatctcagcttccttcttcctccaccagttcttctgtagagcaacaatcaagaggcaagaagcgtcaaaatccttcatctgcgttagcattggttgagccaaagattgtattagctaccattgataggtcttcagctttgaaggttcctgctggaacatcgccttctggtctttgcaggccgtgggatagaggagatcttatgaggaggcttgctactt

SEQ ID NO: 101351 - DNA, 672 bp, Arabidopsis thaliana columbia
  unsure (1)..(672): unsure at all n locations
catgacctgaaaatgaaaggtggttcaggttgttgtgctagcaaaaatgagaaagggaaggaagtagtggcaaagagctgttgtgagaaacccaaacagcaggtggagagtgttggagactgcaagtctggtcattgcgagaagaagaagcaagctgaagacattgttgtcccggtgcagattattggtcatgcattaacgcatgtggagatcgagttgcagacaaaggaaacctgcaaaacaagctgttgtgacagtaaagaaaaggttaaggagacaggtttgctgctttctagtgagaacacaccttacctggggaaaggagtcctgattaaagatgaaggaaactgcaagtttggcagcgagaacatggggacagtgaaacaaagctgccatgagaagggcttcagcgatgaaaaccaaaccgggggaataaatcttgcttcggaggaggggccagatggtcaagatttctcctcggggttttgtgtgaacgagggaacagtggaacaaaagcttcgatgagaaggagcattctgtgttggtggagaaggaaggtttngacatggnaacttggttcttttttgtaaatnccaagctggttttttntgggaancacaggaggttnagtttaggngcnatttcnccntnnggggtaaanaangngggccc

SEQ ID NO: 101352 - DNA, 675 bp, Arabidopsis thaliana columbia
  unsure (1)..(675): unsure at all n locations
agtgatgatgattatgttgtggacttagaagcaggcttgttaacaaagagcgggaatggtcaatgcaaatcaagctgttgtggagataagaaaaatcaagagaatgttgtgatgatgaaaccaagtagtaaaaccagttctgatcattctcaccctggttgttgtggcgataagaaggaagaaaaagtgaagccgcttgtgaaagatggctgttgcagtgagaaaactaggaaatcagagggagatatggtttcattgagctcatgtgagaagtctagtcatgtcaaacatgacctgaaaatgaaaggtggttcaggttgttgtgctagcaaaaatgagaaagggaaggaagtagtggcaaagagctgttgtgagaaacccaaacaacaggtggagagtgttggagactgcaagtctggtcattgcgagaagaagaagcaagctgaagacattgttgtcccggtgcagattatttggtcatgcattaacgcatgtggagatcgagttgcagacaaaggaaacctgcaaacaagctgttgtgacataagaaaaggttaggagacaggttgccgcttctagtgngacnncctacctgggaaggatgccgttaagtgaggactcanctgcccggactngggntgaaaantgctgnaggtcccgtgaaaaaccngggtc

SEQ ID NO: 101353 - DNA, 514 bp, Arabidopsis thaliana columbia
  unsure (1)..(514): unsure at all n locations
nnnnnnnnnnnnnnnnnnnnnnnnnnnnnnnnnnnnnnnnnnnnnnnnnnnnnnnnnnnnnnnnnnnnnnnnnnccacgcgtccgcttcttcttcttcatcttcttctatatattggtgtttcatttgttctgctttaaaagtacacaaagattcatcttttttcggtcctctgattgggcaaaagactagctcggtcgtgttttgaacaagagatacatgttttgaaaaattcctcgcaaaagaagagaaagaaagactcaaacttttgtttgaatttgataccattttttatatatataccaaaagtccaagactggtttcatttttgggtttggtctgaaacctctcttcgtgttgtttgttcatggtatgtcttaattagggtaaaaaaatacttgattgttttctctcaatcatcatgcatagagtacgcaataaaccggttaaatccaccgctactgcttccgtcaagcatttaatcaaacagagaggcggcgacggagctacggcgg

SEQ ID NO: 101354 - DNA, 515 bp, Arabidopsis thaliana columbia
  unsure (1)..(515): unsure at all n locations
tgacgtcgcatgcacgcgtccgtaagctgggatcctctaaagcggccgctntttttttttttttttttttttttttttggggaggagaaaggcatctacatttctagttaattgggggtcagaggataaacctgataagccaggtcttttaaacatagaaacaccataaccattactgaagaattgtgcctacacattgttgtttgcttgacttcaaagcttctgcatccatgcgctcgaggatatgacgagcttcttcctctgtggcaggaactacatttcgaagtttaaacccattgtttctggcctttgcctctggccttacagtgaacttgaagtagaatgtatttgaaacctcactggagcgaatctctggacttgtaacatgagcaacaacttcgatattgatgagcggacaatcctgtttatccagttgagtgtaaagaacacaggatttgaaacgtaagaaatccccgacgtccaccggtcttaggaaatcgacgtgatcaacttct

SEQ ID NO: 101355 - DNA, 535 bp, Arabidopsis thaliana columbia
  unsure (1)..(535): unsure at all n locations
nnnnnnnnnnnnnnnnnnnnnnnnnnnnnnnnnnnnnnnnnnnnnnnnnnnnnnnnnnnnnnnnnnnnnnnnnnnnnnnnnnnnnnnnnnnnnnnnnnnnnnctcaaccaacattgcatatgacattacatgattacaataaagtgatataaaaagcagtcccatattgcttggctgccaaaaaaaaaaaaagtgtctccaaacattttgctgcttaataaatcactgaattatatatgcatgtaataatgtattaacttacaaatttataaaatcaaatctagacattcttattgcttggctctgatccgaagaacaacaactcggaagccatctcacgtgttctgcacgtgacaaccaatggttcagccttaggcaaactaagtcctggaccttcagtcatatcaacctgacctcctgagccgctttcccactcaaagcactgaatcatcgaacccaataataacccaacaacccggttagccaaactcaacccaggacaagcccgtcttcctaacccaaacggcatcatttt

SEQ ID NO: 101356 - DNA, 1294 bp, Arabidopsis thaliana columbia
gacgttgacggccgccgccgtaccggtccggaattcccgggtcgacccacgcgtccgcaaaccaaacataacactcacaatttaactctctctgtctctctctcatatctctcacttcttctctttctttttaagtccccaaaataacctcgagatcgatggactcaaatctgttcataactcccacttcttctctcaaatcccaagccttggtctcttcatcatcctaactatataagaaaaagaaaaaacaacgtaaagtttctgccataaatcatgagaccaatattagacctcgaaattgaagcttcatcgggcagtagtagcagccaagtggcctcaaacttgtctccggttggggaagattacaaaccaatctcgctgaatcttagcctcagtttcaacaacaacaacaacaataatctggatcttgaatcatcgtctttgacgctgccactttcgagcacgagtgagagtagtaacccggagcagcagcagcaacaacaaccatctgtatcaaagagagtcttctcttgtaactactgccaaaggaagttctatagctctcaagcgctaggtggtcaccaaaacgctcacaaacgtgagagaacactcgccaaacgcgctatgcgtatgggtcttgctggggtcttccccggtagaggatcaagtagcaattatgcggctgctgccacagcagccgctctctcgtgtttgccgcttcacggaagcggaaacgggaacatgacatcgttcaggactttgggaaatccgggcacattcctcggcgccacgaacgttcagcatgacaaggcagacaccagaaacacttattagaaacattgccaggttcaaccaggggtatttcggtaattgtatacctttttacgtggaggacgacgaggccgagatgctctggccggggagtttccggcaagctacgaatgcggttgcggttgaagcgggtaatgataatttaggtgaaagaaaaatggatttcttggacgtcaagcaagcgatggatatggaaagttctcttccagatctaaccttgaagctttgagctttcgtttttttttgtttttttttttgctgaatttggattcttaatttggtgcatcagcttcataactctattatgtacagtgagagtttcacaaaccatttctgatatgttatggtcactatcgattgatcgaccaaaagtcaattctagtgtttgcttacgtggataaaccatttaaacgtttatgtattgtaaactaaatattaagttaattatgctatcaaaaaa

SEQ ID NO: 101357 - DNA, 536 bp, Arabidopsis thaliana columbia
  unsure (1)..(536): unsure at all n locations
nnnnnnnnnnnnnnnnnnnnnnnnnnnnnnnnnnnnnnnnnnnnnnnnnnnnnnnnnnnnnnnnnnnnnnnnnnnnnnnnnnnnnnnnnnnnnnnnnnnnngggggaacaaatgctggttgaatgtaacaacacctttcatggtttatgtctttttatcttctctttagcatacgaaagcatatatatgaacaacaaacctatcaaagaatttagtcgagatccgattggtttgatgagatctgcatcaaccgagcttaacaggaactacagcaggaactttgggtgaagagggatcaagtgtgatgatctcctttcttccttctcctccattctcaactttctctttaaccgcctttgtcactgcgccaaacgcgtttgaaaaccacgaagctccacttgatacataagggtttgccattaaagccgttcttgcactgattgctgtctcttcagcagctgctaaagcagatttcgttatctccctcacctgatatcgctcatcgatatctctcaacttctcattaaccacagttg

SEQ ID NO: 101358 - DNA, 535 bp, Arabidopsis thaliana columbia
  unsure (1)..(535): unsure at all n locations
nnnnnnnnnnnnnnnnnnnnnnnnnnnnnnacgcacgcgtacgtaagcttggatcctctagagcggtcccccttttggtttgttttttcaatatattaagttcttttcttaatgaagtggaaacatttaacaactgcagaatacagttagagtaacaagccaacatttggttccaaagatttgtgtttgaaataaagaataacttgagttttgtgtctggaaaatatgaataggatcaggtggaagaagagacaagagacatgaactcttgatctgattccaaagcttccataaactctggaagtagacatacttccaaatctatacttgctcctccttgtcttcctggataagctgataccttcccgtcatacttaccgccataaccgcttctaaccgccaccgctttccccatcccaaactcgcttccgtacttgttaaaccttggagaacttcccatgggaactatgttcaaattggaaaggccatttgcttgccaccggaaaggaaacttcaacatttgaactttttccga

SEQ ID NO: 101359 - DNA, 531 bp, Arabidopsis thaliana columbia
tagaagattatgacgtcgaacgcacgcgtacgtaagcttggatcctctagagcgtccgccctttttttttttttttttttttttttttttttttgggagagagaatgttccaagtctcatattttatacatattgcattgggcttatagtcagagcttgtccctcacaaacattccattactgttttctctaccaatctaaacaatagccagatccgctcattcatattcataataattaccaaaagagattcaaacaaaaccactcatcagcattggatctaaacttcatcaatcgataaattcttggctgctcaattcaatcctcttctcaatcggactactcatcatcttgatactctttctcttggtgaacttgttagatccatggcttctctctgcaaaacattgcctcaaaaacttgcggttttctttatccaactttctggtttgctcgctcacaagttcaacttcttgctttgctttagcaagattcataatgagacattctttctcctttgcaattctctta

SEQ ID NO: 101360 - DNA, 636 bp, Arabidopsis thaliana columbia
  unsure (1)..(636): unsure at all n locations
gaggtcgaatcgccgcgtacgtaagcttggatcctctagagcggtcgccctttgggttttttttttttttttttttnggaaaagaaaagaaacgcttccaaaatcggtgaacaacaacaagcttttacagttgtgtgctttgagaaaaaaaaccaaagttgcaagtggctactttctcacaaaaccaaaaacgcaaaactttggtttgtttatgagacgcccatatatacagaagaaggacctgagtttccttcatctccttacacaatttacaaaaaacagaaacaacctttggtgtaaaatgcaaaattgtgctcaggccttgtatgagacacttttcgtctgaactctaaaccctcggattccgccatttcttccgagcagaagaaccgtagaccttgcttgcacgggattttttagctgattctagaagagagtgactgaggaaaaatgctaagtgttcatggcgattagctcatccggcatgcattgccttatattaatgaccattgacttattatatggcgatgagatgtcacaacattggcggcgaggcaaacccatctgttcaacgttgcgttccagtttaggagacagaactctgatgcgttctagacgctcaacagcttctgctct

SEQ ID NO: 101361 - DNA, 442 bp, Arabidopsis thaliana columbia
  unsure (1)..(442): unsure at all n locations
nnnnnnnnnnnnnnnnnnnnnnnnnnnnnnnnnnnnnnnnnnnnnnnnnnnnnnnnnnnnnnnnnnnnnnnnnnctttttttttttttttcacaagttgtatattagattataatttccaaaatcactcagaaacttatataggcatatcattttaagtgataagatcctctgaaacgtttagacaaaataattttgagccatcagtatgattctaacacacacacacggaacacactcacactatatagttaaacctactatactacagctctttcctcaaaaaatgttttatcaagagagactctgtgtctgattcagaaggattcagtccaaccccatgcattcgccgaatgttgctgaaacccgcctctgctttctccctctcccattcctccatcgacaatcctccacttcgttttcctcatgtcggcccttttctc

SEQ ID NO: 101362 - DNA, 524 bp, Arabidopsis thaliana columbia
  unsure (1)..(524): unsure at all n locations
nnnnnnnnnnnnnnnnnnnnnnnnnnnnnnnnnnnnnnnnnnnnnnnnnnnnnnnnnnnnnnnnnnnnnnnnnnnnnnnnnnnnnnnnnnnnnnnnnnnnnaacagaaactagtagtgtactaataacaaagattttaactccatatctgtcaagtgcaacaaaagggcttacaatacaaaacaacaaagaaactgacaacttgggtcggagaacgcaaaaaggggaaacccaaaaggtgttcaaaaaactgtcaacgaaacgcaaaatagacaatttaaaaccgtggtttccagcagaagtcaatacccgaaccactttaccttttttcatcagcttgagatgaaattaaacgcaaaaggtgcgttcttgacttcctttggatttcaaaaaacacaaaatgagaaaccataaccgctcttaatccttccttttctcttattcttacttcttctgaaaaaaaactacgctcctcctccaacatcacaagaaacagcagctttaatcctctccaccgtacatttg

SEQ ID NO: 101363 - DNA, 540 bp, Arabidopsis thaliana columbia
  unsure (1)..(540): unsure at all n locations
nnnnnnnnnnnnnnnnnnnnnnnnnnnnnnnnnnnnnnnnnnnnnnnnnnnnnnnnnnnnnnnnnnnnnnnnncttttttttttttttttcaccagcaaacctatcatgtgatctatcataatcgtactgtgaatattacaagaacttactgttttggataaagagacccaaaagagccttcgggtccatagtaaaagatacaagtatgggagtcaaaagatgctaacgagtcttgtggggtttagagactttcttttttcgcttcttgacagatttgggtgttttcgtcttcctagactctcgtttctcctctttcactttcttcttgggctctttccttgcagctttcttgtcttcaggacccaattctttttcactctcttcttcgctttcttctccacttccctcttcctcttcttcttcttcctcttcagcattcacctctatttgctgctcgtctactttaggaagagcatccttaagccccgttatcgtttggtacagcatgtctcctgtgtcctgcccgcttgttatcttcg

SEQ ID NO: 101364 - DNA, 879 bp, Arabidopsis thaliana columbia
  unsure (1)..(879): unsure at all n locations
atgatattnnnnnnnnnnnnnnnnnnnnnnnnnnnnnnnnnnnnntccgttttttctttggaaccatctagtctaagagaaagccacgcgtccgaagagaaagaagaagaggacttgaatacggaagcttgagagaatgaaagcgatcgtgatctcggagccaggtaagccggaggttctgcaactccgtgatgtggcagacccagaagttaaagacgatgaggttctcatcagagttctcgctactgctttgaatcgtgcagatactctccaaagacttggcctttataatccaccacctggctcaagcccttaccttggtctcgaatgttctgggaccattgaatccgtcggtaaaggcgtctctcgatggaaagtcggagaccaggtgtgtgctcttctttctggaggaggttatgcagagaaagtttctgttcctgctggacaaattttcccaattcccgctggtatctctctaaaggatgcagcggctttccctgaagtggcatgcactgtttggtctactgtcttcatgatgggccgtctctctgttggtgaatcattcttgattcatggaggttcaagtgggattgggacatttgctattcagatagctaaacatctgggagtgagagtatttgtcacagctgggagtgatgaanagctagctgcgtgcaaagactcggggctgatgtttgataaatacaaaaccgaggattttgttgcaaggggtaaagcggaaccgtgganaggagtggatgtatcttgactgattgggcaccgattgcnanaatctcacagctaacttgatggaggtatgatatcngttatggangagcatgagaataactagagctgctcaacgctactgctagactg

SEQ ID NO: 101365 - DNA, 1177 bp, Arabidopsis thaliana columbia
  unsure (1)..(1177): unsure at all n locations
gaggacttgaatacggaagcttgagagaatgaaagcgatcgtgatctctgtgccagatactctccaaagacttggcctttataatccaccacctggctcaagcccttaccttggtctcgaatgttctgggaccattgaatccgtcggtaaaggcgtctctcgatggaaagtcggagaccaggtgtgtgctcttctttctggaggaggttatgcagagaaagtttctgttcctgctggacaaattttcccaattcccgctggtatctctctaaaggatgcagcggctttccctgaagtggcatgcactgtttggtctactgtcttcatgatgggccgtctctctgtggtgatcattcttgatcatggagttcaagtgggatgggacatttgctatcagatagctaaacatctgggagtgagagtatttgtcacagctgggagtgatgaaaagctagctgcgtgcaaagaactcggggctgatgtttgtataatttacaaaacgaggatttttgttgcaaaggtaaaagcggaaaccgatgggaaaggagtggatgttatcttggactgcattggggcaccgtatttgcagaaaaatctcgacagcttaaactttgatggaaggttatgtattatcggtttaatgggaggagccaatgcagaaataaaactaagtagtctgcttccaaagcgtctcactgtcttaggagctgcattaagaccaagaagccctgaaaacaaagcagttgttgtaagggaagtcgagaagaatgtctggccagcgatagaagcagggaaggtaaaaccagtgatttacaagtatttaccattgtcacaagcagcagaaggtcatagccttatggagagtagcaaccatattggtaagattctccttgagacttgattctctgcaaagggagaaatgttcagagacaagagtcatggtcaataatcaataaaatctggtcgattctgttcatagatatctctttacaagagttctgtttgttggcttttatgtatctctgatttggtcaaaaagacactgtaactatggaacatatatagtatcaaataagctgttgtaaccaaaaaaaaaaaaaaaaagnnnnnnnnnnnnnnnnnnnnnnnnnnnnnnnnnnnnnnnnnnnnnnnnnnnnnnnnnnnnnnnnnnnnnnnn

SEQ ID NO: 101366 - DNA, 1029 bp, Arabidopsis thaliana columbia
tcctggttacaaaactcgttacgatgatgttgatctcattaccatcagagaaaacacggaaggagaatacagtggccttgaacatcaggttgttagaggtgtggtggaaagtcttaaaatcattacccgtcaggcgagtttgagagttgcagagtatgcttttctctatgccaagactcatggaagagagagagtttctgctatccacaaagccaacattatgcagaaaactgacggtctctttctcaagtgttgtcgtgaggttgctgagaagtatcctgagatcacttacgaggaggtcgttattgacaactgctgtatgatgcttgtgaaaaacccagcactttttgatgtcttggtgatgccaaacctgtacggtgacattattagcgatctgtgtgccggattggttggaggactaggattgactccaagttgtaatattggagaagatggtgtagcccttgctgaagcagttcacggttctgcacctgatatcgctggaaagaacttggcgaacccaaccgcgttgcttctgagtggagtgatgatgttgcgtcacctgaagttcaacgaacaagcagaacaaatccacagtgcaatcatcaacaccatagcagagggcaaatacagaaccgcggatcttggaggtagttcgaccaccacggaattcacaaaggcaatctgtgatcatctctgaacatcgtaaaatccaattctttatcgaatcttcttttgggagccttttttatagcctcgaattcttcttgttttcttgttttacgattagaataaaagaaaaagcaaaaaaacggctcttcatgagttttgaagttattgtttctgccttaaaatttctctgccgtaaggcaagaagattcataacactggaaaaagtgatgttctttctgaatcgatcagaagaattttgttttgttgcttgaaaaaaacccaaaaagggcggccgctctagaggatccaagcttacgtacgcgtgcatgcgacgtcaaagtcttctataggtcacct

SEQ ID NO: 101367 - DNA, 943 bp, Arabidopsis thaliana columbia
  unsure (1)..(943): unsure at all n locations
acaagtcacaactcaaataatctttgttttcctcctacaaatatggggttttntccttcattttcttgcagtgctattggagccctaattttgggttgccttctgcttcaagcatcaaactctaatgctcagttgaggcctgatttctacttcgggacgtgccctctccgtttttnaatcttactcaacttaaaacagcctttgctgacgttggcctaaaccgcacttccgatctagttgctctttccggtggtcacacatttggaagagcacaatgccagttcgtgacgcctcgtctctacaacttcaatggtacaaacagtccagacccaagtttgaacccaacttaccttgtcgaactncgtcgattgtntcctcaaaacgggaaacgggcaccgttctggtcaacttcgatgtggtgacctccagangctttcgntaggcaaatactnnaccaaccttcgcaaatgggaaaggtttgattcagagtgaccgagtccttttttcaactccaggagctgatacgattccactagtaaaccaatacagcagcaacacgttcgttttctttggagcattcgttgatgcaatgattaggatgggaaatcttaaacctttgactggaactcaaggagagataagacagaattgtagggttgtgaatccaagaattagggttgtggagaacgacgatggtgttgtgagttctatctgattatgcatgttggggatatatggatatgtaagaacgtataaaatgtgtgggattgtgggaacatttcggctaaataaagttctcacaagttcgtgtgatttatgaaatttggtcttaatttaccactttttgattccggattttctgagcactaaaaaagtggatgaatttcataatatattgatacgtggtgtttgaataaaaaaaaaaaaaaaaaaaagggcggcc

SEQ ID NO: 101368 - DNA, 1387 bp, Arabidopsis thaliana columbia
  unsure (1)..(1387): unsure at all n locations
nnnnnnnnnnnnnnnnnnnnnnnnnnnnnnnnnnnnnnnnnnnnnnnnnnnnnnnnnnnnnnnnnnnnnnnccacgcgtccgcactcacaagtcacaactcaaataatctttgtcttcctcctacaaataatggggttttctccttcattttcttgcagtgctattggagccctaattttgggttgccttctgcttcaagcatcaaactctaatgctcagttgaggcctgatttctacttcgggacgtgcccatttgtttttgatatcattggaaatatcatcgtcgatgaactgcagactgatcctcgtattgccgcgagcctccttcgtcttcactttcacgactgctttgttcgtggttgtgatgcatcgatcttgcttgacaattccacatcattccggactgagaaagatgctgctccgaacgcaaattcggctcgagggtttaatgtcatagatagaatgaaagtagcccttgagagagcttgcccaggaagagtctcttgtgcagatattctcaccatcgcctctcaaatatcagtgcttttgtcgggaggtccatggtggccggttccgaaggggaggagagacagtgtagaagctttcttcgctctggctaatacagctctgccctctccgtttttcaatcttactcaacttaaaacagcctttgctgacgttggcctaaaccgcacttccgatctagttgctctttccggtggtcacacatttggaagagcacaatgccagttcgtgacgcctcgtctctacaacttcaatggtacaaacagtccagacccaagtctgtacccaacttaccttgtcgaactccgtcgattgtgtcctcaaaacggaaacggcaccgttctggtcaacttcgatgtcgtgactccagatgctttcgatagtcaatactacaccaaccttcgtaatgggaaaggtcttattcagagtgaccaggaactcttttcgactccaggagccgatacgatccctttagtaaaccaatacagcagcgacatgtccgtgttctttcgagcattcattgacgcaatgattaggatgggaaatcttagacctttgactggaactcaaggagagattagacaaaattgtagggttgtgaatccacgaattagggttgtggagaacgacgatggtgttgtgagttctatctgattatgcatgttgccatgttggggatatatatatggatatgtaagaaagtataaaatgcgcacgtgagaacaatttcgactaataaaagttttcacgagttatgagattaaaaaaaaaaaaaaaaaaaaaaaagggcggccgctctagaggatccaagcttacgtacgcgtgccatgcgacgtcaannnnnnnnnnnnnnnnnnnnnn

SEQ ID NO: 101369 - DNA, 813 bp, Arabidopsis thaliana columbia
acatcgataaacacatacgttcacacatatatgtctataaatccgacaatgtctcgtactggcgaaagttcttcaggttcgtcctccgacaagacgataaagctattcggcttcgaactcatcagcggcagtcgtacgccggaaatcacgacggcggaaagcgtgagctcgtccacaaacacgacgtcgttaacagtgatgaaaagacacgagtgccaatactgcggtaaagagtttgcaaattctcaagccttaggaggtcaccaaaacgctcacaagaaggagaggttgaagaagaagaggcttcagcttcaagctcggcgagccagcatcggctattatctcaccaaccaccaacaacccataacgacgtcatttcagagacaatacaaaacgccgtcgtattgtgcattctcctccatgcacgtgaataatgatcagatgggtgtgtacaacgaagattggtcgtcgaggtcgtcgcagattaacttcggtaataatgacacgtgccaagatcttaatgaacaaagcggtgagatgggtaagctgtacggtgttcgaccgaacatgattcagttccagagagatctgagttctcgttctgatcagatgagaagtattaactcgctggatcttcatctaggttttgccggagatgcggcataacaaattaaagagagatatatgattaagattatatgtactatagtggcgtatttcattgggatcatgaaggggaaaaaacgagacatatagtattcttgatgcaatttgagttttgtaatttatttaggtttatgtatgttttcgaag

SEQ ID NO: 101370 - DNA, 502 bp, Arabidopsis thaliana columbia
caagaggaataaattcacacgcgaacttcgatagttgttaattttcgttgaacacaagtgacgaatttgagagagaaaaaaatagaaaatcagagataaagaatttgagtttcttggaattaaaggatcgattttgttgaagtgaaattgaaattgattgtgaaaagagaaagagactgatggtagcagaagcagaggttgtgtttcaacagagtttaccggcggttctggagattgagttgtttgacggagtttcctccgccgttaaatctcccgtttcttctccgaaattgggttttactcagtcaacggcgtcggtttccggaagtttaacgacttctcctgtgcctgcctgcgttcctgtgggtgattgcgatcctagtgtcttggatttatattccgaccatccggtctggaagctttgctgatattgggccaaagagaaacatggtagatgaacacattctcatagacgatttattttcttaagttgggttccttt

SEQ ID NO: 101371 - DNA, 917 bp, Arabidopsis thaliana columbia
ctacaatttccctgaagaactctttgcagatgctggtatacttgctattgagcatgctgactttgagggaatagagcgtcttggtttggttactggtggtgaaattgcttcgacctttgacaacccagagtctgttaagcttgggcattgcaagctcatcgaagagatcatgattggtgaagacaagttgatccatttctctggctgtgaaatgggccaggcttgctcaattgtcctaagaggggccagtcaccatgtcctagatgaggctgaaagatcactccatgatgccttatgtgtactctctcaaacagtgaatgacactagagttttgcttggaggtggatggccagagatggtgatggcaaaggaagtagatgagcttgcaaggaaaactgctggcaaaaaatctcatgccattgaagctttctcacgtgctctagttgctataccgacaacaatcgctgacaacgctggtttagacagtgccgaattggttgctcagcttcgtgcagagcaccacactgaagggtgtaacgctgggatcgacgtcatcactggagctgtaggagatatggaagagagaggaatctatgaagcattcaaagtgaagcaagcggttctgctttcagccacagaagcatctgagatgatattgcgagtggatgaaatcattacatgtgctcctaggaggagagaagacaggatgtgaaaaacccaacacaaacacatgaacgtggtgggagcctcgagatttcatgattgtgttttcgatttggatcagaatacaacctttttaatctgtttaatgttttgctcctccttagaactcatctttttgttttgtttccttttaatcttgttttgagtttgaatttagacgtttgaaaaaagtgttagctccaaagtttttaatt

SEQ ID NO: 101372 - DNA, 545 bp, Arabidopsis thaliana columbia
  unsure (1)..(545): unsure at all n locations
aggaagncaanttnttttgatcatttttccaaaaatttgnaaagnaggaaancttttaaatatgggaaaggttgattttttaatattttaaaacaacgagaacaagaaccggtccagggggaaaaggcaggaagagaattaaacaactagactaagaaacttccttgaatcacaagaaaagtaaaaaccctcaaaaatctctgagggaaagcaacaaacgataaaagataaaagctggttcttgttctcattcttctccttcttcagttggaaggagggaagaaaatggctgatgaagtcctcgtggatcggaaggacttctccacctccggagccaccttaaacgctgcctgcaaaacctcaggggacaaagacttccacaccgatgtattcccggccaaatgtgtgaagatcggatcaggagtggtgacaatggagaaccaagacatgccatcagcatcagcaatcttagaaaccacaaagaaccttggaacaatgaagagagaaccagctttgatatgggtctcaagaactcttttcccatt

SEQ ID NO: 101373 - DNA, 575 bp, Arabidopsis thaliana columbia
atgttcttcttcctcttccgattcatagttttttttttttccggtaacttgtcatcaattagatctcgtccgaagttgaatctttagttcgcgagcttttggacaacttcgaggtcttagctttgcaatgaaattgtacgaacacgatggagttgatttagaagatgggaagacagtaaaatccggaggagataaaccaattccaagaaagatacataaccgggctttgttatccggtttagcttattgcatttcttcatgcagtatgatacttgtcaacaagtttgtcctctccagctacaacttcaatgctgggatcttcctaatgttataccagaactttgtctcggtgatcattgtggttggtttgagtttaatgggtctaataactactgaaccacttactttgaggttgatgaaggtctggtttccagtgaatgtcatctttgttggtatgcttatcactagcatgtttagtttgaaatacatcaatgtagcaatggtcactgtcctgaagaatgtcactaatgtgataactgcagttggtgagatgtatctgttcacaagcaacatga

SEQ ID NO: 101374 - DNA, 954 bp, Arabidopsis thaliana columbia
ctcatctttccattttcaagaagacttttaaatctgtctctctctctctctttgtaaatatacatatatagataagctcacatatatggcgactgaaacatcttctttgaagctcttcggtataaacctacttgaaacgacgtcggttcaaaaccagtcatcggaaccaagacccggatccggatcaggatccgagtcacgtaagtacgagtgtcaatactgttgtagagagtttgctaactctcaagctcttggtggtcaccaaaacgctcacaagaaagagcgtcagcttcttaaacgtgcacagatgttagctactcgtggtttgccacgtcatcataattttcaccctcataccaatccgcttctctccgccttcgcgccgctgcctcacctcctctctcagccgcatcctccgccgcatatgatgctctctccttcttcttcgagttctaagtggctttacggtgaacacatgtcgtcacaaaacgccgttgggtactttcatggtggaaggggactttacggaggtggcatggagtctatggccggagaagtaaagactcatggtggttctttgccggagatgaggaggttcgccggagatagtgatcggagtagcggaattaagttagagaatggtattgggctggacctccatttaagccttgggccatgaatgattataattttggcccagtaaagatctgtaaaatactactaggatttcatttttatagagtatgtttttttccttaatttcggttgaaattggtgaatatttttatctcttacttaccaaatctcatatttctatgtatgcgtttgctttcactttttttttttatataattcttcttgtaaaaaatgcaatgtgagttttcttccctatcattctgtcaagctttggttcaattatttagtaatcgaataatataggaatagtgttgaaag

SEQ ID NO: 101375 - DNA, 645 bp, Arabidopsis thaliana columbia
  unsure (1)..(645): unsure at all n locations
accacgcgtccgtttttttctttctgagaaaaatgaaccgcaagaatccgagtggagtggtgccattcgctgttctccaatccaaatacgccaaatcttcccaaaaataaataaacctttccttttctttctcttcactctgttcccatatctacagtgactcttctctctctgtatattactcttccttcactatctctctctctttactgggtcttcttcagcttctgagtcttctcctctctctctatctctcaagtgggctttgctttgctgtttttgtcttccttcgacgactcacttttgcagattctcataaattcttcaaagctttgagtcttttttcagattcgagggtcggttttatatatgcttcaaatctcttacccaaatcaggtatggagactctgcatccattctctcacctacctatctctgaccaccggttcgttgttcaagagatggtgagcttacacagctcgagtagcggtagctggactaaagaagagaacaagatgttcgaacgagctcttgcggtatacgctggaagactcggcctgatccgctgggtttaaaagttcgcttccattgatccctgggaagacctgttttttaatggtaatgaaggcaatttaggnaagcttt

SEQ ID NO: 101376 - DNA, 473 bp, Arabidopsis thaliana columbia
ctctatttgtcctaacgacctgattgcattagacaggaacgaaaaggaatgcaaaagatgagagtttcggggtttagagttcttctcttggtttcttgtttcttcggcaaatccaaaggagctgttgttcctgcactcatcatgtttggcgactccattgttgacgttggcaacaacaataacttactcagcattgtcaaatccaactttcttccttacggtagagacttcatcgaccaaagacccaccggaagattctgcaacggaaaactcgctgtagatttctcagccgagtaccttggtttctcttcatacccacctgcattcctaagccgggaagcaagcaacgagaatatcctgatcggtgccaactttgcatcagcttcttcaggatactatgatgccacatctgttccatttgtaaaggagacaacacagtcaaacatcattacacacatacccaagaaatgatc

SEQ ID NO: 101377 - DNA, 658 bp, Arabidopsis thaliana columbia
  unsure (1)..(658): unsure at all n locations
nnnnnnnnnnnnnnnnnnnnnnnnnnnnnnnnnnnnnnnnnnnnnnnnnnnnnnnnnnnnnnnnctttttttttttttttagaagaaaccttaaaccctattaagttataagtagtcacacatttataactgtacaaaagcagagtggaacccgaatgattatcacaagcaaaatatggacgatacaaagatcggttttcttttctttatttttcagatattagggaaattaactcaaatctcatcaggtaatttaaaactctgtgtaccaaaaatctgaagagaagagttctgaagaaagacggcgactccacatttgctgctgttgaatccatcccagagcgtaaaatgagcagtccccgagactggcttcttcggtgctacatctttcacagtgcacatcttttccatctttcttacaacgtaatcattcgacaacattcttccttcgttctctcctcttgcacagtcgttcacaagcccggtttcgtatattgccaccattatgtccattccgtctccgtctactttcattctcaaagctccggtgagtgatacttgcagtgtctctgaggttggtctctggaaagtcgcccggaaggctggagaaggaaacctaggcgcttcggagatagatttgagcagcgtctcctcttcg

SEQ ID NO: 101378 - DNA, 1132 bp, Arabidopsis thaliana columbia
ttaggtgacactatagaagagtctatgacgtcgcatgcacgcgtacgtaagctcggaattcggctcgagctcgagccgaggcggctcgagcggctcgagctttcataatctccaatcttcttcggattcgacgaatccgtcatcgccgacggaatcgtggccgtgtaatattaacagatggggaagaagagaaaatcaacagccacaagcctcgatgaggtagatcggactgtttacgcttcttttcgcaccgccgctaactctttatctcagctttatactcagtctatgaatcatcagaagttatcttttcaagccggtgaacgccatggtttggaaaaactgtaccaatggatatggagacaacaagaaggagggtcaagagtgacacctatggatattgtcaattatattcagaacgagctcggaatgctgcatagaccagcctccaatttccccaacgagcgccaccaccgcaacccaccaatgcatgtcacgaatcccgggcttcatgaccactttaggcacctctttcccaacagctgttccagtggttaggtccgagcaatgtgagaaccaggccaagaactcggttttctcaaacgcactttcaagcccaatacggcgtagtcttcagaactaccaaattccgcagggaggctacacatccggcggaaccaccagaagcagtgaagtgaacaggggatctaactctccaggttctattgattcttcaatggacatgcatgcagaataagaagtgtgatcgtaaacacaactcttgtttaatgatgtttgatctatatacaaaaaccggtttgattcctcataatgtatcaattgattcttatcttggaggtttgtttgttggtaattttgttagagtttctaaaaggtcacatgtaaatcattgtgtgtctgattattattatcacttgtttaactcttttaacttttcatcttttaaactacttgatgaccaagagttttcacatctacttgaatactcttttaaccctaaaataaactcaatggattcttgtaaaaaaaaaaaaaaagaacggccgctctagaggatccaagcttacgtacgcgtgcatgcgacgtcaaagctcttctataagttcaccta

SEQ ID NO: 101379 - DNA, 694 bp, Arabidopsis thaliana columbia
  unsure (1)..(694): unsure at all n locations
acgactcactatttggaaagctggtccgcctgcaggtaccggtccggaattccccggctcgtcctttcataatctccaatcttcttcggattcgacgaatccgtcatcgccgacggaatcgtggccgtgtaatattaacagatggggaagaagagaaaatcaacagccacaagcctcgatgaggtagatcggactgtttacgcttcttttcgcaccgccgctaactctttatctcagctttatactcagtctatgaatcatcagaagttatcttttcaagccggtgaacgccatggtttggaaaaactgtaccaatggatatggagacaacaagaaggagggtcaagagtgacacctatggatattgtcaattatattcagaacgagctcgaatgctgcatagacgagcctccaatatccccaagagcgccaccaccgcaaccaacaatgcatgtcacgaatcccgggctcatgaccacttcaggcacctctttcccaacagctgtttccagtggttaggtccgagcagtttgagaaccaggccaagaacctcggttttttcaaacggactttcaagcccaatacggggtggttttaagaacttccaaatttccgcagggagggttacacatccggggggccccccacganttagnaacagggggtttcttcccggttttttttttattgttgc

SEQ ID NO: 101380 - DNA, 544 bp, Arabidopsis thaliana columbia
  unsure (1)..(544): unsure at all n locations
nnnnnnnnnnnnnnnnnnnnnnnnnnnnnnnnnnnnnnnnnnnnnnnnnnnnnnnnnnnnnnnnnnnnnnnnnnnnnnnnnnnnnnnnnnnnnnnnnnnnccttttttttttttttttgaataaattaatttttttaatttttgtgaatccaatacatgacaaagaattgtatacctcacctataatcaactaacatattaaaacaaaaatcctacaaggacagacaaagacacaagcgaagcttatctcatcctcatcttgtcgcccatatcgagtatgaaccaagccacagccaaacccatcacgactctccacaaattcaaaatcttaattgtagttgcccttgaagtatagataatatcaggtaaataaccttgcataccgacattgtaaaccggtttaccatccggataaaaaagtccataattcctctcagaaaccggacccggtttaagattctcattaaacagagcaaacacataaacatcaataggaacagattgcttcgccggagttcctttcctctgctgaatcaacttcaac

SEQ ID NO: 101381 - DNA, 538 bp, Arabidopsis thaliana columbia
  unsure (1)..(538): unsure at all n locations
cgnnnnnnnnnnnnnnnnnnnnnnnnnnnnnnnnnnnnnnnnnnnnnnnnnnnnnnnnnnnnnnnnnnnnnnnnnnnnnnnnnnnnnnnnnnnnnnnccttttttttttttttttaaacaaaagaatctttcataaatcatgtcacattaaagcaaaagctatacacaagagaaatgtctctctatctttctgaggaatttttcagacaatctcctaagtctctactttaacgacccaaaatctaaaagacgcaaacaaaatcgatatctgacagaaacccaaccttccaataaagaaagaaataacgaataataatgtgttcccaaatgccaaaaatctatacaagaccaaaaaataaacttacattataatgattcttgtatcactctgcttgtgtaccggcttgagaggtttcttcaggttgatcagacttggagttatttgcaacaacattaggcggagaccattgatcagggaccatgaggaagtaagttgtcattgcttttctgaatcttctcttatattgctttggagaga

SEQ ID NO: 101382 - DNA, 426 bp, Arabidopsis thaliana columbia
cttcttcttcttctccgttcgtgctctggactcgctcgaaatcgatccgatgataatttatgcagctcgaaacttaatttagaatcatacctttttctggatttggctgacgaatccgttttcaattgcacgagttgcttcgccaggtttatcaacttaagaatgtctaattatcaaggggatgatgctgagtacatggaagatgtggatgatgaaatggatgaggatgatttagatgaggattttcgtggggatgatatggctgcctctgattccgatgtcgatgagtttgactactctaataatagaatagctgacacttcagctgaccaagcccgggaagggaaagacatccaggggattccttgggacaggcttagtattacgagagagacatacagacaaactagactagaacagtataaa

SEQ ID NO: 101383 - DNA, 513 bp, Arabidopsis thaliana columbia
  unsure (1)..(513): unsure at all n locations
nnnnnnnnnnnnnnnnnnnnnnnnnnnnnnnnnnnnnnnnnnnnnnnnnnnnnnnnnnnnnnnnnnnnnnnnnnnnnnnnnnnnnnnnnnnnnnnnnnnnnnnnnnnnnnnnnnnnnnnccagcaaaaacccatcttcagaagaaaataaggataaagccttgtaatgtctagacctttagttttatgaaacgttaaagatctttaatcacatcaactggagaattgcctttggcaccaacaaagttcggcacatacttactctctgatgtgacaccttccactgggtaactcccatgataacctttaaactccaatcctcctccatcctaaatctctccgtccacaaaactcaaccactcgcgtttgatctccaaaaacctcttcccagcttcgttaacctcaccatctgcattcaccaaatgtgagtgttctctgctcataaacagctcccagaatccccaaagcatcactccttcaactgccggatgagcaaaggcttcccatagcatca

SEQ ID NO: 101384 - DNA, 703 bp, Arabidopsis thaliana columbia
  unsure (1)..(703): unsure at all n locations
cgattgtnnnnnnnnacaactcgacgtcgatgcacgcgtacgtaagcttggatcctctagagcggccgccctttttttttttctttttttttaaaatttaaaaacatattttcaaatcaatgtaaaatagaaacgttgaagagagaaacaactgaagaatgggggcaaagcgccagaaacttgtaaaaacaagtaaaaggattggcaaaagtaagaaagcacaccactttaaaactaacattaagctttggatgatgatgattcttcttcgtcatcttcatcaatgtcccaacttaaatcttcatcttcctctgcagcactcagacgtttacgcagctcagctctgtttggactaccaccagaccgactcgtttccttaccatctatgctactcatatcctcgatctcgtcccatcccaaatcctcttcagatggttgttgagttgatgaagaagcagccacatctggtttagctgagtcttgggatggagcagcctcatcagattttggtttgacagaatcttggattggagcctcatcagatgttggtttgacagaatcttggattggagcctcatcagacgcaggaggagcagcatcaacaaatgatttttcttctggaacttcctcactatcagtctccttcttttcctcagaatctttatctgtcttcaaaccaacattgctcacttcagtcactgaa

SEQ ID NO: 101385 - DNA, 509 bp, Arabidopsis thaliana columbia
  unsure (1)..(509): unsure at all n locations
nnnnnnnnnnnnnnnnnnnnnnnnnnnnnnnnnnnnnnnnnnnnnnnnnnnnnnnnnnnnnnnnnnnnnnnnncttttttttttttttttgaacaatttgcatcatgtgtatatactttggccgttgagatacgcttagagactagagttagtgtaagatcaaacgttaatagtgtccgtaatggtacgatggactcttagccgatgagctaataggatatctttcaaacactactaacgcctctttcatggtcggtctcttttgtggaatttgagatgcacaactatatcccaatttgaaaaggccaagtaaaaagtcctctttgccttccaattcggagcggatcgctacatcagccattattagcgcccggttcccgtcctctacggtcagcccatttcctacccccacctcgtctatcgacactatttttcccgtgagcagctcgaggaggatcactccaaacccaaacacatcccatttcgggtttggtttgagattgcggagc

SEQ ID NO: 101386 - DNA, 532 bp, Arabidopsis thaliana columbia
  unsure (1)..(532): unsure at all n locations
nnnnnnnnnnnnnnnnnnnnnnnnnnnnnnnnnnnnnnnnnnnnnnnnnnnnnnnnnnnnnnnnnnnnnnnnnnnnnnnnnnnnnnnnnnnnnnnnnnnnnaaaaaaaccactgttctttatgttgctgcctaattcactgctagtgagtatagtctattctactctatagccaggttgactttggtggtacaaggagaagggaccacagagaaatccaaggtcggtttactggtatagagaatggggaaaaaaaaaagatcctaatcattccaaaacctggcataccaaacttaatatagcctggctttgacccacattagcagtttagtatgcttccaaaaaaagtttcatccagactggtgccggcctcttacctcgcccacgtcccgaagcgaccccgccctctacctctaccacgaccatggaagccccttccccgttcagaagactgcccgctgctaaacccttgagattgtggttccattggggactgcaaatcacttggtgactgcgggatttgtgactgtagt

SEQ ID NO: 101387 - DNA, 721 bp, Arabidopsis thaliana columbia
  unsure (1)..(721): unsure at all n locations
nnnnnnnnnnnnnnnnnnnnnnnnnnnnnnnnnnnnnnnnnnnnnnnnnnnnnnnnnnnnnnnnnnnnnnnnnncggacgcgccacgcgtctactctctttcatttcctcttttcgttgacttactaaagtactcttgtttcaatcttcattctagagagattctgtttcatggatgctattttgccagtacccgttgatgggttcagattcgacaccggttctggatcttgttgcaaaccgaggaacaatcttgaatctgggacgaccaatcgtttcacttgtttcaacgaatctgaatctcagagcaacccttctccgaccgagtctaaggtatgttcagattaccttcctgtctttaagtacatcaatgacatgttgatggaagaagatcttgaaggtcagtcttgtatgttggaagacagtttggctttacaagccgcagagagatctttcttcgaagtgcttcaagatcaaactccaatctcgggtgatctagaggatggttctcttggaaacttcagttctataacgagtttgcatcaacctgaagtttcagaggagtcaaccagaaggtatcgacatagggatgatgatgaagatgatgatcttgagagtggaaggaaatcgaagctccccgcgatttctccggtggatgacctactagagaagtttgaggaagtgttgttggtaagtcaaaagaatgatcagggagaagcaac

SEQ ID NO: 101388 - DNA, 517 bp, Arabidopsis thaliana columbia
  unsure (1)..(517): unsure at all n locations
cagctacnnnnnnnnnnnnnnnnnnnnnnnnnnnnnnnnnnnnnnnnnnnnnnnnnnnnnnnnnnnnnnnnnccacgcgtccgcggacgcgtgggctagttgctgtcacacttgtgctttatgcaaaagggaaatacaaggatggaaattttagccctgatcaatcctatctctatcttaccatcatctatacaatatcatacactgtagctctgtacgcgctggtcctcttttatgtggcatgcaaagatctgcttcagccattcaatccagtcccaaaatttgtgattataaagtctgttgtctttctaacctattggcagggtgttctagttttcctttttgctaaatctggatttataagggatgaagaagaactagccctcttccaaaattttataatatgtgtggaaatgcttattgctgcagctgctcatttctatgcatttccgtacaaggaatatgcnagagcccatgttggaggagctcgcagtttctcaggaagtcttgcacatgc

SEQ ID NO: 101389 - DNA, 396 bp, Arabidopsis thaliana columbia
  unsure (1)..(396): unsure at all n locations
nnnnnnnnnnnnnnnnnnnnnnnnnnnnnnnnnnnnnnnnnnnnnnnnnnnnnnnnnnnnnnnnnnnnnnnnnnnnnnnnnnnnnnnnnnnnnnnnnnnnnnnnnnnnnnnnnnnnnnnaagaaacgggattttaagttaaagcccaaaagattagacttttttacccattttttatagatgccccgggttaagcttctaaacaaggctatttgggaagggaattgggagaaaaaatttcctccatagcgacttggaccaccaacatttcattcacaagaaccctttggtgaatttctcagatcagaaagaggcatgaagtcagcgtttccccacccgattgtttggggactggaaccagtatcaaggggcctttccaaaacgagattggatgggg

SEQ ID NO: 101390 - DNA, 657 bp, Arabidopsis thaliana columbia
  unsure (1)..(657): unsure at all n locations
ggaaggctggcccgcctgcaggtcccggtccggaattcccggttcgacccacgcgtccgcttttctctcttttttctcagtcttcaaagagtttctttgatacctgccattgattggggttactaagaaactctttgaagactgagaaaaacgagagaaactaggaagacttgtgatgtttggatcgatcctggctcacaaggatttctagctatatgcttaacacatgcaagtcgaacgttgttctcggggagctaggcagaaggaaaagaggctcctagctcaaggtagcttgtctcgcccaggaggcgggaagagttgagaacaaagtggcgaacgggtgcgtaaggcgtgggaatctgccgaacagttcgggccaaatcctgaagaaagctaaaaagcgctgtttgatgagcctgcgtagtattaggtagttggttaggtaaaggctgaccaagccaatgatgcttagctggtcttttcggatgatcagccacactgggactgagacacggcccggacctcccacggggggcagcagctggggaatctttgccaatggggcgaaaccgattcccagcaatatccgcgtggnttaagaaaggaattcccgttttnaaantcttttngtcgggtcgggttantaaaagnntttgg

SEQ ID NO: 101391 - DNA, 576 bp, Arabidopsis thaliana columbia
ggtactaggccaaattttggagacgctctttctctttcatagagagagagtgagaaagttctgatacggcggcttctcactgtcatctagctgtaccactgacgataaatctctctcttcctctaaatcggttaaaaaattcattcccttcttggattgctctgttttcttcggcggttcttgcagctccattgattctctgtttcctctgctacagttaacttatacttgcagattctcgcgttgatagtaaaaagatggtgaagcttttggagctgttcataacttcatcaaaaccagtcgttgagattctgttgataacatcagtcggattttatatggctctcgatggagtcaatcttcttggtcatgatgctcgtaaatatctgaacaacattgtcttctatgtgtttagtccttcgcttattggaagccgtttagctgatagtgttacatacgaaagcttggtcaaaatgtggttcatgccggtgaatgttctgcttacattcatcattggttcattacttggctggattgttattgtcatcactaagcctccttcacaccttcgtggtc

SEQ ID NO: 101392 - DNA, 503 bp, Arabidopsis thaliana columbia
aattttggagacgctctttctctttcatagagagagagtgagaaagttctgatacggcggcttctcactgtcatctagctgtaccactgacgataaatctctctcttcctctaaatcgttaacttatacttgcagattctcgcgttgatagtaaaaagatggtgaagcttttggagctgttcataacttcatcaaaaccagtcgttgagattctgttgataacatcagtcggattttatatggctctcgatggagtcaatcttcttggtcatgatgctcgtaaatatctgaacaacattgtcttctatgtgtttagtccttcgcttattggaagccgtttagctgatagtgttacatacgaaagcttggtcaaaatgtggctcatgccggtgaatgttctgcttacattcatcattggtcaaacttggctggattgttattgccatcactaagcctccttcacaccttcgtggtctcattcttgggtgttgtgctgctgggaa

SEQ ID NO: 101393 - DNA, 1017 bp, Arabidopsis thaliana columbia
tctcaaactcactctccctgatctctctcttccatggacgaaaccaacggacgaagagaaactcacgatttcatgaacgtcaacgttgaatccttctctcagcttcctttcatccgccgtactcctcccaaagaaaaagccgccattattcgtctcttcggccaagagctcgtcggtgataactccgacaacttatccgcagaaccttctgatcatcaaaccactaccaagaacgatgagagctctgagaatatcaaggacaaagacaaagaaaaagataaggacaaagacaaagataacagcaacaacaggagattcgagtgtcactactgcttcagaaacttcccaacttctcaagccctaggtggacatcaaaacgctcacaaacgtgaacgtcaacacgccaaacgcggttccatgacatcataccttcatcatcatcagcctcatgaccctcaccacatctacggcttcctcaacaaccaccaccaccgtcactatccgtcttggacgacggaagctagatcatactacggcggaggggacatcaaacgccgtcgtactactcaaggaatactctttgctcctccttcttctaacccaccgacaatcaacggaagtcctttaggtttgtgcgtgtaccgccttccacgtcaacaaatactattcaaggcgtttactcatcttcaccagcttcagcgtttaggtcgcatgagcaagagactaataaggagcctaataactggccgtacagattgatgaaacccaatgtgcaagatcatgtgagtctcgatcttcatctctgacttcttttattttatttttttatcatccatcattgctgtgatatatgagactcgctgatcggtgaagccaattcttttgagagtgttggagactgaaaaaaagaaaaagaaaacgagaaccggtttggtgtgtagatcatcttgaacctttttgaggttttcacattctgagtttatattaataaagggaataatattttggttaattagt

SEQ ID NO: 101394 - DNA, 813 bp, Arabidopsis thaliana columbia
  unsure (1)..(813): unsure at all n locations
nnnnnnnnnnnnnnnnnnnnnnnnnnnnnnnnnnnnnnnnnnnnnnnnnnnnnnnnnnnnnnnnnnnnnnnnnnnnnnnnnnnnnnnnnnnnnnnnnnnnnnnnnnnnnnnnnnnnnnnnnnnnnnncccttaattcctatgattattggaatattaagttaccactgtaatggaaaatgcataaaatgtaatctaaattgtctttttaacacagggaagaagctaccttcgtacttgaaatcgaattcgagcggttttgcatcgttttcaaatcgagatagagctaaaaaggtaacacttccctaagaatatcatttttacaaagccctttaaacaattttttcatatagtatcatcaaatcaaaatgcttgtcccaatatgaagatctgtctttatcatgaaagagtcacaaataggctctctcatcatactattttcaacatcgccgaatgaaatcagtggacgacggttgaggttgtacctcgtttgtgttcgggtcaaagccacgcccacgacgcttgttgatcaactccatgagcgatcggtgtagcacctgtgttctcgtgtccaccagcgatctcattttctgttgtagccttactcgtctccgttgttgctgatttttgatcatcatcaatggcaggtgagtagtggtatgttgaagnattcaagcaacctgttagagnttctatttnccatcatccatatctggggtcacatcggttactagaatcgncaattgttctctctaacctntnnaggagntcnttagaggagnagagtgggaaaggcgggtnttcccnnttttttt

SEQ ID NO: 101395 - DNA, 587 bp, Arabidopsis thaliana columbia
  unsure (1)..(587): unsure at all n locations
gtgacactatagaagaagctatttgacgtcgcatggcacgccgtaccgtaaagcttgggatccctctagagcgcgcgccctttttttttttttttacttcgttatggtctctttaacacagggaagaagctaccttcgtacttgaaatcgaattcgagcggttttgcatcgctttcaaatcgagatagagctaaaaaggtaacacttccctaagaatatcatatatacaaagcactctaaacaattatttcatatagtatcatcaaatcaaaatgctagtaccaatatgaagatctgtctttatcatgaaagagtcacaaataggctctctcatcatactattttcaacatcgtcgaatgaaatcagtggacgacggttgaggttgtagctcgtttgtgttcgggtcaaagccacgcccacgacgcttgttgatcaactccatgagcgatcggtgtagcacctgtgttctcgtgtccaccagcgatctcattttctggtgtagccttactcgtctccgttggtgccgatttgggctccacaatggcagggggtaagggntnttgnaaatcngcacccgntanagntc

SEQ ID NO: 101396 - DNA, 511 bp, Arabidopsis thaliana columbia
aaataaatgaaataatacaaagggatctttatgtaaaggcgtcaccaattagtggaaataatggagcaagccactacactcttcatattgctttccactctcctcctcgccgtctccgttgagtctcctcagccaccgctatttcccgatgaagctctccccactaaatctggctacctcccggttaaacccgcacccggctcgtccatgttctatgccttctacgaagcccaagagccaaccacacctcttcctgacactccgctcctcgtttggctccaaggtgggccaggctgctcttcaatgattggcaacttttacgagctcggtccctggcgtgtagtttcacgcgccacagacctcgagcgcaaccccggcgcatggaaccgtctattcggactactttttgtggataacccaataggagtcggattcagcatcgcagcctcacaacatgacatacccacaaatcagagacaggtcgctgagcatctttacgccgctctcgtgg

SEQ ID NO: 101397 - DNA, 516 bp, Arabidopsis thaliana columbia
  unsure (1)..(516): unsure at all n locations
cnnnnnnnnnnnnnnnnnnnnnnnnnnnnnnnnnnnnnnnnnnnnnnnnnnnnnnnnnnnnnnnnnnnnnnccacgcgtccggagagcttctcacagtgaagcaaacaatggagtcttttcggcgattctccttgctatccttcattgccctacttgcctacttcgctttcctcgcttctgctgaacatcacgtccatcaattcgtgatcacaccgacaccagtgaagaggctgtgcagaactcaccaaagcatcactgtgaatggtcagtaccctggtccaacgcttgtggtcaggaacggtgactctctcgcaatcactgtcatcaacagagcccgttacaacattagtattcattggcatggaatcagacagctgcggaatccgtgggccgatggtccagagtatataacacaatgtccgatccgtccaggacaaacctacacttacagattcaaaatcgaggatcaagagggtacgctttggtggcacgctcatagccgctggctcagagcc

SEQ ID NO: 101398 - DNA, 587 bp, Arabidopsis thaliana columbia
  unsure (1)..(587): unsure at all n locations
aatgtnnnnnnnnnnnnnnnnnnnnnnnnnnnnnnnnnnnnnnnnnnnnnnnnnnnnnnnnnnnnnnnnnnnnnnnnntgctttttttttttttttcaaaatcaaaaccacacttttcttcgctaaaaaaaatctacacaataatcaactaagagttacccgaacctaatcaaagaacacaaaaaaaaaaaaaaaaagactgtgtaagaaaaataaaagttacaaaaataataagttgtcttcatcttccaatcttttatttatcttttctttgtctcgttgccccatgttttgctcctccttatctgcgtcccattgtctcactcaaataatctcccaatattctatatataaaaaatatgggagaagaaagggtttcttggcttgtaatgttggcatcagcattccttaaatcatgctactccctagttgtacttacatactctaagctttttttagtttgttccatgagacactctctagtttccctttcttccttctccctctacaattgactctttcttggggggttttaataacccgaaggttttancccgggtgggttgtgganaccacgggnccgnagg

SEQ ID NO: 101399 - DNA, 539 bp, Arabidopsis thaliana columbia
  unsure (1)..(539): unsure at all n locations
gattgtnnnnnnnnnncactatagaagagtatgacgtcgcatgcacgcgtacgtaagcttggatcctctagagcggtcgcccttttttttttttttttgatcgaaatgattaatattgaatccaaaactttgtatacgatttccatatatatatatatacacacttatttacacatacacttagcaaaaagcttcactgaaacagaggagctctgttgtcaacaaatttcatctccttccctattatccttctcctttggtcctgtaggaccttcctcaccgtaaagctcaataggaaacagactctcaaaagaattcctcagaatcagtggaagtagatcaatgatcttattgatctcagctgctggatcatatactatcagttggtccccattctctcataaactgcagccagtacgggtctgaaacccctccttacgcctaaatactctgctgctacgattctgtacctttgactaggatccaccatatacttgcttttcgcaacatcgtttcttactccaatcccgagcttcgac

SEQ ID NO: 101400 - DNA, 551 bp, Arabidopsis thaliana columbia
  unsure (1)..(551): unsure at all n locations
ggattcttctctgaaaactcaggaacctcaagtagtggaaacttctccttctccggtagctcaggagcctcctcaagtagctgacaaacctgcgattgtcccttctccgatagctcaagagccagacaacgatgtcccggcgccgggaaacgagtttcctgagttcgccgccggttgtttctggggagtggagcttgctttccagagaatccctggcgtgaccgtgactgaggtcggttacactcatgggatctctcacaatccgtcttatgaagatgtctgtacgaacaccacgaaccatgcagaagttgtcaggggtcaatatgatcctaaagaatgcactttatgaggcacttcttggatttggttttggcccaggcataaccctaccacctttgaatcgtcagggggaacttttggggggcaatacccggccagggtattcttttncaacccggggcagggaacgtgcacgggggcttnttgggaaggggcggaaaaccttgggggtnagtttnaccttagttttccgnaanganttttcaaggttg

SEQ ID NO: 101401 - DNA, 743 bp, Arabidopsis thaliana columbia
aatactacttacattgaaatatgaatattcctatttagcgatgatttttacgtgttaatctctgactagcttctttgtagatataaacgagcttcccgaggtctcatcatcaaacaatacacttaacaatggattcttctctgaaaactcaggaacctcaagtagtggaaacttctccttctccggtagctcaggagcctcctcaagtagctgacaaacctgcgattgttccttctccgatagctcaagagccagacaacgatgttccggcgccgggaaacgagtttgctgagttcgccgccggttgtttctggggagtggagcttgctttccagagaatccctcggcgtgaccgtgactgaggtcggttacactcctgggggctctcacaatccgtcttatgaagatgtctgtacgaacaccacgaaccatgcagaagttgtcagggttcaatatgatcctaaagaatgcacttatgagacacttcttgatttgttttggtctagacataatcctaccaccttgaatcgtcagggagaacttttgggagcacaataccgatcaggtatatatttctacacaccggagcaagagaaactagcacgcgagtctctagagaaagagcagaaaaaactggaggataagattgtgactgagatcttaccggcaaagaaattctacaaagctgaagaataccatcagcagtaccttgtcaaaggtgggatgcatggaaacgctcaatc

SEQ ID NO: 101402 - DNA, 872 bp, Arabidopsis thaliana columbia
  unsure (1)..(872): unsure at all n locations
acgcctgcaggtaccggtccggaattcccgggtcgacccacgcgtccgggattcttctctgaaaactcaggaacctcaagtagtggaaacttctccttctccggtagctcaggagcctcctcaagtagctgacaaacctgcgattgttccttctccgatagctcaagagccagacaacgatgttccggcgcgcgggaaacgagtttgctgagttcgccgccgggtgtttctggggagtggagcttgctttccagagaatccctggcgtgaccgtgactgaggtcggttacactcatgggatctctcacaatccgtcttatgaagatgtctgtacgaacaccacgaaccatgcagaagttgtcagggttcaatatgatcctaaagaatgcacttatgagacacttcttgatttgttttggtctagacataatcctaccaccttgaatcgtcagggagaacttttgggagcacaataccgatcaggtatatatttctacacaccggagcaagagaaactagcacgcgagtctctagagaaagagcagaaaaaactggaggataagattgtgactgagatcttaccggcaaagaaattctacaaagctgaagaataccatcagcagtaccttgtcaaaggtgggatgcatggaaacgctcaatcacctgcaaagagctgcaaggaccctatccgctgctatggctaatcaaaagcctttgttcctcttctcccaaaacagaggattctcccagaggacctctttacctgttgcttttgttggtttgtgtgtgttccgtgtgtttataatgtancttgtcaatctnaatncatacattattaaaaggttntngggtccatcttcacccctttgntg

SEQ ID NO: 101403 - DNA, 604 bp, Arabidopsis thaliana columbia
tccgaaaagaaaaaaaggctttttaactgaaattgaaacacaagatgggatgctcttcatacgctggcagatctatcgctggtgatgcctggaactggcactggtactgggtcattaagtcaaggctgggggaaaaaaagctggggaagcttatgtttcagattttaaagggactgatccggcattcatgtctaaaagtagttctcttagaaacttcaaacagagaagatacggcagcaatgacctttgtaaccctgaactcgagagaaaaagtccaagtagttctttaatccaaaagagacggcagaaagcattaccagctaaagttcttaaagatgagcttgctgcaagctcacaagtcatagagccttgtaatagcacgggaatacgtgaggaagataagcctgttgggagaggtaaacggtccgcaggtattcgaaactcacatgaaaagaaatctgccaaatctcatgatcacacttcgtcaagtaacagcatagtagaagaagatgagtcagctccatcaaatgcagtcattaagtaacaagttaacttgccaactaaagttacgagcagaagaaagatagttactgagaaacctcta

SEQ ID NO: 101404 - DNA, 1585 bp, Arabidopsis thaliana columbia
  unsure (1)..(1585): unsure at all n locations
cggacgcgtgggtttcatctctagaaaagggcacaaaaaaccaaactttacgatttctcctcggcacgagctcgattctgtatgatctcttcgatctaatcgagtcttctaaacgttccgtgtagaatttcaaatctagggtttgctaaagcttgaacctttcttacccttttctctcgaagaggttttgattcctgggcatgaatttttccctaatcttgttaccttcgaagcataacaacaacgaaagatgtcagattcaatccaggaaagatacttagttggatacgcactcgcagccaagaaacagcatagtttcatccaaccttctttgatcgaacactcaaggcaacgaggcattgatctggtcaagcttgatccgacgaaatcgttgttggagcaagggaagcttgattgcataatccacaagctttacgatgtgtattggaaggagaatcttcatgagtttcgcgagaaatgtcctggtgttcctgtaatcgatttgcctgaggctatcgagcgattgcacaatagggtttcgatgcttgaggtgataactcaattgaggtttcctgtttcagatagcgagagatttggtgtcccggagcaagttgttgttatggattcgagcgtcttgagcggtggaggagctttaggggagcttaagtttccggtgattgctaagccgttggatgctgatgggagtgctaaatctcataagatgtttttgatttatgatcaagaagggatgaagattttgaaagctcctattgtgttgcaggagtttgtgaatcatggtggtgtgatctttaaggtctatgtggttggagatcatgtcaaatgtgtaaagagaagatctttacctgatatctctgaagagaagattgggacgtcgaaagggtctcttccgttttcgcagatatcgaatctgactgctcaagaggacaagaacattgagtatggtgaggataggagcttagagaaagtggaaatgcctccgttaagtttcttgacagatctagcaaaggccatgagggaatcaatgggactcaatctctttaacttcgacgtgattagggatgccaaagatgctaataggtaccttataattgatattaactactttcctggatatgctaagatgccctcttacgagcctgtgttgactgagttcttctgggacatggtcactaagaagaatcatgtctgagaaataatctgttggggagttagcaggaacattgttggggaggatttgtaccattgcaatgtgttgcaactgccattgcaattctggcctatggtgactagctgctttgctaattttcatttggattcttgaacttgtgctttttatatttttttagttgtttctcttttgtttacttccgagttttgcaaagccatgttcaaatgcataactgttgctactcttgaaaagcattgaatctctaaattcttggcaaaaaaaaaaaaaaaaaaaaaaaaaaaaaaaaaaaaaaaactcgagggggggcccggtacccaattcgccctatagtgagtcgtattacaattcactggccgnnnnnnnnnnnnnacaatc

SEQ ID NO: 101405 - DNA, 335 bp, Arabidopsis thaliana columbia
aggtgacactatagaagagctttgacgtcgcatgcacgcgtacgtaagctcggatcctgtatagcgcccgcccatgctcttttctttcattagtagacgacaaaagattcactattctcgtcagatgaacgacgatgctcacagccgctttgacgtgacctatactctacaactaagcgcgttacgtgtgcgatccataacagttcacaactgacactcgggctactactctcctgtaagaagcctgcaatgaactcaaacccacgtcggagatcacgattgatttctcctacccgtgacagggatgtgtaaatactgccgggaacattcacgga

SEQ ID NO: 101406 - DNA, 508 bp, Arabidopsis thaliana columbia
ggaatgctgcgccgcctgaaggtaccggtccggaattcccgggtcgacccacgcgtccgcagatccttaaatctccaaatttcctcctcagtcttatcattatagacaaaacccttttctttgtaaattttttcccaatctatggaagtgcctagtgaaaccacgaatttagccgatctccggcgaccattggtggttccggttgtctcggagcgtaaacctccggcagacgtcggactcggactagagagtgttttaacggagcgtagccttccgtaccggaggcgcgtgtacttaggggcatgcatagagatgaagctacttttccggttggcacttccggcgatacttgtctatttagtcaacagcggaatgggtatttccgctcggatcttcgccggacatctcggtaaaaatgagctcgccgccgcgtccatcggaaacagctgcttcagtctcgtctatggcctcatgttaggtatgggcagtgcagtcgaaacactatgtg

SEQ ID NO: 101407 - DNA, 555 bp, Arabidopsis thaliana columbia
agaaagatgaacatgcatcgtgataacattagatggttacaatatcctcaccaacttggaagtgacacaaattatacattactactagttagtactagtagatctgaatctctctctctttcttcttctctaatgccgtaaattgtaagctaactcttcccacatagtgcctcgattctcgcttttgctctctctctctttcctccgacaatgaataggaatctcagagaatctcttgccggtgggaggaatattccggcgatctctcagtttcgtagaggcaataacaacaacagcaacaacatctctcaaaatggcttctctagagattccgatgagaatctagatcttttctctaagatccgtcgctcatttcctttggcttcctccgacgaattacccgacgtttctgcaaaactcgggagactctcggtcggatccaaaatagctcccaaaggcaaagatgatctcttgtcttcagctgaaggaggaaaaaatgattatgattggcttcttacgcctcctggaacacctcttggaaacgactctcattca

SEQ ID NO: 101408 - DNA, 1171 bp, Arabidopsis thaliana columbia
atgattctccggcactaatcgactcattaagggaaagctcgtacgcctgcaggtaccggtccggaattcccgggtcgacccacgcgtccgtacggctgcgagaagacgacagaaggatacggctgcgagaagacgacagaagggtacggctgcgagaagacaacagaaggggacggctgcgagaagacgacagaaggggacggctgcgagaagacgacagaagggtacggctgctagaagacgacagaaggggatgattgtaagggagctcactggaggtatttactttggagagccaagaggcattacgatcaacgaaaatggcgaagaagtcggttttaatacagagatctacgctgctcacgagattgacagaattgctcgtgttgcattcgagactgctaggaaagggcgtggcaagctgtgttctgttgacaaagccaatgtcttggatgtatgttttgaattgtttttccactccactcttgtgtgtttttcgttatacaattatttttttgttttgtttcgtataggcatcaatattgtggaggaaaagagtaacagctttagcctctgaatatccagatgttgaactatcacatatgtatgtcgataatgctgcgatgcagcttgtccgtgacccgaaacagtttgacacaatcgtcaccaataacatttttggtgatatattgtctgatgaagcttcaatgatcactggtagcattgggatgcttccatctgctagtctcggtgaatcgggacctggactctttgaacctatacatggttcagcaccagatatagcctggacaagacaaggcaaacccattggccaccattctcagcgcggcgatgcttctgaagtatggacttggagaagaaaaggctgcaaagaggattgaagacgctgtcgtggatgctctgaacaaagggttcagaaccggagacatctactcccctggaaataaactggtgggatgcaaggaaatgggtgaggaggttctcaaatcagtggaatccaaagttccagctactgtttaagtttattgatgatttgaagcacttgaaaaagtttgtgtagcacttggttttacggtcacttatatgctaatccatgcaacattgtaccttttataataaataaattatttgggatcgattctgcaaaaaa

SEQ ID NO: 101409 - DNA, 1651 bp, Arabidopsis thaliana columbia
  unsure (1)..(1651): unsure at all n locations
nnnnnnnnnnnnnnnnnnnnnnnnnnnnnnnnnnnnnnnnnnnnnnnnnnnnnnnnnnnnnnnnnnnnnnnnnnnnnnnnnnnccacgcggtttcaaaatccgaaaaagaccaatcaatcctttctccctgaaatggcggcggctctgcagacgaatatccggacggtcaaggttccggctacgttcagagctgtaagtaaacagtcattggcaccctttagagtaagatgtgctgttgcttcccctggtaaaaaacgatacaccatcactctccttcccggagacggcatcggtccggaggttgtctccattgccaaaaatgtgcttcagcaagctggatctttggaaggagtggaatttaacttccgtgagatgcccattggaggagctgctttggatttggtcggagtgcccttgccggaggagactatctcagctgcaaaagaatcagatgcagtgcttcttggagccattggagggtacaaatgggataacaatgaaaaacatctgaggcctgagaaggggttacttcagattcgtgcagctctcaaagtctttgcaaatctgagacctgctacagtcctcccacagttagtggatgcttccaccttaaagagagaggtagcagaaggtgttgatctaatggttgtaagggagcttacaggaggtatttactttggagagccaaggggcataaagaccaatgaaaatggcgaggaagttgggtttaatactgaggtttatgctgctcacgagattgatagaattgctcgtgttgccttcgagactgctcggaaacggcgtggcaagctgtgttctgttgacaaagctaatgttttggaagcctcaatcttatggaggaaacgagtaacagcattagcctctgaatatcctgatgttgagctgtcacatatgtatgttgacaatgccgcgatgcagcttgttcgtgacccaaaacagtttgacaccatcgtcacaaacaacatttttggtgatatattatccgatgaagcttcaatgatcacaggaagcataggaatgctgccatctgctagtctcagtgattcgggacctggactctttgaacctatacatggttctgcacctgatattgctggacaggataaggcaaacccattggcaaccattctaagcgctgcaatgcttctgaaatacggacttggagaagaaaaggcagccaagagaattgaagacgcagtgttggttgctctgaacaacggattcagaactggagacatatactccgcgggaacaaaactggtgggctgcaaggagatgggagaggaggttctgaagtcagtggactcccaagttccagcttctgtttaatatttgtagaaactttgaagagttcatttccaacaacaaatgttgtaccttgtactcaaagagtctcggttttattagcgatttttataatgtgagattattagagggacttatttgatcgaactgaaacgttgatgtttttttctgagaaataaatatccttgtggagatnnnnnnnnnnnnnnnnnnnnnnnnnnnnnnnnnnnnnnnnnnnnnnnnnnnnnnnnnnnnnnnnnnnnnnnnnnnnnnnnnnnnnnnnnnnnnnnnnnnnnnnnnnnnnnnnnnnnnnnnnnnnnnnnn

SEQ ID NO: 101410 - DNA, 766 bp, Arabidopsis thaliana columbia
  unsure (1)..(766): unsure at all n locations
atgattctgccagcatcnnnnnnnnnnnnnnnnnnnnnnnnnnnnnnnnnnnnnnnnnnnnnnnnnnnnnnnnnnnnnnnnnccacgcgtccgaagagactctcgccgtctaatgggaagctgttggtctgatggctcttacgctggtggaggaatggtcggtgttggtggtggggctaattcctccgccgccactcctaacgacgccgttgactactatctcaagtctcgtggctacaatggcctcttttctcagatcgagttatctttctctgcttccaatttgcgagaccgggacgtgatttcaaagagtgatgcaatggtggttgtttatacaaaaggaagagatggaacacttgctgaattgtttcgtagtgaagttgttttgaattctttgaatcctaaatggattaagaattttactattggttatcagttcgagattgtgcaaacattgctgtttcgtgtctatgatattgacactcagtttcaaaattctaaggaggagctcgacgaacagcaatttctcggtgaggcaacatgtacattgtccgaggtggttaccaaatcaaataggacgattgctttagaacttatgcgtaaagaaggtgttgctgcacagactcagccacaacataatggaaagcttattgttcatgctgaggagtctttagcttctaagaccaatacagagattgtatttagggggttgaatttggaatcaaaggatactttctctaaaagtgacccgtttttggtgatatct

SEQ ID NO: 101411 - DNA, 517 bp, Arabidopsis thaliana columbia
  unsure (1)..(517): unsure at all n locations
atgatatgccnnnnnnnnnnnnnnnnnnnnnnnnnnnnnnnnnnnnnnnnnnnnnnnnnnnnnnnnnnnnnnnnnnnnnnccacgcgtccgctgaaacaaaaaaaaaagaagatcagacaaaataaatcattgtcaatcgacgattcagaagcttaatcgtctagaatcaacataattcttcgattgtacactctgattggctacttgttagatctaagaagaggccaagtgttatttcgtactaacattatcatggaggagacttctattgaagcagacactgcggagaagtcccaaaccatataaaaggcttcacgtcagcaagatcggtgaatgatattcgtgccgccatcgtctcagaataaactgactattttctaaaaaggttatcgccaagattagtatttacgaattagaattgataaggaaggtcactaggaaggagctggggaaagagattggggatttgggcagaaacctgggtattgctaataagccttggcttatgcttgggga

SEQ ID NO: 101412 - DNA, 479 bp, Arabidopsis thaliana columbia
ccacgcgtccgcaaagcctggatcaatcatcatcttcatcaatttccagattcagattccaaatctccgaagcttaacgaaaacaatggcggcagaacctaaccgctaagaatttccctgtcctctcttatgtcttggctcgtctcccttctttcaccgccaaatccccttcctcctccgttcctcccttcgacatcgaacaaccaccaccatcatcatcatcatcatcgattgagatcgtcactcagatgcctcacttaacacaaccagatgttctcgcttcaatgacaagtgcgatctctgacgtcgccgagactcgatctatccttcgaaccctaggacctagaccagatcacgaatcagtcgataaggctcgtgctaaactctcggaaatcgaatcgttcttatctgaatcgttcgaggatatcgcgttaaccgatgcggcggcgaaagatgagaagaggagacaagagatggat

SEQ ID NO: 101413 - DNA, 2094 bp, Arabidopsis thaliana columbia
ataattataatttatttgctctcggcaggatctatataatacacagaccagtctttgcgtggaatatagaccccacgcgtccggggtttatatcttttcatcggattttctttgtcgagcaagagccatgtcactgagacccaacgctaagacggaggttcgccggaaccgatacaaagttgcagtggatgcggaggaaggacgacggaggagagaagacaacatggttgagatccgtaaaagcaagcgtgaggagagtttgatgaagaagagacgtgaaggtatgcaagctcttcagggtttcccttcagcttccgccgcctccgtcgataagaagttggatagtctgaaggatatggtcgctggggtttggtccgatgaccctgccttgcagcttgagtccactactcagttcaggaagcttctctctattgagagaagtcctccaatcgaggaagtgataagtgctggtgttgttcctaggtttgttgagtttcttaagaaagaagattaccccgccattcagtttgaggcagcttgggctctaacaaacattgcatctggaacatcggatcacactaaggttgtaatcgatcacaatgctgttccaatctttgttcagcttcttgcttcccctagcgatgatgttcgtgaacaggctgtatgggctttgggtaacgttgctggtgattcaccacggtgccgtgatcttgttcttggatgtggggcactgcttccgctgctcaatcagcttaatgagcatgctaaattgtccatgcttcgaaatgccacttggaccttgtcaaacttctgtcgtggcaagcctcagcctcactttgaccaggtcaaacctgctcttcccgcccttgaacgactaattcattcagatgatgaagaagtcttgacagatgcctgttgggctctttcttacctctctgatgggaccaatgacaaaatccagactgtcatccaggccggtgttgtcccaaaacttgttgaacttctcctccatcattctccatctgtgctaattcctgctcttcgcactgttggaaatatagttactggagatgatatacaaacacagtgcgtgatcaatagtggtgctctaccttgtcttgccaacctgctcactcaaaaccataagaaaagcataaagaaggaagcttgctggacgatttcaaacatcacagcaggcaacaaagatcagatccagacggtagttgaggctaatttgatttccccgttggtgagtctgcttcaaaatgctgaatttgacattaagaaggaagctgcatgggcaatttcaaatgcaacttcaggtggttctcatgatcaaataaaatacctggtggagcaagggtgcataaaaccattatgcgatctcctggtttgcccagatccaagaatcataactgtctgccttgaaggattggaaaacattttgaaggtgggagaggcagagaagaacttgggtcacacaggagacatgaactattacgctcagctgattgatgatgcagaagggctagaaaagatcgagaaccttcagagccatgacaacaatgagatctatgagaaggctgttaaaattctggagacatactggcttgaagaggaagatgatgagacacagcaacctccaggtgttgatggttctcaggctgggttccagtttggagggaatcaagctccagtaccatccggaggattcaacttcagctgaaggaatggaattggaagcttgcaacttgagaatggtgaaaggtcagagtcagtcagagtctagtttcactgccatggttatactccaggtctggtctggtctggtctcagaggtttgtaccgggtggtcggtttaaaagtacagcgtctgagaaagtgtttggttcattgtccagggctatttttttgaaatgactggtacaccggtcgtgagtcgacctttgtgttgtttttaaattttggagggttataaaaacttacagtggagtcttttgtttttgtgttgacaacagtttgtatgtcggttaaaaaattgaaaccataaacccttttttggtcttcatcgtcatctaaagcctgaaaaaattt

SEQ ID NO: 101414 - DNA, 505 bp, Arabidopsis thaliana columbia
  unsure (1)..(505): unsure at all n locations
nnnnnnnnnnnnnnnnnnnnnnnnnnnnnnnnnnnnnnnnnnnnnnnnnnnnnnnnnnnnnnnnnnnnnnnnnnnnnnnnnnnnnnnnnnnnnnnnnnnnnnnnnnnnnnnnnnnnnnnnnnnnnnnnnnnnnaaaacaaaaaaccccgataatgatttcggctttttaggctcacaaatcattttttctcaaatccccccactggaacacactggaagccaacgatttttccctaccctaccttaactaaccaacacttcttacttgaaatgtggaagaaaaaaaaaaaactggctttgattatcacatcgcccgatcgggttttaaaatcaatcaaacccatttacctccccttattttttttagaaaccaagcccaaaaggattcatagagttttttatgggcatatattttctgttgcagcttcattatgaatcactgtttcaaacgcgtttatcccagtctgattgcaatcaccattttttggctcctctcccatttttc

SEQ ID NO: 101415 - DNA, 544 bp, Arabidopsis thaliana columbia
actacgactcactattttggaggctggaccgcctgcaggtaccggtccggaattcccgggtcgatccacgcgtgcgggacaggcaatcaaaggattcttgccttgaggttgtttaccggatgtactggctgtgttatcatatccacacatacaagaagacgcaggtgtctctggttaatggaatatcgatgggtggaggtgcagcattgatggtccctatgaagttttcagttgtgacagagaaaactgtttttgcgactccagaagcaagtttcgggtttcacactgattgcgggttctcctacatccattcacgtcttcctggtcatttaggagagttcttggctttaactggggcaagattgaacggcaaagaacttgtagcaattggaatggcaacacattttgtaccttctggtaaattgatggatctggaggcacggcttgtgagtttagactcaggagatgcggatgtagtccaatccacaattgaagagttctccgagaaagtcaaccttgacaaagacagcatccttaacaagca

SEQ ID NO: 101416 - DNA, 596 bp, Arabidopsis thaliana columbia
  unsure (1)..(596): unsure at all n locations
cgnnnnnnnnnnnnnnnnnnnnnnnnnnnnnnnnnnnnnnnnnnnnnnnnnnnnnnnnnnnnnnnnnnnnnnnccacgcgtacgcctctctctctctccgatctcaatagatcgctggagttgagagagcttcgggacttcgcgttccttgacgaagaagacgatacttcttctccttccatcacagcttcacgcaaatctttctgcagttacatcttcttaagattctgagttccgacttatttcgtggaaggattttgatatttcaacagtgattttaattttatactggaacttaagcatcacttaatcttccggctaaaatgatgtcgccgaagcaaatctccgacgatcgaggatcttcacatttcaggcatacaccattccagataatccaccttattgggaacttttttaggatatggtcagtatattcgatgtaccgatacttgaatcagacgggagcgcctgttgttctctttctcttctgctgtctggtgccttcatcaatcatcttcttgataattcaaaagccatggaaaggaagggctctttctaatcaacagattgtaccttctcttatcaatggagtcatc

SEQ ID NO: 101417 - DNA, 518 bp, Arabidopsis thaliana columbia
  unsure (1)..(518): unsure at all n locations
gcagtaccgttggnattncggctcgaccacgcgtccgacattttcaagactcaacgacccgctcaggctcctcttctcctgcagcttcaggggcagcgtcatcttcttttgcttcgggaattgaggcggtgtcgtcaggtttgtgatcatcagaaggaggagaagcgccaccagaagaggcggatcgacggtggttagcagcggcttgatggacgtgattgtaactgcctttctcgagaaagagctgattgaagtggactttacagtagaggacgccattaagagaagcgtaagaagagtgagtcaaaggacaaccactgtgtgtgcacctgaagcaagtctttgtgtatcccatcaatttgaggcaaattcagattgataaagaaaggggggaattaaaaaccaaggtggttggaatctttgaagacattaccagatgatcattgngcttctcggtctctcctgcctgaaaattcttgcttgtattgccagattctttgaaaagctgttcgaagtgt

SEQ ID NO: 101418 - DNA, 418 bp, Arabidopsis thaliana columbia
  unsure (1)..(418): unsure at all n locations
cttgaaacgtactggttggaagaggaagatgaaactttaccacctggtgatccctctgcacaaggcttccagtttggaggaggtaatgatgcagccgtaccaccaggtggattcaacttccagtgaaggagctgaacatgacgatttgaagagtcgaaggagcttaaagagtttgggggcactggttaaaaagggtatgattagagagtctggtcttctgtgtaaaagtcagatggggtgccttacttagtctggcctggtccggtcagatccagtggttggtgggtttgtgtcatggtataagcttgttgggtgtgannnnnnnnnnnnnnnnnnnnnnnnnnnnnnnnnnnnnnnnnnnnnnnnnnnnnnnnnnnnnnnnnnnnnnnnnnnnnnnnnnnnnnnnnnnnnnnnnnnn

SEQ ID NO: 101419 - DNA, 389 bp, Arabidopsis thaliana columbia
gttaacggatgcatgttgggctctctcttacctttccgatggcacttcctcatcagtcgaatgaatcaggcgttcaagggctgggaggaagtgttaacggatgcatgttgggctctctcttacctttccgatggcacaaatgacaaaatccaatctgtcattgaggcaggtgttgttcctcgactcgtcgagcttctccagcatcaatcaccatctgtgcttattcctgcccttcgtagtattggtaacattgtcactggagatgatctgcagacacagtgtgtaattagtcatggtgcacttcttagccttttgagccttctgactcacaatcataagaagagcatcaaaaaggaagcttgctggacaatctcaaatatcactgctgg

SEQ ID NO: 101420 - DNA, 2169 bp, Arabidopsis thaliana columbia
tataagaattgtcacacgtcttcatcacgccaaactcaaatgcgaagttttctactctaaactttcttaaaggaatataatatccttttcacaaaaccaagttttgccaaaaaaaaatgtattttattttaaattaatattagtcggtgcgaaaagactaatgaataaacaagtcaacttaagtaaattaatggtctctgtatcgaatcttaaaatttagattttaccaaaatgtttttgtaaaccaacgaaattcaatctttctctctgtgccttttttcctcttttctcgttcccctctacttcatttagggtttatcatcctctaccaatccgccgattctatacatacacttttcatatatatacatacatcgtctccactctcgttggctcatttttcattcaccgccacgaagcaagaggagattcgtattagccaccatgtctttgagacctaacgctaagactgaggttcgccggaaccgctacaaagtggcggtggatgctgaggaaggaagacggaggagagaggacaacatggtcgagatccgtaagagtaagcgtgaagaaagcttacagaagaagcgtcgtgaaggccttcaagctaatcagctacctcaattcgctccttcttctgttcctgcttcatcaactgttgagaagaagttggagagtttgcctgctatggttggtggtgtttggtcagatgatagaagtttacagcttgaagcgactactcagttccggaaattgctttctattgagcgtagtcctccgattgaagaagtgattgatgctggtgttgtgcctcggtttgtggaatttctcactagagaggattatccacagcttcagtttgaggctgcttgggcattgacaaacattgcttctgggacttcagagaatacaaaggtggtcattgaacatggtgctgttccgatttttgttcaactattggcttctcagagtgatgatgtccgtgagcaggctgtgtgggcattagggaatgttgctggtgattctccacggtgcagagatcttgtccttggtcaaggagctttgataccattactctctcagttgaatgagcatgctaaactctcgatgctgagaaatgctacttggaccctctctaatttctgcaggggcaagccacagcctccctttgaccaggtccgtccagcactcccagcccttgagcgcctgattcattcgactgatgaggaagtgttaacggatgcatgttgggctctctcttacctttccgatggcacaaatgacaaagtccaatctgtcattgaggcaggtgttgttcctcgactcgtcgagcttctccagcatcaatcaccatctgtgcttattcctgcccttcgtagtattggtaacaatgtcactggagatgatctgcagacacagtgtgtaattaagtcatgtgcacctcctagccttttgggccttctgactcacaatcataagaagagcatcaaaaaggaagcttgctggacaatctcaaatatcactgctggaaacagggaccagattcaggctgtgtgtgaagctggtttgatttgccctcttgtcaatctgcttcaaaatgcggagtttgatataaagaaagaagctgcgtgggcaatatcaaatgccacttcaggtggttctcctgaccaaatcaagtacatggtggaacagggagtcgtgaaaccactgtgtgatcttttggtgtgccctgatccaaggattatcactgtgtgtctggaaggattggagaacattttgaaagttggggaagctgaaaaggtcacaggaaataccggggatgtaaacttttatgcacagctgatcgatgatgctgagggattagaaaagattgagaatctgcagagtcatgacaacagcgaaatctatgagaaggcagtgaagattcttgaaacgtactggttggaagaggaagatgaaactttaccacctggtgatccctctgcacaaggcttccagtttggaggaggtaatgatgcagccgtaccaccaggtggattcaacttccagtgaaggtaaaaaaacctcactacttgggactaatttatctaagcatctaaggctagactagcaaacagagtaaatctgcctgtgtgtctaccttgtgtgaatctgtgagtctggttttgg

SEQ ID NO: 101421 - DNA, 619 bp, Arabidopsis thaliana columbia
atcttattgaagaggcaggacaaccgaagaatgctggctcgactgctgcgactgcttttcttataggtgataagttgattgttgctaacgttggtgattctagagttgtagcgtcaagaaatggttcagctgttccactctctgatgatcataaacctgatagatcagatgagcgacaacggattgaagatgctggtggctttattatttgggctggaacatggcgagttggtggaattcttgcggtctctcgggcttttggagataagcaacttaagccatatgtgattgcggagccagaaattcaggaggaggatataagcacattggagtttattgttgttgctagtgatggactgtggaatgtgttgtcaaacaaggatgccgtggcaatagtacgagacatttcagatgcggaaacagcagcaagaaagcttgtgcaagaaggttacgcacggggtagctgcgacaatatcacttgcattgttgtacgattcgaggtttcttgagcaagaaccaaattcatattgttcttgttctatgaatgtaccatcttcagctgttgaatacactaacatatttgggttatccaattttataaaagaaagatatatttatg

SEQ ID NO: 101422 - DNA, 481 bp, Arabidopsis thaliana columbia
  unsure (1)..(481): unsure at all n locations
cggacgcgtgggtacagtcaaatcactcagagaaagctactaggtctctcctcgacatttgctttcaattcgatccagtaattttcttctcatcggagagagaaaaaaaaaatggaagacccgttgattggtagagatagtcttggtggtggtggtacggatcgggttcgtcgatcagaagctatcacgcatggtactccgtttcagaaagcagctgcactcgttgatctggctgaagatggtattggtcttcctgtggaaatacttgatcagtcgagtttcggggagtctgctaggtattacttcatcttcacacgtttggatctgatctggtcactcaactatttcgctctgcttttccttaacttcttcgagcaaccattgtggtgtgaaaaaaaccctaaaccgtcttgcaaagatagagattactattaactgngagagttaccgtacttgaccaatgcagaatccattatctatg

SEQ ID NO: 101423 - DNA, 849 bp, Arabidopsis thaliana columbia
  unsure (1)..(849): unsure at all n locations
nnnnnnnnnnnnnnnnnnnnnnnnnnnnnnnnnnnnnnnnnnnnnnnnnnnnnnnacggacgcgtgggccacgcggccgactttcttccccgaagatgcgtcctttagacgagaccgagacaaccgtcgtcttcgagaagctcttcaaattcgtcggcaacaacctcaagaagatcgtcgagaacccatcagacgaaggacccgaatctacacccggcagctactgcttccgcctccagaaaaacagagtctactacgtcagcgaagccctcgtgaagcgagccacaaacatctccaggaaaaacctagtctccttcggaacctgcatcgggaaatacactcacgccggtagtttccatctgacgattatgtcactcaatatcttggcggcgaatgctaaacacaaggtatggcttaaacccacttcggagatgtcgtttctttatgggaaccatgtcttgaaaggtggattagggaggattactgatagtattgttcctggagatggtgttgttgtgttctcgatgtctgatgttccgttagggtttgggattgctgcgaagagtacacaggattgtaggaaattggatcctaatggtattgttgtgcttcatcaggctgatattggagagtatttgaggggtgaagatgacctttgaaagtttaaaggttttgtctttgttgtgtcttagtttgattctgcttgttgctttgagttttaaagtatgtagctgttacaagtttcgtggaacttggttctggatctatgaaagtctcgatttttataaatctgtttttgaggtgttttgtgagactcttgagtatgtaaaagctaaaaaatttacattc

SEQ ID NO: 101424 - DNA, 440 bp, Arabidopsis thaliana columbia
  unsure (1)..(440): unsure at all n locations
cccacacgtccgcagaatccatggatcgtgctttaactccgcgttttgatactccagctactctctcccctttccgataccgatatgggagctctctggccatcactcgacgattcgcgccggcgattgtttgcgcgaaacgatctccgatcgatggagtgagcgacgagctgaatctgattgcttcacagaacttagatcaagctcccgcacgaagactagcccgttccgcttttgttgacttgcagcttcagctggatcactgcttgttcaagaaagctccgagtgggatcagaacagaggagtggtatgagagaaattcgaaaggggaagatattttctgcaagagttggttgccgaaatccggcgacgaaatcaaagctgctgtatgtttctgtcatggctatggaancacttncactttcttcttcnatggtata

SEQ ID NO: 101425 - DNA, 445 bp, Arabidopsis thaliana columbia
  unsure (1)..(445): unsure at all n locations
actnntnnnnnnnnnnnnnnnnnnnnnnnnnnnnnnnnnnnnnnnnnnnnnnnnnnnnnnnnnnnnnnnnnnnnnnnnnnnnnnnnnnnnnngcagccggcgaccaagaggtggcggtagcgccccagagtgcaacaattaccgctgaaaaagaagttgcaaaataaaaaaaagagatcaaacggaggggaaaaatacaatctctctcctccaatggtggccaaggccaaaaagtgcaagatcaaagatgaagaggagatggaaatggtagcggaaacggttgccggagattcagagatcagcaaatctaccacttcttctaattcttcgatttcgtcaaacaaattttgcttcgatgatctgacaataattgttgagcaaaagctcagcttatcaacaagtgttcccacaagatgagaaggaggctgctggtttgctcatggct

SEQ ID NO: 101426 - DNA, 728 bp, Arabidopsis thaliana columbia
atcttcatcatcttcctctgagaaatcaaaaactcgatcgatcaattcgttgttcgtctacatcgattccttcagaacctagtgatcctctgttttggttgattcgattaagctaaccatgtcttacaaaccaagcgcgaagactgaggttcgccggaacaggtataaagtatctgtggacgccgatgaaggtcgccggagacgggaggataacatggtggagatccggaagaacaagagagaggagaacttgcagaagaagcggcgtgaaggttttaatccttccatggcgtcacagccagggcaggatttctcctcgtctctccctacggaaacgagattggagaatatacaacagatgattgctggagtaatgtcagaggatagagacttacaattggaggcgacggctagcttcaggagattgctttcaattgagcgaaatcctccaatcaatgaagttgttcaatctggtgttgttcctcacattgtgcaatttctttccagggatgacttcactcaacttcagtttgaggcagcttgggcgcttaccaatatcgcttcagggacatctgagaacactagggtcattattgatagtggtgctgtccctttattcgtcaaacttcttagttctgcaagtgaggaagttcgagaacaggctgtatgggcattgggaaacgttgctggtgactcgccaaaatgtcgtgatcatgtcctaagttgtg

SEQ ID NO: 101427 - DNA, 1996 bp, Arabidopsis thaliana columbia
cccccccttgaggtccgcgggattcgataggctggttatcgatttcggggccgtttccgatttcgattcgattttagcggcgatgtctctcagacctagcgcgaagacggaggtgcgacggaatcggtacaaagtagcggtcgatgcggaggaaggacggcggaggcgagaggataacttggttgagatcaggaagaacaagagagaggaaaatttgcagaagaagagatttacgtcttctatggcttttggctcagcaacgggacaaacggaacaggatctttcttcagcgaaccaattaaaagataatctacctgctatggttgctggaatctggtcagaggatagcaattcacaattggaggcaacaaatctcttgcggaaactgctttctattgaacaaaatcctcctatcaatgaagttgtacaatctggtgttgttcctcgtgttgtgaagtttctttccagggatgacttccccaaacttcagtttgaggcagcttgggcgctcaccaacattgcttcagggacatcagagaacacaaatgtcatcattgaaagtggagctgtcccgatattcatccaacttctcagctctgctagtgaagatgtccgcgaacaggctgtttgggcattgggaaatgttgctggagactcaccaaaatgccgggatttagtcctaagttacggtgccatgacacctcttctgtctcaattcaatgagaatacaaagctttcaatgctgagaaatgctacatggacattatcaaacttctgcagagggaagcccccacccgcatttgaacagacacaaccagctttaccagttcttgagcgccttgtgcaatcaatggatgaagaagttctcacagatgcatgctgggctctgtcatacctctcggataattcaaacgacaaaatacaagcagtcattgaagcaggagttgttcctcgcctcatccagctcttaggtcattcgtcgccatcagtgctgattcctgctcttcgtaccattggaaatattgtaaccggggatgatctacagactcagatggttctcgaccagcaagtgcaaccttgtcttttgaaccttctaaaaaacaattacaagaagagtatcaagaaggaagcttgctggactatctccaacattacagctggaaatgcagatcagatacaagcagtgattgatgcaggtataatccagtctcttgtttgggtgcttcaaagtgcagagttcgaagtaaaaaaagaagctgcttggggaatatcaaatgctacttctggtggcactcatgatcaaatcaagtttatggtgagccaaggctgtatcaaacctctatgcgatctccttacttgcccagatctgaaagttgtaacggtttgcttagaagcactagagaacattctcgtggttggagaagcagagaagaacttaggtcacacaggagaagacaacctctacgctcaaatgattgacgaagcagaagggttagagaagattgagaatcttcagagtcacgacaacaatgatatctacgacaaagccgtgaagatcctcgaaacattttggactgaagacaatgaagaagaaggcaacgacgagaatcatgctccacaatctggtttccagttcggaagcaccaatgttcctcctggtcaattcaactttatttgaaaggtaaaatagttgaattgggtcatagaagttgcttggacttttaagtatcaagttcatatccaagtttacagaccatgatcttgatgttgtccaaaacccaacaagcccttctcaagactcatcttctttagctctacgaaaaacccaaggcagaagaaagtgtcaaacttcatcatcactattacctcaaaccctaactccacataaccttttaaccattgacaaatcactttgaaccttttttctactaagaccctaaactactaaaccctaaaacccaaaagtcaaaaacccaaaactcaaaagtcgtatgta

SEQ ID NO: 101428 - DNA, 1978 bp, Arabidopsis thaliana columbia
  unsure (1)..(1978): unsure at all n locations
gagagagagaactagtctcgagtttaaataatcttccgatcgttaattctcttccgatttcgattcgattttagcggcgatgtctctcagacctagcgcgaagacggaggtgcgacggaatcggtacaaagtagcggtcgatgcggaggaaggacggcggaggcgagaggataacttggttgagatcaggaagaacaagagagaggaaaatttgcagaagaagagatttacgtcttctatggcttttggctcagcaacgggacaaacggaacaggatctttcttcagcgaaccaattaaaagataatctacctgctatggttgctggaatctggtcagaggatagcaattcacaattggaggcaacaaatctcttgcggaaactgctttctattgaacaaaatcctcctatcaatgaagttgtacaatctggtgttgttcctcgtgttgtgaagtttctttccagggatgacttccccaaacttcagtttgaggcagcttgggcgctcaccaacattgcttcagggacatcagagaacacaaatgtcatcattgaaagtggagctgtcccgatattcatccaacttctcagctctgctagtgaagatgtccgcgaacaggctgtctgggcattgggaaatgttgctggagactcaccaaaatgccgggatttagtcctaagttacggtgccatgacacttcttctgtctcaattcaatgagaatacaaagctttcaatgctgagaaatgctacatggacattatcaaacttctgcagagggaagcccccacccgcatttgaacagacacaaccagctttaccagttcttgagcgccttgtgcaatcaatggatgaagaagttctcacagatgcatgctgggctctgtcatacctctcggataattcaaacgacaaaatacaagcagtcattgaagcaggagttgttcctcgcctcatccagctcttaggtcattcgtcgccatcagtgctgattcctgctcttcgtaccattggaaatattgtaaccggggatgatctacagactcagatggttctcgaccagcaagcgcttccttgtcttttgaaccttctaaaaaacaattacaagaagagtatcaagaaggaagcttgctggactatctccaacattacagctggaaatgcagatcagatacaagcagtgattgatgcaggtataatccagtctcttgtttgggtgcttcaaagtgcagagttcgaagtaaaaaaagaagctgcttggggaatatcaaatgctacttctggtggcactcatgatcaaatcaagtttatggtgagccaaggctgtatcaaacctctatgcgatctccttacttgcccagatctgaaagttgtaacggtttgcttagaagcactagagaacattctcgtggttggagaagcagagaagaacttaggtcacacaggagaagacaacctctacgctcaaatgattgacgaagcagaagggttagagaagattgagaatcttcagagtcacgacaacaatgatatctacgacaaagccgtgaagatcctcgaaacattttggactgaagacaatgaagaagaaggcaacgacgagaatcatgctccacaatctggtttccagttcggaagcaccaatgttcctcctggtcaattcaactttatttgaaaggtaaaatagttgaattgggtcatagaagttgcttggacttttaagtaagccacatatcgaacgaaagtggtaacatcacaaagatgaaatatcaatcttctctatctcttcatgcccactccttaactcgtggacatgaactatgaagaaacatagtacgattttcttttctttttggaagtttgtctcaataactaaatcatttggggaagagaaacaattattctgtgttagccatcatctcgtctttcaacaaagttccttttttccnnnnnnnnnnnnnnnnnnnnnnnnnnnnnn

SEQ ID NO: 101429 - DNA, 950 bp, Arabidopsis thaliana columbia
cccacgcgtccgccctaatcactcttgcagtcaccactgtcgccgtccgtctctccttctccttcttagggaccattcctcctctttcagaccagattctagaagaggaaaaatggcaggatgtgcaatgaatcttcagttctcaagtgttgtgaaagtgagaaacgagatctcttcttttgggatttgtaatcgagactttgtatttagagatttagccaaggcaatgaaagtgcctgttttgcggattagaggtggttcaggtaggcaaaggtcgaggcttttcgtggttaatatgtctcaatctcccattgagccacaatctggtggttttgcggctactgaacaaattaaaggagaaggtgataatagtatcttagggaaagacaatgttagaaacttaggaactggatccagcttgagaatttggatattgatggtaatgttggagatggttttaatggtagtgatggtaatgggggtggtggaggaggtggaaatggaggagaaggtgatggtgaaggtgaagactacgaagaaaaagagtttggaccgatattgaaatttgaagaggtcatgaaggagactgaagctagaggagctactcttccatctgatatgttggaagctgctaagaactatgggatccgcaaagtgcttctccttaggtacttggatttgcagagctcagcagggcttcttgggtttgctataagatcatgggctatgcttcgtaacagaatgttggctgatccatctttcctcttcaaaataggggctgagatagtcattgattcttgctgtgccactgttgctgaagttcaaaagagagggaaagatttctgggcggagtttgagttgtatgttgctgatcttttagttggaactgtggttaacattgctctggtcggtatgttggcgccttatgttcgttttggacaaccttccgc

SEQ ID NO: 101430 - DNA, 643 bp, Arabidopsis thaliana columbia
  unsure (1)..(643): unsure at all n locations
gccnnnnnnnnnnnnnnnnnnnnnnnnnnnnnnnnnnnnnnnnnnnnnnnnnnnnnnnnnnnnnnnnnnnnnnnnnnnnnnnnnnnnnnnnnnnnnnnccttnnttttttgttgtttgactgtttttttttttgggaaataaatgattttatatgcataaccaagtcttgttggactgaaaagaagcaggctcttaaatgcaaagagaatctgtaacaaacgtagtcctaactcctaaactcattcttatttatgagctttgttataaagttatcactttgcattgtgaagaaaagtggtaaccataataaagaatatgaatatgctttagaaatggcagaggatgatctcgatcacaaggatgcccgagacatattatagaaagaaatcgcgatctccatactaatcagggatatgattagccactccagagtagctgatttcctgttcttgtagtatttcttgaaggaaacgaacgttgtgctctacaaacttgagcttattaatcaaggtttgcaaaactctgtgtcagttcaaattcatctctcagaaactcccatatctgaccatatttcgcatccttccaagctatatctgacctctcaaaaagaccaagcttcagaatcacatcagccagaatcac

SEQ ID NO: 101431 - DNA, 557 bp, Arabidopsis thaliana columbia
  unsure (1)..(557): unsure at all n locations
cagctctcnnnnnnnnnnnnnnaaaaaaccctaaatataatttcacgcagctgcctctcttttcttcttcccctcccccgcccgccgagtgaagccgcgactgtgaaatcatgagaggagtaaaacgcgccgccatctccgaatcgaatgactctccctttaagaatgcaaaaccagtggaaggaatcttttttggtactcagaagaatgtggtaccgatgcagcagagttcagtaacatcagcatcattggataaacagagggctgagttagctaggaagcatgtgagagctcttaataaccaatttgtaagttgggtgcagttacagctgaagaatcatcctgatgaactttgggaagatgggatgaatgactacattacgcatgcttcaaacattctggaaaagtttaaggatgtggtcagctggcttaaagaaaataaaggaaagggggagaatttatcccctgaatctcgtggagcagaaaataaattagtggctgaagtcaagaataccaatgttaaatcattttcaaacaatattccttttgcttcaaac

SEQ ID NO: 101432 - DNA, 557 bp, Arabidopsis thaliana columbia
  unsure (1)..(557): unsure at all n locations
cagctctcnnnnnnnnnnnnnnnnnnnnnnnnnnnnnnnnnnnnnnnnnnnnnnnnnnnnnnnnnnnnnnnccacgcgtgcgcttctgcctccaaactctctctttctctctcgagaaccttaagaaaacgttacaaatggctgttgaagcaagacacatgaatctcttctcttctcaatacattaccaacagagaatgtgttaaatctcaaacgaatatgaacaacggacaacaaatcgccggcggtggttttccggtaacaatcggtgatcggaatttacagtacatagatccgattaacagcttcaacaaatcagaaagcgagctcacagctatttcaaaacgtcagagagattcaacgtttgattcagacgctttaatcgcatctcagaaacgcagagcaatcgcgttttctccggcgtcattaatcgacgcagagttagtttcacagatccaacagcaaaactcagaaatcgatagattcgtagcgcaacaaacggaaacgttgagaatcgaattagaagcgagacaaagaacgcaaacgcggatgttagcg

SEQ ID NO: 101433 - DNA, 1112 bp, Arabidopsis thaliana columbia
acgtcccataaagaagcgccacacacacagtcacacgaaaactctactgtaactgccaaatcttgttgttttcttaaacgaagagagaagaaagaaagaaaaaaacgttacggattctctgcttcggtttcgcgattgaagcttgagatttcatcttgaacatccgatatggctgaaatcaaggatgaaggaagcgccaagggctatgctttccctctcaggaaccctaatgttacgctgaatgagagaaactttgcagccttcactcacagatcagctgctgctcatccttggcatgacttggagattggtccagaagctcctactgttttcaactgtgttgttgaaattagcaaaggtggaaaggttaagtacgagctagacaagaacagtggccttattaaggttgatcgcgttctctactcatccattgtgtacccccacaactacggtttcatccctcgaactatctgtgaagacagtgatccaatggatgtcctggtactgatgcaggagcctgtgctaaccggatcattcctccgtgcccgtgctattggtctaatgcccatgattgatcagggtgagaaagacgacaagatcattgcagtatgtgctgatgatcccgagttccgtcactacagagacatcaaagagcttccccctcaccgtctagctgaaatccgtcgcttctttgaggactacaagaagaacgagaacaagaaagtcgacgttgaagctttccttcccgctcaagctgccatagacgctatcaaggactccatggatctttacgcagcttacatcaaagctggcctgcaacgctaatgaagaaaccagtccttttccgttcctcccggtttgcttagacatcactgaagccgccttctatactacatgcatgttagataaaatttcaattggtgcatttaatttcgtaatgctcatcagaaaacattgttgaacttaaagctttctgatgatgatgaaaaatttccagtacaatcataaaatttgaaatattagcttttcttttaaaaaaaaaaagggcggccgctctagaggatccaagcttacgtacgcgtgcgtgcgacgtcatagctcgaaaagagtgt

SEQ ID NO: 101434 - DNA, 910 bp, Arabidopsis thaliana columbia
  unsure (1)..(910): unsure at all n locations
gtaactnncnnnnnnnntacgactcatttagggaaagctgctacgcctgcaggtaccggtccggaattcccgggtcgacccacgcgtccgaagagatcgattgtgaaagaatcaaaatttgttgagataagacatggtgttccgtggcgacacggtggtgtccgtagctcatatatcggctgagatttttcagcgattacggtggattccgccgtcggatcgaatcagcagcggagagatgttacaactcgtttgttgttttccgcttcagcaactgggtcgattcgttttatggttctggaactatatctgtgttccacctccggagattttgtattttgatggtcgtcgtgatgatgacgatgatggttatggatcatcttcgtcgtcttcgaatgttactcatcatcataattactatcatcttcatttggagtgaccaaagttcccggttttcctgatttgttgttgtaaagtttttatttttcccgtttttgtgcagagaaagatcatgttttgattttgggtttaattccttgggagtgttgaatataatcagagtctggtgttttaaatccttgcttatagaatcagagaagatgttgagcatttggtgatacatatatattttnagctttcattgtcttaaggagtcaaagaagcttgctttgatctattgcttgtccaaatctagctcttgatagattatgtagcaattcgagtttattatactgtttcttctggacanattggntagttggnttgacttaggnatgtttagttagtggagttaggngggtgaaggttaaggntttggaattaggggtattttnnttcanatnggnggttnaagttngccagaggntcaagccttttttgccggaaaattgtatnccccnagnataaaggg

SEQ ID NO: 101435 - DNA, 932 bp, Arabidopsis thaliana columbia
ttcgacgtttatcgatacgctagatatcgaattcgcggccgcgatttttctaaagcagccgaaacttacgtttccctgaattttccctactgacaaaatttcacttcaaatacaaatctcgtcttcatgagtcttcttcttcgtccaaattgaattttctccgcacacgagagttgaatgttgattttcggctgtttatatggtctccggtcccttagggttttaattcttctgcagatctctcacgatgagcgttgcgaaatcccaagtatggcagccatgcaagaagaagaggtcctcctcctgattcaatagagatctatctatatatatataagaggccgcgatatatatatagagagagagatggcttcttcgaacaacggccttcacgatcgactccttcacgatcaaccgccttctggtagttcttctggtggtaggacacgagttggtaacgtatgagcttggccgaactttgggtgaaggacctttctgctaaggtcaaattcgctagaaatgttgagaatggtgataatgcccctattaaggttattgataaagagaaagttctgaaaaataagatgatcgctcagatcaagcgtgagatttcgacgatgaaattgatcaagcacccgaatgtcattcgtatgtttgaggtgatggctagcaaaactaagatctacttcgttttggaattcgtcactggtggggagcttttcgataaaatttcaagcaatgggagattgaaggaagatgaggcgaggaagtatttccaacagctgattaatgcggttgattattgtcatagcaggggagtttatcatagagaccttaagccagaaaatttgcttttggatgctaatggtgctttgaaagtgtctgactttggattgagcgctctacctcagcaagttcgagaggatgggtta

SEQ ID NO: 101436 - DNA, 1312 bp, Arabidopsis thaliana columbia
  unsure (1)..(1312): unsure at all n locations
cccacgcgtgaatcaactagttttgtttttcctctttcaaaaatgcatttctcttcgtcttcaacatcgtccacttggacaatcttaatcacattgggatgtcttatgcttcatgcatctttgtccgctgctcaactcacccctaccttctacgataggtcatgtcctaatgtcactaacatcgtacgagaaaccattgtaaatgagttaaggtcggaccctcgtatcgctgcgagcatccttcgtcttcacttccacgactgctttgttaatggttgtgacgcatccatcttgttagacaacacgacatcatttcgaacagagaaagatgcgtttggaaacgcaaattcggctcggggatttccagtgattgatagaatgaaagctgcggtggagagggcatgcccaagaaccgtttcatgcgcagatatgctcaccattgcagctcaacaatctgtcactttggcaggaggtccttcttggagggttcctttgggaaggagagacagtttacaagcattcctggaactcgctaatgcaaatcttccagctccattctttacacttccacaacttaaagccagcttcagaaatgttggtctcgatcgtccttctgatctcgttgctctctccggggctcacacatttggtaaaaatcaatgtcagtttattcttgacagattatacaatttcagcaacacaggtttacccgaccctacactcaacactacttacctccaaactcttcgtggactatgcccccttaatggcaatcgaagtgccttggtagattttgatctacgtacgcctacggttttcgacaacaaatactacgtgaatctcaaagagcgaaaaggtcttatccagagcgaccaagagttgttctctagccccaatgccactgacacaatccccttggtgagagcatatgctgatggcacacaaacattcttcaatgcatttgtggaggcaatgaataggatgggaaacattacaccaactacaggaactcaaggacaaatcagattgaactgtagagttgtgaactccaactctctgctccatgatgtggtggatatcgttgactttgttagctctatgtgagaattgtttacccaatatgtggctacaagaatacatatatattaatgaataaaactctcaagacgtttacttgagaacatttattttaaaaaaaaaaaaaagggggcgccntagggtcaagtttgncggnnnnnnnnnnnnnnnnnnnnnnnnnnnnnnnnnnnnnnnnnnnnnnnnnnnnnnnnnnnnnnnnnnnnngaagtatcat

SEQ ID NO: 101437 - DNA, 675 bp, Arabidopsis thaliana columbia
  unsure (1)..(675): unsure at all n locations
gttgctcaaaaccttcttcctgaaatggcttcttctctcatcttcctcctcctcgttaccctaaccttttcagcatcaaccctaatctcagccaaatccaacacaacaacaataatcgaatcaacttgcaaaaccacaaactactacaaattctgcgtctcagctctcaaatccgacccaagaagtcccacagccgacacaaaaggtctcgcctccattatggtcggcgttggtatgacaaacgccacctccaccgcaaattacatcgctggaaacctatccgccaccgtaaaagacaccgttctcaaaaaggtcttacaagattgctccgagaagtatgctctcgccgctgattctctccggctgacgattcaagatcttgatgatgaagcttatgactatgcctccatgcatgtgttggcggcgcaggattatcctaatgtttgccggaatatttttaggcgggttaaagggttggcttatccggtggagattcgccggcgtgaagctagtctgagacgtatttgtggtgttgtctccgggattcttgatcgccttgttgaatgatttacatttgcattaactactttcgtaaaatctctatttaaattatcgtatttcatgaatttaatatgaccgttactttattcccggnnnnnnnnnnnnnnnnnnnnn

SEQ ID NO: 101438 - DNA, 434 bp, Arabidopsis thaliana columbia
caaacggcttcacttctaactggtgcggtcctaatgggggtgactacacaggcgtgttttgggcaccggctctagataacccttatgtcttaaccgtcgctggtatagacttgaaccatgctaatatcgccggttatctccctttagagcttggtctcttaaccgatcttgccttgttccatatcaattccaaccgttttcaaggtcaacttcccaaaactctaaaatgtctccatcttctccatgagcttgacgtcagcaacaataaactctccggcgagtttccttccgtaatcttctctttgccttccttgaagtttctcgacattaggttcaatgagttccaaggtgatgttcctagccaactctttgacctaaacctcgacgctctctttattaacgacaacaaattccagtttaggttaccgagaaac

SEQ ID NO: 101439 - DNA, 999 bp, Arabidopsis thaliana columbia
  unsure (1)..(999): unsure at all n locations
ttcctaatgagattgcaacacaaaacaacaatcaaagttttggaacagaacgtcagataaagataccagcatacatggtgagtaggaactctaatgatggttatggttggagaaaatacggtcagaaacaagtgaagaagagcgaaaaccctaggagttacttcaagtgtacgtatcctgattgtgtttccaagaagattgttgagacggcttctgatggacagatcactgagatcatttataaaggtggtcataatcatcctaagcctgagttcaccaagagaccatctcaatcttcattaccatcatcggttaatgggaggcgcttgtttaatcctgcttctgttgttagtgaacctcatgatcaatcagagaactcttcgatttcgtttgactatagtgatcttgagcagaaaagttttaaatcagagtatggtgagatacatgaagaggaggaacaacctgagatgaagaggatgaaaatagaaggtgaagatgaagggatgtctatagaagtaagcaaaggagttaaagagccaagagttgtggttcagacaataagtgatattgatgttcttatagatggctttagatggaggaaatatggtcaaaaagttgtcaaaggaaatactaatccaaggagatacgacaagtgcacattccaaggttgtggagtgaataagcaagtggaaagatccgcagcagacaagagagcagttctcactacctatgaaggaagacacaatctcgatatcccaaccgcgctacgtcgctcgtgaaattattgggacttagtcactagtaatatgatttaggctttctaaaaacaaaaaatcttactatggcttatcttttgtgctcattcacagtttgtttatttgtttgttacacagtcaatactttgttttgtaaaaaaaaaaaaaaaaaagnnnnnnnnnnnnnnnnnnnnnnnnnnnnnnnnnnnnnnnnnnnnnnnnnnnnnnnnnnnnnnnnnnnaac

SEQ ID NO: 101440 - DNA, 505 bp, Arabidopsis thaliana columbia
cagctctactctgactcacattatggaaagctggcacgcctgcaggtaccggtccggaatacacgggtcgacccacgcgtccggagcatttgaagcgcggtcttttgaagcatctaaagcatccattgatatgaaggtatccacctccgcaatggcttcaagcatcagccccgctattggtaaaattgaacacatggacgcaggctctcctgcaaggccaaccccaattcctaatggaattgaggcaatgtcaagaactatggaaaagccaagaaacttggactctgttgataagtctaaacctttagagctcacagaaattgttgatccgactcagtgccgacaagtgacaatgccagatagcatggactctgttagcaaggttgctcggcttctttacacaaattctggcgttggtgatctggctctcggatcagatggagttcaagactatggaagtggatccgcagcgagcaagatccaactgggaaggcaactgctagtg

SEQ ID NO: 101441 - DNA, 958 bp, Arabidopsis thaliana columbia
  unsure (1)..(958): unsure at all n locations
nnnnnnnnnnnnnnnnnnnnnnnnnnnnnnncacgcgtccgctaaaagctcgtcgtcgtcttcaatggtgaatctcaaaccaattggataaataaaacaaaacaaaaaaaacttcacaaaaaaaaaaaaaagatccaaattacaaccatgccttcggagttaacaccagaagaacgatcggaactaaaaaactcaatcgccgagttccacacataccaactcgatccaggaagctgttcatcactccacgcgcaacgaatccacgcgcctccggaactcgtctggtcaatcgtacgacgattcgacaaaccacaaacatacaaacacttcatcaaatcctgctccgtcgaacaaaacttcgagatgcgcgtcggatgcacgcgcgacgtgatcgtcatcagtggattaccggcgaacacatcaacggaaagactcgatatactcgacgacgaacggagagttaccggattcagtatcatcggaggcgaacataggctgacgaattacaaatccgttacgacggtgcatcggttcgagaaagagaatcggatctggacggtggttttggaatcttacgtcgttgatatgccggaaggtaactcggaggatgatactcgtatgtttgctgatacggttgtgaagcttaatttgcagaaactcgcgacggttgctgaagctatggctcgtaactccggtgacggaagtggttctcaggtgacgtgaaaatgaagaaaaaaatatgatttaatttcttttattaaaaacaaaatccagaaatgttatttatgttgcttcgtataagattctcttcttcttttgtctgtttttgcttttttaacctcatatagtcatatttttaccaaaaaaaaaaaaaaaacaaaaaaagnnnnnnnnnnnnnnnnnnnnnnnnnnnnnnnnnnnnnnnnnnnnnnnnnnnnnnnnnnnnnnnnnnnnnnnn

SEQ ID NO: 101442 - DNA, 555 bp, Arabidopsis thaliana columbia
  unsure (1)..(555): unsure at all n locations
nnnnnnnnnnnnnnnnnnnnnnnnnnnnnnnnnnnnnnnnnnnnnnnnnnnnnnnnnnnnnnnnnnnnnnnnnnnnnnnnnnnnnnnnnnnnnnnnnnnnnnnnnnnnnnnnnnnnnngctttttcggctcttcttaaaacattttaagcctttattaaacttgcaccataatctacaaagatatttcatgtttttagaaatcaaacttcaaagtagcaccataatccctaactaaaaccaacaaaaaatctctaattgttacatcctttgttttcaagtgttagccactttaagttatgcaaaagaatcatcagcagcagcaagaatctgagattgaattgcaagccttcttgtcgtctgattcgtcatcgatacaagaaaagtttctcgtctagcgaaatcatctgttcagttcttaggggaatgaaagctatctcaggttttgaaaagggttgaagcaaccttgacatgatgtggcatgatcttgatatcgtaaggaacgtgaagccaggcttcaggtcggtataacagaaagttctcaggtttactggtat

SEQ ID NO: 101443 - DNA, 375 bp, Arabidopsis thaliana columbia
gtacgtgaaaaccatatatcgcatcttctcattcggctttcattgccctcattaaaacacacatcatatcgcccccaaaattttgatttgattagagaggtgtgtggaaaatggcggcagagtatgccgagtgtttgctagagaagaacttccatgaggattgttctggctgcaaggttgatcagatgaagaggcttcgccgtggatttcccttctgggagctttttaccgtttggatcatcgttctttgcaccgctttgcccatttcttctctattcccctttctcgacttcatgattgatgagttcaacattgcaaagaaggaagaggacattgggttctacgctggatttgttggttgctcgttcatgctcg

SEQ ID NO: 101444 - DNA, 423 bp, Arabidopsis thaliana columbia
tttagaagatatgaaaaaataaagtaactttaatataatgtaaacagtttggttttattattctcccccaaagggataaaattaaaatcactctttttccacccccgtgaatcaaatgaaccggccctttattcccatcatctaacacctaaaacgtccatctataaactcaagctggaaacctcaaacagcatcgtgtgattgtccttctcacccgccttaaccacaacagacgggaaattcgactggttaatcgcgttcgggaatccctgcgtctcaaggcacacacccgcatgtttcccgtaaaccgcattcccttttccaaccactccattcacatagttcccggtataaaactgcattcccggcacattggtccacaagttcagtacccttgagctagcagcatcactgagcttcgct

SEQ ID NO: 101445 - DNA, 514 bp, Arabidopsis thaliana columbia
  unsure (1)..(514): unsure at all n locations
nnnnnnnnnnnnnnnnnnnnnnnnnnnnnnnnnnnnnnnnnnnnnnnnnnnnnnnnnnnnnnnnnnnnnnnnnnnctttttttttttttttagtcaaaaagtagactagcataaccaatacttacaagagacaaaagtagattcattctctctggcatagttagtgttaatcccagcataaaaaaaagcaaaacccaaagttacagaatttacaaatacaacacaatagtaagtggttaatgtagagatgccatttggatagactaagcaggagttttctgacaaactgcaaaacttccaggattgaccgtaatgctcttcgtacagttatctgttttgtagattcccaccaatctatctgctagctcaaacatgttgttcctcaaactgatgataatgaactgagcatctttagtccggtctttcacgtaatgtccaacgattgatacgtttttgaagtcgagagcagcgtcgatttcgtccatgacgtaaagtggagtaggcttgtagtgat

SEQ ID NO: 101446 - DNA, 515 bp, Arabidopsis thaliana columbia
  unsure (1)..(515): unsure at all n locations
nnnnnnnnnnnnnnnnnnnnnnnnnnnnnnnnnnnnnnnnnnnnnnnnnnnnnnnnnnnnnnnnnnnnnnnctttttttttttttttataaaattcatctggtaataacttatttggtttaactatgaagaaagtatacagaagaaaaagtataaaggctttcgaaacaaagaaaacggaagttcaacttaacttgcacaagacgcaacaacagcatcgacgacaccaacatcgtgaaacaaggacattttactaatcgcgagagctttccccaaacaacgatgccctcgttgatttctctatctgaacctcaacaaaatccccaattccaggattcctcttcagatcatcaccatcaagaagacacgctttatcaaacagaggcttcgtgacaaacgaaactctgtgtcccttatcagtttttccaatgagttctgtctcaggcgctctcttgtttggtccttcgacgagaactaactgagttgatcctacctgagagtcataacacggacctg

SEQ ID NO: 101447 - DNA, 555 bp, Arabidopsis thaliana columbia
  unsure (1)..(555): unsure at all n locations
nnnnnnnnnnnnnnnnnnnnnnnnnnnnnnnnnnnnnnnnnnnnnnnnnnnnnnnnnnnnnnnnnccacgcgtccgcccacgcgtccgcccacgcgtccgtacggctgcgagacgacagaagggtacggctgcgagaagacgacagaagggtgctctgggatctgatggaggggtgaagctatactggggcatagctgctgatggatcatgttagtccagctgctaaggaggttctcgaggtttggttggagcggtgtgtgaaggaagaagaagagaagattgtggttggggaagaagagagaatggagttggagagaagagataaaagctttagaacggaagagcatagaggacgatttggatttgcagtttccgagaatgtttggtgaagaagtttcctcccgtgttgtacacgctattaaagaagctttcggtgttctctagattatgtaactatatatatacatcagttaatgttcattgtactaaacatttactttcatcaatgtcacaagaacgcaaaatgaccacccaccaagtcctgttttctccta

SEQ ID NO: 101448 - DNA, 1185 bp, Arabidopsis thaliana columbia
  unsure (1)..(1185): unsure at all n locations
acgtttttccttcccacaggaaaagaagaaaaacagacagcggaggactaaaacaactagccacaacacaacgcttcaaatatatattactctgccactttcttcaatcttccttcaaagattcttattacagcgacacacaactcttttccatttagatttttgattttttttggttctctaaaggaggagagaaatgttggctatcttccacgaggcgtttgctcatccgccggaggaactcaacagtccggcatctgagaaatgctctaaacaaccaaaacttccagaagaaaccctaaatgatttcttattacgttaccctctcaacactttctccatgtctttcggacaagctgctgttcttgcttacgttcgtccctctgcttccttctccatccaccagaggttgttttgtggatttgatgacatctactgtctcttctttgggagcttgaacaatctgtgtcagctaaacaaacagtatggtctcaccaagacaacaaacgaggccatgtttgtgatcgaagcttataggactcttagagacagaggtccttatccagctgatcaggtcggcaaaggctttagacgggtagcttttccctttggggtttatgatagcaaagccggctctgtcttcactgctctgggatctgatggaggggtgaagctatactggggcatagctgctgatggatctgttgttatatcagatgatttggatgttatcaaagagggttgtgctaaatcttttgctccatttcctacagggtgtatgttccatagtgaaggagggttaatgagctttgagcatccaatgaacaagatcaaggcgatgccgagggtagacagtgaaggagttctatgcggtgccaacttcaaggtggatgtgtacaatcgtgttaacagtatccctcgtcgaggaagtgaagccaattggtctctctgaatacttttaataacactttcaatttggtttctttttcgcacttgtgcttcttctccgctttcatcttagttatggactgttcctaagcttgccatgaataaaactgtgaataataaagcttttaatgttctgtttcttactttaagtcagacaataaacttttaacacttgtgatcaaaaaaaaaaaaaaagggcggccgctnnnnnnnnnnnnnnnnnnnnnnnnnnnnnnn

SEQ ID NO: 101449 - DNA, 584 bp, Arabidopsis thaliana columbia
  unsure (1)..(584): unsure at all n locations
nnnnnnnnnnnnnnnnnnnnnnnnnnnnnnnnnnnnnnnnnnnnnnnnnnnnnnnnnnnnnnnnnnnnnnnnnnnnnnnnnnnnnnnnnnngcatagatacaatatatcgacccggtgcatttttataagtaaaaagacaaaactccctctcgtgtggtttttcttgttcgggtaatgaagaaaaaaaaaaacataaccaaaaaaaaaagaatcttgaaaaaaaagttactattatttcaacggctctaactgaatttccatcctccctccatttctatcttcatcatctttatctctgaaacctcctcttgagtcttttagatcaatggaatcatcttcttccacattccccaaaacccaatttcctctgcttagattcctcgctcttcttcttcctctttcccggtactccaaatacgcaacagtaaccacacagaggaagacccataacccgagggccaagttaagcccgtccacgttctcagttccattcctttctcccagatgtttcattcccgtgaaaagcgccacaactccaactacaacagctgattgaccgacaatcgaatgagaatactcccag

SEQ ID NO: 101450 - DNA, 514 bp, Arabidopsis thaliana columbia
  unsure (1)..(514): unsure at all n locations
nnnnnnnnnnnnnnnnnnnnnnnnnnnnnnnnnnnnnnnnnnnnnnnnnnnnnnnnnnnnnnnnnnnncttttttttttttttttttacattcacatgcatgaaataatatagaaatacagtaacattcaggtctttccaagtaagattttcagtgaagtggcagggggtttatgagagaataaacgcctatttcacaaatttacacaaatcggattcaaacaaaaacaaatgaaatagtgatgatcataaagggtgatatcagactagagcatatcaatacgggttcctgtgtggagtctggggagcagaacgaggaggattgagcaacggctgaagagccttcaccactatgctcatgttaggcctgaagtctgcctcatattgcacacacagtgcagctaccgcagccagcttagcaacagctttgggaggatattctccgtttagtcttgcgtcaacacactgcttcaccttgtcttcactcaatttaggggttgcccatgtcacgacac

SEQ ID NO: 101451 - DNA, 483 bp, Arabidopsis thaliana columbia
  unsure (1)..(483): unsure at all n locations
ggcccccttccgtaggctggaatcctttaaagcggccgcccttttttttttttttttttttttttttttttttttttttaagggatgatgatgcttgattcataaattaaatcccaaggttttttattaaagggtctctagagaaaataacccccccattagaaaaacgaacgaatctcctacaagatgaatttcacttttaaaaatcccaaaaccttttctcaatcctcattcttgatgaacagagaatgacctgaattatattttcacgcaatccttttatgtctggtagagcgtagtaaaagattactgtcgcttgcattcgggtggcctctcatcttgtttaccttcaccaactatctgagatctccctcccttcttgttgccgattgatggcttctttttggtcttgctttcttcttcatcctcatcatcatcgncctcctcatcctcttcgncttcctcatcttcatcctcatcaat

SEQ ID NO: 101452 - DNA, 517 bp, Arabidopsis thaliana columbia
  unsure (1)..(517): unsure at all n locations
nnnnnnnnnnnnnnnnnnnnnnnnnnnnnnnnacgcctacgtaagcttggatcctctagagcgttcgcccttttttttttttcttttggagccctcaagtctaattcacttacttaaatattggagccctcaaagtctaatgaaatctatgataaataacaacaattgaagtatatgcaatcaacacaagccttgcttattctatattgaaaagtgtaattccagtcttctatcgccctgggttcaggcgatgaactgtatcactatcacagaaaagaagcagcaaaaaaatctcagcaatggcgtctgttagatatctcactggtttatgtatgcctatcaaagaacttctctatgagtacagagaaaattgcaaatccagcgcaacctatacacgcagcttttggcccacctcgggcggacattgaaccaccggtaacacatccagctatagcggtgtttacagtgtcatgcttagctcttgccttttcgacaatgcattctggagcagagaaaa

SEQ ID NO: 101453 - DNA, 813 bp, Arabidopsis thaliana columbia
  unsure (1)..(813): unsure at all n locations
tacactatangacaagctatgacgtcgcatgcacgcgtacgtaagcttggatcctctagagcggccgccctttttttttttttttttttttgaaaactatagtactttaatatttatacaataactttggaatcgaagcagacatcctcagtacaataatgagaaattgtcacatttgaaagcaagcgctcaataaacattacattaaacaacatcacctataacaacattataaaccggcctctatatgaatctatctcttcttacacatatctacaagtagctcttaagccatacattcacacttagtctgaaaatcatccacctttcctctccaagaaagacagcacggaatgggtttaagctacataacttacacagcattgcggttctcgggattattttcagaccctctttgatctaggtggagtccctggagcgaaaagggatccttggactggctgagccagaggatcaaacttttgggaggcgaggtaagaaagtgcagtgacgacgtcagcaatgagaggtctaagatttggctgctcttgtacgcacatcgctgctacagcgagtgcttggtataaccctcgcggagggtattgaccttgaagcattggatcagccctctgagagaaatttctcctgtcttttaaacaaaggcctttgcccatgcgaactagattctggttcttccataagatctttggaactggtctaattggctttttccgaccccaggtttatatatttctctcaaacaggaaaacaaacaccccgaaaaaccttgttaaaaaacggtccttgaatttt

SEQ ID NO: 101454 - DNA, 518 bp, Arabidopsis thaliana columbia
  unsure (1)..(518): unsure at all n locations
nnnnnnnnnnnnnnnnnnnnnnnnnnnnnnnnnnnnnnnnnnnnnnnnnnnnnnnnnnnnnnnnnnnnncttnntttnnnnnnnnnnnnnnnnnnntggcaggcttgtgccaaactattgggttttagaaaataagtatcagtttccatcaaaatggcaaaaaccaaatcgcattacacatggaaatgcataaaactataaacttcaacaaaatgcaaatgaagaaaatgattgctctctcttagttctgaaagcaagcaatttggcgcctcaaggcgtatcaaagacgaagagtcttgccaaggaagggaacttgttgggttaaggcaagagaacctctatatatatggtcgatgaaagactacaaatttcgaccacattttaagcgagacgagtgttagggtctgcgaaactaccagccatacttcttgaagaagtccctggttctctttctaggctcgagtgaaaactattaactatggcatgcggagcacccatggaggaaaggtcccaatgga

SEQ ID NO: 101455 - DNA, 761 bp, Arabidopsis thaliana columbia
  unsure (1)..(761): unsure at all n locations
nnnnnnnnnnnnnnnnnnnnnnnnnnnnnnnnnnnnnnnnnnnnnnnnnnnnnnnnnnnnnnnnnnnnnnnncttttttttttttttttccaagagaatcatttacttactagcttagagattaatgaactatatacaccatttatgtcttgtatgtatcccatcaccttaaaatgaatatatttatagcagcataccacaaacaaacaaatgaatgtatttaaaagttctcccaaaattcaatccggaattatgaaaaaagggtgactgagagaactgagaagctattgagactacacgtaggacgatttagctactacgatttgaagatggaagtggaaaagagagcttcaaggttgattatacctaggaaatgtcttggaccttagtttccgttggttcagagttagtctcttttgcctctgttgatgattgcttctcgtcattaacatgctccggagatttttcaggtgttgtgttcttgttcttgtcgcgccaccctagtccaaatggccgtgctagcaaactgatcctgcttggaggaggttctggtgacgaatcttggttaacttgccgtggtgaaggttgtgctttgagttggccagattgatactgcaagttgcctcgagatggctctgccatcaatgntctttttccattcagccagtcaagaacagcttcccggttttccctcaaacttagcagcaatcctgggtctganccggccanaaaatcgggancccnggacctnggctngccnt

SEQ ID NO: 101456 - DNA, 412 bp, Arabidopsis thaliana columbia
gacaaacacgatcgccgatccatttacgagccgtcgttgctctacacatatcaacaacaaatcttatcctcccaactatcttttctctgattttcttttcttctccagtttccatttctagaatcgatcgatattgaaggagagaagatgcctggtttaacatgtaacgcgtgtaacatggagttcaaggacgaagaagaacgtaaccttcattacaaatccgattggcaccgctacaatctcaagcgcaaggtggctggagttcctggagttacagaagccttgtttgaggctagacaatctgctcttgctcaggagaagaataaatcaaatgaagcacctatgctttatacttgtgcaatctgtgctaaaggttacaggagttccaaggctcatgagcagcatcttcagt

SEQ ID NO: 101457 - DNA, 646 bp, Arabidopsis thaliana columbia
  unsure (1)..(646): unsure at all n locations
tgacactatagaagagctatgacgtcgcatgcacgcgtacgtaggcttgggatcctttaaagcggccgcccttttttttttttttttccttatgtggccttttttttattcattctaggcaaaggtcttatattcaagtaagaagaaccattgttgtaaaaggttggggattctcagtgttcaagagcactccgtatagagactgttgtgtcttgggttgagttgatgtggcctctcgatatgaggtcatggttcaagaacaccactataaccgtgatgtcatcatgaaaatgtcgtctcactttcttgtcaatcttccttagatctgaatatctcatctcacgtttcctcgctgcctcgtgaagagccgcctttatcagtctctttgcgcttccagcacggggatggttatgaacaatctcaactgctttttcgttagtcaaatgctcccaaagaccatcagatgcaaaaatgagaaacgggtcattagggtgcagaggatgagagagtattnttggtgttcagcatcaagggctttcattgntctnaattntgactttgctgattgnncctgtnaatngggcgtcatgtcangccccttagccngtcccaatngnctanttccaancatccgaaaaggttgggc

SEQ ID NO: 101458 - DNA, 508 bp, Arabidopsis thaliana columbia
agtgacacttagagacttgacgtcctgccgcgtacgtagctgggtcctttaagcgggcgccttttttttttttattcgaatctattttcaaaagatctctcaaggtggagaattaagggattacttaacaccactggtaaaactatttttatatcctctgttttcagtcggagctaggaaggaactgggttccggacctagtgccaaagcttctcgaagctgccgggataatccgcgatggagacaagacttgtgcaaacgagaagttgtaagaatcagtgcctaaacggctctgcaaccatcctctgccaccagagaatccatctgtcacaatatagcaattcttgtacccgagaacctttaacgttttcgccactttcttagccgaatccgtgtacgagtccaagatgatgatattggagcctttgttgattttcttgaggtaagaaatctttaatgctgctatctctgcttcaacctcgttagagttcctcacgattccttttac

SEQ ID NO: 101459 - DNA, 657 bp, Arabidopsis thaliana columbia
  unsure (1)..(657): unsure at all n locations
cantgccaaatttnaatttttccccggaacctttaccgtttccccncatnttnccngaanccgtttcgggnccaagttgccgatattggcgcctttgtggattttcttggggtaagaaatctttaatgctgctatctctgcttcaacccgtttagggttccccacgatcccttttactttgtttggtagttcttctaatggaatggcgatcacgcggttcttagcattcgaagggacccgtggaatcccggctttctccttgtctttctctgatcttatatccaccatcaagtagttcttggtgcaaagaaggtcaagcgtttgagccggcgtaagatcacctttgtaaccacggaagttaaaagagatggcagagaaaacaggagggagaagaaggtaagcaagaaacgcagcaccagcagcaacaacaatgacactagggtcagctgaagaaatcgtatccatggtcgatgaagcaatcggtttagcatcttctatcgcttttgacgtctgttgtgctacatctgttactgtctttgcagcattaaaaacaggcttagaattaaaaccagagctctgcattgcttcttgagctttctttgaagcttcaganaaagcaggagaagcaagcttcatagcttcttcaccagcttgctt

SEQ ID NO: 101460 - DNA, 515 bp, Arabidopsis thaliana columbia
  unsure (1)..(515): unsure at all n locations
nnnnnnnnnnnnnnnnnnnnnnnnnnnnnnnnnnnnnnnnnnnnnnnnnnnnnnnnnnnnnnnnnnnntcctttttttttttttttcaagtcaacaatgatgaaattttcagcaatttacttaaacgctacgagagtgagagaccctaccagagtcaactttgttgatttgttcggattgggtttttaaccaaaaacttgggatgacaaaagaagaacagtagggggcaaaaagcaaattgtcgaagcattgtcttctctcctgcttcctcttcttctgcttcttcataccacaactatctttctcttgtccacaagatcaaagacaatcccttctcgagttcaagaacttgctgattcacaacatcaaggacaactacacagcctttgaagaattagggacatggaggccaaactcagattgctgcaaatggctacgcgtgacatgtaacgctagttcgccttccaaagaagtgatagacctgaatctattcttgctcatcccccctggcttag

SEQ ID NO: 101461 - DNA, 494 bp, Arabidopsis thaliana columbia
  unsure (1)..(494): unsure at all n locations
nnnnnnnnnnnnnnnnnnnnnnnnnnnnnnnnnnnnnnnnnnnnnnnnnnnnnnnnnnnnnnnnnnnnnnnnnnnnnnnnnnccacgcgtccgcaaatcctcttcttccatctccactgcttcctaattccccggaattcttcacaacccataaagggaagagagagttattcactggtatgagttcgtcgtttcattgagattatacacaaaacaagattataacttttttgctgggttttggagactatggctggtggtaacgaagtcaaccttaacgaatgcaagagaattgtcccactcaacacatgggtcctcatttccaatttcaagcttgcttacaaagtcctccgtcgccctgacggttctttcaaccgcgacctcgccgagttccttgaccgtaaagttcccgccaactctttccccctcgacggcgttttctccttcgaccacgtcgactcaacagctaccctttcaccagaatctaccaacct

SEQ ID NO: 101462 - DNA, 545 bp, Arabidopsis thaliana columbia
  unsure (1)..(545): unsure at all n locations
nnnnnnnnnnnnnnnnnnnnnnnnnnnnnnnnnnnnnnnnnnnnnnnnnnnnnnnnnnnnnnnnnnnnnncttnnnnnnnnnnnnnnnnnnnnnnnnnnnnnnnnnnnnnnnnnnnnnnnnnnttttaaaagcaaaggggtagttttgccattggaattttagggattcaaagatgtttttttgacctttttcacctactctcccttccaaaacttttcaatttttttttggttgaagagaaatttacccacttgggaccggggttaaagagagaccctaagggcctcttaactcctgaatataatggcctagttgctgagccccaacgaacaaagcatcagcagccagaacaactccaaacagacgagcagtttataccaaacggtccccccaaccttttttcgcagcttgagctctttgctggtctgcccaaccgagggaactctgaaaaacctccaataccagcaagcttcaagggttggacaccttctgtcactagatcctcgtcttgagcagatttctaaacccaccttggtancccaga

SEQ ID NO: 101463 - DNA, 511 bp, Arabidopsis thaliana columbia
tgacctatagaagagctatgacgtcgcatggcacgcgtacgtagcttggatcctctagagcggccgcccttttttttttttttttttgtactggaatttattaatcaagccgaacatgtttacaaaaccggataaaccggaaacttagccagagactttaacaggaaacagagcccgactttaacgggagacaaagccggcgaacaacaagatgtccccggaaacaaaagctcaaacgagagaaacaaacgagggagacataaccctaaagtacagggaaccaacttacaaccaaaaaaattagctcactaagagaagtctacaaccaatgcactaaacatgaccacatgttccaaagagaagcctactaaaccctccctattagaaactgtgaacgccagatagcatcaggaagaccagataagacacaacaccaaagcctaaccaatcgcaacaccgacaaggaaggcaaaaggcttcacccgataccaaggaatcatgaaccactagc

SEQ ID NO: 101464 - DNA, 509 bp, Arabidopsis thaliana columbia
tgacactatagaaagactatgacgtcgcatgcacgcgtacgtaagctttggatcctctagagcggccgccttttttttttttttttttttgggtacttaaatgttataagcaaacacaccttacaataatctcaattttcttaacaaaaaaacaattaaaagacctaatcctgggtttgaccattagctctcaacgggattcttcatcaccaccgtaaactccaattttccggcgaaatcaatctcacttcctgggggatgagcacaccactcgaactcctgaaccatccgcgcaagcatcaaatggacgtgtatggttgccattgcaagtcctggacagatcctacggcccacaccaaacggaatcatttttactccactaatcccggttatgtcagcatcttccttacccaacataaaccggtccggatcaaactttttcgggttattccaaattctcggatcctcactaatacccggaagataaacctcgacgttaacgccggcgg

SEQ ID NO: 101465 - DNA, 661 bp, Arabidopsis thaliana columbia
  unsure (1)..(661): unsure at all n locations
tnnnnnnnnnnnnnnnnnnnnnnnnnnnnnnnnnnnnnnnnnnnnnnnnnnnnnnnnnnnnnnnnnnnnncttttttttttttttttttgcgacgaatcttgtttcctttattgaaccaataaccaacgaacttgaacaccgataaaagtatatttcaaagcagggccaaactaatcaactgaaaaacaaataaaacacccaatttaaacacacttggagacaacaaatgagatgaagagttcgacttgattgggtatacaggagctacagcgactgcacatttcccggttggttcatggaagttacgttgaagcctaaggtacccgccttctcccccactctggtccccaaagaattacgaataagccagtagtctccttcatctgatgatgttccataccccacaattagcacattgtgatctccccacaaattactacatgctcctttatacacaccagatttgtagtcgctcatgtttgcagctgatatcataacactaataggttgataagcaacagctttcttcaaagacatctcatcgtttacaggaacaacctcatgaccattaatggtaacaacccgagtggttttcatctcaatgggccttgcatgcggcatgtatcccggacgcagtgggcnncccaggnanttcaggcc

SEQ ID NO: 101466 - DNA, 531 bp, Arabidopsis thaliana columbia
  unsure (1)..(531): unsure at all n locations
nnnnnnnnnnnnnnnnnnnnnnnnnnnnnnnnnnngntaaaattaagctttncattgtataagtgtccacgatcaaacacaactcaataatataactttcaataaatacttggccaagccatgaacactgatagtctcacacaacaatacattgggatatgaccttaatggcttaaacggagcaactataaggaaagcttgaagaggccagagctattggtcatgtagaaattgtttaagattcgagagctttggtttgatctaagacaatttatctatgcaacaaaagtcttaccttttgatccaatctccacatcacctttcttctccaaaacgctagttctacaatcttcataaaacactacacaagccacccatttgatcatattcccaacacagatcaaacccacatagaaactcgtgtacaacactctgtttccattggaactctccgtgcatttgaaacaaaaacatggcatcctcatcgcaatagcgaagaccaagaacaccagcatcacttggagaccacgc

SEQ ID NO: 101467 - DNA, 505 bp, Arabidopsis thaliana columbia
  unsure (1)..(505): unsure at all n locations
ggtacactatgagagcttgacgccatgcacgcgtacgtaagcttgatctctaagcggcgcctttttttttgattgagacatatagatatatataaagcccactttggtccaagcgtttgaaacatcaatagatataactaataatcactgaacagtgacaaactctcttttagaatcaaaggaactaattctcagttatcttaatcactaacctcttacaagctaaggtctttaagcatcactatcactgctttcatcatcctcgtcgttgacatggcggttactgaattcattggggatgaaaactccaggctggctcgatcttctcctagtcctcgacggaaggatattatccaaatcaacctcagccaaaggatcatncggagaaatcgcttttcgtcgtcttcatcaaaaccttcgtcatcttcatcaatcatcactgncgtcttcatcatcactttcttccacttcgatcatttttccctttcccttatcctctcgcgaa

SEQ ID NO: 101468 - DNA, 687 bp, Arabidopsis thaliana columbia
  unsure (1)..(687): unsure at all n locations
attcgttnnnnnnnnnnnnnnncatgacgtcgcatgcacgcgtacgtaagcttggatcctctagagcggccgccctttttttttttttttttttttgaaacttcaatagatataactaataatcactgaacagtgacaaactctcttttagaatcaaaggaactaattctcaattatcttaatcactaacctcttacaagctaaggtctttaagcatcactatcactgctttcatcatcctcgtcgttgacatggcggttactgaattcattggggatgaaaactccaggctggctcgatcttctcctagtcctcgacggaaggatattatccaaatcaacctcagccaaaggatcatcggagaaatcgctttcgtcgtcttcatcaaaaccttcgtcatcttcatcatcatcactgtcgtcttcatcatcactttcttccacttcgatcatttttccctttcccttatcctctcgcgaaatccctttacctttcctatcaacaacttcttcttcttcttcttcttcttcttcctcgtcgccttcctcttcatcttcttcatcctcttgctcctcttcagctccaacatcgccgattaccccattctcaacctcttcagctgctttctccgataaaaccgaagattctgctccaaatcgttcctcgggggaaaaattcagattcttc

SEQ ID NO: 101469 - DNA, 1038 bp, Arabidopsis thaliana columbia
tacgcctgcaggtaccggtccggaattcccgtttcgacccacgcgtccgcccacgcgtccgtcttcttcttcgcttcagccatgggaaccctatctctctcatcttctctcaaaccttcactcgtttcatcaagactcaattcatcttcctccgcatcttcttcttcgtttcctaaaccaaacaatctctacctcaaacccaccaaactcatttcaccacctctcagaacaacttcaccatcgccattgagattcgccaatgcttcaatcgagatgtcgcagacacaggaatcagctattcgcggagctgaatctgacgtcatgggtcttctccttagggaacgaatcgtctttctcggtagtagtatcgacgatttcgtcgctgatgctattatgagtcagttgcttctcttagatgctaaagatccaaagaaagatatcaaactctttatcaattctcctggtggttctctcagtgcaaccatggctatatacgatgtggttcagcttgtgagagctgatgtttcgacgattgctcttggcattgctgcatcaacagcttcgattattcttggtgcgggaactaaaggcaagcgctttgctatgcccaacacgaggataatgattcatcaacctcttggaggtgcaagcggtcaagctatagatgttgagattcaagctaaggaagttatgcataacaagaacaatgtcaccagcattatcgcgggatgtactagtcgatcgtttgagcaggttctgaaagatattgatagggaccggtacatgtctccaattgaagcagttgagtatggtttaattgatggagttattgatggagacagcattattcctcttgaacctgttcctgatagagtgaaaccgagagttaactacgaggagattagcaaggatccgatgaaattcttgactcccgagatacctgatgatgagatctactaaagcccagctcgtctagaacagggatcttccaatgtgactaagactagcagtttcgaagaaaagctcaatttcttctgc

SEQ ID NO: 101470 - DNA, 490 bp, Arabidopsis thaliana columbia
  unsure (1)..(490): unsure at all n locations
ttcaccttcttctttatctaaggaaacaaaaacggagttttcttaagagaaatatcacaaacttttgtgaaaaagagagagacaagatggggaattacaagttcagaatttcagagatgctcccaaatgcatggttccacaagctcaaagacgtgactaaacactctaaacccaaaaacaaagcttcttcttcttcctcaaacacttgtagcaagaagaaaccttcctcagattctcttcctcaacactcttatttctccaacagcttagtagctaacaatcctcctcaccataactcaccaagaaactctcttcacacaaaaaagatgagtaaaagaaagacactttacaagccatcccttaaacctttgactcctcctcctcttcttgtatctgcaagtttcaacaaaggagcaagggtcaaacgcgttcaaggttcgtcttacaaggttttttccgggttttttnaaccncccctgaggtttttgtg

SEQ ID NO: 101471 - DNA, 790 bp, Arabidopsis thaliana columbia
tggccgtctgcggtaccggtccggaattcccgggtcgacccacgcgtccgcacaaacttttgcgaaaaagagagagacaggacggggaattacatgttcagaattgcagagatgctcccaaatgcatggttccacaagctcaaagacgtgactaaacactctaaacccaaaaacaaagcttcttcttcttcctcaaacacttgtagcaagaagaaaccttcctcagattctcttcctcaacactcttatttctccaacagcttagtagctaacaatcctcctcaccataactcaccaagaaactctcttcacacaaaagagatgagtaagagaaagacactttacaagccatcccttaaacctttgactcctcctcctcttcttgtatctgcaagtttcaacaagagcaagatcaacgatcaagaatcgtgttacagcttgtccccggctattgaaacctaccctgagtcttttgtgtatagattctacgaagaggatgatgatgatgagttcggtgaattttccaacttcaagatcaacacagagaacaaagctttcaccaagcataaagtcaaagtgattggattgggagagaaagcttgtgctgcaagccagccgattaaaaaaccgcaacaaaggccttcttttctgggaaaaatttcaacaaaatgaaagaagatttatggaatattaaagcccctccaaagaaagaacccaaaggggccagcttttcttagttgggaaagaaaaacccattctggctgggggataaaaacccttcaaaaagaag

SEQ ID NO: 101472 - DNA, 589 bp, Arabidopsis thaliana columbia
  unsure (1)..(589): unsure at all n locations
nnnnnnnnnnnnnnnnnnnnnnnnnnnnnnnnnnnnnnnnnnnnnnnnnnnnnnnnnnnnnnnnnnnnnnnnnnnctttttttttttttttaacggcgtaatttgggcttcattatgcattatattcttaatgggtctacttatgaggcccatttgcatatcaatgtcttggtattgttgttttgtttctctctttttcgtcccgtgacatgttaaggagccttaaaaagccaacaaaaacttgtacctggctaatagacaaaagaaatactcttgttttactaaaataggccatgaaagtgattccctcaaatcccatgtgcacaacctgatgactctgtacgggccttctttgtacccacatcattaccggcttcttttgcaggccgttttcctctttcaacaatttctacaggttcgtgcattctttcttgaggacctttctctccaaatttactcaaacttgtcaaaccttccgtaaccatcttgatttcttctccacttacattgcccaagctcttgtcagaatcaggcatgatgtgctcgttcaaggagttatgaaacttgctagcaccaaagtcaggatatt

SEQ ID NO: 101473 - DNA, 520 bp, Arabidopsis thaliana columbia
  unsure (1)..(520): unsure at all n locations
nnnnnnnnnnnnnnnnnnnnnnnnnnnnnnnnnnnnnnnnnnnnnnnnnnnnnnnnnnnnnnnnnnnnnctttttttttttttttgtaaatcgtgttataatactcggaaatttcaaatattctggtacatctttcgttgcttaacctcaaataatcaaaacaagtgtaagtcaacaaaagctacaaaaaaacaacaactcagatctctcagtaaacagatccttgagtgtgattcaaaagcccagaaacaacaccaaggattgaagaaaaaagtgggatttatttttctgtacactaaagagcaaagaggaggtctcctactctactctcatctctccagacaacgttccctcttcatcttccccatcaaactcttgttctacacctttcacctcggatacataatggcatccagcatgttttccgattccccggatttccaaagtaacaggatggggctcgggacaacccactacaaagctccttgcatcctcagcttcactataccgctttccggat

SEQ ID NO: 101474 - DNA, 538 bp, Arabidopsis thaliana columbia
  unsure (1)..(538): unsure at all n locations
nnnnnnnnnnnnnnnnnnnnnnnnnnnnnnnnnnnnnnnnnnnnnnnnnnnnnnnnnnnnnnnnnnnnnnctttttttttttttttcttatccacgtccctttctattggcgtctcaatttttgctttttatgccgagctatctccctcctttaaatctcagaaagctcagggttgaaatttttccaagctttcgagcttttcctcagcaatcttctttctcacgttgaggcattttcttttcagatactttgcttggctctacctttctcttacctgcctcacgttcaaacttttccagctctctcatgacttctttacgattgctcttttcagaatcaacatcctcattcgccttctggatatcattttcaatgttatataattgccataggaagcgttctctcttcagagctttcagttcttcctgcagccttagatgcttctaagcttcttcctttggtgctttcttcagcttcttctcatttccaattgttttcttcttctggtatataagagctgctttttcttcagcgctg

SEQ ID NO: 101475 - DNA, 610 bp, Arabidopsis thaliana columbia
  unsure (1)..(610): unsure at all n locations
nnnnnnnnnnnnnnnnnnnnnnnnnnnnnnnnnnnnnnnnnnnnnnnnnnnnnnnnnnnnnnnntccttttttttttttttttttaaataaaccttggattatattaatgggccggcatctcaaaaacacagggggtgtttcttacaaaagttgcaagctaatgttgagatcggcagaggaaagggttatacacactggctaaaacttaaaccccagaagcaaacattgaacactattgatattgatttcatacaaatataatgagttttcgggggagttaaacaaacaaaactactaggggtgaaattaatctatagaaaaaatgaacagaggagcagcttgatatttgtaacgatggagcatcagaagaatcttacaagaaggtctctcaagttgtgccttctgggtcggacaggctcgaagtttaccgtgaactgagccaagctgggttagtaggcttggaagacgcttcagctgaaccgtctatttggtatggtgcctttgatgtgatcctatccttcctctgctcaaggaaccgatgaagtgaagctcttcttgcaatcgggagttcgcaggctaaagaggccgggttaggctgaattggctctt

SEQ ID NO: 101476 - DNA, 896 bp, Arabidopsis thaliana columbia
ctccctcatcactttgataaacaagagtctcatttttcgcttttccaaagggaacaacttcttcggattattatctatggcagagaagcttgagccggtgaaggttttgtactgcggagtttgctctcttccagcggaatactgcgaattcggtcccgatttcgctagatgtaagccctggctcgtcgaaaacgccccagatctctatcctgatctcctcaaagaagcaaatgagaaggcagcagataatgtttctgacaaactccagtcggtgggaatctcttcaggtggtgctgatggggcaccatcttcagctcagactgcagggacatccaagaaggaggaagtgaagcgcctacctggggggaaagttaaaaagaaagatcgacaggaagttatcattgaaaaggttgtacgcaacatacgcaagtgtatcaccattgtgaaaggactagaactgtttgggataaaactcagtgatgcctctaaaaagcttggtaagaagtttgccactggagcatcagttgtcaagggaccaactgaaaaggagcaaattgatgttcaaggggatataatctatgatatcgttgaattcattacagacacttggcccgacgtacctgaaagatccattttcttcatcgaagatgggaagaaggttcaggctgggtgatgatcacctttgtcctcgttttttggcatggcgggttcatgtagacgagctagttcctgagttttcctatgtgtttggaggaaatcgcatcttgattataactttcaacgtaacgtatagttggatttatcatactattttcttattcgggttgcgatagttccaaacatgtttctccaaacatttctctttttgggggtcttaatatttaaaatgtgtcttg

SEQ ID NO: 101477 - DNA, 518 bp, Arabidopsis thaliana columbia
  unsure (1)..(518): unsure at all n locations
nnnatgatacgtcagctgtatacgactcatatagggaaagctggtacgcctgcaggtaccggtccggaattcccgggtcgacccacgcgtccgggtattgtagaaagtgcaatcaatataaacccgcctcggtctcaccattgttcaggctgtggaagatgcatactaaagatggaccatcactgtggttgggtggtgaattgtgttggtgcaaataactacaaatcatttctcctattcttgtttgacggatttcttgagacaacggtggttgcagtatcactattgccaattttcctcgtattcttcagcgatggagatggtgatataaccgtatcaccaggaagcctagcagccagctttgttgcatttgtattgaacatagcatttgccctaagtgtcctaggcttcctaataatgcacataatgttggtcgctcgtaacaccacaactattgaggcgtatgagaagcatacagtgaactggccatacaacgttggtcgtaagacaaactttga

SEQ ID NO: 101478 - DNA, 1270 bp, Arabidopsis thaliana columbia
  unsure (1)..(1270): unsure at all n locations
gcnnnnnnnnnnnnnnnnnnnnngaaatttataaactttattcctcaattcaatttggggtttgcttcatttttttcacgccacgcgtccgaaacaagttccgggtgttttgaaagaaccccgacaatggcgtggaacgtgttcaagttctgcacagcacttcgcgccttgggttcgatcatgatcttaattgttatcgggatcatcggattcacatactacgccgttgtcgtcgttaattacggacctgctctactgatcggtggtgtcgattcattactatctgttctcgtcttagcgttcttccactttctgcttataatgctactgtggagttatttctctgttgttgtgacggaccctggtggtgttccaacgggttggaggccagaattagacatagagaaaagcgagggaaaccaaccagctttatggaaagcttcggtgagatcctcgttcatgtgtaaaattgtaaaagtgcaatcaatataaacccgcctcgttctcaccattgttcagtctgtggaagatgcatactaaagatggccatcactgtgttgggtggtgcattgtgttgtgcaaataactacaaatcattctcttattcttgtttgcacatttctcagacacggtggctgcaatatcactatgccaatcttcctcgtattttcaacgatggagatggtgatatagccgtatcaccaggaagcctagcagccagctgtgttgcatttgtattgaacatagcatgtgccctaagtgtcctaggcttcctaataatgcacataatgttggtcgctcgtaacacccctactattgaggcgtatgaaaagcatacagtgaactggccatacaacgttggtcgtaagacaacctttgaacaggtttttgaaagtgataaaatgtattggttcgtgcctttgttcacggaagacgataagaagaagttctcagcgcttggagggttagactttacgagcaggtcggagtccgagacagagccgcttcagtctctatgaccttgcaatcttgaaatttttggaagtgtgtcttctgctttgtgtatgtatcaatcaaatattatatccaccattgtcttgtgtattataaagattagtgcctaatgtggaatttgtatctttttatttcgtgaaaagaaatttctccaacttcttaaaaaaaaaaaaaaaaaagnnnnnnnnnnnnnnnnnnnnnnnnnnnnnnnnnnnnnnnnnnnnnnnnnnnnnnnnnnnnnnnnnnnngtctcaat

SEQ ID NO: 101479 - DNA, 1668 bp, Arabidopsis thaliana columbia
  unsure (1)..(1668): unsure at all n locations
caggaagtgttcaaaggaacgaaatacacttcttcttccatttgatgtctgtggtccgaatgaaaaatatctctgtattaaccagaaacgtgtttcataagcatctttaactcttcagctctcaaattcttcatgaatatctctgcttatcgatcaagtgagagcaaatgcaatttttaagagccagctattggatctataactgaagaggatatatatagagatgatgagttcttcttctccaacacaacttgcatctttaagagacatgggaatctatgagccatttcaacaaattgtcggttggggaaatgttttcaaatctgatatcaatgatcatagtcccaatactgttacttcctctattattcaggttgatcctagaattgatgatcacaacaacaacatcaagataaattatgattctcctcataaccagatcgaagcagaacaaccttctagtaatgataatcaagatgatgatggcaggattcatgataagatgaaacggcgtttagcgcagaaccgtgaagcggctcgcaaaagtcgtttgagaaagaaggcttatgttcagcagttagaggaaagccggttaaagttatcgcagttagagcaagaactcgaaaaggttaagcagcagggccatttaggaccatctgggagtattaacacagggattgcatcatttgagatggaatattcacactggctacaagaacaaagcagaagagttagcgaactacgaacagcgcttcaatctcatataagcgacatagaactcaagatgctagtagagagttgcttgaaccattacgctaatcttttccaaatgaaatccgatgcagcaaaagccgatgttttctacttgatatcgggaatgtggcgaacttcaaccgaaagattcttccaatggattggaggggtttcgtccatccgaacttttaaacgttgtgatgccttatcttcaaccattaacggatcaacaaatcttggaagtgagaaacctccaacaatcatcacaacaagcagaggatgctctgtctcaagggattgataaacttcaacagagtttagctgaaagcattgtgattgatgcggttatcgagtccacgcattatcccactcacatggctgcagctatagagaatcttcaagcattagaaggatttgtgaatcaagcagatcatctgaggcaacaaactttgcaacaaatggcgaagatcttaacgacaagacaatcggctcgaggtttactagctttaggagagtatcttcatagcccccggccccttcgttctctttgggccagctcgtccacaagacccaccttaaaggaggaacttattaaaactttaaaaacaagaaacagcggaatcaaaagtcttgaagaagcatactcatcacaaagcttggaaggatgttttaaaaaagatctttgttaattaagtagagtgagattctcttgattagaactttatggtttttgctttatgaagtatctctccagagaagattgtaaatttgggttgaaactttgtaatatatttagatacaacaaataagtttgaaatctgagcaatttgataataaaaaaaaaaaaaaaaaaaaaanaaagggcggccgctctagaggatccaagcttacgtacgcgtgcatgcgacgtcatag

SEQ ID NO: 101480 - DNA, 418 bp, Arabidopsis thaliana columbia
ggagaagcgagaagagattaaaagattagaccttttcgcattcatggattcgaagttgagaaattttgtgatgggtctgtttgtgatgactgcgatcttgaataattctggtgttggcgcgtggactggagagattcgtggtagagttgtgtgtgatgtctgtgctgattcttcaattggaccagaagatcatgttcttgaaggagctgaggttgcggttctgtgcataaccaaatctggagaagttgtgaactaccaagctttcacaaactcaaaaggtgtctacacagttgcagagacaatgccagagagcgaacgttgggacgcttgccttgcaagacccatcagcagcttccacacaccttgcaatcgcctacaccaaaccaataccggaatcaaattcacttataaccgccct

SEQ ID NO: 101481 - DNA, 2132 bp, Arabidopsis thaliana columbia
gtaatttagaaacaaacaaaaagaggaaagtcaaatccacgattaagaagagtaactttgcacgcggcttcgtgatgagttcgtggagcaagagctttaccaggctcgtcaatggtgtttcgcttgtagcgaaagagatctataatcagtcaccggagttacaaagagcgagaaatggagatctcgaaggtttaataacgtcttcagggaaaaaagctttggttgccgccaccgacttagtcggacttacctccgggaagcttcgcgaactctcgattcgtcgatctaaagaaccttccgttgtttacttcgacgaaggagataataaggataacgtcgtcgcaacgcctgagattagatctgttaacaccgaacctagcgagaaaatcgttgattcgaaagtcctgagaagtgaatttagcgatgaagttaagaattcaaatagagaaggtgagattaaggtttcaggcgttgaagcgggagagattattggagttagagctgttgaatcaggtacggtaacggaagcatcatctccgtcggaggtagtacctccggtgaagagacggagacctagagagaggaaggttccttcaactcctatggcaagagcttatgggttttttaatttaggagctgctcttgcttggggagctgttaaagaatctacgtataggatggtaaatgggacaccaatgacaccagacaatcagcctgcgttatcgtctttgatgtctaaggaaaatgctgaaagattggctcttggattgtgtgaaatgcgtggagctgctcttaaagttggccaaatgttgagtatacaggacgagagtctcgttcctgctccgatcttgaatgctctggaatatgtgcgtcaaggtgctgatgtgatgccaaggagtcaacttaatccagttttggatgctgagttaggttccaattggcaatccaagttgactagttttgattatgaaccgctagcggcagcgagtattggtcaggtgcacagagctgttactaaagatggattagaagttgcaatgaagattcagtaccctggcgttgccaacagcattgaaagtgatattgaaaatgtcagacgcttgttaaattatacaaatctaattccaaagggactgtttctagacagagctataaaggttgccaaagaagagttggcgcaggagtgtgactatgaaatcgaagcagtcagtcaaaagcgctttcgtgatttgctttcagacactccagggttttatgtgccgcttgtggtagatgagacttcaagcaaaaagattctaaccactgaacttatatctgggatccccattgataaagtagcgttgttagatcagaaaacacgagattatgttgggaggaagatgctagaactcactttgaaggagctctttgtcttccgctttatgcagacggatccaaactggggtaacttcttatacaatgaagccacaaagacaataaatcttatcgatttcggagcagctcgtgattaccccaagaaattcgtcgatgactatctacgaatggtgatggcatgtgcagaaaaagacagtgaaggagtgattgaaatgtctaggagactcgggttcttaaccggagatgaatcagatgtaatgctagacgctcatgtccaagccggtttcatagtgggtctaccttttgcagaacctggtggctatgctttccgaaccaacaacattgcttctagtatctccaatttaggagcaaccatgttgaaacatagactcagtccaccacccgatgaagcctatagccttcaccgtaaattatccggcgctttcttggcttgtatcaagcttggagccaccgtcccttgccgtgatgtattgctccaagtttacaacaagtatcagttcgatgatgagccacaagatcccgtagtagctacaagctctgtttcttcatagctccctcatacacacacactacattaatgattttttctcgtccccttgtagggagtataaaacgattctttctttggtacaccttcgagtttaatttagtataattttttcaataatgtaaaatgttaaatattacaatgctggagaagtcaatcatcaaaaaaaaaactaaattactcacactgg

SEQ ID NO: 101482 - DNA, 707 bp, Arabidopsis thaliana columbia
  unsure (1)..(707): unsure at all n locations
agctctctacgactcactattgggaaagctggtcacgcctgcaggtaccggtccggaattcccgggtcgacccacgcgtgcgtggagcttaaactagccaccgccgagaaacaagtgcttgacgagttggtgaagctattgcagagtcgagatttgcgtggcgaaaatggaaactggaaggaatttttacatgtttacgacaaaaatgctgattcaccaagtgatccttcgaggcgttctcatgaagatttggttcagtttctgacaacttttaagaagaaagaagatttgcaacttctgaaatgtcacgccaatcatcttctgattgaaaatttgaagcaagaatcccaagatgaagacactcctgagcagatgctagttagattgacagttgagcatccgagttactcgttagactattctttcaagccatactcagaggactggtttgtatccgatgttggaatgaagatgaaaaaggtgatggaatcaactaacatggtagctgttgattgtgagatggttctttgtgaagatgggactgagggtttagttagagttggtgttgtagaccgtgatttaaaggtgattcttgacgagtttgtgaaaccgaacaaacctgttgttgactataggacagacattacagggattactgctgaagatatcganaatgctagtctctctgtggtagatatacaggaaac

SEQ ID NO: 101483 - DNA, 506 bp, Arabidopsis thaliana columbia
ctatagaaagactatgacgtcgcatgcacgcgtacgtaagcttggatcctctagagcggccgccctttttttttttttttgggggtcaacatcgaatcgacttcagactagcagctttgattgtacaacccaaattgtagcaaataatgatgttcttatgactaaagttgaggaaatggtagagacaaaacaaaagaaagaaggtttttttgagaacaagacctctctcgggaatcgaatttcacgtttgtttgttgtcaggtttcttttagggccttaagttttctgtaacctttatcggtgccaaagatccagtccatgtaaacaaacgttgatgaggagttgccagactttgtgtagagtaatcgatgatggtagtcatggaagtcagcaccggcgtatagaggaagaaaattcgaggggctccatgggaaatgataaccacaatgtgcctcaactgtctcaataactctgagcatcatccataaccaaagggtgatcaggtg

SEQ ID NO: 101484 - DNA, 497 bp, Arabidopsis thaliana columbia
cgtaagctggggatcctctagagcgtttgcccttttttttaatccttagaagccataattaagatttcttctctggactaatgataattcaagatacaagcaatacatcaataggccttctattaacaactctacaattaaacctaatctcaccaggtctcccagattgcaaatcacccaacttcaccatgccttctgcaaaagccctaaagaactcatcttgatcctcactaaacatcttcacatactctctcgtcactagattcgtgtacaaagtctgatcagagttaagaaaccctctccctgaaaccaagtctttgaaatactgattatcaaaaacctgaggtgttgcatctagatctccagtcacattctcatctcgcacccaaaggacaaagcttatcaagcttcttacgggaactacggttcaagagctgggtccggtttaccagaaccggattggttataaagtctgaacatgattgaaaaacaccgac

SEQ ID NO: 101485 - DNA, 480 bp, Arabidopsis thaliana columbia
aaaaaatagcaagaagaagaaaggaaaaaacaccacaaagctcgtcactccgctaccgaccactcacatcacaagtcacaacctccgccttgagatgagagccgccgccgccgccaccgccaccgtgagtcttcgacatttccgcagcttccctactattgtcccatctcttctcttctcctcctcctcctccataccttttcactccccccgtctctgcgtcttcctccgccctcgccaactcttccttaaccgtccactcgccgcaggtttcagttcctcttcatcaggtgctacctctgattcggcctacgacgttattgttgttggtgccggacacgctggatgcgaagcggctttagcctctgctcgattaggagctagtactctgcttctcacattaaacctcgatcgaatagcttggcgacccgtgtaatccagcagtaggtggaccagctaaatcacaattagtacatgaag

SEQ ID NO: 101486 - DNA, 606 bp, Arabidopsis thaliana columbia
  unsure (1)..(606): unsure at all n locations
ccctccgtaagcttggatcctctaaagcggctgcccttgggtttttattcctttttttttttaatagttaatcttattacaataaagaaattttatatcaacacttatatagggagaacaaaaagacactgtactgtatctgtgtttttaaacatgtaatttaagaacaatttatgaccataccaaaatcagaaatcaactatatggttggatattgagtcttggcatgtctaagatagaaacatttgatccttttaaaagcttcttcaatcgaagttgcatctgctgcaaacgttatcctcagccagttcttcagccccaccgcggtcccaggaagaaggatgactgattcttccctagctaacttgaaacagaagtcgatatcgtcacttacatcttcaagtaatgagagattcagcttaaccatcattgccatggatccttctgggcgatgcgaggatcatgcaggaatcccctggtccagcacaacaattccggnngtctcacgggcagggttctgagaagncnccggcgtccaanagggncgcncngaaatgggggcccagatcaggtctacccagcnggcaagccaggnaggganccgcc

SEQ ID NO: 101487 - DNA, 387 bp, Arabidopsis thaliana columbia
agttcaaaaaaggtttttctatagccattgaatccgcaatcgttggttctggggtataaaaggaaacaacagccccagctttcaacgtgtttgaatccttgaggtgaggctgaaaaaggcagaaactcaagcaaccttaggaactacgacagattccgaattgggcactgtcacagaccgcaacagctccaacgagcaaacaagaccaaggaaatgagagagtaaggtgttcgccgatgcctgaactaggaagacatcaagagcaagaccgggactgtttccctgagagactccttggtagaaagggtttgctgaagtttgtaaagcctttgcaactaaaatccaactgttgctttgcctcccgagtagtgctgatcccattcccaa

SEQ ID NO: 101488 - DNA, 513 bp, Arabidopsis thaliana columbia
ggcgacctatagaagatctatgacgtcgcatgcacgcgtacgtaagcttggatcctctagagcggccggcctttttttttttttttttttttagtaagaacatttccattccttaaaagaaacatgaaagagttaacaactaaaatcagaaagattcttattccgagatgagtcgcatgatgaaaggaagaggaccctttagttcttgggagttattcaagcttgtcagaacgatggatgtggcgaattaacctcaaagaagcccagaaacttatgggtccaagaaccaagaagagggcgttacattacaaagcagtggatcctaagtaaaagcttaactggagaaattcagtcatttcttacctgagatagaaccattcttcatacccatacatgaacaccggtgggaattcttcggacaatattcgatcttcaccaccattcatgatctttaacggatagctgaatggagggtaagataattccgaccctcgaacctaagaagattagcac

SEQ ID NO: 101489 - DNA, 489 bp, Arabidopsis thaliana columbia
  unsure (1)..(489): unsure at all n locations
nnnnnnnnnnnnnnnnnnnnnnnnnnnnnnnnnnnnnnnnnnnnnnnnnnnnnnnnnnnnnnnnnnnnnnnnnnnnnnnnnnnnnnnnnnnnnnnnnnncaacaaatcttgtggatcaaagaatcaaaaagcagagatagaagttgaacaaagcaggttaaatcaaagcaaaacaatcgcttattatccaacaaatcccaaaaccccaacttggcgagttaaagaagaagcagagccaccactggctggagccacagggggagctcctaacaaagctggagatggtgcaggagaaggagaagaaccagtaaaaaaaccaccggtgtggccaccacgagagggcatgacaaccatttgaagcttctcaccttcaaccgcagttgcttttagagcccgttgtgaagaagtaggaccaaatccttctagcttaatttagtatctccattgctgtattagctgctgggtttggggggttgcagttatgtatgc

SEQ ID NO: 101490 - DNA, 519 bp, Arabidopsis thaliana columbia
  unsure (1)..(519): unsure at all n locations
tannnnnnnnnnnnnnnnnnnnnnnnnnnnnnnnnnnnnnnnnnnnnnnnnnnnnnnnnnnnnnnnnnnnnnnnnnctttttttttttttttgtcaatggaaatagttttcttgatatatataatggacagacatagcgggggatgatgtcaggaatcgggaatatgatcatcaaaagaagtttggttctgattgagaaggctcaaccaaatggagcgaagtatcatatgaatctcatcggactttctaggcttagggctccacaagaaatgtctctgaaccatcttcacgtttctctgcatcttcaaatatctcctcatacgaatctccaatagtatctccttcagccggggaatctccttctccggtaccaccactgagaacgctgaccaatctagcacatcgctgaacggtaacatgaagttatcagcgatcactacagggacgcattcataggatatagcttgaacgatacgtggactgttcacttggtaacccattggacaaagacagtacttg

SEQ ID NO: 101491 - DNA, 574 bp, Arabidopsis thaliana columbia
  unsure (1)..(574): unsure at all n locations
tannnnnnnnnnnnnnnnnnnnnnnnnnnnnnnnnnnnnnnnnnnnnnnnnnnnnnnnnnnnnnnnnnnnnnnnnncttttttttttttttttttttatccaaacgttgcttatactgtgtaagctatttttggtaaagtacaactagcttagccccttattcatagatgtaagtcgcacagtttttcagtcttttggaccaaatcatggttgctgatactggaacagaacaaaaatagagtaaaggctcgagattcaagccaaatatttcaaaacacctagcacagtggcacctaattgaaccgaacaaatccaaaccggctttgtagagcaggttacgcaaaaagcagaaagactcaagcttctgcaagaactggtgtgtgtatttagtggctggcagctaccaaagccatgtgctctataaggtcaagaactcggttgctgtaaccccattcgttgtcgtaccaagagacaagtttcacaaaggacttgctcaatccaataccagnattggcgtcaaagatactggaccttgaatcaccgacgaaatcattggagacgacatcntcatctg

SEQ ID NO: 101492 - DNA, 509 bp, Arabidopsis thaliana columbia
tattagggcgaattttaaagaactatgacgtggatggcccccttccgtaggctggaatcctttaaagcggccgccctttttttttttttttggcaaaccttaattttttttatcatccaattaattaaacttggcttccattccaccatttggcccaccagtcatggttcccgccttggggagtaatataccatcaacagtcacaactttaaatctctctccgctccagctaagaacctgggcttcttcaagttcgtcgcagacaagagtatttccaacagcatagagaaccgccttctccaattcaggatcgaactggataacatcgaacaccagctttgctgtgccacccaaatttctcaatctttcaaacacttgcttgacacgtactgactgaagaggaataaatgtcataggaggaagcctttgctctttcaagtacttgatgcaatcctttcccgtgttttcatcttctacaactactgcatccataaatcttcccatggcaa

SEQ ID NO: 101493 - DNA, 482 bp, Arabidopsis thaliana columbia
ctggcccccttccttagcctggaatcttttaaagcgtccgcccttttttttttttttggttttttttttcaaccatttaattatttgggagggttggtaattcttagagatccaccaaatcctattcctaataaattctcaagaattacaagaagggagaatcatcaccgggatgccaaaatctgttttaaaaccactttctgtcaccctccacagcataaccatcatggttcctatgccatccatagtgagcatgcgtcctgttctttatcgagaatatagcatgcccgaagcttgcttctctaaaggcagagtacttaggctgaggctcagtcattttggtagccaagccctcaatattgcctccatcaccaatggtgatatagactggagctgattgatctttgactgaagtgcaaatgccgttaacaacattgaaagctatgtttgatacacgtcccgatctttcgtaggcgtggaca

SEQ ID NO: 101494 - DNA, 509 bp, Arabidopsis thaliana columbia
ttaggtgacactatagaagaagcttgacgttgcatggacgccttcgttagcctggattcttttgagcgggcggcctttttttttttttttttctggttaaggaggacctatggtttccattttctgcattttcgggaggttacctggatattaccggatctttttcatccttttccaaaaaaaaagccgaaacctaaaaaggtccaaggataagaaacccaaaaaggagggacctttcaaggttaaaattaaaaggggccacagaaggagaggtaagagaagaggctttaggtataggtaggtatattataagacccactttataaacttaaccaccaaagagaagcccaggcaggactcaaataaatatccttcctttttttatgtctgcaaattccaatttctaaagcagaaacctcattttggtcgttttctcagaaagcttaagagtatatctctcatcaaagaagagagatagagagcttaagaatccttcctttaagctctga

SEQ ID NO: 101495 - DNA, 1448 bp, Arabidopsis thaliana columbia
gtcgacgtcgatggggatgagaagtagtggagaatccgctcacattgggattcgtcattcttcttctaaaacccgcaaaatttctccatttctaccaaaaatatccaacttttacttttctttcctgtgaaattatctgctcaaatctttggttcctgacggagatggcggcgatttcaggcatctcctctggtacgttgacgatttcacggcctttggttactcttcgacgctctagagccgccgtttcgtacagctcctctcaccgattgcttcatcatcttcctctctcttctcgtcgtctgctattaaggaacaatcatcgagtccaagcaacgattttgcaagacgatgaagagaaagtggtggtggaggaatcgtttaaagccgagacttctactggtacagaaccacttgaggagccaaatatgagttcttcttcaactagtgcttttgagacatggatcatcaagcttgagcaaggagtgaatgttttccttacagactcggttattaagatacttgacactttgtatcgtgaccgaacatatgcaaggttctttgttcttgagacaattgctagagtgccttattttgcgtttatgtctgtgctacatatgtatgagacctttggttggtggaggagagcagattatttgaaagtacactttgctgagagctggaatgaaatgcatcacttgctcataatggaagaattgggtggaaattcttggtggtttgatcgttttctggctcagcacatagcaaccttctactacttcatgacagtgttcttgtatatcttaagccctagaatggcatatcacttttcggaatgtgtggagagtcatgcatatgagacttatgataaatttctcaaggccagtggagaggagttgaagaatatgcctgcaccggatatcgcagtaaaatactatacgggaggtgacttgtacttatttgatgagttccaaacatcaagaactcccaatactcgaagaccagtaatagaaaatctatacgatgtgtttgtgaacataagagatgatgaagcagaacactgcaagacaatgagagcttgtcagactctaggcagtctgcgttctccacactccattttagaagatgatgatactgaagaagaatcagggtgtgttgttcctgaggaggctcattgcgaaggtattgtagactgcctcaagaaatccattacaagttaataaattagaaagtaaactaaaaaagattatttgtatcagctcatgaacaatagatataatcccatatacttgggaataaaggaataatgtgaaattcccatcgttgtgctagtgtgtgagagaatcaaataccctaatgatgtaaatgtactttgatgagcttaagtcgttgtagaccattttatccatactactagcctttgtggttgaaaaaaaaaaaaaaaaaaa

SEQ ID NO: 101496 - DNA, 496 bp, Arabidopsis thaliana columbia
ctatgacgtcgcatgcacgcgtacgtaagctgggatcctctaaagcggccgccctttttttttttttttgacaaatccatagtatatttcgatggaaattggggaccatattctctactctacaaccaaaatatctaaaaaaagaaaactaaatcaaaagttcttatattctaaacactctcaaggtgattttgctttataattgttagagtgcaaggaacaaagccaaggagtagtatatagttacaacaaaacgacggtgtattggtcactcaggcagtctcagacggttgaaaaggaccaagaaactctgctcagggccaatatatagaaatccaagatctgcgcccttcacatatggtcccattccctttccattgagttttaagagcttgccctcgacccatcttggctttttaaacccaaagtcagcgatttttccttgccctctgtaactcgcaagcactcccaattcctctggaaacaatccatgatt

SEQ ID NO: 101497 - DNA, 510 bp, Arabidopsis thaliana columbia
  unsure (1)..(510): unsure at all n locations
nnnnnnnnnatccaagaaatatgggattgctaatcatactactgttcattatgattttatgtgtcatgttgtgcctttcatctttcctttttttttagttggcaaaaaaaaaaaagacttggaagtattgaaaaccaaatctgatctcaacctagacaagtcgattaaagctaaaccgaaaaccgaatcccgaccggttaattgaaaaccgatccaaccctttagggactctagcttcactcaaaagatctacgctgctgtcaaaccacctgagtacttgctggctcttctggcaggtgggaattgcttctcctccatttcaaatactcgttaatagctgttgtgccggtcatggtgagtccaaatccgatcatagtggctaagacaatgcacattaccggctgcttcacatcaaatcttacaactctgtagaaaagctgagcgaaaaggaccacaaaaccgaactgaacggtggcgtagatccatacatagttcttcttcaccattgtt

SEQ ID NO: 101498 - DNA, 501 bp, Arabidopsis thaliana columbia
  unsure (1)..(501): unsure at all n locations
nnnnnnnnnnnnnnnnnnnnnnnnnnnnnnnnnnnnnnnnnnnnnnnnnnnnnnnnnnnnnnnnnnnnctttttttttttttttgtgaaaacgttatcattatttaactattaactcaaaacgttggcggtggttgaccatattacaaaatggaacatggcttatgggcagttcctaacaaatataaaacctaagggccaaaacgatacatgtgtgaaatatgatcacgactcatgagtagactctaacctctttagaagctgggtaacgacaccccagttgaaaccccggtactgaagccaccggatgactctagttttacgagtttctgtaggcaagtctcgaccttgaagccaccgctttgatgcctggacataaagctggtccactgcttccttggacagcccgtggtttagttctgcttcttcatctccttcattgcattggcgtttctcaaaaaccagctttatggccgtctctgagtctttgttgcttatgcct

SEQ ID NO: 101499 - DNA, 524 bp, Arabidopsis thaliana columbia
  unsure (1)..(524): unsure at all n locations
nnnnnnnnnnnnnnnnnnnnnnnnnnnnnnnnnnnnnnnnnnnnnnnnnnnnnnnnnnnnnnnnnnnnnnnnnnctttttttttttttttataagaaattaaacatactcaggggggtaatatcactccgctcatcacaatgatatctttaaaataactgtccaaaaaaggtagactagcgaagaaatacacaaaattcagcacaaaaaataacaggagaacaacgctcactgtaacagtctctctcccctctttacacaacttgctctacctctctctctctttctctatgctttaaacataattgatgatggtcttttcgaggggttgtttcatttcatcttgctgcgaatctacgtctcctccttcccttcaccggcatggaaccaaaactagtcagttcatcttcgtcatcgcttgtttcatctgaccgccatctcaatccaccactgttatttctgctctccgtggccaagacattgttgttgttgtcctttaagctcgaagacatgtccattggatca

SEQ ID NO: 101500 - DNA, 503 bp, Arabidopsis thaliana columbia
  unsure (1)..(503): unsure at all n locations
nnnnnnnnnnnnnnnnnnnnnnnnnnnnnnnnnnnnnnnnnnnnnnnnnnnnnnnnnnnnnnnnnnnnnnnnnnnnnnnnnnnnnnnnnnnnnnnnnnnnnnnnnnnnnnnnnnnnnnnnnnnnnnnnnnnnnnngtgcgaaaggaaagattctgatagaaattgaaataattccaagcccacgaaatttacaaaaggctttacaaaatcagaaatccgttttggggtttttttgaatgggactaagcgctaggctttaacaaagaggcctaaatatacataaagttttcagaaggaacatcttcctcatgggaaactaactttttcaacatagcaataagctgatcaaagtcattttgggatctgatgagactcaatcgcacaaaccttttttttgatccaaacacattgccattgggtcctgttattttcgccgttttgaaaatctaatagcagttggggtcttttggtctctcacacttcacccatgcataagaaggagt

SEQ ID NO: 101501 - DNA, 550 bp, Arabidopsis thaliana columbia
gaggagtactcaatgctcaaaacatagatatcctcctttagaacttcccatattatttaagtgctacatcatagggtgttttgatgatatcgatgtatgttcatatgaacggtggaagcaagtatgcaaattttgcaacagacttgactacagcctgtccccgtatcttactctctggaccatcaggctctgagatatatcaggaaatgttggcaaaagcgcttgctaaacagtttggggccaaattgatgattgttgattctcttttgttgcctgggggatcaccagccagggaagctgaatcctctaaagaaggttctaggcgtgaaaggctgtctatgcttgctaaaagagctgttcaggctgcacaagtattgcagcataagataccgacttcaagtgttgatgctgatataacaggtggctcaacattaagctctcaggctttgccaaaacaagaagtgtcaacagcaacttctaaaagttacacattcaaagcaggtgacagagttaaatttgtaggtccttcgggttctgcaatttcttctct

SEQ ID NO: 101502 - DNA, 1706 bp, Arabidopsis thaliana columbia
cggacgcgtggggagatagataccgctgttttggttcttgtacccctgcgtgatcatgtcgcacacctctcttaacttcttcgatctcttctttttctctacacgattcgattgattcaagtatcaatcaatcgaatccgagataagtcatgagtttcttcaaatgggtttcttttgttttgatccttcacttgcttaatccgactctgatttcatgttcctctaatgggttatctcaaataccttcaaagtttcttactttggctaaaaggaatgattttttcgattggatggttggaatcagaaggagaatccatgagaatccagagttaggttatgaggaagtagagacatctaagcttgttagagcagagttggagaagatgggtgtttcttataagtacccagttgctgttactggtgttgttgggtatgttggaactggtcatgctccttttgttgctttaagggctgatatggatgcacttgctatgcaggaaatggtggaatgggaacacaagagtaaggttccagggaagatgcacgcttgtggacatgacgctcacactacgatgcttctcggtgctgcaaaattgctcaaagaacatgaagaagagctacagggcacagtggttctagttttccaaccagctgaggaaggaggaggaggtgcaaagaagattgtggaggctggagtgttggagaatgtgagtgcaatctttggattacatgtcacaaatcaattggcattaggtcaagtgagctcgagagagggtcctattttggctggtagtggctttttcaaagctaagataagcgggaaaggaggccacgcagctcttccgcagcataccatagatccgatactggcagcttcaaatgttattgttagcttacaacacctcgtttcacgagaggcagatcctttagactctcaggtggttacagttgctaaatttgaaggcggtggtgctttcaatgtgattcctgactctgttactatcggtggtacattccgagctttttccactttttcaactaaaagctttatgcaactcaagaaaagaattgagcaggttatcacaaggcaagcgagcgtgaatatgtgtaatgcaacagtggatttcattgcaagaggagaaacctttttttccccaccaactgtaaatgacaaagccttacaccagtttttcaagaacgtttcaggcgatatgttagggattgagaattacgtcgagatgcaaccattaatgggatcagaagatttctctttctaccaacaagcaatcccgggacattttagcttcgttggaatgcaaaacaaagctcgttcaccaatggcgagccctcactcgccgtactttgaagttaacgaagaattactaccttatggtgcttcccttcatgcttccatggccacaagatatcttcttgaactaaaagcttcaactctaaataagagtaacaaaaaagatgaactttgatgccaacaaacattggcttctcctattcttctactctgaaaaatgtcaaaacatggtaacagttttttcttttttacagagcctgccatgtaaagattaataaattgttatgcagtgtcaagcttctattaaatccaagaaatgttattactgcaaacaaaaacagatttgggccattgcaatgagagagctgaaacggtcaatttaaacaaatcagagcgg

SEQ ID NO: 101503 - DNA, 589 bp, Arabidopsis thaliana columbia
  unsure (1)..(589): unsure at all n locations
atgannnnnnnnnnnnnnnnnnnnnnnnnnnnnnnnnnnnnnnnnnnnnnnnnnnnnnnnnnnnnnnnnnnnnnnnnnnnnnccacgcgtccggctgcttctgcggcgatcaaaaacgccgtcgacgataataacctcaccggcgccaccaacaccgcccattctatcaaccaaacaaaatctcgccgctaatttctctctctatggcgctttattgccgtgatacactaatcatcatcttccaaaagctcaccgtcgccgatctagcgcgtgcgagctgcgtctgtaaggtttggaattctgtagccacagaagacgatcttgttgtatctgctttcacggctccatggcggatcaaagaacttgttggaagaccagcttctgtttcgttttggagagataacggaatctggaaatttgctatttctcatcggatttgtcgtggtgatagtgtgactagcctcgccgtcaaatacgccgttcaggttatggacataaagcggctaaacaacatgatgagcgaccatggtatttactcaagagacagactgcttatcccaataagcaatcctgaaattctcgcaaacac

SEQ ID NO: 101504 - DNA, 483 bp, Arabidopsis thaliana columbia
acgcggacgcgtgggttcactttttcttctttccttttttctctctctcaacgaccacctccatgcccggagttgccttctcctgtggtcctgcctccgatctgggaatcttcatctccgaatccaccaccttctcacgctccatctccgcctccctctcatcttcctccagttcaccctcctcctttcgctgttgcaccccattgaacctcaaatcgctgcgttctcatcgccgtcctaagatttctcatatttgttgcgacggaagctctatttccggatctggcctcggcgatcccgatctcgagtttctccaagcctctgtcctcgttgcagagacaagtatgcattacaaaatgcggcgacatggtttccggcaagattcaatgtggcaaacttctaggcctttgcctcccttttctattatagctagtgaatccaaggttggtgttctccctattgggcttggatttctccgtcaat

SEQ ID NO: 101505 - DNA, 1218 bp, Arabidopsis thaliana columbia
  unsure (1)..(1218): unsure at all n locations
cgactcacattagggagaagctggcacgcctgcaggtaccggtccggaattcccgggtcgacccacgcgtccgcccacgcgtccaagtcaagcaaaaaaaacgaaacaatggatgcgttctcttccttcttcgattctcaacctggtagcagaagctggagctatgattctcttaaaaacttccgtcagatttctccagccgttcagaatcatcttaaacgggtttatttgaccttatgttgtgctcttgtggcgtctgcctttggagcttacctccatgtgctctggaatatcggcggtattcttacaacgattggatgtattggaactatgatttggctcctttcatgtcctccttatgaacaccaaaaaaggctttctcttctgtttgtgtctgctgttcttgaaggtgcttctgttggccccttgatcaaagtggcaattgatgttgacccaagcatccttatcactgcatttgttggaactgcgatagcgtttgtctgtttctcagcagcagcaatgttagcaagacgcagggagtatctctaccttggaggactgctttcatctggcttgtctatgctaatgtggctccagtttgcctcttcaatctttggtggctctgcatctatctttaagtttgagttgtactttggacttttgatctttgtgggatacatggtggtggacacacaagagattatagaaaaggcacacctcggtgacatggactatgtaaaacattcgttgacccttttcactgactttgtagctgtgtttgttcggattctcatcataatgttgaagaactcagcagataaagaagagaagaagaagaaaaggagaaactgaggggatgtaaagtaaatttaactttatggttgttatcgtgtgtggccactttgaagatattacttgttagcactctctattggtgaccagacatgtttccactaaaaaggatctgcttgtttcacttctgcacaagtaccatcttcagattgtaaatgactcgagtgttgttcttcttttcataaacttttgttctttaagagtttggttctactgattgcatcttaccaagctaagaataatgtaggaaaatgataatcctgtttaaattttctaaaaaaaaaaaaaaaagaaagnnnnnnnnnnnnnnnnnnnnnnnnnnnnnnnnnnnnnnnnnnnnnnnnnnnnnnnnnnnnnnnnnnngaa

SEQ ID NO: 101506 - DNA, 477 bp, Arabidopsis thaliana columbia
cccacgcgtccgcccacgcgtccgactctctctctctctcgttgcaagcaacttgttttctgaatccaaagaagacgataacgatgaatggagctataggaggtgaccttttgctcaattttcctgacatgtcggtcctagagcgccaaagggctcacctcaagtacctcaatcccacctttgattctcctctcgccggcttctttgccgattcttcaatgattaccggcggcgagatggacagctatctttcgactgccggtttgaatcttccgatgatgtacggtgagacgacggtggaaggtgattcaagactctcaatttcgccggaaacgacgcttgggactggaaatttcaagaaacggaagtttgatacagagactaaggattgtaatgagaagaagaagatgatgaccatgaacagagatgacctaatagaagaaggagaagagagaagtcgaaaataacagagcaaaa

SEQ ID NO: 101507 - DNA, 540 bp, Arabidopsis thaliana columbia
  unsure (1)..(540): unsure at all n locations
cggccgccctttttttttttttttttaccaaaaacagtttctttttgtgtgtacgtatacgatttgtagattatacacatcaatatttttgaaagattagtttttaagactaaaaatcgccaaagaaaagaaaaaagagaaaagtttttgttgttattgaggatttacaagattagattgcaggagcttgctcaagcagtgaaacaatctcaatcctgcttctcaccaatctatggaacacttgcctcacttgtctctgcaaatcctccaatcccacttccattcgccggcaaatctcctccatctcatccaccttctccgcaacttccacctcctcttcttcatctgccggaaacctaaacctctccgcgaattccattaaagataacccaatcttctccatcctctgcatctcctccatcaatccaccaccaccacaacgcttctccttccggtttatctcttcaccaatcctctcctgataatcaaggggggagncaatttggggttngangggagggnanagaatggtgttgaang

SEQ ID NO: 101508 - DNA, 706 bp, Arabidopsis thaliana columbia
gatgtcacgcgtgcgtaagcttggatcctgtagagcggacgccctttgctttttttttttgactttaatttttaacatgggggggtacgtatacaacttgtagattgtcctcttctttttttttgaaagattagtttttaagactaaaaatcgccaaagaaaagaaaaaagagaaaagtttttgttgttattgaggatttacaagattagattgcaggagcttgctcaagcactgaaacaatctcaatcctgcttctcaccaatctatggaacacttgcctcacttgtctgtgcaaatcctccaatcccacttccattcggcggcaaatctgctccatttgatccaccttgtccgcggcttccacctcctctttttcatctgccggaaacctaaacctgttccgcgaattccattaaagataacccaatcttctccatcctctgcatgtgctccctcaatccacccccaccccaacgcttgtgcttccgttttatctcttcacccatcctctcctgagtactcgtagcggcgctagcccaattccggtgttttggaagcggcaatggttccacaagaacagttggtttggttgacaaggaaccgtcgtcactagtgacccacatgagccagaaccataaaatctgcttatttatggaaaacccgggaatttggccgggtgccgaaaaggctttttagttttccaac

SEQ ID NO: 101509 - DNA, 547 bp, Arabidopsis thaliana columbia
  unsure (1)..(547): unsure at all n locations
aagcaaaccaataatggctaccactcgtctaactctagctcctctcctcctcatcgcagccgtactactcgcaaccaaggcaacggctcagccggcagcccccgctccagagcctgctggtcccatcaacctcactgcgatcctcgaaaaaggtggtcaattcactactttcatccatcttctaaacatcactcaagtcggtagtcaagtgaacattcaagtcaatagttcatccgaaggtattgacggtgttcgcaccaacaggcaatgcttttcaaaacccttaaaaccccggaacccctaaaccaagttaaggcccttgacgggtcaaggtaaaactcatttctcttanccacggtaaggcccccaaattttttccagttttgggtggttcttccttcttccgtggggaaaccccggttagggccttaaaggttttttggcccggggcaacnggggttttacgggggttaaattttaccgggccaaanaaacccaatnaaaggnnnttnnntgggtttttgggggcannggntttggaantttt

SEQ ID NO: 101510 - DNA, 966 bp, Arabidopsis thaliana columbia
  unsure (1)..(966): unsure at all n locations
acactttaactaagcaaaccaataatggctaccactcgtctaactctagctcctctcctcctcatcgcagccgtactactcgcaaccaaggcaacggctcagccggcagcccccgctccagagcctgctggtcccatcaacctcactgcgatcctcgaaaaaggtggtcaattcactactttcatccatcttctaaacatcactcaagtcggtagtcaagtgaacattcaagtcaatagttcatccgaaggtatgacggtgttcgcaccaacagacaatgcttttcaaaaccttaaacccggaaccctaaaccagttaagccctgacgatcaagttaaactcattctctaccacgttagccccaaatattacagtatgggatgatctcctctccgtgagtaacccggttaggactcaagcttctggccgagacaacggtgtttacgggcttaacttcaccggccaaacaaaccaaatcaatgtctctactggttatgtggagacacgtattagcaattcgttgaggcaacaacgtcctctcgcagtttatgttgtcgacatggttttgttgcccggtgagatgttcggagagcacaagctttcgccgattgctcctgcccctaaatctaaatccggtggggttaccgatgactccggctccactaagaaggcagcgtcaccgtcggataagtcaggctccggtgagaagaaagtcggactagggtttggtcttggacttattgtcttatgtttgaaatttctcttttgaaaatttaatagcaaagatttgttttgctttctattgattttatcctgcgatgtgaggtataaatatgaaatttgttgattaagttccgtgaaataaaatgtgagatttttaataaaaaaaaaaaatggcncntttannataaaataaaaaaannnnnnnnnnnnnnnnnnnnnnnnnnnnnnnnnnnnnnnnnnnnn

SEQ ID NO: 101511 - DNA, 1141 bp, Arabidopsis thaliana columbia
  unsure (1)..(1141): unsure at all n locations
tgatctnnnnnnnnnnnnnnnnnnnnnnnnnnnnnnnnnnnnnnnnnnnnnnnnnnnnnnnnnnnnnnnnnnnnnnnnnnnccacgcgtccgacagaaggggagaggaaaaaaaaagtgagcgtgttgatgcataacgaacgatgccattttccgcatcaatctcatcgccttcttcttctgtcgcgcttcttcgatcgcctctctctttcttcatcttcactcccaaaaccctaatcttcaccagaaccaggatctctggtttcccttatcttgcttcccggcgatcccgcgatttcatcaacgggagggatgatttcgctgacgatacgaggagctggaaccggaagatcaaaccggagtatgggttcgatgaggattacgatggagaagaagatgatgatgatcacgaggaagaagatagaagcttggatctgttacttagatttgtagaaaatgttttcagaaagatttctaagagagcaaggaaagctgtccgatcaattttgcctgtttcgatctctacgaagctcgtggggttttcagtgaatggagtacttattcttgcttttttgtggattttgaaggctttcctcgaggtagcttgcacacttggaactattgtatttacgagcattctacttatacgtggactttgggccggagtagcatacatgcaagagagccgcaacaataggatcaatgaactcgctgatgatcctcgtgcatggaacgggatgcaaccagtttcctgatgaattcgctttacacttgtagaaatcagaattctgacttttgggagagccataattgtttaggttcttccaaggcaataaaaccacagctgagttcagaatcagaaagcagttacagtggatgttcattggcaatgtctgatgatttagtaagtaaaaaaagtgtaatattgtagcattcaccaagtcagctatgctggtgtgtagctcaactgggatctaagtcgtcgccaatggtgaccatgttttcttagtttctaaataaataaaccaaacatataggccaaaaaaaaaannnnnnnnnnnnnnnnnnnnnnnnnnnnnnnnnnnnnnnnnnnnnnnnnnnnnnnnnnnnnnnnnnnnnnnnnnnnnnnnnnnnnnnnnnnn

SEQ ID NO: 101512 - DNA, 552 bp, Arabidopsis thaliana columbia
acgcatgcacgcgtacgtaagcttggatcctctagagcggccgcccttttttttttttttttataagaaacaacttttaaaaaaattaaaccaactaggcatttggttgaaaacaattacaaaaaaaaaaaatcaactcaactgtttcatcaccaagcacaaagctccatttgccttctacaacaaaacctagattaatggagacatactataaaccccaaactcaacacgataccataaaaatacaaaaacaaaaacaaaaaacaaaagatgggacattgtcgctgtttagaaccagaaacttatttttcctacaactatgacagaatcaaacacaaaactggacttctctctctctctctctctctctctttctcttcttcttctcctactcttgggtctcagcatattaataaaactggctatgactttggcttttaccctttccctttttccttccatatcagcttgaaactctcggctcttcacggacattcttaccccctccttctaactcctgaactcctaaaatcacggggctgggcacaggcg

SEQ ID NO: 101513 - DNA, 528 bp, Arabidopsis thaliana columbia
  unsure (1)..(528): unsure at all n locations
ctatagnaagagctatgacgtcgcatgcacgcgtacgtaagcttggatcctctagagcggccgcttttttttttttttttttttttttttttagagagcgtttgaacaatattagtaataaataaatatctgatacatgtaggtagcagcagaagtagccaaaaaggctaactaaaacaaaaatgctatggaattgagcccacatgaaaattttacatcttaattttcacttgctctgtcgctgtttcttggctaaagcagcaccggtggcaagtcggagagcttggccggagttcttgatgactgaagacgatctggggacttgcgctctcctcatcttcaagaaatctaacccggttttcaagcattctggtggtggaatctccttgtaaataaccgtttcgatccctgagcttttttgctttttctttcttgggagttcgtctatgatctcttcttcttcaaaatctgactcagctttttgtttttctcgctccgcaagaaagtctatgatgtctttggaaagga

SEQ ID NO: 101514 - DNA, 488 bp, Arabidopsis thaliana columbia
tgcacgcgtacgtaagcttggatcctctagagccgtcgctgggtttttttatcctttttttttttttttaataaaagttgatgtttattcgtatattatgagtttatagagcaattctgagactcggacctatcaattgggataagatcacaagacacataaaatacaacaatagatcgactggtctaaatggggatctttaagacagacacacatgcacaattttgcattgtttgagcctctgcgtgccatcactacaaaacatcctccattaacgggtatgagggtagttgagcttcttcatcttcatccttcttcttgcatatgtaaataaaatgggaatcaggatcctccagaacataatcatgtggcagcattccctcacttgttataaagttagcttccatacaagactttgctgccacacatcaatgaatcaagggttccttttatcataatagtgtcaaaggaaatcgcttcaaaggaac

SEQ ID NO: 101515 - DNA, 1036 bp, Arabidopsis thaliana columbia
  unsure (1)..(1036): unsure at all n locations
cagctctcctacgactcactattgggaaagctggtcacgcctgcaggtaccggtccggaattcccgggtcgacccacgcgtccgtctttctctaccattttcttttgctttaaagctctctcaatcatgatcatgaagacccccatcacagcattccattcatcctcatgaataattctacatcagtgaagaggctggtttcatctaaggcaatgaaatgtttctacttcagcaaagacaaaactcaggatgatgaagctaagactagaaagtttggttcagctacgatggctagaggaggatcagggtctgagtttaattcagatacaagtactgctacttccattacttcttccttgcacgtcctctcagagacacacagtaataatctcaaagtatttgtcctcgatgaccttaaaaccgctaccaagaacttcagccgctccttgatgatcggtgaaggtggctttggtggtgtctttcgtggcgtgattcagaaccctcaagattctcgtaaaaagattgatattgcagttaaacaacttagtagaagaggtctacaggggcataaagaatgggtgacagaggtaaatgtattgggagtagtggagcatccgaatctggtgaagctgatcggttattgcgctgaggatgatgagagagggatccaacggctacttgtttacgnatacgtacaaaacagaagtgttcaagaccatttatccaatccgttttatagtcactcctctttcctttggtcccacccagacttgaaggtttgctcaaagacaacttgctaagagggccttcgcttatccttcaatcaaggcaatgggggtttcaagatccatcttttaggggggtttnaaaatncccctaaananccttccttgnttgggancttggattcnaaaanccttcgggttttcgggcctggctccnaatggggcctcaaggtggnatcacntacggttccncccgggggttttgggnccccttggtttcagncccgnttaatcnaanagggncnncggtt

SEQ ID NO: 101516 - DNA, 522 bp, Arabidopsis thaliana columbia
  unsure (1)..(522): unsure at all n locations
nnnnnnnnnnnnnnnnnnnnnnnnnnnnnnnnnnnnnnnnnnnnnnnnnnnnnnnnnnnnnnnnnnnnnnnnnnnnnnnnnnnnnnnnnnnnnnnnnnnnnnnnnnnnnnnnnnnnnnnnnnnnagagcaaaacaatatttgaataagaatatgattcttacataccttaaggctttgggtttcattccaagaagatcaatttttcagaatcatttttttaacacttggttagaatctcagcaccatctttggttataagaatggtatgctcgaattgcgccgagaggcttgcatcttctgttaccacggtccagttatcatcccacattatcgggtttctgcttcctattagaagcatcggttcaatggtgaaggtttgattcaagaccatacgtccagcttcattgttccggaaatgcagaacaactggatcagcgtggaagacgctgccaaccccgtggcctacaaattgtcgaacaactccatatttatgtttatctgcaagatcatgaatgactttg

SEQ ID NO: 101517 - DNA, 527 bp, Arabidopsis thaliana columbia
  unsure (1)..(527): unsure at all n locations
nnnnnnnnnnnnnnnnnnnnnnnnnnnnnnnnnnnnnnnnnnnnnnnnnnnnnnnnnnnnnnnnnnnnnnnnnnnnnnnnnnnnnnnnnnnnnnnnnnnnnagaattctaaaattcttccatttccacaacaataatcatcttcctccacttgcttcttcttttttcaagagccattctaaatatcacaagccagagtagaaaaatgtatatgtataaagagattcataatttcaatgtcaaaattttcgcgtttctaatcatctactggtgctattagcagtcttgttcttgctcatatcagcaagctcttcaataagttttttctcctctttgctcaatctcttaggtatctccacttgtactctcaccaactgagctcctctcatattactcttggtcaataccggaactcctttttttcgccaccacaagcgtcgtgctaggttgtgtcccagctggaactttcaaatctactgtcccatccactgttggtactttcagtgtcgtctctaaaatcgcatcgat

SEQ ID NO: 101518 - DNA, 673 bp, Arabidopsis thaliana columbia
tacttcaagataaaccagaacatcagggcttgacgctgcatttcgtggaagacagactcgcaacactgaaaaatgtcataaaagagcctgaattagacaaatggagtttatacctaggaacctggggatacaacactgagaaagagagagctgaagcagcaggcattcccaggattcaggttattgagctctccacgtttagcaataagcttaaatgagtgcatatactcattggaaaagaaacaaagctttcctctttattgtattctacggcattcaacggaaactaaaaaccaaacatgtttaggtaagattcagtaaaagagttgaactttcagtactacccattatagaagcttttctgtgacctataattcatccttagtaagatcattcttgttaccatcaccatcttcgggatctttcctttgctcagcttgaaatttggcaaagacatcttcaaatggaggatctccaggtcttctaaactcttgcttccctatcttgacctcggaagcttcttcttggctcagcacgaattcccttagctcagtcacaagcttcccattttgcatattgaacatcactgtgcttcgatctacagccatgaatcttactcctatccctcctgttcttaaaacttttgtccatttcatagcaatatcaatcacca

SEQ ID NO: 101519 - DNA, 601 bp, Arabidopsis thaliana columbia
  unsure (1)..(601): unsure at all n locations
nnnnnnnnnnnnnnnnnnnnnnnnnnnnnnnnnnnnnnnnnnnnnnnnnnnnnnnnnnnnnnnnnnnnnnnnnnnnnnnnnnnnnnnnnnnnnnnnnnnnnnnnnnnnnataccaaactcactgctcgtatgttgtttagtataatattacaggattctcaactttttacaaatacacatttatgtaccgctctttgtgttcttagtcttgagaaacacttgagtaacttgttgaagatctgatatatccaaaaaagttctaaagtctaaacaatgcggaatgaactagctatcctcttcagatccttgtagtgtctcttccattgaagaccgtttccggtgacactgaacaagtaaaggcggtttccggcagctgttgcagttatcagtacatgaggcggctctagctcgaattggtaatagagtctaccatcgtgttctgcaacattggaacttaacaccttcccttctacgttttctccaataacttctggtccaaacgcgttaatcaccttcgctggttgtccaatattttcaatcttaacatcgtccccgaggttatctgcaaatctaagaacaggagctacaataacagacaaac

SEQ ID NO: 101520 - DNA, 563 bp, Arabidopsis thaliana columbia
  unsure (1)..(563): unsure at all n locations
tgacgtggtacgcacgcgtacgtaagctcggaattcggctcgagctccatacaaggattgaagcctgcgctgtatgcagtggcagcgaaatccgaagtgttgtcttagccggtcgtcgcttctatgaaaaggaaggcttgccagcattccctatgggaaatattgaccagacaagaatgtggaaggtgggggaacgcgtcaggaagtccagacctgctggtgacttgggtccattgtatcccttcaccgctggagtttatggagcacttatgatggctcacattgagatcttgaggaagaaaggtcactcttactcagaaatcaccaacgaggagtgtgattgaatcccgtggactctctaaaacccatttatagcccgccagggggagtggccttcatgggatgacaacctgctccacccacaccaaagaattgggtttcgaggaaatggggcggccacggtttggactcacatcccggactccaccaagtctcttggggttttgggcaattgggtcagcaattaacnaggggccttatcagnaacttttttcttttgnncc

SEQ ID NO: 101521 - DNA, 703 bp, Arabidopsis thaliana columbia
  unsure (1)..(703): unsure at all n locations
ttccttggaattttcccacagattggaagtggtaccntaggatccaactntgtactggnccatnttcccctcccgtggagttntntgcnctttntgcccgattgagatctgngaagaaaggtcactctactcagaatctcaacgngggtgatgaatcctgactctctaacccattatgcacgccagggagtgtccttcatggttgacaactgctcaaccacagcaagattgggttcgaggaattggggcgccacggtttgactacatccctgacccaacaagctcttgtggctgtggacagtggtgcagcaatcaacagagacctaatcagtaacttcttctctgatccagtccatggtgccattgaggtctgcgcacagctcaggcctaccgttgatatctctgtgcctgctgatgcagactttgttcgacctgagttgcgtcaatctagcaactgagtgaagggttgcacgtttgtcagtctcttatttgtaatcggagtattaagtcgagagtttgtgatgttttcttaggcgtgactgtttgttttgtttgaaggattatgtctctttgctttggtcttaaaatctacttaaatcaaaaaaaaaaaaaaaaagggcggccactcggacgcgtgggtcgacccgggaattccggaccggtacctgcaggcgtacgagctttccctaaagtgagtcgtatt

SEQ ID NO: 101522 - DNA, 2212 bp, Arabidopsis thaliana columbia
  unsure (1)..(2212): unsure at all n locations
nnnnnnncagctactnnnnnnnnnnnnnnnnnnnnnnnnnnnnnnnnnnnnnnnnnnnnnnnnnnncggacgcgttgacccacgcgtccgcccacgcgtccgattaacttctctcacactgactctgcgaccctaatttgtgagctctcttctctttgcgcagtcaatttgctacaacttagaaaatggcggcggctacttcatccatcgctccttctctttcatgcccatctccttcttcttcatccaaaaccctttggtcttccaaagccagaaccttggctctacccaatatcggtttcctctcgtcttcttccaagtctctgaggtcgcttactgccaccgtcgctggaaatggcgccactggatcctcccttgccgctcgcatggtttcttcgtctgcggtcaaagcccctgtttctctcgattttgagacatctgtcttcaaaaaggagaaagtttctcttgctggttacgaagagtacattgtgagaggaggaagagacttgttcaagcatctcccagatgctttcaaggggattaagcagattggtgtgattggctggggatctcagggacctgcccaggctcagaatttaagggattcacttgtggaggcaaagtctgacattgttgtcaagattggtctcagaaaagggtctcgctcatttgaggaggcacgtgctgctggcttcactgaagaaagtggtactttgggtgatatatgggaaactatcgctggcagtgatcttgtattgcttttgatctctgatgctgctcaagctgataactatgagaaaatattctctcacatgaagccaaacagcattcttggtttatcacacgggtttctactagggcatttacagtcctcgggactcgatttcccaaagaacatcagtgtggtcgctgtatgccctaagggaatgggtccttctgtgaggaggctttacgtccaaggaaaagaaattaacggtgctggaatcaacgccagttttgcagtccaccaggatgttgacggtagagccgccgatgttgcattgggatggtcagtagcacttggttctccgtttacttttgctactactcttgaacaggagtacaggagtgacatctttggagaaagaggaattttgcttggtgctgttcacggaatcgtggagtctctgtttagaagatacaccgaaaatgggatgagtgaagacttggcttacaagaacacagtagaatgcatcacaggaacaatttcaaggactatctctacccagggaatgttggctgtgtacaactccttgtctgaagaaggtaaaaaagattttgagactgcatacagcgcatccttctatccttgtatggagattctctatgaatgttacgaggatgtacaaagtggcagcgaaatccgaagtgttgtcttagccggtcgtcgcttctatgaaaaggaaggcttgccagcattccctatgggaaatattgaccagacaagaatgtggaaggtgggtgaacgcgtcaggaagtccagacctgctggtgacttgggtccattgtatcccttcaccgctggagtttatgtagcacttatgatggctcagattgagatcttgaggaagaaaggtcactcttactcagaaatcatcaacgagagtgtgattgaatccgtggactctctaaacccatttatgcacgccaggggagtgtccttcatggttgacaactgctcaaccacagcaagattgggttcgaggaaatgggcgccacggtttgactacatcctgacccaacaagctcttgtggctgtggacagtggtgcagcaatcaacagagacctaatcagtaacttcttctctgatccagtccatggtgccattgaggtctgcgcacagctcaggcctaccgttgatatctctgtgcctgctgatgcagactttgttcgacctgagttgcgtcaatctagcaactgagtgaagggttgaaagtttgtcagtctcttatttgtaatcggagtattaagtcgagagtttgtgatgttttcttaggcgtgactgtttgttttgtttgaaggattatgtctctttgctttggtcttaaaatctacttaaatcaaaaaaaaaaaaaaaggaaaaaaaatctagaggatccaagcttacgtacgcgtgcaggcgacgtcannnnnnnnnnnnnngtcacnnnnnnacaatcgcagcnnnnnnnn

SEQ ID NO: 101523 - DNA, 529 bp, Arabidopsis thaliana columbia
  unsure (1)..(529): unsure at all n locations
cgaattctattaggagcnnnnnnnnnnnnnnnnnnnnnnnnnnnnnnnnnnnnnnnnnnnnnnnnnnnnnnnnnnnnnnnnnnntttttttttttttttttttttttttttttccatccattatactcttttcaaaccttcatagtcattttctcaggcttcttttaaattgaattagaaccacaattaaagtaaaacggattgggttggatttcatacatatatctaacaaaatctgaagagtttacacaggcttttttagcgtctatgtgacctcaaatgtctcttaaaatcttggggaccagccaaatctaatgaggaagtgttcttcaactcatctgaaagctgcaatgcactctgaaaatctcctgacttcttcagacaatcgattaaagctcggtagacataaaccgatggtcgaatctgtctctgcttcatctcatcgaaaagcctcaacgattccttaacgttcccagatcgacccaaactgtctattaccgctgtataacttagcaaatctggttcaata

SEQ ID NO: 101524 - DNA, 540 bp, Arabidopsis thaliana columbia
  unsure (1)..(540): unsure at all n locations
nnnnnnnnnnnnnnnnnnnnnnnnnnnnnnnnnnnnnnnnnnnnnnnnnnnnnnnnnnnnnnnnnnnnnnnnnnnnnnnnnnnnnnnnnnnnnnnnnnnnncgacattatttttagtattttattaaacgtaatacattttatttttttggacgggattacaagaaaagtatacaacaataggtggagattttgtatcttacaacaataagattaacattttctttattacatgtccaaacaagaaaacaagataaaagaagggcttaagatggtctttgtcaagcaagttcttcggaccactcgtgtaatgtaggagtcttgactccaatattcttcatgtcaagaatattcgcagtatggatctctggtgttgcagcagctgtggcatctgtaataacagtcacattgggataatccagcgccactgcatcaaacaccgtttgccggatacagttcggcgtttgcacaccagcaatcactaacttggtaacccctgaagtttgcaagaaggaatgaagattggtactaaagaaagcac

SEQ ID NO: 101525 - DNA, 734 bp, Arabidopsis thaliana columbia
  unsure (1)..(734): unsure at all n locations
taggacnnnnnnnnnnnnnnnnnnnnnnnnnnnnnnnnnnnnnnnnnnnnnnnnnnnnnnnnnnnnnnnnnntntttttgtttttttttttttttttttttttgcgactccaattttaccagatacatccacacaccaaacaagtctcatctttctttacacagatggttttagacttttagttttcaactttaaacaaacaaacaacacgttttgcttattagcaacactaatctgttgctgtttctgtattcatagcctttgtattttttttttccgtgtatctcaatgttccgccgcacccgaatggtaagctctacgcctcaactgagattcccctgatggctgttgcagatatatcctcgttggatcattagggtccacgtacgcatgtctcatcatttcgtccacaggtgtctgagcggcttgaagaggatcaacatgaggagctgccgctgctgcttctgctgcttgttgcatttgtctgttggattggctcactgatgatatgagattcaagaaagagaggaacaaatgtcccacaancaacttccttaaaatagggaccttgaaactggggggttgnatatagagcccaatgcccaatttctgggancacangggncacnttggccaagnaatattggtgaagggaaaaatnggggggtaaattcccggnatgggtnnaaacaggggggtgcnaaaggacaaaggtgnaaangggtggtgaanaa

SEQ ID NO: 101526 - DNA, 381 bp, Arabidopsis thaliana columbia
  unsure (1)..(381): unsure at all n locations
ttacgattcctannnnnnnnnnnnnnnnnnnnnnnnnnnnnnnnnnnnnnnnnnnnnnnnnnnnnnnnnnnnnnnnnnnnnnnnnnttttttttttttttttttttttttttttaggcccaagagatacacttcggaaagcgggtatccaaacaaattcaatccctagttactgaacagatatatccgtcaattatccccttcacataatgatacaatccttcttccctttcttctccgccttctgtcgtcttctcgccagccgtacccttctgtcgtcggacgcgtggnnnnnnnnnnnnnnnnnnnnnnnnnnnnnnnnnnnnnnnnnnnnnnnnnnnnnnnnnnnnnnnnnnnnnnnnnnnnnnnnnnnnnnnnnnnn

SEQ ID NO: 101527 - DNA, 483 bp, Arabidopsis thaliana columbia
cggaaaaacaattctccttcgattttccgattctcacaaactcaatctcgatccagattccgagcttatccttctctggcgaatttcgattttctgtgtttccgatctgattacagagaaccacatcgaagcttcgagaaaaaaaaacacgatgtttaacgggttaatggatcctgagatgattcggctcgctcaagatcagatgagtcgtatgactcctgctgatttcgctaggatccaacaacagatgatgtcaaatccagatttgatgaatatggcaacagagagtatgaagaacatgaggcctgaagatttgaaacaagctgcggaacagcttaagcatactcggcctgaagatatggctgagattagcgagaagatggctaaagcttcccctgaagatattgcagctatgcgtgctcatgctgatgctcaatttacttatcagatcaatgcagctcagatgcttaaaaaacagggaaa

SEQ ID NO: 101528 - DNA, 521 bp, Arabidopsis thaliana columbia
ctatagaagactatgaggtcgcatgcacgcgtacgtaagcttggatcctctagagcggccgccctttttttttttttttacatagagctatgcccattatcatcatgtacataaacatacacatatccatatacatgcaaatgctgatcaacagacctacttatcacatgcagcgaactgatcagcaggtgcacttatctcaccctgatcaacatcaccactagtaccaccactagtgctggtttgtccaagcaaactacttattgaacgtgcctttaccatgccaagctttactctcttcttcttcacttccaccaccaccgcctttttctcgccgccacgaccaccaccactcttgttcatgctccttacccttcctttaccgagatgatgctcacaaagagaataaccaacaagcgtttgctgacacatctccatcctctaccgtaacacggctgcaccgtgatccttcctctaacccaccaccgctctttttcgctttcttttccctttattaatac

SEQ ID NO: 101529 - DNA, 541 bp, Arabidopsis thaliana columbia
  unsure (1)..(541): unsure at all n locations
nnnnnnnnnnnnnnnnnnnnnnnnnnnnnnnnnnnnnnnnnnnnnnnnnnnnnnnnnnnnnnnnnnnnnnnnncttttttttttttttttaaaaatttaacagagacctcgacttaatagctttgttctctcagtgattcagactacttttatcttttatgcaacaacattgtattgacatctctctgaatttagtagtagtcttaacagaaaatagattccaagtttgtttactggatgagaatataatcagcatcaaagacatctccagcagtaggagaaaggttgtttctacggagttgggcatgagtctccgcttcgtgtggaaatatcttaaccacgtcttgtagctccagctttctaacttctacttgttcttctgtaatgggttttttgagccccaagtataccaaaccaaccacaatcagaatagccccaaggagaaccatcagaaaagtgaatagaccaaacgcataaggcgtgttctgcgcccccgggatcccatccacattgatcccaaacagccctacgatgatggtaa

SEQ ID NO: 101530 - DNA, 560 bp, Arabidopsis thaliana columbia
  unsure (1)..(560): unsure at all n locations
taggagcnnnnnnnnnnnnnnnnnnnnnnnnnnnnnnnnnnnnnnnnnnnnnnnnnnnnnnnnnnnnnnnnnnnnctttttttttttttttttttgaatgtaaaaactactagggaaccgaaggtagaggaatattacaatagaattttctttcaaaaaaaatccccaccagaacgatgtaaaatttctatacactgtgaacaatttagagtgacaacgtaagtaatgcacaaaaaagataacatcataagtacagaaaatcacacccctgtttttgtgactgtcctaactcctaaccagaagtagcaagcaacacagctttcaatcctagagagttcttacacttatgtgaactcaatctcctcgtaagaatatctgattcctcgcttccgtcaagagcaaaaaaacattcaggacttggctcagagcttcagtgtaagggtcaaaatgactcagggactatagtcttgcagaacttatgaggttggaagatggatgaagagctccaaggctcaaaatgtttccggtgtttgaaaaattggaagacaaatggaagatgc

SEQ ID NO: 101531 - DNA, 576 bp, Arabidopsis thaliana columbia
  unsure (1)..(576): unsure at all n locations
nnnnnnnnnnnnnnnnnnnnnnnnnnnnnnnnnnnnnnnnnnnnnnnnnnnnnnnnnnnnnnnnnnnnnnnnnnnnnnnnnnnnnnnnnnnnnnnnnnnnnnnnnnnnnnnnnnnnnggatgtcaacaacataaaaagactttattacaaaatgcgttagcaaaaagccaagtgagtggagaagttttatttggtgtaaggaagagaagcaagaaaggcgagagtaaaaggagaagtggatttgccaaacattgtgcaaaatggaggaagtctttcgagaaccctttggacttgtggagtgcgacggttcaagtcagttctgagtttcaagagaggtctttgcttcttcttatcatcagatacttcttcctccttgtaaagtttgagaacaaagctagttggtgcctttttcccacctgcgaattgaatttagatgccatccttctttcaattgctgcttttcttcggcctcgttcctatccatcaactcttgcttctttcctccccaacctactttgcattgtaaaggcttcctatttcatccnatgncaantcngagnntnccancgcgntgng

SEQ ID NO: 101532 - DNA, 520 bp, Arabidopsis thaliana columbia
  unsure (1)..(520): unsure at all n locations
cactatagnaagactatgacgtcgcatgcacgcgtacgtaagcttggatcctctagagcggccgcccttttttttttttttttttttgactagaaaattgtcataagactgaaatgaagaaatggcttgatatacaaaggaacgagctgtttctaaagtgatgcaaagttttatctgcaagtgcatattcacaaagagtaatggagaaagttggaaatttcagtttctttggccttaatactgtcctcccagtcatccattgaaaaggtgaccaaagtgaggattatgagcatatgggttcatgatatatatgccttaactaactccgtgtagttgcagacaagccctgtccttggacatgttattttacctccattcttttccgccatttccttgagagccttggtgctgtagacgtagccattgggcagcacctgtggtgggttctctgtgtccattagctccttagaaatatagcaaacaagctttgaatggtgctgcttggagaacggtaaaggca

SEQ ID NO: 101533 - DNA, 492 bp, Arabidopsis thaliana columbia
gcacgcgtacgtaagcttggatcctctagagcggtcgcccttttggttttttttttttctcaaaaatgtttatatgagtaatacgcttatgtacataccgttacatatatgcacatgacaggctattaagcaaatacaagaacaccatgaaagttgaaaaacaaaaatcaagaacaccaaaaaaatctgaatcaaacttttgtgggggaggttccagagagttttaactcgtaacgcttttactaaacttgttgcatctccttcttcttagcatccacaagcagagcaagttgtgcacatttacttttaatttcttccagttctttttctaagctctttaccgtctgttctacttcattctctttctttacatattcctcgcacctcatgaagagttgtaagttctcttcgcgtatctcagccgctaacttgccaacgaggttgtttccagtatcgccagctgcaagtggttgtgggttgagctgcacgggt

SEQ ID NO: 101534 - DNA, 394 bp, Arabidopsis thaliana columbia
gtttctgagccctatggatgatttaggagagaatcagctgttccctaaccagaaaatagtacagctcacattcctctttctggctctggtttctgtgccgtggatgttgttgccaaagccattcatcctgaaaaaacaacatgaagctagacatcaaggactgtcatatgcacagcttgacgagacagatgagagtcttcaagtagaaacaaatgggggaggacatggacacgaagagtttgaattcagcgaaatctttgtgcaccaactcattcacaccattgagtttgtgcttggagctgtttccaacactgcttcttatcttcgtctctgggctctcagtctcgcccactcggagttgtcgtcagtcttctatgagaaggtccttcttatg

SEQ ID NO: 101535 - DNA, 498 bp, Arabidopsis thaliana columbia
  unsure (1)..(498): unsure at all n locations
gcacgcgtacgtaagcttggatcctctagagcggttgccctgggggtttaaggcnnnnnnnnnnattacaatcttttcacatatcacaatcaatcattccatacatggccaatacataaccaatacaattctgtaatagtaacttacatatgataatctattttagctactaagctttactatctggatctcttactccttctacgggattcggttactaggtaaccagcctctccatctccatgtatcatgaagacactaatcatcaacatgtaatgcacacatctaacttatgctacaaaacatcaaacagatacaagaaatgcttacttggaaccatcattggtaattcagatagcggagagcaagagtatcattaggctttgagtctgactatcagatacccatatacttgacctgaacctggcatatatagcagcttgaaactatagaaattggagtgatatcaagagcaactgtaatttcctttccagtttg

SEQ ID NO: 101536 - DNA, 667 bp, Arabidopsis thaliana columbia
ggaaagctgacacgcctgcaggtaccggtccggaattcccgggtctacccacgcgtggcgacgtaatatataaaacattactaattattacaagaaacaatcagaaacatcatggaggagcaaagcaagaacaagatcagtgaagaagaaaaacaactccatgggagaccaaatcgaccaaagggaggattaattaccatgcccttcatcttcgcgaacgagatatgtgaaaaattagcggtggtggggtttcacgcaaacatgataagttacttaacaacacagcttcaccttcccttaaccaaagcagccaacactctcacaaacttcgccgggacatcgagtcttactcctctccttggtgcctttatcgccgactctttcgccggccgattttggaccatcacttttgcttccatcatctaccaaatcgggatgacgttgcttacgatatcggcaataataccaacgctaaggccaccaccatgtaaaggagaagaggtttgtgtagtagctgacacagcacaattgagtatactttacgtagctcttctttttggagctctcgggtcgggtgggatccgaccatgtgttgatgcttttggtgctgatcagttcgacgagtcggatcctaatcaaaccaccaaaacttggaactacttcaact

SEQ ID NO: 101537 - DNA, 510 bp, Arabidopsis thaliana columbia
cagctctatacgactcacattagggaaagctcgtacgcctgcaggtaccggtccggaattcccgggtcgacccacgcgtccggtcttcttctcggtactctgagagagtgagagagaagcaacaatggaggttttctactacttggtgtttggagtcatggctgccgtagtggcagcgttggagcttagcaagacgaacaaggatcggatcaacacttcgtcttccttcaattcattcaagaacaattacctcctcgttttctctattatgatggctggggattggcttcagggtccttatgtgtattacctttacagcacttatggttttggaaaaggagatattggtcagctattcattgctggttttggttcgtcaatgttgtttggaactattgttggatctctggctgacaaacagggtcgaaagagggcatgtgttacatactgtatagtttacatactaagttgcatcaccaagcactctccacagtacaaagttttgatggt

SEQ ID NO: 101538 - DNA, 414 bp, Arabidopsis thaliana columbia
agagattctcagtttgcggaggagacgacggagaaggaccaagtaacaacaatcaccaatcccggaaaaggcaacgacttccttcaatcgatgaaaatgaagaagacgccgagacctccgacgccggaagttccggtgaagaagacgaagacgaaactcagaatcaaggaatgagaccagaatctgaggatcgaggatcaacgagcgatgatagcgatcgtgaagttgtgattgaggagagacgatttggtaaatttgtaaatagtcagagttcttcttctagcaaagattcgcctctttctgtaacgttattggatccagatgttcttgattgtcctatttgttgcgagccattgaagattcctatctttcaggttttgcttcttcattgattacacaatccattgaagcact

SEQ ID NO: 101539 - DNA, 721 bp, Arabidopsis thaliana columbia
  unsure (1)..(721): unsure at all n locations
aaaattcacccagtttctgatattctatgcctgctcactggatcctgaaaattgtggtgtgaaatttgctagtaagctagtggagatttttctctccagcaacaagcatgtagctactagaatgagtgcggtggcttatcttgctagcttcttggctcgtggaaagtttttgcctgtttcctttgtggctagcatgttgaaaaggttgatagatgagtgtgtgggttactgcagaacttgcaatgatgatactaggcctgaagcacatcagattttcttctccggatgtcaggcaatcatgtatgtgctctgcttcaggatgagatccatcttggatgttcctcgctttcggtcccagcttacaccattggagtcaatattaatgcacaaactaaacccattgatggtatgccttccatcggtagttgcggagttccttagacaagctaaagaaggtggtctgttcatcgtctcagactcggtcattttcgatgacctacttgagtctgagctttcccgtgcttttggcgggtttgagaggctggatacattcttcccatttnacccttgcttgctaaaatcctcaaacagctttatctcccaaaatttcatctactggtcaaatggncaaagggncctntgcgnagatggtggtgntaatgatgctnagggatcgtgnatggggttnggcagtacgagntnccggggntactttgtncgc

SEQ ID NO: 101540 - DNA, 790 bp, Arabidopsis thaliana columbia
  unsure (1)..(790): unsure at all n locations
nnnnnnnnnnnnnnnnnnnnnnnnnnnnnnnnnnnnnnnnnnnnnnnnnnnnnnnnnnnnnnnnnnnnnnnnnnnnnnnnnnnnnnnnnnnnnnaagattcagcttaatatgttaataaaaactataggttatacaaatacaagacaaaaacgcaaacgcagcgttatgcctcttcatcaaagcatctggttccgcttcgcctccccagacgccacatacattttgattttctagtgtagtagtagtagattcgtaattaatatattacaattatagtgtcgaacctccagacttcttcaactacgtgccgttttttatataacgaaccgacacacatcactgtcgttttgaacaccacgtcatcatctccaatcgaggcggacttcacggggcccggcgacgagttcactggggtttccggaacgaaacgatgtgacttccggccataaacgccgtgactcgctccgagactcggatatcttccatctttagcccttgaagacgacgcacgtactccggcacgtggtaagagatcccaaaccacacacaacccttctggcttcacaactctcacaatctctccgggcactctcattctcggcgcttcgccgcagcttccaccgacttctgaccatgctctttccccaccgtgtgaacgaacaccgacgagaccaccacgtcgaagtaattatcgccaaacggcaacgtcttcacattttcttcacggcatgtcacatactcttgcacaccttcgagtttaaccgtgcggaaagtggaaagagtggtgct

SEQ ID NO: 101541 - DNA, 629 bp, Arabidopsis thaliana columbia
gacgtcccttgcacccttccgtaacctggaatcctttaaagcggccgcccttttttttttttttttgttgtttataaaaccagattctaccattggtaattttgtagtaattcgttacaaattacaccgagttaaggtaaattactcaaaggctagtctctgagggccaacaagtgaagcatatgatcccttttgcgctaccaattcggaatgtgttccaagctctatgatcttcccatcagagcacacagcgatctgattcgcgctctgaactgtgctcaagtctgtgagcgatgactaatgttgtcctgtctttcatcagacggttcaacgcactctggactaaccgctcgctcactgcatccagcgcacttgtggcctcatcgagaatcaagatgggggcattcttcagcagagatcgggctatggcaactctctgtcgttgtcctccgctaagcaagcctcctctttcaccaaccagtgtatcgtatccctgaggaagtgagattataaaaatcatgagcgtgtgcagctttggctgccttaatgatgtcgtccttggacacatgctcattggggagaccatatgccatatttctcgccacggagagagaaaagagaaccggttc

SEQ ID NO: 101542 - DNA, 494 bp, Arabidopsis thaliana columbia
attctgactcacatctagggaaagctgtgccgcctgcaggtgccggtccggaatacacgggtcgacccacgcgttcgcttattcgagcatgcttaagtgctttctcaaggcgttgcctcagtacatccacaaagtattgggtggtggacaatccttacactggcgagatccattgtgaaatcccctattgaagtcccgaccacatcaccaaagtggtggagcgtcgcgctgctgctcagaagagctactatcatgaatcgactttggatagtcgcattgaactctgcaaaaaatttatggatgagatgaaagcccggtctgattctatcgccactgacatttcagaacagatgggaaagcccctaagccaacccaagggagagattaaggggttgatcgagcgagcgacagccttgatggacctggcgccaaaggcactcccagacgaagtgctgcccaaacaaggcttttaccgaaagctctccttcgagcct

SEQ ID NO: 101543 - DNA, 466 bp, Arabidopsis thaliana columbia
cccacgcgtccgcatctccacacctctcttatctcttattttcttccctgcagatttataagaaaaccgaggaataaggaaaaaaaactaaaaaaatcagaagaaacctgagaagctcacagtaaacacatcttcaaccacaggttcatacttactgaaaaaaacagaggaaaaaaaggagctcccttttctatctctaagggaaaatgggtagcaagatgttgtttagtttgacaagtcctcgacttttctccgccgtttctcgcaaaccttcctcttctttctctccttctcctccgtcgccgtcttcgaggactcaatggactcagctcagccctggaaaatcgatttctttgagaagaagagtcttcttgttgcctgctaaagccacaacagagcattcaggtccagttggaggagacaacgtcgataccattgttttgccctattgtagcatcaacaaggc

SEQ ID NO: 101544 - DNA, 1326 bp, Arabidopsis thaliana columbia
tacgactcacttagggaaagctgctacgcctgcaggtaccggtccggtttcccgggtcgacacgcctccggaaaaaaaggagctcccttttctatctctaagggaaaatgggtagcaagatgttgtttagtttgacaagtcctcgacttttctccgccgtttctcgcaaaccttcctcttctttctctccttctcctccgtcgccgtcttcgaggactcaatggactcagctcagccctggaaaatcgatttctttgagaagaagagtcttcttgttgcctgctaaagccacaacagagcaatcaggtccagtaggaggagacaacgtcgatagcaatgttttgccctattgtagcatcaacaaggctgagaagaaaacaattggtgaaatggaacaagagtttctccaagcgttgcaatctttctattatgatggcaaagcgatcatgtctaatgaagagtttgataaccttaaagaagagttaatgtgggaaggaagcagtgttgtgatgctaagttccgatgaacaaagattcttggaagcttccatggcttatgtttctggaaatccaatcttgaatgatgaagaatatgataagctcaaactcaaactaaagattgatggtagcgacattgtgagcgagggtccaagatgcagtctccgtagtaaaaaggtgtatagtgatctcgctgtagattatttcaaaatgttattgttgaatgttccagcaaccgttgttgctctcggactctttttcttcctggacgacattacaggttttgagatcacatacatcatggagcttccagaaccatacagtttcatattcacttggttcgctgctgtgcctgtgattgtatatctggctttatcaatcaccaaattgatcatcaaggacttcttgatcttgaagggtccttgtccgaattgtggaacggaaaacacctccttctttggaacaattctgtcaatctccagcggcggcaaaaccaacactgtcaaatgcaccaactgcggaaccgcgatggtgtatgactcgggttctaggttgatcacattgccagaaggaagccaagcttaaaccctgtgagctagatgaagatgggaaaagaagaatgggttttgtcagaagcaaaatagattcgaagttaaatgtatatgtaagatcttccatgttagctctctctccttcacatgttttctgatttgtaagtattgtgtgtaagcaataagagatatataatatgagcacttcttccaaaaaaaaaaaaaaaaaaaaaagggcggccgctctaaaggatccaagcttacgtacgcgtgcatgc

SEQ ID NO: 101545 - DNA, 639 bp, Arabidopsis thaliana columbia
  unsure (1)..(639): unsure at all n locations
nnnnnnnnnnnnnnnnnnnnnnnnnnnnnnnnnnnnnnnnnnnnnnnnnnnnnnnnnnnnnctttttttttttttttagagacaagcaaaactattaacattgatcataaaatcattacaacatgtccataaattaattatggattacaaaaattaaaacattacaaaagatctataatgtgatgaattaatgtgtagctataattaaacaaaactacattttttactatagttactacttgagataatgatctcaaaaagaagcttcatacgcttaaagtctaatttgatactgtcctttatctaaattactgtttagtatatggacatgagagatatatgagcagaggctgaaggcttaaaccttcttccctctgttctctcacacagccgcaagtattggctccattcactcagttgtctcttttctttatatttgctgtctaatctgttctttagtctcagatcatgattttgcattttctaacgaagatgtcggaggaatttacgtatctataccaaagagatcgtacctcagggttactgatctctagccacggttttgctggaccggtgaaatgtaaaaccgaagcagatttcagaatctcttgaggggattttacggatcgagaacctagt

SEQ ID NO: 101546 - DNA, 430 bp, Arabidopsis thaliana columbia
agaagttttactaatttaaatccttgctacgttctcttaccgttcttccttgtcctagccacgaatgcaacacatacaaacaatttcctcccaaggccacggactgggtattacggtagtgcatgctggaatgtagaatcgatagttcggtccgtggttgagtctaactatcttgctaatccagccaatgctccaggcattttgcgtatgcactttcacgattgtttcgttcaaggctgtgacgcctccgttctcctagccggacctaactctgagcgaacggcgattccaaatctatcgttgagagggtttaatgtcattgaagaagctaagactcagcttgagatcgcttgtcctcgaacagtctcttgtgctgatatcctcgcactcgctgcacgtgacttcgtccatttggccggtggaccatggt

SEQ ID NO: 101547 - DNA, 615 bp, Arabidopsis thaliana columbia
gcacgcgtacgtaagctcggaattcggctctctgccattgaaaaaaatggcggaggagagcagagtcccatcatcggtgtcggtaacagtcgcccacgaccttcttctagccggccaccgctatctagacgtcaggactccagaagagttcagccagggacatgcctgtggggcgatcaacgtgccttacatgaatcgaggagcatcagggatgtcaaagaaccccgacttcctggaacaagtctcctcccatttcggacaatccgataacatcattgttggctgccagagcggtggtagatctatcaaagccaccaccgatcttctccatgcaggtttcacgggagtcaaagatatcgtcggtggctatagtgcctgggccaagaatggccttcctacaaaggcttgatgactcaccattcaccaaacatctttccttatctcttcgtctccttcttcttcaataatgcatcctttccgcatgtaatcatcaataaatgaccctcctttctctttgctgtctgatgtgatagcttggagggaggggatcatcgcgatctttttaaaatatctaaaaatacgagtgtgtgttgattcgttttttttttttttttt

SEQ ID NO: 101548 - DNA, 804 bp, Arabidopsis thaliana columbia
  unsure (1)..(804): unsure at all n locations
cggatatctcnnnnnnnnnnnnnnnnnnnnnnnnnnnnnnnnnnnnnnnnnnnnnnnnnnnnnnnnnnnnnnnnnnnnnnnnnnnctttttgttttttttttttttttttttttaacaactcttcaatttatgaactaacattgactcatctttaacactcactactcaggtcacgaagcaaagatacaacaacctctgtgtaaccagttgcatgaaaaaactctagcccattcaaaataataaatgctgtattgatcatcacttggttggtggtgctggttaataaagtgaggcattttaagtagcaagagacattatttttaatatctaaaccgtaaattcgtatgaagtaggttttataggctaaagaaagatgatatacatgaatctacatctttttacttgcgaaaaatccgttaacacacatcgtgatcggactgaactttgtttctcgggggcttcccaatcttcaaacaatcaatgggaggaagagtaggagtgttgagctcaccaaatgtctgccagcaataagcatcatacattcgatacttttcttgaaccggtttaagctctatcgacgataactgcacatctacacacgggaagttatcgctacaagcgaaatgcaccggtttcacggtataagttccttttatcctctcgtaagtcactccttccactgctactgctgatgtttggttcttgcatttgctatggtcacagtagaattggtttatcgttattggaatttgtacttggttgagctgaatgtttgagaagattatccctttcactgatcctac

SEQ ID NO: 101549 - DNA, 520 bp, Arabidopsis thaliana columbia
  unsure (1)..(520): unsure at all n locations
nnnnnnnnnnnnnnnnnnnnnnnnnnnnnnnnnnnnnnggcaactagcaagattgatgatatggcaatgcgctttttttttttgtgtgatttcaagcataagaattacataagaggaagcttgcaaatagaaagaatcaaacagaacaaggtagtgaaacatcagcattaacaaatctttaagcttttctttctcaaaacagacgtacaagaggctcgtggcgggagcatgtaatctgcaagcttgttgatcttcttctgcagactcaaatgacttgtgaaggtccttgcaataatttaccagctcgctgttgttttcgagctttcagagagtaaaagaatttgatgatgatgaggctacaacaggtctaagatgagcggtgtcatttaaccgctttacctgccacccggttttccacgaatgctgtaatacggtcacagaggaatcctccacacagatcttatgtgtcattaccgggctgcatccaaggataccggtaagaagacactttataggtaaa

SEQ ID NO: 101550 - DNA, 491 bp, Arabidopsis thaliana columbia
  unsure (1)..(491): unsure at all n locations
nnnnnnnnnnnnnnnnnnnnnnnnnnnnnnnnnnnnnnnnnnnnnnnnnnnnnnnnnnnnnnnnnnnnnnnnnncttttttttttttttttatttaaataatctttttataatttataaaggcacaataaagtatcaaaaaaaaaatctcaaagatgctaagattcgacttatataaacagtggtactgtacaacaggaaattcattgcacctgaaaaaataattaaaaacaggtgaaagagataataataccaaaaaaatgaaaaggaaagaaaagcgaaatataaaataagagcaaaagagtctgaagttgatcaacaaaagaaagattagctttcacttacttccactgaagaaataacttttggaacattcaacaagacaacaaaatatgacttccccatcatccaccttcagaccaaattaagttcttcaatcttgtttccctgtttcacacacatatatatatatatatatatatatatatatat

SEQ ID NO: 101551 - DNA, 529 bp, Arabidopsis thaliana columbia
  unsure (1)..(529): unsure at all n locations
tgcggattttnnnnnnnnnnnnnnnnnnnnnnnnnnnnnnnnnnnnnnnnnnnnnnnnnnnnnnnnnnnnnnnnnnnnnnnnnnnnctttttttttttttttttgttgagaaaaggtttcaactttacataaattacaattataaatcatagtttttgatttaagaatcaaatcacatttacatagaaataatcattcattcccccaagttattaaaaatgataaaatttacaaaagcaaaaggaaagacaattattgggggataatcagagagatcagttaagtcatcatttcttcaaccaaataccatccttcatcatattcttccacatggatccatcatcatcatcatccccacatcacaaaaactcatccttccatcatcatctgtatcctcatcatcatcatttgacccttcttcttctgtttcaccaccatcatcactactctgtatattcacaacttcttctacaacactccctctgttttcttcttcttcattttcttcatcataatcataatcatgatc

SEQ ID NO: 101552 - DNA, 528 bp, Arabidopsis thaliana columbia
  unsure (1)..(528): unsure at all n locations
gattccannnnnnnnnnnnnnnnnnnnnnnnnnnnnnnnnnnnnnnnnnnnnnnnnnnnnnnnnnnnnnnnnnnnnnnnnncttttttttttttttttttttttttttctgttacacgggtcgtctttgcttgaaataaaatgagagtataacagcaatgagactcaagctctagtctgattggtgaccaaaatttttgtatgcagtagaaaaagtaaggactcaagatgtgttatatataaaacaactgttttcactcggttctctccggaccagactttcctttttttgaccgttttcttgacctcttttgtgtatcgctcccgccttctttcttttccttttgtgcattagagttagaatcggctttggatttggattgaggattctccttctttttcttcatgcatgaaagtgggtttggacccttggctctatttcgcttgaactgaggtctatccttcacaccaagtccattttttgtagaaactactcgaggcattccccattcttcatttgcaattgttg

SEQ ID NO: 101553 - DNA, 762 bp, Arabidopsis thaliana columbia
attaggtgacacttttaaaaaactttgaacttcccttgcccccttccgtaacctggaatcctttaaagcggccgcccttttttttttttttttttttttccaaaaccacaaacttatcttactagttaccactttccaaagaaagttttcaaaaggacataaacataaataatgtcaaacagaaaaaaacatgatcatccaacatcacaaagaagaggtaaggacttcaaaacgataacaaactagaacagaggagtctttcttgaaatggagaaatcttaagtaactcagagcatgcaatcagttcttgctggaagcctcctgaagaagttaagtggaactgatgggagcttgtacctgagcctcgggtgtctaagcacatacaagccaatggcaaaagccacaacctggaagggagttatatattaaaatcactgcagctatcagacagaacaagacgaagagagcagtggcacgcgggtcacgccagcttagcaacgactgaaatctctctccttgagttgcaagatcaccaacaactgtttgaatcctaccagcaatgctcctgagtcggtcgtatctcatcctgacgatgtctgatggtcgggaagtagggaaagtgtcaaactcctcgtcgagctcatcagggtgtgctgagtcagcgtgtgagagacgtgtgtccatgtgtggaggatgtctcggcctccagcgatagtaccaaactccaatcaagaagaggtagaggaaaatggtgggcaagat

SEQ ID NO: 101554 - DNA, 450 bp, Arabidopsis thaliana columbia
  unsure (1)..(450): unsure at all n locations
gatagtggcacttaatttctcttgcagagcgcaacagattctttactctttctctacaggcttgggtcatgaatctaaatttaatctcaaaagcttaatgtacaagcaaaacttaagacgggatactaaaaactctttctatgcttggccctaatgtagataacaactcatgttgggaagcaaagggtccctgaagataaagaatgtctacccaaaagcatcgttttcctgatcaagaattatcaccagcacagttggtttttgggaccttgaaagctccatgggcgaattagtggatgctacccaacagaacccattgtctgagagctaagctgtggactcgctggacaaccctcgaaggtgcttgtgctcatgggagcatggacccgngcttatctgngggnccnaagggtccttggtcnctgccggggncatnggnncccgnccatt

SEQ ID NO: 101555 - DNA, 655 bp, Arabidopsis thaliana columbia
  unsure (1)..(655): unsure at all n locations
actatcgaagagctangacgtcgcatccacgcgtacgtaagcttggatcctctagagcggcctgccttggtgttaaaggcttttttctttttttaaagagaaggataagtctttattgaaaagagtttgagatcagtacatgtatacacataaaaggatagattttttaaaatggttacaggacaaagagttttaagagaatgcagagtccccctgtaccggaattcataaaagaaaacactgacccttaaaccgaaagaactctaaaccctaaacgctaaaccctaaacagactttgggttacttctaaaaaccttctcttatggctttagtactactactaaggtgatctgtataggcttaaaaaggattggtatcaagttctgttacacaacacccttttcagccacttatgttacagacaccaatttaaaaacactacatggggttttttctcctaagctctttacatgttgaaaaagttaagaaaacggatgatggtaataagatcaaaccgataattagcaggaaaatgttaatatattctgtattaactattaaccccccatttttttgttgtttctaatcatctaccttcgtccattcaaacccgcctggtagtgggttgtcgttcacaggatcaaagttgtacttc

SEQ ID NO: 101556 - DNA, 1023 bp, Arabidopsis thaliana columbia
cgggtccacccaagcgtccgagaggaacaagaagaagaaagatgttcaggaaccagtacgacacagatgtgacaacatggagtcccacaggtcgactattccaagtcgaatacgccatggaagctgtgaaacaaggctccgcagcaataggactcagatctcgctctcatgtcgtcctcgcttgtgtcaacaaagcacaatcagagctctcttctcatcaaaggaagatctttaaagtcgatgatcatattggtgttgctattgctggtctcactgctgatggtcgtgttctctctcgatatatgagatctgagtctattaatcactcttttacttatgagtctcctcttcctgttggtcgtcttgttgttcatcttgctgataaagctcaggtatgtacccaacgatcatggaaacggccttatggtgtgggtttgctggtaggtggattggacgagtcaggagctcacctctactacaactgccctagcggaaactactttgaatatcaagcattcgctatcgggtctcgttcacaagctgcgaaaacctatctggagcgcaaattcgagagcttccaagaatcatcaaaagaagatctgataaaagatgctattatggccataagggaaactttgcaaggggaaacactgaagagctcgctctgcactgtttctgttctaggagtcgatgaaccattccatttcttggaccaggaaagcattcaaaaggtgattgatacgtttgagaaggttcctgaggaagaggaagatgctggtgagggtgaggccgaacccgaagctgctcctggtgctgctggaactggtgaacaaggtggttcaggtgatcaagatgttgcaccaatggaaatttgagcaagagggaatgagttcaaagttggattttctaaccaattttcttgtgtgtagctctttgatatgttccaacttccaagtacaattgtggtttttattcggctttgtttatttaacagcttggaacaaggagttattctaaattact

SEQ ID NO: 101557 - DNA, 1243 bp, Arabidopsis thaliana columbia
  unsure (1)..(1243): unsure at all n locations
nnnnnnnnnnnnnnnnnnnnnnnnnnnnnnnnnnnnnnnnnnnnnnnnnnnnnnnnnnnnnnnnnnnnnnnnnnnnnnccacgcgtccgcccacgcgtccgctgaactttcgtctctataaaccctttcgacgacgagtgaagaagaaagcgagacgaagaagcaaagatgttcagaaaccaatacgacacagatgttacgacatggagtccaacaggtcgtttattccaagtggaatacgccatggaagcagtgaagcaaggatctgcagcaattggactcagatctcgttctcatgtcgttctcgcttgtgttaacaaagctcaatcggagctttcttcgcatcagaggaagatctttaaagtcgatgaccatatcggtgttgcaatcgctggtctcacagccgacggtcgtgtattgtctcggtatatgagatcggaatcgattaatcactcttttacttatgagtctcctcttcctgttggtcgtctcgttgttcatcttgctgataaagctcaggtctgtacccaacgatcatggaaacgaccctatggtgttggtttgctggtaggtggattggatgagtctggagcccacctttactacaactgtcccagcggaaactacttcgagtaccaagcttttgctattggatcccgttcccaagcagcaaagacctatctggaacgcaggtttgagagctttggggattcttctagagaagatctgatcaaagatgctattttggctgttagggagacattgcaaggggaaacactgaagagttctctctgcacagtcgctattctaggagtcgatgaaccgttccacttcctggaccaggaagcaatacagaaagtgatcgacacatttgagaaagtgccagaggaagaggaaggagaaggcgaggctggtgagggtgaggccgaagctgccgaggctgcaccagcagaacgaggtggtggtgttgcaggtgaccaagacgtggctccaatggaaatgtaaggcttgtgtgtgtaacgctggatggaactattttatttcgatgttagttggatttttactttgcaaaatggctgcgggtttagattatatgcttgagaagttgaaaccatttcgtcattttaactcaatagctgccatcaagactttctcgtaaaaaaaaaaaaaaaaaaaagggcggccgctctagaggatccaagcttacgtacgcgtggatgcgacgtcaagctcttctatgagt

SEQ ID NO: 101558 - DNA, 1751 bp, Arabidopsis thaliana columbia
agagagagaactagtctgtgtcttttttttttttttttggtgataattgaaacatatgaaacaatcgtcgtcatagaagcagcagagattcaccttctttctttatctttccctctcagaaacaggaaacaaaattcaaaaagaacaaaaaaaaaaggtcaaaccaaaaacgatggcgtttcatcacaatcatctctctcaagacctctccttcaatcatttcaccgaccaacaccaacctccacctccgcaaccgcctcctcctcctccgcaacagcaacaacatttccaagaagcaccgcctcctaattggttaaacacagcgcttcttcgttcctcagataacaacaataacttcctcaacctccacacagccaccgctaacaccacaaccgcaagcagctccgattctccttcctccgccgccgccgccgccgctgctaaccagtggctatctcgctcctcctctttcctccaacgaaacaacaacaacaacgcttccatagtcggagatgggatcgatgatgtcaccggaggagcagacactatgattcagggagagatgaaaaccggcggtggagaaaacaaaaacgacggcggaggagctacggcggcggatggagtagtgagctggcagaatgcgagacacaaggcggagatcctttcgcatcctctttacgagcagcttttgtcggcgcacgttgcttgtttgagaatcgcgactccggttgatcagcttccgagaatcgatgctcagcttgctcagtctcaacacgtcgtcgctaaatactcagctttaggcgccgccgctcaaggtctcgtcggcgacgataaagaacttgaccagttcatgacacattatgtgttgctactgtgttcatttaaagagcaattgcaacaacatgtgcgtgttcatgcaatggaagctgtgatggcttgttgggagattgagcagtctcttcaaagcttaacaggagtgtctcctggagaagggatgggagcaacaatgtctgacgatgaagatgaacaagtagagagtgatgctaatatgttcgatgggggattagatgtgttgggttttggtcctttgattcctactgagagtgagaggtcgttgatggaaagagttagacaagaacttaaacatgaactcaaacagggttacaaggagaagatagtagacataagagaggagatattaaggaagagaagagctgggaagttaccaggagataccacctctgttctcaaagcttggtggcaatctcattccaaatggccttaccctactgaggaagataaggcgaggttggtgcaagagacaggtttgcagctaaaacagataaacaattggttcatcaatcagagaaagaggaactggcatagcaatccatcttcttccactgtattgaagaacaaacgcaaaagcaatgcaggtgacaatagcggaagagagcggttcgcgtagaaacaacaaacatatgatgtgaattggggaggtggaagatgggatttgaaagcagggttttagggatttaaagttgagaattttatggaggagtttgggttatacagagagaggggacagtattagaaagtaactttttgtgcaattacatagtaacgtagtttggttatgtgattatgcccatatattttattaagtagcacacaaaccaaaaagaaaatatgaaaactgaagatgcaggcttttgtttaatgttttttgtttgtttgtctgcaaaaaaaaa

SEQ ID NO: 101559 - DNA, 486 bp, Arabidopsis thaliana columbia
  unsure (1)..(486): unsure at all n locations
cgggatacattcaccaccagcccgtgatggcctgatctgcttcctcctcctccttacttcttgtttccatcttggtttcaaatttcttcaaagattccgatcatcttcacgtcggagtacacaatctgaaaccgatcatcatcatcatcaattggggtttttaatccctagaatcagtagaaaatatcgatcattgagcttcgattctggtctccgtttgattgtttcggacaatcagagctttgagtctccgaaaaggttggttatgtcatcttctgttccaaactcggaccggaagattgttactggtcccgccggttatattcttgaagacgttcctcatttctccgacgactttcctgatcatcctacatatccaaatccattacaagacaatgcagcttactctgttgttaagcagtattttgtcgatgaggatgacacggntcctcaaaaaaatagtagttcatcctgatagtcctaggg

SEQ ID NO: 101560 - DNA, 601 bp, Arabidopsis thaliana columbia
  unsure (1)..(601): unsure at all n locations
nnnnnnnnnnnnnnnnnnnnnnnnnnnnnnnnnnnnnnnnnnnnnnnnnnnnnnnnnnnnnnnnnnnnnnncttttttttttttttttaagagatttagtactcaagtaaaattatatatcaaacgatacatgtgagcaaactcgtggatgagaaagtatctcatgaagcaacagaacagaagacatgaagaaaaaaagattattgatgatgacagaacaaaaaacagagttgctcttaaaagtaaatgatcaatcaaaatgtgaggccatcaactgcataatgaacaactagttgagagccatcgaactcaggtataccaattcagttatcttcttcttcttcttcatcttcatcatcttcatcttcctcctcagatgcttctttgagccactgtatgaatgtatcacattgtttcagatatactttgtcagcttcatccgcgcctgccttctcttcctcccatctcagtatcgcatcttcttgcaacacgtccttgtcatatagaagatgtagaatttgtgtgaacaaagggcccaactctttgtgagattcctgacacatctcttcaaattcatgatcacttctatctgttcatcaat

SEQ ID NO: 101561 - DNA, 493 bp, Arabidopsis thaliana columbia
ccaagctctaattctgactcacatatagggaaagctggcacgcctgcaggtaccggtccggaatacacgggtcgacccacgcgttcggttcatctctccgaccttaaaccctccgatccaaaaatctccaccgactctaatccaatcaaatggcctccgtcgcgcttctacggtcttttcgtcgccgtgaagtccaaatggcttccgtatctgcgtttaaatccgtttccgcaaatggaaagaattctatgtttgggaaattaggttacttggcgagacctttctgctcgaggcctgtggggaatgatgttattggtattgatttgggtactaccaattcttgtgtatctgtgatggagggaaagaccgctagggttattgagaatgcggaaggaagtcgaaccacaccatcggttgttgctatgaaccaaaaaggggaactccttgctggaacaccggctaaacgtcaggccgtgaccaatccaacaaacac

SEQ ID NO: 101562 - DNA, 702 bp, Arabidopsis thaliana columbia
  unsure (1)..(702): unsure at all n locations
nnnnnnnnnnnnnnnnnnnnnnnnnnnnnnnnnnnnnnnnnnnnnnnnnnnnnnnnnnnnnnnnnnnnnnncttttttttttttttttttatagatagatgatgatagaggtgagaaggccggaatcaaacaatgtacataccagcgtgccctacattgacattatgaccgtttgtctaataccaaatcttttattttccagtacccacccagattggggtttttggatctttttattccgtctgccttttgtacgtcgtaataatggtatcttatccttaacttacgttgagagccccattcagagcttcgaccgtgccccggagggtcctttggagggtctagcccctctcttaccatagggcctcttgcccgttaatgactaccaaccagctcttcctttccttgttgaccacatttgaccagtcacaccaaaccacgggtcttcatgccgcagttggactcacaatcacatcagagcaaccacttcgtcggctcttagagggtcggtgaaaccacatcgcatggtccaggctaagtgcggcggatttcaccccttttctccggtgagggttcaaaccaacaccacacaatattaaatccgaggcaaatgcaacgacacatgcggtgcaaagcttgatcatcagaaagccttccctttgctctaacncaatagttcaatctcggaggagactttgtctg

SEQ ID NO: 101563 - DNA, 657 bp, Arabidopsis thaliana columbia
  unsure (1)..(657): unsure at all n locations
nnnnnnnnnnnnnnnnnnnnnnnnnnnnnnnnnnnnnnnnnnnnnnnnnnnnnnnnnnnnnnnnnnnnnnnnncttttttttttttttttattagcaaaagtgtttctctttcatatcaaacttcaatacgtttccattcacatgaacattatttagcttacttgcaacaacagttctaactatcaaggagatggaggcggttgcacgcacccacaaaacgcaaaccgctttttaatcctctttcgtcgctcacctctcactccgctatagatataatcccgaagaagaatcctcgttttgctatccgatatctttgcttttgctcgatcctctctatctccttccagtttcagtaacagaaactgtaatctctgtatctccaactgtaacctaccaatcttctctgatcctcttctcgcctgttctgatatcctcctccttctgctactctcattctcatcaagatccattgatgatttgcttccatctgatctttcaaatccattttgaactttcgtcaccagtttcctgttgatgcttaacagtttctctaatgcttcttcagcttcgttgatctgtcccttgatcgtctcgtactcgttttctttttctttctcgtctttctcctctgtctccactttgattntcaaatctta

SEQ ID NO: 101564 - DNA, 604 bp, Arabidopsis thaliana columbia
agcgtctctacgactcactatatggaaagctggcacgcctgcaggtaccggtccggaattcccgggtcgacccacgcgtccgcccgatcctgtacaagaacatttccctcaggttcagatcgcctgaagttaaacaaaaaaatgctccggtcacttcttctccgacgctccgtcggccattctctcggaaccctatctcctcttcatccaccatccgttcctcattttcgcctcatcgtactctctgcaccaccggtcaaacattgacaccaccaccgccgccaccgccacgtcctccacctccgcctccggccaccgcctcagaagctcaattccgtaaatacgccggatacgcagcactcgctatcttctctggagttgctacctatttctcatttccattccctgagaatgctaaacacaagaaggctcaaatcttccgttacgctcctttacctgaagatcttcacactgtctctaattggagtggtactcatgaggtacagactaggaactttaatcaaccggagaatcttgctgatctccgagctcttgtaaggaatctcatgagaagaagtaaggattcgtcccgtggatcgggtct

SEQ ID NO: 101565 - DNA, 630 bp, Arabidopsis thaliana columbia
cacgcgtacgtaagcttggatcctctagagcggcctgccttggtgtttggtgcatcagttacgacttcaagggtcattaacttataaaccattccaccttgaaaaaactaaacctcttcactcgtctgagcttacaatctctgaaagaaaagaagaaaaattggtcggctcaatctttcattattcatatgttatcctcgttggggccaaagggtcgcaatccataagacatatggcacatgttatagtcggcactggatggtctcattcctcaaatgatacggctgagtccagctctattcggttaagtcgaactggcccaaggatatactcgggcaaatcgctttcctcctttccctcaatcaagatggcgagatcaacaatgaggcttgtgacataaccaaggaccagaccaataacgctcctcgcaacagccgatgatccaatatctacatcaatctccaaaaagttatcctgcctcaggtacttacaggtcacagctttaccgagcaagcaggcttttgttccaacagcccgcttgaccatccaatatccctgaacaaatacttggaattagctaaatcttgcgtcgcggaactgtcactcccatccacgaattttcccagggat

SEQ ID NO: 101566 - DNA, 708 bp, Arabidopsis thaliana columbia
  unsure (1)..(708): unsure at all n locations
nnnnnnnnnnnnnnnnnnnnnnnnnnnnnnnnnnnnnnnnnnnnnnnnnnnnnnnnnnnnnnnnnnnnnnnnnnnnnnnnnnnnnnnnnnnnnnnnnnnnnctgaaaataaccttagctgctaaatttaaatccctctgctttctgttttacaaatttcaacattaggaggagttgttcaacaatcaacataaagtttttcatgttaaaacttaaaatcgaaaaaagacagttacatagtgaaccaaacgtataccggaaataaccgaaaaacaaagagtctttgattttacattttctccggcaagatcaagttagaccaacaaagcatcatcttttgaaatttcaagcttcttctgaggactcgttcactggtttcaatccggatttacctttgcctgatctgacacgagggctgtcgtgcgcagcattggtgttcttgttcctgtgatcatcgtctttgttctgaactgttccagtgctgtgtcggttccggttagagactgtcttcagaatctcttcacgggaagacgagctgactgcgtcgctgaagctttttctccgagaaaggatcagttttggcgacttgggacgtgtcaaaggaagcttcttgagctcaggtttcgcaggaggtgcctcgtagtagaagttggggacgggtttagccttgaacttgagattctttctaagttgcttaaggctgcttctt

SEQ ID NO: 101567 - DNA, 787 bp, Arabidopsis thaliana columbia
ggcagcattgcttggtcagcccatgagcatggtgttacctggcgtggtcgggtttaagttggatggaaagttgaaggaaggggttactgctactgatttagttctcactgtgacccaaatattgaggaagcatggtgttgtcggcaagtttgttgaattttatggtgaggggatgagtgaactttcactggctgatagagccacaattgcaaatatgtctcccgagtatggagcaactatgggtttcttcccagtggatcatgttacactggagtacctgaagttgacaggaagaagcgatgaaactgtgtcaatgatagaatcatatttgcgcgcaaacaatatgtttgttgactacaacgagcctcagcaagaaagagcatacacatcttatctgcagttagatttgggacatgttgaaccatgtatttctggtcctaaaaggcctcatgaccgagtgcctctgaaagatatgaaggctgactggcatgcatgccttgacaatcctgttggattcaagggttttgcagtgccaaaagaaaaacaagaagaagttgtgaagttctcatacaacggacaacctgctgagatcaagcatggtagtgttgttattgcggcaattactagttgtacaaacacgtcaaaccctagtgtcatgatcggagcagcactcgttgcaaaaaaagcttcagatcttggcctgaaggtaaaaccatgggttaagacaagtcttgctccagggtctagagttgtcgagaaatatttggatcgaagtgggctccgagag

SEQ ID NO: 101568 - DNA, 568 bp, Arabidopsis thaliana columbia
  unsure (1)..(568): unsure at all n locations
nnnnnnnnnnnnnnnnnnnnnnnnnnnnnnnnnnnnnnnnnnnnnnnnnnnnnnnnnnnnnnnnnctttttttttttttttaactgtttaaatgttttaccgaacttttttccaccccgccaaaaagacggttcggagacatcattatatttacatctttaccctcaccaattatcttaattacgaatctacccctcaccgggcaaaaaaaaaagaacaagaaaaaacaactcaaacgaccaccgtcctgatactactcggaagataccctccggagattcgatcattcagatcatcttcaagctcgatcctaatcacagaatcttccgaagacgaaactcgagatttcacgctattcaagctcgaacccattgcttcctcaagccattcctctaagctaatcttacttagccagatcgcacctgcaattctctccaaagcatcatcttcaatctccaccgttagtccatccgcgagaccatttgagaaacgtttctttaacgattcagcagttttgctcttgatcggagggggggcnccgggatccgncggacngngggggacaggt

SEQ ID NO: 101569 - DNA, 655 bp, Arabidopsis thaliana columbia
  unsure (1)..(655): unsure at all n locations
actatagaagagctangacgtcgcaacgcacgcgtacgtaagcttggatcctctagagcggccgcccttggtggtttagtgcaatataatttagggttctgaaaatttgacatagcattttcaaacaataacattgatggatcagataaataacagaaatacaccaaatgggcattactcaacctaaaagcaatcttcatattcgatagaaccggtatcaaaaaccgtgcctgaggttgnnaacaataattctactctctgattagttcgagcagcatccacctttcttcacagctgaaacatctttaccgatatcgatcttgtctcctttcgatggaacattagcggattcgctcgcagcttccatcgccttcttgctcacaatgtggtgaatctgagtgaggacttcggcgaaagcgttctcaacattggtggcttcgagagccgaggtttccatgatgtagagagattctctctcggcgaatgacttagcatcttcagtctgaacagccacgagatggcgaaggtcagatttgttgcccacgagcatgactacaatgtttggatcagtgtggtttctgagttctttcagccaagtctcaacgttttcatatgttgagtgtcgggttacatcgtagacaagaagcgctcaaca

SEQ ID NO: 101570 - DNA, 526 bp, Arabidopsis thaliana columbia
  unsure (1)..(526): unsure at all n locations
annnnnnnnnnnnnnnnnnnnnnnnnnnnnnnnnnnnnnnnnnnnnnnnnnnnnnnnnnnnnnnnnnnnntctttttttttttttttttaacttttgaagtcttattgtacatttcaaaataaggattttgaccgtctgattacaattacgcttacacacaatgatacagttttcaaattcacacccagtggaaaaaaagttttaaagagattttcattttcttatgtggaaagagagagatgaaggacatgactcattttacactcactcattcgtccagctccaaagcttttgttctgctttcaaactgaagaagagataaaaggtttgggtaggttatgcatcaggcaacatgatgcagtcaatggctcgtttgcatattcccgtcattgttgcctctggaccatatacctctagagggacaccaagttcctctccttaaagctcgcattctagcccaaaccagtctggtaatttggtccacctcttcttancgtaatgtgcattcttgatgctttcaatctt

SEQ ID NO: 101571 - DNA, 702 bp, Arabidopsis thaliana columbia
  unsure (1)..(702): unsure at all n locations
nnnnnnnnnnnnnnnnnnnnnnnnnnnnnnnnnnnnnnnnnnnnnnnnnnnnnnnnnnnnnnnnnctttttttttttttttgaacgagcagaatttgtgaattatacttcagaacctgatgattacgcccgccaagaacatagtaacactaatttacaaagacagtaaccacccaccaacattatgcacaccaaaaaggggtattaccgtgattaggacattttctgtttacgacataaacgaccaaatagatccaccgaattttaaagccgttatataaactaagttccatacttatatatagatagatagatgaaagtagcctaaagagaagccaagagcttctaagagactcaaaaacctcactcaaatcttcatattaatacttacagatttttttgtgaagttcagtagttgtctcttcacgcagtggacagaacttccagctctgcccaccagagtggtgaaagttttgggatagtgtcgtctggtgataatccagtgatctctcgtaatctccctgtgacttccttcattatcggtctctgtttcgcgtctgctcttatgcagcttttgatcacttcacctatattctcaatcttctcgtcaaagctttcaattgtcggatccaccatctcccttaatgtctttcctctcaagaagacagccaatccggtatctatcgagtcgccttttttaacc

SEQ ID NO: 101572 - DNA, 478 bp, Arabidopsis thaliana columbia
gtaagcttggatcctctagaagcggccgccctttttttttttttttatcactttccatcaatgtgtgatattgtagtacttaagaaatcataatctgtttaacaacatgagtttatgtatgaaagataggctcacaaacatttgagaatgtttcaggtaaagctatggcttcttctcgttgtttatcttcttaagcttcatttattcatgtagatagagagagtgtgatcaagcgtagagatcaatgttccaaaacttggctggttggttcgtgcggtatttcctctccatgcttttgatcacttccatgtcctctttcgatagttcgaagtcgaaaacctgaaagttctcttccaatctcgcaggctttgatgtctttggtatcaccaccgtttttctctggattccccacctcaggacaacttgtgccactgtctttttgtacttctcggccacatctttgagaactggatcatcc

SEQ ID NO: 101573 - DNA, 359 bp, Arabidopsis thaliana columbia
tttttttttttttttttttcaataaaagttgtattgatcttataaataagaggtttacattacatttgggggaatcatctgaagaaggatggctacaattcttgcttacctaccaaagcctcaatgtgtgtatcccttacttacaaaacagataaaaacaagaccaatcttcgataaagagaatagtcacataactgaacattcctatgagggaccccaaaaaaactaagaacaatctgaggaaaaagagcagagtcttgaaaccttcaattcaagtgattgaatcgttctctatcatttccctgacttcgttaaccacgaaatgcgctttgtggccgccaataacttcagcttgtttc

SEQ ID NO: 101574 - DNA, 519 bp, Arabidopsis thaliana columbia
  unsure (1)..(519): unsure at all n locations
nnnnnnnnnnnnnnncgacttactatagggaacgctggtacgcctgcaggtaccggtccggaattcccgggtcgacccacgcgtccgtgaaaatccacttgacgacctaaacaacaacaacgactccggcgagtgtatgtatctttcactttctcactaaccaaccagacgacaaaagaaaattattcatcttagctaagctcgattagtttctggcggaaacgggtttgtggataattgttagcatattccgatcttgccctcccccgagagagagagtccaatcaatcaatcaatcaatcatctcttacgaagctacgtgtgacctaacattctccagattgttgtttatagcctcttcttagatttacgatttgtgagcttgtgaagatttcttggtagaattagaggtctctggttcgagatcgagatgaataataataataattatagaggaagatttccaccggggattggtgcggcnggtcctggtccggatcctaatttcagtcacggaat

SEQ ID NO: 101575 - DNA, 704 bp, Arabidopsis thaliana columbia
  unsure (1)..(704): unsure at all n locations
cagctctaatacgactcactattagggaaaggctggtaccgcnctgcagggtacccnnngtccggaattccacgggggtcgaccccacngccgtccccgtnngaaaatccccactttgacagacgctaacctaaacaacaacaacgactccggcgagtgtatgtatctttcactttctcactaaccaaccagacgacaaaagaaaattattcatcttagctaagctcgattagtttctggcggaaacggttttgtggataattgttagcatattccgatcttgccctcccccgagagagagagtccaatcaatcaatcaatcaatcatctcttacgaagctacgtgtgacctaacattctccagattgttgtttatagcctcttcttagatttacgatttgtgagcttgtgaagatttcttggtagaattagagttctctgtttcgagatcgagatgaataataataataataatagaggaagatttccaccggggattggtgcggcgggtcctggtccggatcctaattttcagtcacggaatccgaatccacctcagcctcaacagtaccttcagtcacggactccgtttccacagcagcctcagcctcagcctcctcagtatctccagtctcaatctgatgctcaacagtacgttcagcgaggttatccccagcagattcaacagcaacagcaactgcagc

SEQ ID NO: 101576 - DNA, 525 bp, Arabidopsis thaliana columbia
  unsure (1)..(525): unsure at all n locations
gtctcaaagaataaacgccgaagcaatgcaggtgaaaacagcggaagagaccgttgagatcaagcttgcatgtagagatccaaaagctttatagaaaggtggaggcatgaagacaaagaattcttacacaacaaacgtaggacgtaattttgtgccagtacatggtcgccagcaaacgaaagaaagagattatctccgccgttgtcaaaattattaaaagggattataaagtttttcaatttgggcccctttcctgcgttttctttattgtccattatgggcctcattgtctctagactctctaccttacagggtttgctcgccgacgtttcatacatagtcctcttgtttctaaggatgccgattaacacttttcatttttatcaacaaactggcttgcaagggttttgaacctgagtgatgacctaccatttcaaaaaaaaaaaaaaagnnnnnnnnnnnnnnnnnnnnnnnnnnnnnnnnnnnnnnnnnnnnnnnnnnnnnnnnnnnnnnnnnnnnnnnnnn

SEQ ID NO: 101577 - DNA, 1514 bp, Arabidopsis thaliana columbia
tttccctctccgaaacagaaattcaaaaacaaattcaacacgaaaacgatggcgtttcataacaatcactttaatcatttcaccgaccaacaacaacatcagcctcctcctccgccgcaacagcagcagcaacaacattttcaagaatcagcaccccctaattggctcctccgctccgacaacaacttcctcaatctccacacagctgccacagccgccgctacaagctccgattctccttcttccgccgccgctaaccagtggctctcacgatcctcatccttcctccaacgaggcaacaccgcaaacaacaacaacaacgaaacatccggtgacgtcatcgaagacgttcccggcggagaggagtcaatgatcggagagaagaaggaggcggagaggtggcagaatgcgagacacaaggcggagatactgtctcatccactatacgagcaacttttgtcggcacacgtggcgtgcctgaggatcgcaacgccggtggatcagcttccgaggatagacgcacagcttgctcagtctcaaaacgtcgtggctaagtactcaactttagaagccgctcaaggactcctcgccggcgatgacaaggagcttgaccacttcatgacgcattatgtactattgctttgctctttcaaagaacaactgcaacagcatgttcgtgttcatgcaatggaagctgttatggcctgttgggagattgaacagtcgcttcaaagttttacaggggtatctcctggtgaaggcacaggagcaacaatgtctgaggatgaagatgagcaagtagagagtgatgctcatttgtttgatggaagcttagatgggttagggtttggtcctctagttcccactgagagcgagagatctttgatggaacgagtcagacaagaactcaaacatgaactcaagcagggttacaaggagaaaattgtggacataagagaggagatactgaggaagagaagagctggaaaattaccaggagacaccacctctgttctcaaatcatggtggcaatctcattctaagtggccttaccctactgaggaagataaggcgaggttggtgcaggagacgggtttgcagctcaaacagataaacaattggttcatcaatcaaagaaagaggaattggcatagcaatccatcttcttctaccgtctcaaagaataaacgccgaagcaatgcaggtgaaaacagcggaagagaccgttgagatcaagcttgcatgtagagatccaaaagctttatagaaaggtggaggcatgaagacaaagaattcttacacaacaaacgtaggacgtaattttgtgccagtacatggtatggctttcatatttggtaatgattagggccacacaaaattaaaccccaaagcatgatttgtaatatgaggttttagatggactttatgataggatcgtcagtcttcactgccatctccattctccaccatcaatccatcattatatcttgtgaaaaaaaaagaaatttcacaat

SEQ ID NO: 101578 - DNA, 505 bp, Arabidopsis thaliana columbia
  unsure (1)..(505): unsure at all n locations
nnnnnnnnnnnnnnnnnnnnnnnnnnnnnnnnnnnnnnnnnnnnnnnnnnnnnnnnnnnnnnnnnnnnnnnnncatcatcattccacgcgtccgctccggcgacaaaaacacagcgagcgactgacgaaaattaaacacttcgccgtcacagacactctctctatatatataatctccggcgatggagagtttcgctcttcactctctctccaccaccgccacttccaccttactctcccatcatcatcatcaccatccctcacgtctctctcttctccgtcgtacctcttcgagatctccgccttcaacaatctccctccgatctctctccgttcaacctctctccttccctcttctcaaaccaattcctcgattctccacacgaatcgccgccgcaccgcaagacaacgctcctcctcctcctcccccatctccgtctccgtctccgtctcctcaaggagcgaaactcatccctctgattctctcaatctccgtcggcctaat

SEQ ID NO: 101579 - DNA, 507 bp, Arabidopsis thaliana columbia
gacggtcgcatgcacgcgtacgtaagcttggatcctctagagcggtcgccctttttttttttttttaaaagcaaatgtggtcaagataaccataaatcaagattatgttgatacaaagagagaaaaatagttatgaatctaatagactcagcaatagaaataacaagacaaagcttgagaagcaacaatatcaatgtttgtaacacctaaaacatattattaccataactgaaatgttctctctcaccaaggcaaaccagcagacagagacttgtatatattacttactcggatagagttgctttgagatcaccactctcacttagctccataatgatatcacatcctccaattaactcacctttgtagtatagctgaggaaaagttggccagtttgagaaattcttaatcccttgccttacttcttcatcagtcaagatatcaaacgatccgaaactcacgttttctcctctcaatgctttcacaactttggagctaaatccgcat

SEQ ID NO: 101580 - DNA, 603 bp, Arabidopsis thaliana columbia
  unsure (1)..(603): unsure at all n locations
tgacgtcgcatgcacgcgtacgtaagcttggatcctctagagcggccgccctttttttttttttttaaggtataaatattttatttggtttattctaatttttcgcagagagaccatgaatgaggcactttagctgcacaaggtctcgaaagatccctggctctcgtatagaggtggtactcgtgacaaattcagaggataaattaaaacaagtatttggaacacgctcaaactcaatcaccgattctcgaactcttctacactcaagaggttccaattcacaacggcaaaaagcatttacagaacaggatcttcgccgtgtctttcttcaccttcttagcaatgagaagcaaaccccattttgtgtaggaacatcgccaaacggctaatttgccgttttctcggacatagagcaaatctcgaagatctagataacattattggccaaaccattctcaactctaagttcactccgttgttgttgttgctgttgttgatggttatcgttttccnnagaagagagcgaggttaagatcccttggctagtcaaatcagagttcttctccccaacttcgctcttgcatagagggcaagaggcattga

SEQ ID NO: 101581 - DNA, 560 bp, Arabidopsis thaliana columbia
agctctctacgactcactattgggaaagctggtcacgcctgcaggtaccggtccggaattcccgggtcgacccacgcgtgcgcttctctctctctctctctgtctgaaaacgactttcctctgttcttctctcccccaattcttcttcttcttctctcatcctttcccaatctccatttttcgatgcttcattgattcacgagaagacaattccatttctgatattatttgtttcctttctcgatcgattctttgcgtaaaaacctgtttctgttctgtttcagaatctgtctctcttattactctgttctgttttgtctgtcttaataaagtttctttctctctttaaagacaaattcatagttccagtttccgaacttctctctctcttgtcggattctctgatgagtcatcagatctctgtttgaactatccaatttctcatcctctcttattttcttttttaatttcacttcaccggagatctccaatcgccggagaaatgggaggattattgcatctcttcgatttccacaacaacagtttctccccgaaagttt

SEQ ID NO: 101582 - DNA, 537 bp, Arabidopsis thaliana columbia
  unsure (1)..(537): unsure at all n locations
nnnnnnnnnnnnnnnnnnnnnnnnnnnnnnnnnnnnnnnnnnnnnnnnnnnnnnnnnnnnnnnnnnnnnnnnnncttttttttttttttttttgtgtcacggaacaagaatctcattcataacccaacagagaaaacataaataacaactcaaatctgtgcctattgctagtactagaatctattgtttttgatacagagatttctcttggagaatacttgtcttgagatttgtctgttgtgcttgtgcatcatgttttcctccgatttaatggttgttttcatgttcgccctccaaatctttcaagtatcccatgaacaaaagaaacccgaaaaggaagaatccacctgaagagctccctccaccgtctccgccaccaccaccaccaccatcatcccgaggtgggaacccgtttccaccgtcatcaagctttggggatttaacttttccatgagtaggagcttgtgtgattgttggtgattgccgtgtaacggtctgtgtttgtccttgactgcattttgaattcagcgcagagtt

SEQ ID NO: 101583 - DNA, 719 bp, Arabidopsis thaliana columbia
gacgtcgcatgcacccctacctaagcttggatcctttagagcggtccgccttttttttttttttttcatttgaaactgaaaatttttattccaaggtaaaggtgaaaaaagggtaccttcttccagggcttccaattgggggtgggttaattaaccaaaaccttattcaccccttgccaaaggtcaagattccaaacttagttttcttatttttaaaatttggaaatcaaacttttcttttcttaaaccaaagggccttcttattgcccaaacccatggtttaggactcgaatggggtcgtttttaccgaattcttgaccatattctgcattacttatcagccctccagctttatcgtctttcatatccactgtgattggcatctggagaacgtgtgaacccatgaagagttcaggttcacctccccacacgtgtggatcccgaatttgtctgacgtaggtgtcgaaatctccttccacgaaccattctgtttcctgtcttctttggataaactcatcagcaaccctggtacgtaattcgtcagcgagttctctctgcatcttctcgcctggagctagtttcccagagcgtaaacagaatccgtgagctacagaacgaaacaaacatctgccatcccccggaataccaatgatagagtaatcagtataaactcttttcccattgtggaatttaccatcagacgaatgatgatgcacgtt

SEQ ID NO: 101584 - DNA, 652 bp, Arabidopsis thaliana columbia
  unsure (1)..(652): unsure at all n locations
ccagctctcctctactcacattatggcaaagctggcacgcctgcgtgtgccgggcacgctatacaccggtcgacccacgcgtccgccgatttccactctctgggagacagaaaaacctcataatctcaaaaattgttcactgtgtttatcttccttctaaagttctaagaagcttcgattcttaattctgtttatcgatttgaattccttgtttctatttcccaaccgttagctgattgtgctagatccatttttctggtgattgatgcaacttctggagctcgattcttcgttctagtatttgattattcgaagcagagttggtgtgatgaatgctaatgaggagggggagggttcacgttacccaatcactgatcgaaagaccggagagacgaaattcgataggggttgagagtcggacagagaagcatagtgaagaagagaaaactaatggaattactatggatgtgagaaatgggagtccaggcggacctgcaaattccattggcgcaacaaacagnggnaacgnctggtngggaagggttcnccatgngggaccnttagggcccncttncgaaatacngctgcccccgnanacggacggcctccccnaatgancataantttngggcaaggggcaactgnagggggc

SEQ ID NO: 101585 - DNA, 506 bp, Arabidopsis thaliana columbia
gacgtcgcatgcacgcgtacgtaagcttggatcctctagagcggccgccctttttttttttttttttttaaatgaaataatctttaaatagagcaacatatacaaaatatccggccttagtcatacctccaatatctctcctcttctccactattacatctcctctaaaaagtttcatttcacatgtgtatatttacatatgtgtattctctcatgtacagtttactttctaaatgtctgaagatggaaccaagatctctagcggtatacctgctataggctccaacacttgagcttctgggagctcttttaacaataattccttaaatgattcaatagttccttctttctttactaggcttgctaaaagtccctttgcttcaagctcgccattttgcatcggcacaacaaacttggctttcaagagtttggcaagctggacagcgtcttcttgaccagaaacaagagtaaatcgtgggagaagttgtttgatgaccggtgtgatt

SEQ ID NO: 101586 - DNA, 519 bp, Arabidopsis thaliana columbia
cgcgtacgtaagcttggatcctctagagcggctgccctttttttttttttctctaaatcatacatcatacagaatatatataccaaagagtattttcaagctgtattaatgaacccattacccaaattatatgatacaataaaagaatatacccccaaaagaaaataatacaaagtaactcatcttaacacctcctaattctgcgttctaaagattgattacattcactattcatttttgccatctcttcattgtcttgtccgtagcagccgatcaccgatcgttctcaactcgaacgttctcacagcaaggccaacatcacatattgtagtgtctagcacataaggagtgttctcgaacacgactcgagaatcgttaaaaagttgacgacaaggctcgcggcgctgagagatcgaaccatggtagtggaagtaacggattttgctttcagccttgtggtatgttttcccttgtagattctgagacatgtgtacgcctgtcgcgatacatctccggctg

SEQ ID NO: 101587 - DNA, 923 bp, Arabidopsis thaliana columbia
aaacaccggtccgttaattattaatcttcccgtctataattcattaattctcgttagcagcttcttcttcgttggattcgtaaaatggatggatttggagctaactacgagtgtttgttctttgatatggacgatactttataccctttgagcatcggaatcaacttagcttgtcgaaacaacatccaagagttcatgcttaaccaactcggaatcgaagagagtgaagttccaaagttgtgtttggatctttacaaagaatatggaaccaccatggctggtctcaaggttatgggttacgaattcgacaacgatgaattccatgaatatgtccatggaagacttccctacgagaaactaaaacctgatccactcctccgtaaccttctcctctctatgcctcaccgtaaaatcatctttactaacgcagacaaagctcacgcaacacgagctctcaacagattgggtcttgaggactgctttgaaggaatcatttgcttcgaaacactaaacccttcttctgattcaaacactcaaatcctctgtaaaccctctgttgaagcatttgaagctgcaattcgcattgcagacattgttgatccacgcaaaacggtattcttcgatgacagtattcgtaacatcgctagtgctaaagcaacagggctaaaaaccgtgtttgtgggggaatcagtgctagttccaggtgctgactatgcactaagcagcattcataacataaagggagcaatacctgatttatgggaagaccacaaagatgagaagctcgagccaattgttcagcaagccgcggttgcaaccatggtcaatgcttagagagacattctaataagaatcccacatcgattaaaagaacttataactcatgtatccgaaatatataataaataaaagaccagaatttg

SEQ ID NO: 101588 - DNA, 512 bp, Arabidopsis thaliana columbia
  unsure (1)..(512): unsure at all n locations
atgaatcgccnnnnnnnnnnnnnnnnnnnnnnnnnnnnnnnnnnnnnnnnnnnnnnnnnnnnnnnnnnnnnnnnnnnnnnnccacgcgtccgccccaacaaaaaattaaggttcttttttgctttttaaataagtaatatatatatatatatatatatatatatatatatatatataagattgagatattctctgtcttgcttcttctttacccttttcttgtttccaatcaaatcctctaaagtttcgttctttgttctaagttttctgaaggagtgatatttgtttgtggtgtggttagagaaatgaatcggagacagcaagtgaaacgtagagtaggtaaatatgaagttggaagaacaattggagaaggaacgtttgctaaaggcaagctcgctagaaactctgacactggagaacctgttgctctcaagattcttgataaagagaaagttctcaagcataaaatggctgaacagattagaagagagatagctactatgaagttgata

SEQ ID NO: 101589 - DNA, 911 bp, Arabidopsis thaliana columbia
  unsure (1)..(911): unsure at all n locations
ggggannnnnnnnnnnnnnnnnnnnnnnnnnnnnnnnnnnnnnnnnnnnnnnnnnnnnnnnnnnnnnnntcgcgatctagaactagcggacgcgtgggtcttcttcttcttcttcatcgtttatcacgacctctgtctcttcgtctctctcaaaagccattttaaatctctctctttctcactcaatctctctgtagctatcagatcttctcttatgttgatccccaacaaaaaattaagagaaatgaatcggagacagcaagtgaaacgtagagtaggtaaatatgaagttggaagaacaattggagaaggaacgtttgctaaagttaagtttgctagaaactctgaaactggagaacctgttgctctcaagattcttgataaagagaaagttctcaagcataaaatggctgaacagattagaagagagatagctactatgaagttgataaaacatccaaatgttgttcaattatatgaggtgatggcaagtaagacgaaaatatttatcatctgggagtgtgttacaggaggagaactctttgataagattgtaaatgatgggcggatgaaagaagatgaggcgcggagatatttccaacagcttatacatgctgtggactactgtcatagcagaggggtctaccatagagacctcaagcctgaaaatttactattggactcctatggaaacctcaagatctcagattttggattaagtgctttgtcccaacaagtcagggatgatggactcttgcatacatcgtgtggaacaccaaactacgttgctcctgaggttctcaatgatagaggctatgatggagcaacagctgacatgtggtcatgcggtgttgtactctatgtcctgcttgcaggttacttaccttttgatgattctaatctaatgaatc

SEQ ID NO: 101590 - DNA, 1575 bp, Arabidopsis thaliana columbia
gggaaagagaaaacagtcttctcttctccgatcccaaaaacgcaggaaaacaatgtcgtttaacagctcccacctccttcctccacaagaagaccttcctctccgacacttcaccgatcaatcacagcaacctccgccgcagcgtcacttctctgaaacaccttcgcttgtcaccgccagtttcctcaacctccctaccacccttaccactgcggattccgatctcgctcctccgcaccgcaacggagacaattccgttgctgatacaaacccacgctggctctcctttcattcggagatgcaaaatactggagaagtacgttctgaagttatcgacggagtcaacgccgatggtgaaacgatactcggcgttgtaggaggtgaagattggcggagtgctagctataaggcggcgattttaagacatccgatgtacgagcagcttcttgcggctcacgtggcttgccttagggttgcgactcccgttgaccagattccgaggatcgatgctcagctcagtcagttgcataccgtcgccgcgaaatactccactcttggtgtggttgttgacaacaaggaacttgatcatttcatgtcacattatgttgtcttgttatgttcatttaaagaacaactccaacaccacgtttgtgtccatgcaatggaagccattacggcttgttgggagattgaacaatcactgcaatccctaactggagtttctccaagtgaaagtaatggtaagacaatgtcggatgatgaagatgataatcaagtagagagcgaggtgaacatgtttgatggaagtttggacggttcagattgcttgatggggtttggtcctcttgttccaaccgagagagagagatctttgatggaacgtgtgaagaaagaactgaagcatgagcttaaacagggtttcaaagagaagattgtggacataagagaagagataatgaggaagagaagggcgggaaagttgccaggagatacgacttctgtactcaaagaatggtggcgaactcactcgaaatggccatacccaactgaggaagataaggcaaaactggttcaagaaaccggtttgcagttgaaacagatcaacaattggttcatcaaccagaggaaaagaaactggaacagcaactcttccacgtcatctactctcaccaagaacaaacgtaaacggaccgggaagtcgtaggtgacatagcggctaactagaggatggttctttgccatgtgaattcttgggaaccgtatatgaaagaaacgaatccggttctatgctcgtacagagtgtgttatttgtatagtggataccggttagcctatgaaaccggattctggagtccaaattgttgtttgtaacgacttagtagtttttggaagtgatctgtttcgttggtttgcgtcttgtaacgaacgcttaagcaagtgtgggttttttcttgtaaagtgtcaatatgttcgtttgtaatgaatgtatcaagcaatatttatcataattaaactagcttgaaatgtaaaaaaaaaaaaaaaatgtgttcgaaaaaaaaaaaaaaaagggcggcc

SEQ ID NO: 101591 - DNA, 531 bp, Arabidopsis thaliana columbia
ttgacgtctcatgcacgcgtacataagcttggatcctctagagcggcctgcctttgttttttttttttttttttaaaaaagaaaccaataaatcaacggaggaaagtcaaaaacaaaaacagaatggctttcacagaagaatcagttctttgtcttaatttaaagaaaacaaaaagtacacctaattcgggaaagacacactaacggaagacgtccaatcagaaccagtttggtctgaaaaggacttagagaatccacacaaatggcggcgcatccattcttgtcccaaccacagtccggtacagatacaacttatccactttctgcctcccctcgtgtccgttttcttccatccggttattatcattctcgtttatgatctctacattgagccatggcgctttctctgcgagccttttgcatccactgagtgtgacttcacatgaagacatccaaagggatcgcattgtttcatacttgctcacatcagcaagaagcgccgtgtccccaaacggactatcccttatcttt

SEQ ID NO: 101592 - DNA, 563 bp, Arabidopsis thaliana columbia
cttttcagcagcctcttagtaatatggatggttggcttccacatcgtcggtttcctccgtctggggagtttgagcgtcctcgaagttctggtgctgcttttgctgatttccaggagaagtttccgttgcttaaccttccatttgatgataagctgcttcctcgatttccatttcagccgagaacaatgggaacttcgcatcaagacataatggccaatctttcgatgaggaaaagatttgaaggtactggtcattctatgcaagacctatttggcggaacaccaatgccgtttctacccaatatgaaaatccctcctatggatccacctgtcttcaaccaacaagagaaggacttaccgcctttgggtttggatcagtttccatcagctctttcatctatcccagagaaccatcgaaaggtgctggagaatataatgcttagaactggctctggaattgggcacgtacagaaaaagaaaacatgagttgatgcatggtccgaggatgaactagattctctctggattgggattcgcagacatgggtatggaaactgggagaca

SEQ ID NO: 101593 - DNA, 512 bp, Arabidopsis thaliana columbia
gacgtcgcatgcacgcgtacgtaagcttggatcctctagagcggccgccctttttttttttttttacaaaatacaacgttccttccttattggttctcttaatcacaacattacacgtaaacatctctatatttttttaattattatttgtataagaagaaaaaaagattaaaggaaaaataaaggatttagagataaagaagtcttattctcatgatggaacagctctgtggattctcttcgctgaagtaatcacatctagtgacgtggcattgtctataagcaggtggtggtggtgggcagcccccaccccagctctcgtagactggtcgtccatagcactcgtaaggctgcggcggcattccatatccattgaatgctggccctccgtatccatcgtagtagggcccgcaacacattgctggctgcccttgcggcatcatcgggatcgcttgcggtggcggtcccggctgcttcggggcaggtgcgggagctggagcggagcgggtgcg

SEQ ID NO: 101594 - DNA, 520 bp, Arabidopsis thaliana columbia
  unsure (1)..(520): unsure at all n locations
cnnnnnnnnnnnnnnnnnnnnnnnnnnnnnnnnnnnnnnnnnnnnnnnnnnnnnnnnnnnnnnnnnnnnnnccacgcgtccgcccacgcgtccgcggacgcgtccgcccacgcgtccgatagtcaccattttttttgtttgtttgacctcaaaaactcctacgtttctaagctcttctctttgcttcgattcccaaaacgactatttccaaaagggtttaaagaagttatgaacactaatccagtgactaatgggtttgttaaacctgttcctactgaagaagaacaagcaaagattgaggaagtgaggaagctattaggtccattaccggagaagctttcgagtttttgttccgatgatgcagttttaaggtatctaagggcaaggaattggcatgtcaagaaagctactaagatgcttaaagaaactttgaaatggagagttcaatacaaacctgaggagatttgttgggaggaagtagctggggaagcagaaacagggaagatatatagatcgagtt

SEQ ID NO: 101595 - DNA, 563 bp, Arabidopsis thaliana columbia
gacgtcgcatgcacgcgtacataagcttggatcctctagagcggcctccctttttttttttttttttacgagattattagcttttccaattgtgaggggagacgaaagaagttttacactttccagttttcaccattatcatcttcatagaaagtttgaacacaaggatatgaacttaaacaaaacaaacagagaagacaacatttgaaacacagctctgctctttttcttgttccgcagctacttattcagatcaaattccgaaaacgaagaagctttcttaatgagggaagtagccagaaacctggaagaagctttctagatggcgattccaagggatttcttgaacttctcaacctctagatagatagttgagtaaggcaagaactctgagaagtaatctccacttaggtggttaatggcaacagcaagtttcgggatctctaaggtttcttcattggtgagtgttcgaataaaccttgctggattgcctccccatagttcaccagatgggattcttctgccaggtggtaaaacagaaccagcttctaggattgagcggg

SEQ ID NO: 101596 - DNA, 509 bp, Arabidopsis thaliana columbia
  unsure (1)..(509): unsure at all n locations
atgacgtcgcatgcacgcgtacgtaagcttggatcctctagagcggccgcccttggnttttaaatttttttttttttntttaagaggcagaattaacttagagttatcacaaaatgttctgccttcaaattgtagccgatggccgataataataagcaaaagagagattgaatttatgttttgacacatttgatcaaagaaaggtactagcgaggactactaagcacatcgagaaacatacggtttattgagggcaatctcatttgctgctcctgaactcttcttctcttgagcagaggctctggagacgaagatgatgaggacactgaagcagtagtggagacattccaggagctatttgagctgtcatcaaagtctaatacaccacttggactgtcctgatcaaccaaattcatcatcctcttcttgcttggattgtgctccaacaacagttcatagcattcatttactttctcctgattgactttgagtagagtcgttatttgaga

SEQ ID NO: 101597 - DNA, 582 bp, Arabidopsis thaliana columbia
  unsure (1)..(582): unsure at all n locations
nnnnnnnnnnnnnnnnngtacttatacaaacttgtatttgaacaatacctttccaaataacaattattatacaacatcactttggatattttcacaaaacgaaaaatagcaaacccaaatattctcacaactacagataaaaattatcttaagtgaagcaaaagtttgccggggtagtttaactaaatttgatgttttttcttcgatttgtccgattccactgataaaataaatcacgatgaagctctatccaccaagtcaattcggctggaaagaactcgctgaactaatcccgatcaaaataaccgatataaccaactaaccaactaaccaactataccaataacatgaaccaatcttcggttgacaacataccgaacacaaccacaaaacaaaaaagcacactcaaatgccggcataccttactaaatcaattgcgggtccggttcatgagaaatttgcttgggttaaccacaacccacggntnatcaggntccttncccattcgggttnatcctcgggnaacccacccttccntntgaaattnggtnaatgtgcatggaancaaccctggtttcgtnt

SEQ ID NO: 101598 - DNA, 990 bp, Arabidopsis thaliana columbia
tatagaagactatgacgtcgcatcgcacgcgtacgtaagcttggatcctctagagcggccgcccttttttttttttttttcttcgatttgtccgattccactgataaaataaatcacgatgaagctctatccaccaagtcaattcggctggaaagaactcgctgaactaatcccgatcaaaataaccgatataaccaactaaccaactaaccaactatacctttaacatgaaccaatcttcggttgacaacataccgaacacaaccacaaaacaaaaaagcacactcaaatgccgtcataccttactaaatcaattgcggttccggttcatgagaaattgcttggttaaaccacaacccaacgcctcatcaggtaccttaccaatacggtttaatccctccgcgaaaaccacacccattcccatatgcaaatgcggttcaatgtgacaatgaaaaaaccaaacccctggattatccgtcacaaaccttatcgccgtccatccatacggatacaaaatcgccgtattccgtaacggcggattcttcaaattatacgtcttctcatcaattcccggtttaaatttcccgtcaccgtaacccaaaacccagaaatcctgacccgtgaagatgccatgggatgaatcctcacctaacaataccttttaaaaccgttaagcgttttggataatcaccgtcgaccgttacattaaacgggaaaacgtatattccgtttcctgtagtggtgttaggaaacggcggtggattcataatatcgtaatccatacggtaactcctcggcggcgatttccggttaaatccgagtttcaagttgtatttaaccgaaccgagattcggcgttgccggagtcactagagagacgttgttgatcgcccatttcgtgtatccgtcgattagattctgtgtgttgagaagaatcaaccgttttctgtatttcttcggcggcgatggtgatcccatcgctgagaagatc

SEQ ID NO: 101599 - DNA, 536 bp, Arabidopsis thaliana columbia
  unsure (1)..(536): unsure at all n locations
nnnnnnnnnnnnnnnnnnnnnnnnnnnnnnnnnnnnnnnnnnnnnnnnnnnnnnnnnnnnnnnnnnnnnnnnctttttttttttttttattatatgcaagaggttataactatcatatccaccatccaccatcacaagatttaaatactactaagcccctaaccccccaaaaaataaacatgttaaagctaattctgagtgaaaggctcccaacaaaagactgtagtgcataaaaaactaagtggctaaaaacgcctaacgctgctttttaggatgcatacataacccaaaagcatagagagaaagagagagagagagagaagtggtgttttagttgtggaggtaattgcaggatgctcctttccgacaatgtccattttcgcggaagaacttgcatactctttgtcccttgaagttgttctgctgcccacctgactgccctggttccaaccattccccgaatccccattcggggccctgttgtggggttccccagtaaccggctgggccccctcctgaccctccgcttgggatcg

SEQ ID NO: 101600 - DNA, 237 bp, Arabidopsis thaliana columbia
tgacgtcgcatgcacgcgtacataagcttggatcctctagagcggcctgcctttttttttttttttttttgcgtatgaatcattaagagggatttgatgggatcattaaaagcaaatcattttgccaatcgcccaatagacgtttcaagccagggaggtttgtaagtgatacagaatttgcagtcccaagtatgataaggtaagagacttgatattacaaccgttgcaaagcaaacc

SEQ ID NO: 101601 - DNA, 512 bp, Arabidopsis thaliana columbia
ttgacgtcgcatgcacgcgtacgtaagcttggatcctctagagcggcctgcccttgtttttgaggttatttttgtggttgttgagttggagttattgtgtgtttttattaaaaaatacgtcttaaagacgtcaagcaaatcaacatgtttatcacgctaacaacctaacgcctaacatcacacaacacatcttataatattttaacattttttccctagtaattaacaatcaacacccaatgtctaaggcctatacaaatgaacttcaaaaggtcaaaagttgaaaggggattctatgtttccacagatcccgccctcaccttaccaactgggttggataacacggtttcgaaataacagcaacgggaaaaggtccaataacgatctcaatctgcgacgggttaaataatcgatcaaagattattttccattactaatctataattaatttcataatcaacccaaactatatatccttcaataaattaactagacttaatttaataaattaa

SEQ ID NO: 101602 - DNA, 523 bp, Arabidopsis thaliana columbia
tgacacttacaagagcttgacgtcgcatgcacgcgtacgtaagcttggatcctctagagcggccgcctttttttttttttttttttttttcggaaactatttattaatattcttcgtaaatttagtcaggtcacatgtttgaaaagggaaataatatccgataacactgcaaagaatacaatattttctgctaaaacataccgtgtactgtgtctatttcagacgtcttacaattgtgaggaaaagaaaatgaggccaaatctgtcaacaagacatgctaagatctctactaattcattcaggtggtactaaaatccaacttgttcaccccatttgcttcaaatcacggaatcagcaagaagttccggtacactgacaagttcttcccatggcagcaattgtgataaaggcgaattttgtagagcaaccaactcttccctattgtacttcaccctctgatctaaaaaactcctgggaacagcaacagaactctccggcctctggttgttcctccttgctacct

SEQ ID NO: 101603 - DNA, 532 bp, Arabidopsis thaliana columbia
  unsure (1)..(532): unsure at all n locations
tagnnnnnnnnnnnnnnnnnnnnnnnatagtttatctggtagacacttcttacatatcatcaggcgtagaaaaacgttttcttctggcttcaacaatcgaatttactatttctaggcacctcgatgtacatttacaaagaatagaatcggtacgtgaataaacaaactatcagatcatttcttcaaaagaactcacatccaagtttctcattctctaatagaaatgaagctagatgaagatcattgggttcatttacttagcaaattgttttctatgtgttcaactaaccttttcgtccaatttgattcaagaatctgtcttttcttctacgacaacttgctttaaggtcttggcatgtgcttcgtttgtcacgggcaagtccacgagcgtgtgtggaggagcaaagtacatatggagtgacatgatgcatatgacaatacccaagaaaagctgcagtgtcggtttgaagctaaaaaggtatatggatgcaaccatagtaagtagcatcgccattgatgtagaataaacctt

SEQ ID NO: 101604 - DNA, 507 bp, Arabidopsis thaliana columbia
tatgacgtcgcatgcacgcgtacgtaagcttggatcctctagagcggccgccctttgtgttttggtttttttttttttttttgtcgagaaatgcattaacaaagctgtatataccaactaccaaaggttgcttaaatacacaaacttgagcacctcctagaaatttactacataacatcagtcggcctacaccattaagaggttcatgtgtttacttcgcgttacatgatgcagctgatttgatacaaaacatttgtttgcttgaactacaccacgagatgaattggtcttcctgggattctctttatgaactgcttgttcttttattgcacctctgtgaaggcgtgattgataatcttcttaactgccatcatcgcttggacgagccatgttaatattacatcacctcttgtagtgaccttgggttcatacctagcctctcagacaaacatgcttggtgtttgtatgtggcatacaaagagagaggatcatattcggaggatccgg

SEQ ID NO: 101605 - DNA, 528 bp, Arabidopsis thaliana columbia
  unsure (1)..(528): unsure at all n locations
nnnnnnnnnnnnnnnnnnnnnnnnnnnnnnnnnnnnnnnnnnnnnnnnnnnnnnnnnnnnnnnnnnnnnnnnnncttttttttttttttttattcagaactaattgtaactcatttattaattcagatgagaaatcaacacaaaatcccaagtttgtcattttcgtgagcaaaccagacacaatacattgaccgaccagaccctcccacagttcttaaccctaaaccaccacaagactctggttcaaccaaaactcttacacacacagctcattacatacaaaaaacaatcaacgacactttgaatcaatcaaatgatattcccacccccaacaaacaaaaacattaaacaaacagacaattctgagtttctgcccgacctttcggtgcttgtgctcttccatgacggttcgatcagattaaacgaatgctccttgatgattacaacttttttttttcacaacgaaatgaatcaatcattgttgctttcagaaaaaaaagccaagagatgactaagaatatacgaagc

SEQ ID NO: 101606 - DNA, 394 bp, Arabidopsis thaliana columbia
cttgagagtttttgcttcctcgtcttcttcgattcatcaaacagcgtgtgttttttgtttagagttggaagagacgaatcgaattttgaagctttcttttatgtctgacaagatatctccgttttgttgtcaatctggttgcttggaaaacacagtcctacatccagaattaaggactactactagttcctccatcactttagggtctcgcatcttcaaaccggagatccctcctctttctctccacttttttagctaagaagaatggcgctgcagaacattggtgcttccaaccgtaacgatgccttctacaggtacaagatgcctaagatggttaccaaaaccgaaggcaaaggtaatggcattaagaccaacattatcaacaatgttgaga

SEQ ID NO: 101607 - DNA, 749 bp, Arabidopsis thaliana columbia
ctattacgtcgcatgcacgcgtacgtaagcttggatcctctagagcggccgcccttttttttcttctttttttttacaaagtttattctgaaatacatctgatgttataaatctctcttttgtccacaatgatagaaagaaagagatgtgatcttaacacagtaaccagaagaagaaaaaaaaaaggaacgaaaaagccagaacaagtatatgattacttcatctctatatggcttattccaagaaaatccaaagaaaatgtaaaaggggattgagagaagctgaccaaaaactaagtctaacagcttccagaagatgacaaatccatgattatcaggcaacgttcttgtcttgctgtttgatgatattttcattggtttcatatgttgtcacttcgtcatcacttcctttggacctataccatcttgacatcaccaagaaataagcaaaattaactgccaggattccagcgaccatgaaatagaagagatccaatcttcctttgttcaaatcctcagctaaccagttaccccctgacgagttctgggttgtcctgtgaactgttgcaatcaagaagctaccaaggtaacttcgaaactcctactccaacgtaaaagatggatccagcgaaactcctcatgttctcgggaaactgcttgtactaaaacttccatcgtccaatggttgcaaatgcctttgctacacccgccagggagagctgcggattcgccacatacttgacatcgacc

SEQ ID NO: 101608 - DNA, 542 bp, Arabidopsis thaliana columbia
agtacactatagaagactatgacgtcgcacgcacgcgtacgtaagcttggatcctctagagcggccgccctttttttttttttttttagcaaaaaaaaagtctaaacataactttctttatagagtttggtcaaaatgtatgaaatgtaaattgaagttctcacttaggggaactctatacattatttactcttaaaggcatcaacccttgatagttttggctttcctctgggaatgttcctaccataatccactctcgaagacacagcacttttattaccttgatctagctgacataacttagaccacttaaatgacatgaaccccacaacaatcagagaaactcagacgattttaagcggctttccaagaagacaatggtggagtctcagagtttttgaacgtggtcaggatgctaatggatctttctcctttcacaaaacctggttgtgcaagggattcgagctcagacatctcttcgggagtaagtttcactgataaagctccaatgttctggttgaggttttcaatcttagtggttc

SEQ ID NO: 101609 - DNA, 596 bp, Arabidopsis thaliana columbia
  unsure (1)..(596): unsure at all n locations
actatagaagagctaagacgtcgcatccacgcgtacgtaagcttggatcctctagagcggcctccctttgttttttttttcatttaagttccattgatgtatttcaaagggttcagagttttatcgttttacaaagaaatgatgagtgttcatgactgtaaaatccaccttcatcttccactttcagtttaacggctccggctctggatccggctccactactggtgctatgcaatccaccttatatcgaagagtctttttgaagaaagttgaatatgaattatcccaaacaagtttgtagtttccagccattagcgtagagaagttgccctggtcagcttcataccgacggtaaggtaatatcagagtcttttcccctgaagcatttatgtactccacgctaaatccgatatccatgcttatcttgccttgcatcaaagagaaatcccaagcaatatacgaattttcagattccaccatcaatgagatctcataggttctcccagcttgaacgattatctccttgtactcctcattgtcccttgaccacaatatgnccagctgtatcagctgaaataaagaagggggaattggga

SEQ ID NO: 101610 - DNA, 783 bp, Arabidopsis thaliana columbia
  unsure (1)..(783): unsure at all n locations
nnnnnnnnnnnnnnnnnnnnnnnnnnnnnnnnnnnnnnnnnnnnnnnnnnnnnnnnnnnnnnnnnnnnnnnncttttttttttttttttttttaaaaagaaatatttttatttctttatttgaaagataaacagcaaaaagaaaagagatattaaaggcggtaaatacaattattctattctatatcatattgctaaaccaaacccggtttatctaaaaccgccatgctgatgtggcaacaagtgctcttccatgccagcacagcaccaattctccttgtcgtttcgccacgtggaatcctttaacttgcgctttctccaataaacactcagcttgaaagtcggcgaactggcttagctgtatcggcctcatcccggcggcgcaaaacgcttcccgccaagtcattccgccggtgtgtctcctgtcagccgccggttctaccgcagcggagatcttcggccgtagaacgaacgcttccactatcttcttcacccaatctccgggaggagctgcagggtttatcgactccagcaccatcgtgtataactcaagagcgctgacaaactccttgcggattgatccagatccggtggatcttcggtcatccctttaacttttcccgaatgtccaccgaccccttgggtgaacgcttctgccggcaacattggttttgccaatttttcacgggggttttctccacttgaggacctaaccgaaatattatacggcgcgcgggggtgaaattcccaaaaaaccggaccggggggtccttttttctccccc

SEQ ID NO: 101611 - DNA, 307 bp, Arabidopsis thaliana columbia
gacgaatgcgacgaatcactcgcagatcttttggcacaagtggaagccatggagtcccaagaacgtcttccttctccaacttcggcattccgtggtcctgaagaactattaatccggcactcaatgaacgagtagcttcagtcccgcacaaggacatagcccagcactacatgtaagcaaaggtgactccatgagctctcacaaacgatcttcaggtgcattcacgatctaacagcaccgtgcatttttagtcgtgggctcgggttcacatagagagaaatcataacctggggcacaggttaccata

SEQ ID NO: 101612 - DNA, 531 bp, Arabidopsis thaliana columbia
  unsure (1)..(531): unsure at all n locations
nnnnnnnnnnnnnnnnnnnnnnnnnnnnnnnnnnnnnnnnnnnnnnnnnnnnnnnnnnnnnnnnnnnnnnnnnctttttttttttttttttctagcacaacaaaatttgtgtgcaaaatcaaatcatcaaatgaaacataatatcatcttttaataatagtagttatcactctcaaaaccaacctcattatcatttatggcaaatggtactatgtagattctttctgatagttgcagcgaaaaaaaagatttaaaagtttcaagattctggtgctggagctgctgctggaggtttcaggagaggctgtagcgccttcacaactatgctcatatttggtctaaactcagcttcgtattgcacacacaatgctgccaccgctgctagcttagcaactgcttttggagggtaatcggcttttagctttggatcaatgcactgtttcactttatcttcactgagtcttggtgtcgcccaggttacaagactctgttgacctctaggcatggtatgatccaccggtttcctccctg

SEQ ID NO: 101613 - DNA, 577 bp, Arabidopsis thaliana columbia
  unsure (1)..(577): unsure at all n locations
nnnnnnnnnnnnnnnnnnnnnnnnnnnnnnnnnnnnnnnnnnnnnnnnnnnnnnnnnnnnnnnnnnnnnnnnnnctttttttttttttttttttctttcatcaacaaaaccaatgtctctcatctagcaattttataagaatgctagagagcatcatcagtttctataagagttttaggcagtagcagagcatattaacataatcacaaaactctgctcctttcactacagacaaatcatacaataaagaagcagtgaatgcagataaaaataaagaatcaacaaagttgcactagcagagcaaacctccattcacactctctcgtcttcacatgactacttgtgtgcatacatacaagagcaaacctccgtttttcaagctggaacgagttgcttcgagccctccatttttagaccaaaggctatgtatgtatgtatattatgttactggtggttgctggtggctgcggctatatccctttcccaagaatccaaatgtcatcctcagacgatcttgcagattacagggggtttcgcacccttcngggcagggctagcatcaccnagaaccggcaat

SEQ ID NO: 101614 - DNA, 533 bp, Arabidopsis thaliana columbia
actatagtagagcttagacgtcgcatgcacgcgtacgtaagcttggatcctctagagcggccgccctttttttttttttttatgcacacgaaataataatctcttatttcagttttcaaatcatgcatcataataaacatatagaaatttcttattacaacccgcacaattaaatcaatatatataaacaaactcaaaggaggaatttcaaacacaacacaacaagtccaagaccaagccctaatccagtattcatctcaccggagccagacttctctgactctgacggagcagccgctttcttagaggactctgaatcatctgagacatcaggagattttgattttggtggaggcgccatcggtgagatcttacgttctccaaacatctcttccggcaacaataccatgtccaccacgtaaaccgcaagaggacggtcttgtctcaatgaagtactgagacgtgtctcaacggcacccagtagatacattgacttgattcccttgaccggtgaaattaagtccgtaaacccc

SEQ ID NO: 101615 - DNA, 536 bp, Arabidopsis thaliana columbia
  unsure (1)..(536): unsure at all n locations
nnnnnnnnnnnnnnnnnnnnnnnnnnnnnnnnnnnnnnnnnnnnnnnnnnnnnnnnnnnnnnnnnctttttttttttttttttgtaacccaaatcgattgaaacttgaaaggtcacaatactataaaaccagaaaaagtgatttgctcgactctgaaataaacagagtatatctggtcccatgttggaagttaataataccaagccatttgcacgatttctaacttctttctttccttctctaaatcacatcgctgatatgaacaactgaattctcgcctgtcctcgttccttctcctctgctccatcaagatctccaatgttgtcgtgatactcctgaagaatctgcttgacatcggttttactaagcttctgttgcttcagtagcagctccacccgcgctctcattccagaatgctcagaacaccaaatatgccccaggataacagcaacaagctgaagactgtagagacctgattctagcttccgattatatttctcatcttcatccaactcaaggtcatcaagctcaagctg

SEQ ID NO: 101616 - DNA, 517 bp, Arabidopsis thaliana columbia
atgacgtcgcatgcacgcgtacgtaagcttggatcctctagagcggccgccctttttttttttttttaccaaacaatactaaccaatataattttgctgaaaactgtttcttgtactgtttcattgcgcacatataccaatataacgtcaccaattttttttcaatcctgggtgtggaatcggaatcttctaaaagggttaaaattcacattacaaagagaaactcatgtttctttgttaccatatcttctattagttagtggaagaacgctgactttctctcatcttcatcaaaatggctacaatcacaaactcatgatgctctataagtaactagggaaatccatcatcccataatcaagagcggcggaggccgaggaagtccgtcctttggagccagaggtacaccggagcttatgaagacgtaccctgatctccgtgaacagttgcatgctatggcattccaattccttagcgaatctcattctctgcttctacaattcaaccatttccttcg

SEQ ID NO: 101617 - DNA, 522 bp, Arabidopsis thaliana columbia
  unsure (1)..(522): unsure at all n locations
nnnnnnnnnnnnnnnnnnnnnnnnnnnnnnnnnnnnnnnnnnnnnnnnnnnnnnnnnnnnnnnnnctttttttttttttttaaagaccaattataattatataaaagaaacgagtaacacatctataggcctctagggtctaccaccaaaactatcatatgatatttgtaattaactaccgcattagaacttttctcatctaagattttctaagaaaactttatgtataagcgtctcaagattcatgaccgacgaaccatgtttatacctcgtcgcttcctcggccaaccgccgccactcttccgccttttctctcagctttttccccttttctccatccataagttctctaaccaccgtctcgacctcctctctcttcacatctttaccaatctctatacccactccccactcgtcacaacaaaacttacaattcgtcggttgctccgaaaaacatggccaacatatcatcggaacaccaccagcgagactctccaatgttgagttccacccgcaatgcgt

SEQ ID NO: 101618 - DNA, 537 bp, Arabidopsis thaliana columbia
  unsure (1)..(537): unsure at all n locations
nnnnnnnnnnnnnnnnnnnnnnnnnnnnnnnnnnnnnnnnnnnnnnnnnnnnnnnnnnnnnnnnnnnnnnnnnnnnnnnnnnnnnnnnnnaagcaaacaacggctaagagttgtgtattcattgtaagccacatatctattttttcttcttatccggatgtttaatcacagagactcgacagtattcagaagacaataataagtataggtttgtggagagatgatctctctttacttgggatcaacgcgggcatcgagccaagcaacgatgtcattgattacagtgaaaatattttcgtctgtatcaccttctagaatgcaatggtagccacctggatagagttttagagtcttgtcttggctgactgcatgtttgtgaaggaatttactcacagtgggatctgtgactttatcagtgtctccatgaagtatcaacagtggcaacgagaccttgtcaacttgcatctcaatgtctcttgttgcatttagaagttcaacagcagttttgagacgtgtttgatcatcgtagcatatcac

SEQ ID NO: 101619 - DNA, 622 bp, Arabidopsis thaliana columbia
  unsure (1)..(622): unsure at all n locations
cgcgagattcacggtgctgattacggcggttgtgctagcttttctaatggcggcgccgatgccaggagtgacggccaagaagtatacagtcggcgagaacaagttttggaaccccaacattaactacaccatctgggctcagggcaagcatttctacctcggagactggctctatttcgtgttcgacagaaaccagcacaatattcttgaagtgaacaagactgactatgaaggatgtatcgccgaccacccaatacgcaactggacacgtggagctgggggagacatttgtcactctccaaccagaccaagcatttactaaccttctccgaccgggaaggggtggatgtttaccgggggcattgaagctatcctggttaaaagtagggaaaggtttcctcccccaacccaaaaatctggcccccggtcaagaacatttgggctcgggtttcaatgggccanaggccncgcccaattcatggttccgggaccccaattcggtttcccnggaatnngggntgggccccaagggttggggaaagncccaggctntaaagtcttttggtnnaccgaaccggncnaaaatttttntggggancttttaatttggggggnccctttc

SEQ ID NO: 101620 - DNA, 789 bp, Arabidopsis thaliana columbia
  unsure (1)..(789): unsure at all n locations
acttacaacatctatagagagagagagagagagtttagttagagagaaaaaaatggcgagattcacggtgctgattacggcggttgtgctagcttttctaatggcggcgccgatgccaggagtgacggccaagaagtatacagtcggcgagaacaagttttggaaccccaacattaactacaccatctgggctcagggcaagcatttctacctcggagactggctctatttcgtgttcgacagaaaccagcacaatattcttgaagtgaacaagactgactatgaaggatgtatcgccgaccacccaatacgcaactggacacgtggagctgggagagacattgtcactctcaaccagaccaagcattactaccttctcgacggaaagggtggatgttacggtggcatgaagctatctgttaaagtagagaagcttcctcctccaccaaaatctgcacctgtcaagaacattggatcggtttcaatggtcacaggtctcgctcaattcatgattccggtatctctattcgctttccctgcaatgtgggatgtgatctcaaggatgtggtagtagtcaccagtcttcaaagttctttagttgaatcgaaaccgacctcaaaaattcttttcagggaaacctttttaatttagttgagtttctcttttctctttgtaatgttggattgttggttttcctttaatcttttgcctttgaattgattgttaaagaaagattgtatttgatttatttgagaaattaaattactgnnnnnnnnnnnnnnnnnnnnn

SEQ ID NO: 101621 - DNA, 641 bp, Arabidopsis thaliana columbia
  unsure (1)..(641): unsure at all n locations
ctatagtaagactatgacgtcgcatcgcacgcgtacgtaagcttggatcctctagagcggccgccctcttttgctctccttcagaacgaaaagtcgaaaaccattataatgtgactaaatctcacatctgtatcctctccataactaagagttcaagaagaaaaaagcgtagagattactggttatgtttttatcttagtctcagagagttcgcctgagagttaccggtccatttaataagaaaagctttagtttagtcatcttcatcttcatactccagttcatcagaactacctcctcccatcactgatacgtaaatgacgacagctagaaactgagcagctagaaagaaccttgctcttttcttaaattttttctcctcttcggccttttctacctttgggttgctctttggcttcggactctttcttgggaaatgaggaagggaatgagtgaagtggaggtgaaggagatgaagaagaggctccaaggaccccggcctaaagtttctcagcatatcgcaaaggttactatgtccagaagtttgnnccgagcncgntggaactggaaccntgggtaaaaaagatggnggggaagaaggnccaacccangnggctcaaagantttgncccancagngaa

SEQ ID NO: 101622 - DNA, 494 bp, Arabidopsis thaliana columbia
gaacaagggaaagaagaatccaacttcatcaattcagattcgcacgcttgaaattatctgaataaaaatcgaaagctaataatgagctgatcgctaaaaatatctctcgaattcaatcttcctgattttcaatttctgtctctagggtttcaatatccgataacgatggagacggagatggatttctcagatggtgaacaaactaatggtaattcacatgttactgcctcccaatactttgctcctccgggttttaatagaagtcttgtggctgcttatgggaatggaaacacaaccattggattagaaaaaggaatagaaaggagactagatcatcatgagcaactacctggttatatctttatgtgtaatgggagaacgaaaaccgattgctaccgttaccgtgttttcgggattccaagaggaggaaaagaccgttgttgagagtataaagccaggcatgaaagctttcctctatgactttgagaagagac

SEQ ID NO: 101623 - DNA, 599 bp, Arabidopsis thaliana columbia
  unsure (1)..(599): unsure at all n locations
ccccccctcgatttcgacggtatcgataagcttgatatcgaattcgcggccgcgctaaaaatatctctcgaattcaatcttcctgattttcaatttctgtctctagggtttcaatatccgataaaagcgatggagacggagatggatttctcagatggtgaacaaactaatggtaattcacatgttactgcctcccaatactttgctcctccgggttataatagaagtcttgtggctgcttatgggaatggaaacacaaccattggattagaaaaaggaatagaaaggagactagatcatcatgagcaactacctggttatatctttatgtgtaatgggagaacgaaaaccgattgctaccgttaccgtgttttcgggattccaagaggagggaaagacgttgttgagagtataaagccaggcatgaagcttttcctctatgactttgagaagagacttctttatggtggggatggagctactgttggtggcaggttggatatcagaacctgaagcctttgaagggaatatccagcccaggtngggttagaatgccatgaccggtaccctgncagaaancttcaagcnnatccatgngc

SEQ ID NO: 101624 - DNA, 651 bp, Arabidopsis thaliana columbia
  unsure (1)..(651): unsure at all n locations
aggattaaatagctgattttattattttttgttacaccaaggtttaaatttatgggccgagcccataacagtttcagagataacccaatagaagataaccggaaatggaacagatctagatgtgttgacaaattataccaaaccaaaaaacagagcatgaatcatccggatgtaagtagattttagtcttaattcctagaaaaagagatgttcttgttcagaagtctacctgttattctaagaataggatgattttaatatcattgacgtcttctaactactcttaacttcacaagtcttcttatctctttgactgatcctatgaagctaagaacttcatacatatcggaggttttactccggcgagggcaagcaccgccgcaggtaaagtccaaagcccttcgccacagattagccctgaagccaccgccggaaccataaactctgctttcttccgattcatcttctcccaaacaaacacaatcaaagtcccaacacacatgtcgattgcgaaataagctccgacaagaaacggaacagccatcgccgtcggaagtggcatgaatcttccaatcttcgccggagtaagatctctgacgacgttcgcntgcaaacggccgnggnaccggttcggcggccgaggncantttt

SEQ ID NO: 101625 - DNA, 519 bp, Arabidopsis thaliana columbia
  unsure (1)..(519): unsure at all n locations
ccaaattaattccgacaataatgaattaataggtcacgtgcatttacatgaacatgatcagtcgaaatttaatacacattggctctttgtttcttcatgacgcctttttttttttttttgttagcaacgtagaaatttccatagaactaaaaacgaaaacattacaaatccctccccaaaaaactgtatatttacatattcttaacaaagttattacttagttctattctccaccacccccaattcgaccgagcccgaaaaaaaaaacattccgtcttatggtttaattaccttgattccttcccttaaccttttgttgaaaattccaaaaaaattgaccccagggaaattcgactgaaccttaaaagaatttgaatggtcaagaatttggtttggctttggttcttaccctaatattttcccttaaggaacttttttatactcatataacccatctctattgnactgaaccctccatcctctattgatctgatcgttgactgtgaatctatccctgac

SEQ ID NO: 101626 - DNA, 489 bp, Arabidopsis thaliana columbia
aggttcacaagtgaatgggttatcacttttcattatgaatataggtcaagcaaagtgccacgactcaagttggaataaccaaagttgcaggaaaatatcaaacaaattttttttgtaactaacaatgagcctacaattgaagttctcactatttttttgactaatgacttttcaacttttcttcccacgagctcgatgcatcgatataggaccaattcaattggggttcagaagccctacatcgtcgagtgaagattcttggccatgatcctccttgaggttctcagcgatgctgcagctcacaagagttcgaagaggcagaagccattccttatacgctttctccagattcttctttgacaaaatatcactgccgactttgcttctctctttacctgcttcacattctctcgattcaaataacagtgcaaacctgtagaggttaagtgccgccaggatttttaaagaattgatataggaaaagaaaag

SEQ ID NO: 101627 - DNA, 634 bp, Arabidopsis thaliana columbia
  unsure (1)..(634): unsure at all n locations
gtgtcnnnnnnnnnnnnnnnnnnnnnnnnnnnnnnnnnnnnnnnnnnnnnnnnnnnnnnnnnnnnnnnnnnnnnnnnnnnnnnnnnnnnnnnnccttttttttttttttttttcaggttcacaagtgaatgggttatcacttatcaatatgaatataggtcaagcaaagtgccacgactcaagttggaataaccaaagttgcaggaaaatatcaaacaaattttttttgtaactaacaatgagcctacaattgaagttctcactatttttttgactaatgacttttcaacttttcttccacgagctcgatgcatcgatatagaaccaattcaattgggttcagaagccctacatcgtcgagtgaagattcttggccatgatcctccttgaggttctcagcgatgctgcagctcacaagagttcgaagaggcagaagccattcccttatacgctttccccagatcctcctttggccaaatatccctggcggacttgggtccccccttacccggggtnaaatcccccgggtccaaaaaaagggggaaccctgtaaggggtaaagggcncccacgggttttgaaggatggnanggggaaagnaaagncccgggacacnnggccgggnggggggggct

SEQ ID NO: 101628 - DNA, 463 bp, Arabidopsis thaliana columbia
cgacccggcccacattttaaacccattttagccttttctgtttccgccgccgactgatcggaataatcgatcaaagagagaacaactgaatcttcgccggatactacgccgatgacgattgcggcagcgccagcacgccagacagatcgatcagccactggtttcaaccctgcttacgtcacgacggcgaacgcggtgagcgttccggttcaagttcctccggcgactgtggtttccgaaggattacgtaaagatgcgttgatctcatggttcagaggagaattcgctgcggcaaacgcgataatcgacgcgatgtgctcgcatctaaggatagctgaagaagcggtatctggatcggagtacgaacctgtattcgcggcgatccatcgccgtcgtctgaattggatccctgttcttcagatgcagacgtatcattccatcgctgaagtagcgatcgagcttc

SEQ ID NO: 101629 - DNA, 486 bp, Arabidopsis thaliana columbia
  unsure (1)..(486): unsure at all n locations
taattttttattatttattattaatatttattattaatataataaataaagtaaaatatgatactctataaaaatttgctcatttttatagaaaaaaaacgagtaatataagccctctttcttatttaaagaaggcntatattgctcgttttttactaaactagatctagactaacactaacgaattatccatttgtagatggagcctcaacagcagctaggtctagagggaagttgtgagcattacgttcatgcataacttccataccaaggttagcacgggttaataatatcagcccaagtattaataacacgtccttgactatcaactactgattgggttgaaattgaaaccatttaggttgggggcntagtctaatacntaagcagtaaccnaataccnnttccggcaagccntaagngnatttaaagaccgggttnttgaactgcatttggnaatatncgccaataccgnggngtnaatgt

SEQ ID NO: 101630 - DNA, 482 bp, Arabidopsis thaliana columbia
gaaggctggcccccctgcaggtcccggcccggattaattcccgggtcgacgagctcactagtcggcggccgttcgcgatctagacctagctcgagccgttactaaactagatctagactaacactaacgaattatccatttgtagatggagcctcaacagcagctaggtctagagggaagttgtgagcattacgttcatgcatatcttccatcccaaggttagcgcggttaataatatcagcccaagtattaataacacgtccttgactatcaactactgattggttgaaattgaaaccatttaggttgaaagccatagtactaatacctaaagcagtaaaccgaatacctactaccggccaagccgctaagaagaaatgttgagaacgagaattgttgaaactagcatattggaaaatcaatcggccaaaataaccgtgagcagctacaatgttgtaagtttcttcttcttgcccgaatct

SEQ ID NO: 101631 - DNA, 786 bp, Arabidopsis thaliana columbia
  unsure (1)..(786): unsure at all n locations
ccaccaaaacttacaaaaaaataaaaaacagaaccaacaagaaaaaatacacaccaaaacccccacccaagcaaaaaaccaaacaacacaagagacacacacaaaacgacacacaaccaacacacccccccccagcggagacaaaatgaatgccttcccagtaccgaaccggaattccgggacgacccacgcgtccgggcagtggaagacgacggcacgagcttcaccgaagagcgaaaatggtgaacattccgaaaactaagaacacttactgcaagaacaaggagtgcaagaagcataccttgcacaaggtgacgcagtataagaaaggtaaagatagccttgctgcccaaggaaagcgtcgttatgatcgtaaacaatctggttatggaggtcagaccaagcccgtcttccacaagaaggctaagacaactaagaagattgtgctgaggcttcaatgccaaagctgcaagcatttctcgcaacgcccgattaagaggtgcaagcactttgagatcggtggagacaagaagggaaagggaacatctctcttttaagttgttgtttcatctatctacttttttttgttttgtttggtacctgtcctgcttcaatactgtgatatactttgaatctaccagaaatggtcctggtttttaatttaaataggacttggtctaaaaaaaaaaaaaagggcggccgccctgagggaccagctttcggccgggccttgcgagcaaagccatntngggnccccaatccaatcnnnnnnnnnnnnnnnnnnnn

SEQ ID NO: 101632 - DNA, 563 bp, Arabidopsis thaliana columbia
  unsure (1)..(563): unsure at all n locations
aaacaataggcattagcanaaacacctcccctccttttaancaaaagnannnnagaggcggcatcatgttgacgtcaggtacatacctcacagaagttcctctgaaagggtcagcgaagaaccactacaagaggtggaagagcgaaaaccaactcttccctgacgccattggccatcatatccaaggtgtcaccgttcacgagggcgactgggactcccacggngccatcaagtcctggaactacacatgcgatgggaagcaagaggtgttcaaggagaagagggagttagacgaccagaagatggcggtgacgtttagagggctggatggtcatgtgatggagcagcttaaggtgtatgacgtcatcttccagttccgccctaagtctcaggaaggttgcgtctgcaaagtcactatgttttggagaagcgctcgaaactctcagagcccataagacatgaagtcgtacgagctgctgtgcatgatgaccacatctagaccaacagctaatatataggcctctatgagtaaataatagacatctaaatatggggggcgtggt

SEQ ID NO: 101633 - DNA, 794 bp, Arabidopsis thaliana columbia
agaaaataaacaattggcatttgcataaacactttcaaaaacaagtaatcaaaagtattttagaagcttcatcatggcgacgtcaggtacatacgtgacagaagttcctctgaaagggtcagcgaagaaccactacaagaggtggaagagcgaaaaccaactcttccctgacgccattggccatcatatccaaggtgtcaccgttcacgagggcgactgggactcccacggggccatcaagtcctggaactacacatgcgatgggaagcaagaggtgttcaaggagaagagggagttagacgaccagaagatggcggtgacgtttagagggctggatggtcatgtgatggagcagcttaaggtgtatgacgtcatcttccagttcgtccctaagtctcaggaaggttgcgtctgcaaagtcactatgttttgggagaagcgctacgaagactctccagagcccatcaagtacatgaagttcgtcacgagcttggctgctgacatggatgaccacattctcaagaaccagagcaaggcttaatcatcatagtgaccatacttatgaagataaaaataaataaagaaacatcctaatatatatgtgtgtgtgtcgtttgtgtttgtcttgtacatgatgaaaccgcctccttgtcttgtgtacattttatgctgataataatggcggtacgtcttgtaaacttatgcatgtatcatctctgtctttgatgatttgatgttgttatggtgtagtattggtgttcgtaatatataaagagcacaatattaggatgtag

SEQ ID NO: 101634 - DNA, 437 bp, Arabidopsis thaliana columbia
ctcctcgtcttctctgttcgtctgccatatgagtccttcccaagcccaacttttctgaaattgaatcttttgggacagagatggcattaattcagaaaccagtggtgtgcaaagacactaataagatcttcatgaagcaaatacttgcgtttactgaacaggtgaccattacacagaacagtaagctctcgccacgcacatggcacaaggaagtgataaacggactaacttgtagtctctttcccctgtcaagaattagcaaatcatccttcttttacttgttctgaagcacatctagatagaattgaggcacagaggtcaacggatgtgtctcatgaccaacagaaaaaaagatacttcccaatgaatctgataaacaaagtcgcaagcaaactctgttcacgaggaggagatggcgccacgccacctatgggaga

SEQ ID NO: 101635 - DNA, 1164 bp, Arabidopsis thaliana columbia
ctctatcacacacacccaatttgcatttctttcgtcatcatcatctactctttctgcgtttttcccagctgaataatctaaacaaggaaaagtaaaacagagtaccaatctcagattcatcagctccacttgaatttaaagtagccataactgttcgatcataggatggaagaagcaactcaagtaacgagttctgaggtccctgtagtgaaaggtgatgttgatgaccttaagacagctgatatttccgtcaaggctgtgaatggagaagtgccaaaggaggagaaagaagaggaagatggggaattcataaaagttgagaaggaagcttttgatgccaaggatgatgcggagaaagcagatcatgttcctgttgaagagcaaaaggaagttattgaaagaagctcgagtggttcacagagagaactacatgaatcacaagaaaaggcaaaagaactagagctcgttctcggcccccttgcaggggaactaaaacggtatgaatctgaacatacccatttgaaggatgagcttttgtctgctaaagacaagttccaagaaacggaaaataagcatggagatcttgaagttgtccaaaagaagcatcgagagaaaatagttgcaggggaagagagacacagctcacaggtaaagtcctgggaagatgctttgcagtcacatgacgcgaaagatatggaactaactgaagctaacgaaacttccgatgcgttcggcataaaactcgagagctcacgaaagaagttgatagagttggacgatgggctaaaacgttcagctgaagaggctcagaaatttgatgagctgcataagcaaagtgcttctcatgctgactctgagtcgaacaaagcttcggaatttgcggagctgctttaatcgacaaaagagagtgccctggtaatggaggaaaaaatggcgtcccttgcacaagtaaatcaaggatcctcctgtgaagatatctgaagacgaaaaacgttgatactgcccttaacagttctgcgggacaaatagctgccggcaagaggaattggcactctcaaaatctccgttagtcctgatgacggaaccttaaagtgtttttccacaacaatgccctcatttggttaaactgacctcaggaaacttggaccaataaaaaatgctttc

SEQ ID NO: 101636 - DNA, 478 bp, Arabidopsis thaliana columbia
  unsure (1)..(478): unsure at all n locations
ggaancccggggcgaccacgcgtccgaatcagcaaaaaccctagaatatcttagagcttcgcttcactttcaagctcgagactttgagaaagatgcctccgaaagccaaagctaaagatgcaggtcccgtagagaggcctattcttggccgtttctcttctcacctcaagatcggaattgttgggttaccaaatgttggaaaatctactcttttcaacactcttacaaagctttcaattccagctgagaatttccccttttgtaccattgagcctaatgaggcacgtgtgaatatccccgatgagaggttcgattggctttgccaaacttacaagcctaagagtgagattccagctttcttggaaattcatgacattgctgggcttgttagaggagctcatgaaggacagggtcttgggaacaacttcttgtcccatattcgtgcagttgatggaatttccatgtttacgtcctttta

SEQ ID NO: 101637 - DNA, 796 bp, Arabidopsis thaliana columbia
  unsure (1)..(796): unsure at all n locations
nnnnnnnnnnnnnnnnnncactatngaccgagcatgccctcgtacgtaagcttggatcctttaaagcggccccctgtgttttttctctcggagattatctttctataattttagagaggaataaattacaaagcactctgagaaaagggcatatatctcacacaccgcatatcgacaacaacacccgaatctaatactcacatgatttatcttaaacccaactttctttttcctaactcaacgtgaaaccgtacgtatgtctttaagaagacccaagacctgttgcattgttggtcgcttcactggcgtctccgccgtgcaaaagtaaccaattcgaagactctctaccatctcattaaccgattctccagcagctaaccgcaatctcgagtcaagagcttcctctcctcttctctccttaaccaaccggcgaacggatttaacattctcatcactcccttgcttcccggttaataactcaaacaaaatcaccccgaaactatacacatcgaattctacattgtttttattagtaccatctccggttctcgcaatgttgttgataccgaaatcagaaatacgcggctctagggtttcggttaggaggatgttggtagcgactaagtgtccatgagtagtaccaacgtggtgttgataggctaaaccacgtgcaactcctatggcgatacggtgacgtattagccaatttgttttctccggtgatgagctccgacgtnantcttccatgtatcggnactccaatcttccacgttggttntctcccgccgggagctta

SEQ ID NO: 101638 - DNA, 696 bp, Arabidopsis thaliana columbia
ttcaaaagaaaacaatcaatcaagaaatggcgatgtcaggaaaatacgtggcggaagtaccgctgaaagggtcggcggagaaacactacaggcgatggaggagccaaaacaatctcttcccggacgccatcggccaccatgtccaaggcgtcaccgtccacgatggcgactgggactcccacggctccatcaaatcctggaactacacacttgatgggaagccggaagtcatcaaggagaaaagagagatagacgacgagaagatggcgttgacgttcagaggactagagggtcatgtgatggagaagtacaagaagtatgaggttatcttacagttcattcccaagtcgaacgaaggctgcgtctgcaaagtcactctgatatgggagaatcgcaacgaagactcccccgaacccatcaactacatgaagtttgtcaagagcttagttgctgatatggatgaccacatcctcaagggccagaacaaagcttaataaccctccatggtcatcgtcgtaaatcatcctcatgcatgtgtcttttgtacttgtctcgtaagtgcctttatcatccgcctttacatgttatgctaataataatggcggtcttgttaagcaattgtattgtatgcttatgtataccatctctgtctgtgatgttattatgcgtgttcgtaataaaataagtgtgttagtt

SEQ ID NO: 101639 - DNA, 741 bp, Arabidopsis thaliana columbia
cgacccacgcgtgcatttcaaaagaaaacaatcaatcgagaaatggcaatgtctggaacatacgtggcggaggtaccgcttaagggatcggcggagaaacactacaagaagtggaggaacgaaaaccacgtcttccaggatgccgtcggccaccacatccaaggttgcactatgcatgacggtgactgggactcccacggctccatcagatcatggaatatcacatgcgatggaaagccggaagtcttcaaggagaagagagagatagacgacgaaaagatggcgttgacgttgaaagggctagagggtcaagcgatggagaagtacaagaagtatgaggttatctaccagttcattcccaagtcgaaggaaggctgcgtctgcaaaatcactctcatatgggaaaagcgcaacgaaaactcccccgaacccatcaactacatgaagtttgtcaagagcttagttgctgacatggacgaccacgtcctcaatggccagaacaaagcttgaatcccctctatggtcatcgtcggatggtcttcatctttatgtgtgtgtatcttttgtgtatctttacgtacgtacgtgacttatcatccgcctctttccccctttatacatgttatgctaataataatggcggtcttggaagcctatgtatcatctctgtttgatgattacatgttgttatgatgttttcgtggtgtaagtgtgtgttcgtaataaaatagtaattgtaag

SEQ ID NO: 101640 - DNA, 562 bp, Arabidopsis thaliana columbia
  unsure (1)..(562): unsure at all n locations
cnnnnnnnnnnnnnnnnnnnnnnnnnnnnnnnnnnnnnnnnnnnnnnnnnnnnnnnnnnnnnnnnnnnnnnnccacgcgtgcgatcttaccaaagtctgtgataatttttccgacagaagtttcatctgagaaaagatggctacatttgcacttcccttctgcgaaattcccgaggatctccagctccgaatcttatccctcctcacaccagcggagatctccagcttcgcctgcacatcgaaacgcttcgcctcgctatgtcaagaagacggcaaaatctggcacgttatgtgcgatcagagatgggggaagaaaactaagatccagaaatgggcaaacggtcaaatcccttatagacacctttacaagactctaaagggattggagaatctaattggcttctggcgtctctgcggcagagcaaatcccgccgcttcatcgccgccgcttgttttcttcgattggggttcttcttttatattgggatctagagttctatccaccggagatgatacttatgaggtaaagaagacaccttttctcttaatggggatttcggcg

SEQ ID NO: 101641 - DNA, 573 bp, Arabidopsis thaliana columbia
  unsure (1)..(573): unsure at all n locations
cnnnnnnnnnnnnnnnnnnnnnnnnnnnncaaaatcacaaaagtcatctaaactttgaagaatctttaccaaccaggctcgcgcaaaagttggaatcgtgcacgcctctcgagttatctccggctccgatactccatctggtggattctgtagaagaaaaaatttcaatctttgttggattttctgggaaaaactcagatgggtttgctctgaatcgattggaaaatcaaaccggtgtggactctgcaaagttggttgatatgaacagtcttgtgagaagaaaacaagttgattctgttcatcttatcaaaaacgatggacctcatcagcttgccaagaaactatccgccgttgatcttgttgctattggagttgggacaacaattggagcaggagtgtatattcttgtgggaacggtagctagagagcacacaggacctgctcttgctgtatcattcttcattgctggagtagctgctgctctctctgcctgttgttatgctgagcttgcttctcgttgtccatctgctgggagtgcttatcattatgcgtacatttgtcttggagaaggga

SEQ ID NO: 101642 - DNA, 505 bp, Arabidopsis thaliana columbia
gggtttttctcatccacatcggattttagaataccgtctagtagctcgatgaatcagactttacctcggtgtcatctttgtaacgagaagtatgagcaagaagtcaccgcctttgctaagtcggggtcgatgatcgatgatcagtgttcggagaagttaccttcttggttacgaaatgtggagcatgaacacgagaaaggaaatctcggtaaggttaaagatgatccaaacgtattagcctctcggattcccgctctgcagaagaaatgggacgacatttgtcaaagaatccatcaaactccggcgtttcctaaactcagttttcagcccgttagaccgcagttcccgcttcagcttggttcttctagccagaccaagatgagtcttggaagcccaactgagaaaattgtttgcactaggacgtctgaaagctttcaagggatggtggctctaccgcagaatccgccacaccaacctggtttatcagtcaaaatctcaaagccaa

SEQ ID NO: 101643 - DNA, 569 bp, Arabidopsis thaliana columbia
atgatacgtcagcgtctacacgactcactatttggaaagctggtccgcctgcaggtaccggtccggaattcccgggtcgatccacgcgtccgcttttaactctcggtcaagtatgaaaaagtaccagagcgaagaagatgaagatatctctgaacagaaacctcgggcaaaagataaagcagccagtggacaacaatctgttggcagcatttcttctcggagctcccaagctagaaagcttcaacccaacaggaacatgtcttcttctattactccgcggagtgcagcatcggttccaaaaccatcaggtaaagtttcaaacacctcttctgggaggcgaagatcagacaagtcgctcgcacaatctgttccaaatttttctgaacttataaaggaaaacacgaaaccatcttctttagctgtcaaaactactatgcgatcacaggtgaaaagtagtggtcgcaccaagactatcaaggaggatacactgctccaaagacctcgatcattaaggaaaagctcctctgggaacatagactttacggaactctccactctctgctctgatg

SEQ ID NO: 101644 - DNA, 1867 bp, Arabidopsis thaliana columbia
  unsure (1)..(1867): unsure at all n locations
aaagatcaactctttcaaacacttactctgcatgtaacttcatagattgaacgaagaaccaaaaaaacagagcaaaacaaacaaaagatggttcaaaaccaccaaacagttctcgccgtcgatatgccacaaaccggcggctccaagtacttggacgacgacgggaaaaacaaaagaactgggagtgtttggacggcgagtgcacacataataacggcagtgataggttcgggagttttgtcactagcgtgggctacggcgcagctaggttggctcgccggaccggtggtgatgttgctcttctctgccgtcacttatttcacttcttctcttcttgctgcttgttaccgctccggcgaccctatctccggcaagaggaactacacttatatggatgctgtccgatcaaatctcggtggcgtgaaggtgacgctatgtgggattgttcagtatcttaatatctttggtgttgctattggctacacaattgcttcagctataagcatgatggcaataaagagatcaaactgtttccacaagagtggagggaaagatccatgtcacatgaacagtaatccttacatgatagcttttggattagtccagattctattctctcagattccagattttgatcaactttggtggctctcaatcctcgccgccgttatgtccttcacttattcctcagccggtctcgccctcggcatagcccaagttgtcgttaatgggaaggtgaagggaagtctcactgggattagcataggagcagtaacagagacacagaagatatggaggacctttcaagctcttggagacattgcttttgcttactcttactccattatcctcatcgagattcaggacacagtgaagtcaccaccatcagaagagaagacgatgaagaaggcaacacttgtgagcgtcagtgtaacgactatgttctatatgttgtgtggatgtatgggatatgcagcctttggagacttgtctccgggaaatctcttaaccggtttcgggttttataatccttattggcttcttgacattgcaaatgcagccattgtgattcaccttattggtgcataccaagtctattgccaacctctgtttgctttcatcgagaagcaagcttccattcaattccctgatagtgagttcattgcaaaagatatcaaaattccaattcctggtttcaagcctctccgcttgaatgtcttcaggttgatatggaggacagtgtttgtgatcataacgacagttatctcaatgcttcttccgtttttcaacgacgttgtgggtctgctcggggcactagggttttggccattgacggtgtattttccagtggaaatgtacatcgcgcagaagaagatacctagatggagcaccagatgggtttgccttcaagtcttcagcttagggtgtctagtagttagcattgctgcagctgcagggtccatagctggagtacttcttgatctaaagtcctacaagccatttcgaagcgaatactgatcaacttgaatagtagccaattcaaagcgatgactaagtcagttttaaacacaatggatatatcaagaacagtcaagagaaccaagaaccatgaatttgggaattttgatcagcttttttttatatagatagaagcaataatgctgttagttcttctctataatcttctctgtaccctgaaggcaagaattgtagtcctaatgagtaaatcttcgattaatgacagagtcatgtgctacaacagaatcatgaactagcaccataatagtatattaccattgtggtaaaatttcaataacaagttcttgtacttnnnnnncgnnnnnnnnnnnnnnnnnnnnnnnnnnnn

SEQ ID NO: 101645 - DNA, 886 bp, Arabidopsis thaliana columbia
  unsure (1)..(886): unsure at all n locations
tgatatnnnnnnnnnnnnnnnnnnnnnnnnnnnnnnnnnnnnnnnnnnnnnnnnnnnnnnnnnnnnnnnnnnnnnnnnnnnnccacgcgtccgcttctttctacaaatgggtttccaaagatctatctcttcttcttctgcattaaaatggcttggatttgtaacagcggtttgggttcaatccatctccggcaacaactacactttttcaaactactccggtgctcttaagtctctcatgaatctcaaccagctcgagctcaacaacctctctgtcgctaaagacgtcggaaaagcctttgggatcctggctggccttgcctctgaccgtcttcccactccggtcatcctccttattggttgctttgaaggtcttcttggttatggtgtacaatggctcgttgttagccgcaccatccaaccaatcccttattggcagatgtgtatattcctctgtatgggagggaacagcacaacgtggatgaacacggcggttctagtgacttgcatacgcaattttcgacgaaaccgtggtccggtctccgggatattgaaaggatatgtcggtttaagcacagctatattcactgatctctgtactgctctgttctcaaacgatccggcgtcgtttttggttttactagccgtggtgccttttgccgtatgtctcacggcggttttcttcctccgtgagatcccaccagcatcttccgcagctgaggagaacgaagagactcgttactttaccatattcaacattgtggccgctgttgtcgccgtgtatcttcagtcttacgacatcattggaatcaaaactggagtgttctcttgtcgcttttcgcttctatacttctcttcctcttggctttctccaatagccatccct

SEQ ID NO: 101646 - DNA, 426 bp, Arabidopsis thaliana columbia
ggatagagaagtaattgatgttgatgatgagcttggagatgttgaaatgatatctgatgatacaagtagggagggtgtcgaaaacgtggctatggaggtggacgacgtggaagagaaggcggagatgggaaatggattgttttctgaggttgccagtctgaaaaatgggagcttgagggtgggtgaatgttctaaagctaatagtagttcactcgttgtgaatcgccctgtgactgatgtcacaagttttgaagcatacagaaaggttcttgagagtgctgtgaaccggacttctaaactgaaagacagaggctttgttgatttttttaaagagagaggtcgtgctttactacgaagcttgtcttccttttggagacaagatgaagaaccagtagaggttgtacaacgtgaggcatttgtacctct

SEQ ID NO: 101647 - DNA, 529 bp, Arabidopsis thaliana columbia
  unsure (1)..(529): unsure at all n locations
nnnnnnnnnnnnnnnnnnnnnnnnnnnnnnnnnnnnnnnnnnnnnnnnnnnnnnnnnnnnnnnnccacgcgtccgcatcacttaccttcttcacagagagagagcttcatcatcatatgtaatgtgagatgtctcttgaacaatagcaacaagaagctctctctttcctctcgccctctctcccttcccttcaccacaattttccctctctttctcgcctccgcttcaacaattgtcccgcactttccttcaaaccaaacacttcatcatcatcttcatcattcttcaaatccccagatataccctctctctcctccaccacaacaacaacaacaaccaccgaaaccctagaatcctcaatccacgagaaactcatttacctcgattcactcggaatcgatttcctaaccctaatcaaccgtcatccacctctcctctccaccgctctctccgccgttgaatcagtcgtcgattacatgaccactccaccaataaacttcactttacaagactttcgccgcctcgtctc

SEQ ID NO: 101648 - DNA, 521 bp, Arabidopsis thaliana columbia
actatagaaagactatgacgtcgcatgcacgcgtacgtaagcttggatcctctagagcggccgccctttttttttttttttttttgagatgacgtcagtattgtgagacacggaattgtgttattgcaaaagcgctaattaaaatttatatgaagaaaaaacaatagaacgtggagcagcttgagcaaaatcttgaattggctcaaactttagagaaaacatttaactcagaaatccagatggagaaaccgatatcattcaacacggtctgatccggttacgatcctctggaagatgttgaaccagctgttcaaatactgcaatgcatcctacttgaggtcgaaatccctagtctccgtgtggttcagattcatgagatatagagcgtgtgcactactaatattcccaacatgccattaatcccccgcgtaatcgtacgtttcagaatcagatctaacatcctaaggtatctttgccaccatcttgcacttggttgacaagcgtccggtaaatctaaaccc

SEQ ID NO: 101649 - DNA, 513 bp, Arabidopsis thaliana columbia
  unsure (1)..(513): unsure at all n locations
nnnnnnnnnnnnnnnnnnnnnnnnnnnnnnnnnnnnnnnnnnnnnnnnnnnnnnnnnnnnnnnnnnnnnnnnncttttttttttttttttttaattaatatataactagaaaattcattggaaggtatttaaatgtatgggctaactacatatgaaatatttcataaatccaaaataaaagacattaccgttcagagctaataaggtgtggataaaaagcttcctcaaaattttgtttatagaagagatgatgatgatagtgaaaggattaatgcccctagtggaagaaaaaataacactaatgatggacatatattctagggatgaggttgattgatctttctgacatcaagtatatgtatggtcacgccacgacggctgactgctacactacctttttcgtaaagcctccatagctatttcaatcgacggctgcttggttttgatatttgagttgctcttcctttgtccgcaagttttagagtctttgtcaattctcgtacattcgtggaa

SEQ ID NO: 101650 - DNA, 576 bp, Arabidopsis thaliana columbia
  unsure (1)..(576): unsure at all n locations
gtgcttgcgattgttttcnnnnnnnnnnnnnnnnnnnnnnnnnnnnnnnnnnnnnnnnnnnnnnnnnnnnnnnnnnnnnnnnnnnnnnnctttttttttttttttatatgtataatacaataaacatgtttttgaagacactaatccaaatgagatacagcttttatttagccaaatttcatctcaaatgtgtcatcttaaattttacatttaattgtcatagaaagggcccatgtcattctctacaaacttttggcttaagattttataagctctttccgttggatggtaagagtcccaaaacataaaagaagacacattcttgcaaagaagtgatgtatatttgttgcaaagcggacctaattcgagtagccccgtcccgcaacatcctctatcaatctcatcaaatccatattttttggggttttgaatcatatcattgaaagaagagtagatgtcaatatacacccaatgtggtatttttcatgggtttagccaattcgttcaaacttgtggagagtttggaattaaaaagctgagctgcaaagttgagttcatcagcacattttcttttaa

SEQ ID NO: 101651 - DNA, 453 bp, Arabidopsis thaliana columbia
cgaaaaacaaaaaaaaaaagacagaggacaaaaaaaaatcacgaaatctgattttcctctcttttgctcgaagccaagtctctgcttttactttgatccaccaacttcatcttcaacctctcgattttaggtaagattcttagagtgattttgacttatctaagaatggagctaaagagcattaaggatgcgtttgatcgtgttgcgacgaagcagaagctctcttatagcaaaactaatgagattgttcatatgttgtctcaagaaatcgataaggctttgagcatattagaggagacaccatcatcagatactatgcttcttgatcatagatctatcctcgctgatgtgaagaaagtgtttatggagattgctccaatcactcaacttgaagctactgagaaagagctacatgcggctttgaccaagtaccctaaagttcttgagaaacag

SEQ ID NO: 101652 - DNA, 517 bp, Arabidopsis thaliana columbia
  unsure (1)..(517): unsure at all n locations
nnnnnnnnnnnnnnnnnnnnnnnnnnnnnnnnnnnnnnnnnnnnnnnnnnnnnnnnnnnnnnnnnnnnnnnnnnnnnnnnnnnnnnnnnnnnnnnnnnnnnnnnnnnnnccaattaactccccaatctattataaaagccattgacttcttgcttttggattacaaaaaccaaaagtgggcagtcgataacgagacccgcggaaccttaagtacctaactaaccttaggccacagcctttttgtttctccgaccagttaatggcttaggcaatcctgtcaaaaatagaactagccatggctacttgggtgagtaactcaggtttcagggtccactttgaggttggccatagcgatgaaccgttgctgttacagtttggttcttgtagactagatgcgctaacagatttcctcacgcttgagaagctgtctcccacaggagcatccatcaaattgattggtatggaattgagatgtctggtttctgctgataagttaactctgcttgatgctttggaa

SEQ ID NO: 101653 - DNA, 528 bp, Arabidopsis thaliana columbia
  unsure (1)..(528): unsure at all n locations
gattagnnnnnnnnnnnnnnnnnnnnnnnnnnnnnnnnnnnnnnnnnnnnnnnnnnnnnnnnnnnnnnnnnnnnnnnnnnnnctttttttttttttttttttaggcaaaaattgggaccttttagatgatgtctgtaatgttaaacatgtaacatcaatcataatcataacctagactaataatccataagaagaagaagaagcttgaaaactatacattacagagagaaaatatttagaaactactatgccaaattgctccatcgccttcaccacaacggtgatgtacttcaagcattctatctacggatttgcagattccactacagctccaatcgaacgatgctgcgcaagggtttcctgcttgacccttccactcacaatctaaaggtgttccacagcagaggcttctatcgtcgatatgttcaacatcgggaccaatgaaccaagaacctaaagagacatcttcatttgcatacttgtgaagtagttgccggttaactgagatataagttgctaaatctttgg

SEQ ID NO: 101654 - DNA, 519 bp, Arabidopsis thaliana columbia
  unsure (1)..(519): unsure at all n locations
nnnnnnnnnnnnnnnnnnnnnnnnnnnnnnnnnnnnnnnnnnnnnnnnnnnnnnnnnnnnnnnnnnnnncttttttttttttttttttttagtcacaattttcgagtttttatcatttattagctgtataaaaaataaatttcccccttacaggaaaaattacaaataaaaaccaacaagttttaatcattttataaaattataaaaccattaaacggcaaaaacacgacattaaactccttgattcactgttacataaactgtcccagtaacaggagcgtttgtctcaacgaccacccggttatcagaaacgttccttagcgcgtgcagaggaaacacgccagcttcactcgccacaagtgtgtactgcacgtggttgattaaatccgggaacaacaaaaccgggttaaaatcaacggtccaagacgtcccgtttccatctaccgaacctctagccaccgtcgatttctctaccattccgttcacactggtacggncaacgaccacctggccaacgtt

SEQ ID NO: 101655 - DNA, 494 bp, Arabidopsis thaliana columbia
agaagagctatgacgtcgcatgcacgcgtacgtaagcttggatcctctagagcgggcggcctttttttttttttttttaagtaacgatttattttttctcattttcatagaacaaactatcttacctcatatgagaagcccaaaaaacgtggcttcggttttcaaaatttacctccctttggttcccccaaccccaccccggggaccaaacaatatactttagactctcttctcgtcaatcggacatctccacttcagggggcttgtcctgttggtcctcaggtgaaatcgtagaagcaagatcttctactttcaggggagaatgtcgggccatatattgaaacatgatcttggaatagctatcagcaaaggctcgggctcgatttgatacaccgatatattgcaaatccgccttctcaaatctaccatccacacatttcagccctccatcgccaatggcaaagcgaataagacttcctgaagacagccctgac

SEQ ID NO: 101656 - DNA, 508 bp, Arabidopsis thaliana columbia
  unsure (1)..(508): unsure at all n locations
nnnnnnnnnnnnnnnnnnnnnnnnnnnnnnnnnnnnnnnnnnnnnnnnnnnnnnnnnnnnnnnnnnngcctttttttttttttttttaaaggaaacactaaagcttcagcttcaacattgaaatatatatacatgagtaggctaagatgaaaatgtgatgaccaggttgtatcgaataataatacaggcccctcaaagcaaggaaagaagaggtaaatcttatctctacctttcccataatgaactttttccctctcctaaactttatccaatggggctactaggcattatccagcctgattcataccctacgcccaaattggctccacggtgacgcttcttcattggtgccgcagatatagagctcccatgggtgatggaaggcagagagctttctactgaacagttgggtggggatggtgtttttggtgtctattgctactgcaagctctgaccacgatgggcttatcatcatctttggtgcatcgaagtacgggactgatgttcc

SEQ ID NO: 101657 - DNA, 629 bp, Arabidopsis thaliana columbia
ttagaagaagaatctaatcaaagagaggagagacaataaaaactagatggcctaattaaggattcttaaaggctcttctcatgttgtgcttaatctctcataatatacaaacaaaatactctcaacaactacttctaacaatcttctctctttcagatcttcaaaggctttgttaaactgtaaatgtttctactccaattgctccagaggcacacgaacaaataactgcccgtttagggttaccacagccgatgtgtgatccggatcgattcccgttgggaaacttacccccctttttttgaaaggggctagctccccaagggattcatagggttctcgggttcgccacttattactaacccgcccagccggatctgattggactcggccctcttcacggactaatcctgggactaatgcatacacctcaaagcaatcttgcgttctctgtacgttaatcttcacccagtcagctggtggtccaacatcaacaacagtcacatccaacatagatttagatacatggatggcattttttgcaccatgttcagcagccctcttacgtttgagcaaaccaggggtgggtcccatctgtttttcgcgcttttgaagaaaaaataaggttttac

SEQ ID NO: 101658 - DNA, 779 bp, Arabidopsis thaliana columbia
  unsure (1)..(779): unsure at all n locations
nnnnnnnnnnnnnnnnnnnnnnnnnnnnnnnnnnnnnnnnnnnnnnnnnnnnaccggccctccttgggtcgacggttcgatagctgatatcgaatcgggccggggagatttgtgtgttcttaatagaaaggtttaaagaagtttggtgctacaacaaatcaatagtgatgacacttagaagaagaatctaatcaaagaggggagagacaataaaaactagatggcctaattaaggattcctaaaggctcttctcatgttgggcttaatctctcataatatacaaacaaaatactctcaacaactacttctaacaatcttctctctttcagatcttcaaaggctttgttaaactgtaaatgtttctactccaattgctccagaggcacacgaacaaataactgcccgtttagggttaccacagccgatgtgtgatgcggatcgattctcgttggtaaacttaccacctttttgaaaggagtagctccccaaggattcatagggttctggggttcgccaccttttacttacccgcccagccggatctgattggacttggacctctttacggactaatcctgggactgatgcatacacctcaaagaattttggcgttctctgtacgataatctttacccagtctgtctggtgggtcctacctttttccaacacgagaccatcccaaccttagtattttacattaccttggggattggccatttttttttgcctccaaggtttcaaacaaacccccttctttaacgtttatggaagaaaaaaa

SEQ ID NO: 101659 - DNA, 528 bp, Arabidopsis thaliana columbia
  unsure (1)..(528): unsure at all n locations
ctatgacgtcgcatgcacgcgtacgtaagcttggatcctctagagcggccgccctttnttttttttttttttttattttttttttnnaaagacaaaaatattcacaattttattacaaaatcaagaaagggttgcttcctttaagagattaagaaaaaatttgaacaaaaaattgagggaaccagctataatgattataataataataaagtttaattagaaagctaaacaacaaggattagaacatagatttttacaattgcaaaaacaacaagaacaaagtcgtcccttgggacaactaaaacaagatgaccatctgatcttgcagttgcagctgcagcatgagctcttttttttattcagacacgacgggcgagtgcaactgcaactgcggaaacagctgggaatgcagcaagacatgtccggacaagaacaccagcaacctcggaagcatgaacagctcgggcagcttagtcttgggcaacaacaaatgtttgagcagcatgacccgtcacagcatttggaccc

SEQ ID NO: 101660 - DNA, 1739 bp, Arabidopsis thaliana columbia
  unsure (1)..(1739): unsure at all n locations
nnnnnnnnnnnnnnnnnnnnnnnnnnnnnnnnnnnnnnnnnnnnnnnnnnnnnnnnnnnnnnnnnnnnnnnccacgcgtccgctcatttctcttttgcatttctttctttttttctgcattgcattcttttgaggggtttaattttctgcatagctttgtctaatctcttagagctcaataagagaagatggatgttccacggccagctttcaaatgttttgatgacgatggccggcttaaacgttcagggacggtttggaccgcgagtgcgcatatcataaccgccgtgattggatctggtgttctatcgcttgcgtgggctataggtcaactcggttggatcgcaggtcctacagtgatgttgttgttctcttttgtcacttactactcttccacgcttcttagcgactgctacagaaccggagatcctgtctctgggaagagaaactatacttacatggacgctgtccgatcaatcctaggtggctttaggttcaagatttgtgggctgattcagtatttgaatctgtttggtatcacggtcgggtacacaatcgcagcatctataagtatgatggcgatcaagaggtccaactgtttccacgagagcggagggaaaaacccgtgtcacatgtcgagcaatccatacatgatcatgtttggtgtgaccgagatcttgctctctcagatcaaagattttgaccagatttggtggctctccattgtcgctgctatcatgtccttcacatactctgcaatcggtttagctctcggaatcattcaagtcgcggcaaatggagttgtcaagggaagtctcaccggaattagcatcggcgcagtgactcagacccaaaaaatatggagaacctttcaagcacttggagacattgcctttgcttattcatactctgttgttcttattgaaattcaggacactgtaagatctccaccagcagaatcaaaaacgatgaagatcgccacaagaatcagcatcgctgttacaacgacattttacatgctatgtggttgtatgggctatgcggccttcggagataaagcaccgggaaacctcttaaccggttttggtttctacaatccgttttggctccttgacgtggctaacgctgccatagttatccaccttgtaggagcttatcaagtctttgctcagcccatcttcgcctttattgagaaacaactggccgctaggtttcccgacagtgacttggtgaccaaggaatacgaaatccgaatccctggttttaggtcaccgtacaaagtcaacgttttcagagcagtttaccgaagcgggtttgtggttttgaccactgtgatatccatgcttatgccgtttttcaacgacgtcgtagggattttaggtgcgttagggttttggcctttgacggtttactttccggtggagatgtatataagacagaggaaggttgagagatggagtatgaagtgggtttgtctgcagatgttgagctgtggttgtttgatgatcacgttggtcgccggagttggctccatcgccggagtaatgctagaccttaaggtttacaagccgttcaagactacttactaaacaaaccatgatgatagatgaagaagaagaaggtggtggagaaaaaaaacaaaagatataaattttaatgatgattttcattggggaaatgtgaataatgtaaaagttcttcgtttcgtataatttttatcttgcgtaatttatatacat

SEQ ID NO: 101661 - DNA, 505 bp, Arabidopsis thaliana columbia
  unsure (1)..(505): unsure at all n locations
nnnnnnnnnnnnnnnnnnnnnnnnnnnnnnnnnnnnnnnnnnnnnnnnnnnnnnnnnnnnnnnnnctttttttttttttttgtataaaaagagttagttgtcgcataagcatgaaaacaaagaagaaagcaatttgtttatagctatctttctcaagtaaaatacgaaaactcgttcttcataccaataaagggtgttaactaaggagttgcagagatttcagctaatggtcgttcaccaaccacaaaccgcagtttttacggtacaacggcctcgagaagcttctcatacacttgtctagctgataaatcctcgaccacgaggaggtttgatttgctattccaacctctttggagagtcatctggctcaaccttaaaccaagaacccttcccatgaattccagaagctcgttgttagcttccccacgggctgctggtgcagcaacagtcacacgaacatcatcagcatttacccttgtgattgctgaacgttgtgcacggtctt

SEQ ID NO: 101662 - DNA, 515 bp, Arabidopsis thaliana columbia
  unsure (1)..(515): unsure at all n locations
nnnnnnnnnnnnnnnnnnnnnnnnnnnnnnnnnnnnnnnnnnnnnnnnnnnnnnnnnnnnnnnnnnnnnnnnnnncttttttttttttttttttctttttagaaggaacaggttttacataatcatctgagttagaagacactgttactgactaaaaacactgcggcgattgtaaaatgttgatttcgatgcaagatcgaaacttgacataccatgaagaattgaagatatatcaaccgatacaacatcaatgattttcttaattcttaccgagtttggctatgcattctatacttcacagctttcatcgccgcttttgcaaaaatatgggcagcttcagcttcggcttctgctttatctgcctctcttgctgcttcttcagcttctgccattgcaaattctgcttctgccacagctcttgcagctgctgcagcagcttctttttctgtcatacccattatcataacttctccacctacttgggatttagtaagatttttgacgccattctcctc

SEQ ID NO: 101663 - DNA, 390 bp, Arabidopsis thaliana columbia
cccaagcgtccgcggacgcgtgggtttcgattttaccttacgcagaaaggttcgttgaaaccctagattcgttctcagttttcgtgttggctaatggcgagcgcggcacggggagagagcagcagtccatacggcggcggattgggaaccggaggaaagttccgggagccgacggctcgtacgtctcagaaaactccttatgatcgaccaacgacttctgtgaggaacgctggacttggtggcggagatgtcagaggcggcggctggttgtcaaaattggtggatccggcgcagagacttattacttatagtgctcagaggctcttcgggtccttatcccggaaacgcctcggctctggtgagacgcctttacaatcgccggaacagcag

SEQ ID NO: 101664 - DNA, 519 bp, Arabidopsis thaliana columbia
  unsure (1)..(519): unsure at all n locations
nnnnnnnnnnnnnnnnnnnnnnnnnnnnnnnnnnnnnnnnnnnnnnnnnnnnnnnnnnnnnnnnnnnnnnnnnctttttttttttttttttttgtttaaataaaagcattaacatcttgttgtgtatttttacataacatttttggaactcaatacaggtgacacaaacaaatttatttggtggagatagtttgaatcaagatcagctctctgtgaagaaataggaattatatagaacaaggcctcgtcccattcctaacctaagaagatcccgtacataatgttgcttactttttgttttacggacccgattgtactctccccatgttgggcggatatgggtaagatgaattggtcaaggacgagatgtcaccattttgagtctcgttctttgtttctctctggccgtactgattcataccgctatttaagctagcatagtaggatgacatgggactagcctgaacaaacctgaaattgactccatttgggtgagtttggttgacaagttgttgattt

SEQ ID NO: 101665 - DNA, 512 bp, Arabidopsis thaliana columbia
  unsure (1)..(512): unsure at all n locations
nnnnnnnnnnnnnnnnnnnnnnnnnnnnnnnnnnnnnnnnnnnnnnnnnnnnnnnnnnnnnnnnnnnnnnnnnnnnnnnnnnnnnnnnnnnnnnnnnnnnnnctgcacaaggtataatataatttgattgtgaccgatctaattattcatctctaccaaatgttacgactatgttttatcacatcatctgcacaagacttatctagctttgatacaactaactgaatcctattacccagacagggactgagtatataatagttccaatcgcaaaagaaaccacaatggtaaaagatgcatacgcataggctctccatgggtaatcactttctctcatcgcattgaactcagccatgaaggtcgaaactgtgctcagacatcccaacagaccaaactgtatgctcgaagcaaccgtgttacatgttctcgtgttcaccgatttcttcaaggtagccaatgctgccataacgcaagctgcaactacatttgcaatgagggtgccaaatgggacc

SEQ ID NO: 101666 - DNA, 700 bp, Arabidopsis thaliana columbia
  unsure (1)..(700): unsure at all n locations
gttacactatagacgagctatgacttcgcatgcacgcgtacgtgggcttggatcctctagagcggccgccctttntttttttttttttttttttttttttttttttnnnttaaagcagacaaatcgtttgtgtacttttttgtgtgtcgtttttgaaatatttgctgtttcattacaacgacaattgctactcaaacacacaagtaaattacatatctcatgatattacacaattgagaaacagaacaagatacagagatctcttgtattaatgtaaaaaaaacaaaacaaatgatgagtagcttcaattagaccagacatggaggaggccgtgtctgtttcctgggtatatttcattccgttcttcgtcgtagaagagagcggttatgtcttccaaagcctcagcaaccgcacttctccttcgagaggaattccccaaatcactactgctgcagtcctcttccttaggaggaccattatttgcttttatcttagctaagcatttaccagtcaagatattgcttatgttaatcgaccccgcatttccttctatccactgatcttcagtatctgccttgcaatttgagatgatcagatcttgatcgcttgttatgtagatattggttgggttacagtctggatgccaaagaagatgatccttaaaggagggcacaggctttccggggaaattccacacaaa

SEQ ID NO: 101667 - DNA, 618 bp, Arabidopsis thaliana columbia
  unsure (1)..(618): unsure at all n locations
nnnnnnnnnnnnnnnnnnnnnnnnnnnnnnnnnnnnnnnnnnnnnnnnnnnnnnnnnnnnnngagtgaatatcatctttttttttttttttttaacgcaaagaaaataagatcacttttaggtaagcaaacacaacaccacatagctacaacaacttataattatacaaaaacaaaaaaagcttataattaaacatattgttgatgtatgcatgtatatgtactagatagatatttaccgaaaatatcataatagtaacataaccaaagttactattaaccacaagctgaaaaaactcagctctagttaaagtcaaaagctaacgctagaaagccaaacataattaccgactacactgttcttcttcctgctttgctttcagaatccagctttggacggttcacaaacgcggacgcagccaccaccaccgcggtagtagttaaacgccgttcttttgactcactacaaagagcttctaaaacgagaatctcgggctttcaccttccatggtggatatcacccgtttgttagtgaagagattacagtgagagataagagtgttctcattggcattctgcgtttacaaatggcagctatctcatccataacggtatggaa

SEQ ID NO: 101668 - DNA, 730 bp, Arabidopsis thaliana columbia
  unsure (1)..(730): unsure at all n locations
nnnnnnnnnnnnnnnnnnnnnnnnnnnnnnnnnnnnnnnnnnnnnnnnnnnnttctcggtttgttcctaaccccacgcgtccggcggttgaggttttactgaccgggattcatggttcggttatggaagaagaggaggaggaactgaagagtgttgtgactaagtatccagctgatgcatcacttcctgatattaacgaaggtgtttatggaactgatgattttaggatgtttagctttaaggttaagccatgttctagggcttattcacatgattggactgaatgtccttttgttcatcctggtgagaatgcaaggaggagagatcctaggaagtatccttacacttgtgtgccttgtcccgagtttcgtaaagggtcttgtcctaaaggagattcgtgtgagtacgcgcacggtgttttcgagtcttggcttcacccggcgcagtataggacacggctttgcaaagatgagactggttgtgctaggagagtttgtttctttgctcatagacgggatgagttaagaccggttaatgcttctactggttctgcaatggtttcaccaaggtcgtctaatcagtctcctgagatgtctgttatgtctcctttgacgctgggatcatcgccaatgaaactctcctatggctaatggtgttcctttgtctccaagaaatggtggtttatggcagaacagagttaattagccttacacccaccaccgttncagct

SEQ ID NO: 101669 - DNA, 526 bp, Arabidopsis thaliana columbia
  unsure (1)..(526): unsure at all n locations
gannnnnnnnnnnnnnnnnnnnnnnnnnnnnnnnnnnnnnnnnnnnnnnnnnnnnnnnnnnnnnnnnnnnnnnnnnnnnnccacgcgtccgcttagaaagagagagagagagagagagagagagagagagagagagagagatatcaaaccagaggaaaagagtgacagagaaagtggtcatctttgtctgtctctgtccgaaactcaggagccctaatctctgaatccatcaagaaagctctttctcttccttcttttatgcttctgaatttgctacatatataaactatctgaagaaagctagagaataagatgatgagtctaagtggaagtagcgggagaacaataggaaggcctccatttacaccaacacaatgggaagaactggaacatcaagccctaatctacaagtacatggtctctggtgttcctgtcccacctgagctcatcttctccattagaagaagcttggacacttccttggtctctagactccttcctcaccaatcccttggatgggggtgtt

SEQ ID NO: 101670 - DNA, 2027 bp, Arabidopsis thaliana columbia
caaaaaaaaaaaaaaaaaagcacatgcggtttcctctgcttcttccttcttacaagttggatgtctccgtcttccacggtgcttataaattagtgaaacaacaaaagctttggtcagtatttatattatcatgcatttctaatctctactttgtcaattcctatactttcactctcttccaattatataatctctggtccatagaaaacatcggtctcttgtcaccgttgattttatttggtcaaaatcattcttcttctcgctgaataatcgttgatttcacttcttcttctggtcttaaaaaaattcaagatctatacgagaaaacacaaaacaagtaaaactttttcaaccgtttttcctgtcggtaaagtttggattcttcttagtaaattttggtcttattgtcgaccaaaagaagaagatggtcgttcagaatgttcaagatttggatgttcttccgaaacatagctcggattcattcgatgatgatggtcgtcccaagcgaaccgggacggtgtggacagcaagtgcacacataataacagcagtaattgggtcaggagtgttgtcattggcatgggccgttgctcagattggttggattggtggtccagtggctatgttactcttttctttcgttactttttacacatctacccttctctgttcttgttaccgatctggtgactctgttaccggcaaaagaaactacacttacatggacgctattcactccaacctcggtgggattaaggtgaaagtatgtggagttgtgcaatatgttaatctatttggtacagcaattggatatacaattgcatcagctataagtttggtagcaatccaaaggacaagttgccaacagatgaatggaccaaatgatccttgtcatgttaatggaaatgtttacatgattgcgtttggtattgtacaaatcatattctctcagattcctgattttgatcagttatggtggctttccattgtcgctgcggtcatgtcttttgcttattctgccattggacttggccttggtgtctctaaagtggtagagaacaaagaaattaaaggtagtctcactggagtcactgttgggacagtgacactgagtgggacagtgacatcgtcgcagaaaatatggagaacatttcagtctcttggcaacattgcgtttgcgtactcttactcgatgattctcatcgaaattcaggacacggtgaaatcaccgcctgccgaagtaaacacgatgagaaaagcgacttttgtaagtgtggcagtgactacagtcttctacatgctatgtggctgtgtagggtatgcagcatttggggataacgcacccggaaatctcctcgctcatggagggtttagaaacccatattggttgcttgacattgctaatctcgctatagtgatccatctagtcggtgcttaccaagtctattgccaacccctctttgccttcgtcgagaaggaagcctctaggaggtttccagagagcgaattcgtcacaaaagagatcaagatccaactcttcccggggaagccctttaacttgaatctcttcaggctcgtatggaggacgttcttcgtgatgacaacaacgttgatctcaatgttaatgcctttctttaacgatgtagtcggtctcttgggggccattggtttttggcctttaacggtttatttcccagtggaaatgtacattgcacagaagaatgttccgagatggggcacaaagtgggtttgtctacaagtcttgagtgtgacatgtctttttgtgtccgtagccgcggccgcgggatctgttattggcattgttagtgatctcaaggtctacaaacctttccagtctgaattctgagatcatacgggaaaaataaactcctgctaaaagggttaagattagaattgaatgttttaatgtcatatttgtattagttaactttgtgtaagtgttcaattataaatcatgtttctaccgagaattcttacaacatggaactatcaatgattaaaagtag

SEQ ID NO: 101671 - DNA, 745 bp, Arabidopsis thaliana columbia
  unsure (1)..(745): unsure at all n locations
cttttgccgaacaacacaagattgttcttttagcnnnncannccgaccaagcggggatgatttgatacaatctcttctatctcctgagttttttgttttctggtaaacaattttatctgtggagttttctggagttgctagtggaagaatctgtctcacagctaggcgattatctttcggatgaatttcatgggaacgatgatggtatagtgccagactcagcgtatgaggatggaggtcagtttccaattctagttagtaacaggaagaaacgaagaaatgatgatatgggtagtggaacaaaccatctaaagagtaatacttttatcaagagagaggcaaacatgttaggaaaaaatccatggcctgagaaagatagtggtggctcttcggtttctcgtgatacgggaacaggaaaagatgttcaggatatgacattggaggatacaaatacttcagatcatggtttcaatggtggccacgtagatgtggttgaaaatttctccactggggatcccatgttgtgtgacacttccgctgcaccgaatgatggcgtatataattatttccctaacagcattccggatgctgaaaatgatcttaacctttttcgacaatggagataaagaaaaaaatgatctcttctatggctggggtgacataggaaattttgaggatgtagacaacatgcttaggatttgggattcaacattcggcttggatagccttaataaagaaagtgact

SEQ ID NO: 101672 - DNA, 841 bp, Arabidopsis thaliana columbia
taaaactaaaagaccaccgattcattagaaatccatccctctcactgtcaaaacccgagaagcagaaaaaagcaaaaaacagatttcgaagtttcgacgcctctctattcttcgatctctttcatatttgaatcgttcaccttcttgccgatcttcggagtatattacaaggttcttaacggatctctaaatcttctgatttaagaagatgcttcctctatcgctgcttaaaactgctcaagggcatcctatgctcgtggagcttaagaatggagagacatacaatgggcatttggtgaattgtgatacttggatgaacatccatctgcgtgaagtcatatgtacatcaaaggacggagatagattttggaggatgccggaatgttatatccgtggtaacacaatcaagtaccttcgagttccggatgaggtgattgataaagtacaggaggagaagacacgcacagatagaaaaccaccaggtgttggacggtgaagaggtacgtggtgtggatgatggaggagccagaggcagaggcagaggaacttcaatggggaagatgggtggcaacagaggagcaggtcgcggccgtggttgatgcaacaagttttaaagactcgctgccaaatctgctaacttcccattgtggagaaaaccccaagttacataagaagttggtctgttgttggttttctattaagtatgtaagggatagggagtgtgtttttcgattctccttgtgatcttttcgaaaaatgaaatttgtcttttgcctttttgtggtatatgtgaaattccaattgttttcatttgcgcttaaaaatgaatctttcaggtctt

SEQ ID NO: 101673 - DNA, 322 bp, Arabidopsis thaliana columbia
gtgaaggaacacttcgttgttacgaagatcggtgtcctcatcggttggctaagttgtctgaaggacaattgattgatgggagattggaatgtttgtatcatgggtggcaatttgaaggagagggcaaatgtgtcaagattcctcagcttcctgcaagtgctaatattccaaaggctgcttgtgtgaagacgtatgacgtgaatgattcacaaggagttgtgtgggtgtggatgtcaacaaagacacctccaaaccctgagaagcttccttggtttgagaatttctctagacccggttttttcgacatttcgactactcatga

SEQ ID NO: 101674 - DNA, 339 bp, Arabidopsis thaliana columbia
ttcagggctcgctttttcacctatttaaaccatcattttcctttctccattttgccgtcatcacccaacaacaaaaccctagttttggtttctctggatctgaagaatctccatgactattctcatagatcgccactctgatcagaacggttcgtgatcctttgtactcgttttactttggatctttctttctctatgctctgttttgaaatgatcttattatagatttttttgatgattgagtttgagttactttagatgcaggagatgagattgtagagaagaatcaggggaatggtaaagaggaagaaacagagttggtgttagatgcaggttttg

SEQ ID NO: 101675 - DNA, 323 bp, Arabidopsis thaliana columbia
gaaaacatacacaaatagcaaaacatggctaacaagctcttcctcgtctgcgcaactctcgccctctgcttcctcctcaccaacgcttccatctaccgcaccgttgtcgaattcgaagaagatgacgccagcaaccccgtaggtccaagacagagatgccagaaggagtttcagcaatcacaacacctaagagcttgccagagatggatgagcaagcaaatgaggcaaggacgtggtggtggtccttccctcgacgatgagttcgatttcgagggcccccagcacggataccagctactccagcagtgctgcaacgagcttcg

SEQ ID NO: 101676 - DNA, 332 bp, Arabidopsis thaliana columbia
caacaaacaaaaagaaaatggttaagctcagcaatctcctcgttgcaaccttcggggttctcctcgtccttaacggctgccttgcgaggcagtcacttggggttcctcctcagctacagaacgagtgtaacctcgacaacctagatgttctccaagccaccgaaactatcaagagtgaagccggtcagatcgagtactgggaccacaaccaccctcagctccgatgtgttggtgtttccgttgctcgttatgtaattgaacaaggcggtctttacttgcccaccttcttcacttccccaaaaatttcctacgtcgttcaaggaacgggtatc

SEQ ID NO: 101677 - DNA, 392 bp, Arabidopsis thaliana columbia
cctggttttgcagccttgccaaaggcatttagtccatggcattgatttgatcgtaaaaggtacaactcaagacggcaaggttatactgtcacccttggagatgcgttctcagttctacattctgtgttatgatgtgcaaaacaatgatttgagaaaggttgaaatcacaggagtaccacgcctttggttgcataaagaatgcaattttgacttgaagtttatggatgagagtgagagcttcatctacttggaaatttgaccaatacttttgacttttgtttgtgtaccagataagaatacagttaagttttttttttttcttctgtcaagattagtctcctacccataaatccaccgaaccctcgttaacatttattatcaatcaagaacac

SEQ ID NO: 101678 - DNA, 394 bp, Arabidopsis thaliana columbia
agcaagaacttccccgtttaaagtaatatcaccgcgtaggctctcttttgaaatccgattggctaatgcatcgataagcgttgatttccctgacccgctcgctccaagaacagccatcatctctccttcccgggcttcaccagaaataccattcaggagcaccttagtattcatctccatatcattaccatcaaaaggtgaattcccacaacaaggaaagggcttaaacttcttcttgatcttcacgctgtaagtcaagtctttgaaggaaagaacaaacggagaagaagaaggcacacgagaagacggaaccgaggaccagaaattggacgcaaccgcaatatccatagcccgactctggtcatccccctcatcttccacactcatgagaagt

SEQ ID NO: 101679 - DNA, 346 bp, Arabidopsis thaliana columbia
gaaaattttgactcaaatgagttgatgggtcaaatgagttgatgagtcaattggtttgatgagtaaaatgagttgggttgtaatggttaatggtttcaatggtttacccaattaacccatcaagttttgtaaaattgaattaaaccaactaaaatctctaaaccaatgccaatttaagtttaaccaacacatctaaaccaatttaataaaattaatatttttccaaatttcttaaatatacaagcgatgaaattgagaaaaagtaaactcgtaagttttccaccaaaaaacataaatccgtgatttttccgccaaaaacgtaaacccgtgattttctcgtcaaaaa

SEQ ID NO: 101680 - DNA, 324 bp, Arabidopsis thaliana columbia
aaaaagaaaatggttaagctcagcaatctcctcgttgcaaccttcggggttctcctcgtccttaacggctgccttgcgaggcagtcacttggggttcctcctcagctacagaacgagtgtaacctcgacaacctagatgttctccaagccaccgaaactatcaagagtgaagccggtcagatcgagtactgggaccacaaccaccctcagctccgatgtgttggtgtttccgttgctcgttatgtaattgaacaaggcggtctttacttgcccaccttcttcacttccccaaaaatttcctacgtcgttcaaggaacgggtatc

SEQ ID NO: 101681 - DNA, 342 bp, Arabidopsis thaliana columbia
aaatagtgtttttaaccaaaagaaaaaaaagatactgtaaactatataaattttctgtaatctatagaaagaatcaaagtgaagttgcagaaataaagaccaaatcaaatgaataatttattaaattgataaggtggcaaccaacagatatattgcacttaatatagtaaaaaatcatacattgctgtcagtgagtagtaaaccaagtagtcacccatatataaatttctggaaaatatgaaactcctaatcctacatgacttaaaccttttttagataatttcattatcaaatggctattctttcaattcacccttatatctttgcacaacaatagagaga

SEQ ID NO: 101682 - DNA, 330 bp, Arabidopsis thaliana columbia
aataaaaatggtcaaatcattatataaagactggagcaatgggaacgaaaacgggtgcatcaaaccaacatagttgataggcttgatgttaccttagcagctcttgttcttgctctagaccagcgtgaaactgcagtctcttgcttctcaatttcaaaaaacgatatagaacttcttttaagttcagcaaagtcaagtaccttccacctgcaaattccatttagttactactaaacagataattttatcctctctatatataccaatgccaataatcataacaccacgaaccatctttgctcaacgactacagcacaatcagctagcctt

SEQ ID NO: 101683 - DNA, 321 bp, Arabidopsis thaliana columbia
cgtgtcagattcgctttctctacggctggactagaaggattagggatttaccggtggaagaataactccagagataaatctgtaaccatggatatgatgaagaagcgtaagctcgatgagaacggtaacggactcaataccaacggtggcggaaccattggtccaactcgattgtcgccgcaagacgcgaggaagattatcgagcgattcaccactgatcagctgctcgacttattgcaagaggctatcgtacgccatcccgacgtgcttgaatctgtccgattaaccgccgactctgatatctcgcagcggaagctattc

SEQ ID NO: 101684 - DNA, 324 bp, Arabidopsis thaliana columbia
gtcaccttgtgggaagttggatccagagaaaaggttgtcacagaacctttcaagatatggaatatggcggcttgttctgtgatcttccagggttctatagtcaaagagccatcgatatccgtcactcgtgtagcatggagcccagatggaaacttgcttggggtttcttttactaaacatctgatccatgtatatgcttaccaaggctcagacctacgtcaacacctcgagattgatgctcatgtaggctgtgtgaatgacttggcgttcgcccacccaaataagcaaatgtgtgttgtgacttgtggagatgacaaattgatt

SEQ ID NO: 101685 - DNA, 324 bp, Arabidopsis thaliana columbia
atgaatgtgtgcaaatcaagcaaaagtaacttgatttgttgggcttctttgttatacgttctccaaggtggttcaactaatattccaacattttttatattacatctttggtgaaccaatgttatcacaagggagcatgaaagctctttgtacttgtttttatcagtactcagtaggtattaatcaaatttgcatgatttgtggaaaacaagtggtcagtggtggatatgttcttgttgagtcacaattacgttgaaaattaagggtgtaaagttagatttcggtttgagacctcgtctcaaccggtttgaacccaaattgggc

SEQ ID NO: 101686 - DNA, 323 bp, Arabidopsis thaliana columbia
caaaaagaaaatggttaagctcagcaatctcctcgttgcaaccttcggggttctcctcgtccttaacggctgccttgcgaggcagtcacttggggttcctcctcagctacagaacgagtgtaacctcgacaacctagatgttctccaagccaccgaaactatcaagagtgaagccggtcagatcgagtactgggaccacaaccaccctcagctccgatgtgttggtgtttccgttgctcgttatgtaattgaacaacgcggtctttacttgcccaacttcttcacttccccaaaaatttcctacgtcgttcaaggaacgggta

SEQ ID NO: 101687 - DNA, 334 bp, Arabidopsis thaliana columbia
  unsure (1)..(334): unsure at all n locations
acatggctaacaagctcttcctcgtctgcgcaactctcgccctctgcttcctcctcagcaacgcttccatctaccgcaccgttgtcgaattcgaagaagatgacgccagcaaccccgtatgtccaagacagagatgccagaaggagtttcagcaatcacaacacctaagagcttgccagagatggatgagcaagcaaatgaggcaaggacgtggtggtggtccttccctcgacgatgagttcgatttcgagggcccccagcanggataccagctactccagcagtgctgcaacgagcttcgccaggaagagccagtttgcgtttgccccacctt

SEQ ID NO: 101688 - DNA, 272 bp, Arabidopsis thaliana columbia
tacacgctttccttcttcttctctttctccgatttttattttttttactatttgtgattttgaattttccggcgatggcgtcaacgtcggcggaaatggaccaattaacatcaggcgcgagcaatcggataatatttatcttgagaacgcttaggaagtgtctcgtcttcgttctctctctcgtcctttctcttctccttattcttcgtctccgtcctcgtcgccgtgtctctcctctttcatcacctgaggatgaagctgttccggctcct

SEQ ID NO: 101689 - DNA, 326 bp, Arabidopsis thaliana columbia
acaaaaagaaaatggttaagctcagcaatctcctcgttgcaaccttcggggttctcctcgtccttaacggctgccttgcgaggcagtcacttggggttcctcctcagctacagaacgagtgtaacctcgacaacctagatgttctccaagccaccgaaactatcaagagtgaagccggtcagatcgagtactgggaccacaaccaccctcagctccgatgtgttggtgtttccgttgctcgttatgtaattgaacaaggcggtctttacttgcccaccttcttcacttccccaaaaatttcctacgtcgttcaaggaacgggtatc

SEQ ID NO: 101690 - DNA, 309 bp, Arabidopsis thaliana columbia
ctgagattcacattccggtgacaacgccaagaggaagatggatgacgaattgttggcattgcagcgtcagttcgagttcgctcaacaggtgaagtcaagcgtgagattgtcggatcgaaatgttgtcgaattggttcagaagcttcaggagcttggcgttattgacttcgatctgcttcataccgtcaccggaaaagaatacatcactcatgagcaattgatgaatgaaattactcgtgagatcagtaaattgggacgtgtctctgttattgatctggcagatacgattggggttgatttgtatcatgt

SEQ ID NO: 101691 - DNA, 312 bp, Arabidopsis thaliana columbia
cgaaaaccccaaaatgaccacaccttccctatcttccatcctccggcacacacgtccaatcttcaaggaaaccctcagggccgccaggccaactcttcaaaatgctttgcccaatggtttccgcattgcctctgaatccaaggacggggacacctgcactgtgggcgtgtggattgatgctggcagcagatgggagaccgagaaaaacaatggtgtcgcgcacttccttgagcatatgaacttcaagggaacaggaaagaggtcgagacaggatattgagtttgggatggaaaagatgggtgctcatctgaa

SEQ ID NO: 101692 - DNA, 181 bp, Arabidopsis thaliana columbia
actcgacaacaaaacttacttgcgtgatctttggcttccttgacatcatacagttcacagagtttgctcaatgaaggttcacgagacacgatctcacgctcacatgtctggagaccaacatcagaagggaaatttgcggaagcacaaagcacaagggaaacttccagaatctgaacagtct

SEQ ID NO: 101693 - DNA, 374 bp, Arabidopsis thaliana columbia
ttcacctctaatgcgacgaacacagccacgggaactggccgtcactggtttatcggagaatctccaaggatgtgttttccgcacggtgaaacgagcagttctgatcggaaacggctgcgccggcgcggagaatcaatgcatcggtctccttcgatccttaggcctcttcgatcgccacctctattatagagtagctaaaccaagaggtggaatccttcaatggcttcctatctctctctacaaacgaattcatcgttttatcagcactatctgtgccggattatccattaacgctactggaatcacgaatgtgtttgaagtagatgatgcgaagcagattgctgctatggctcgtaaaacgtttgaaaagaatg

SEQ ID NO: 101694 - DNA, 423 bp, Arabidopsis thaliana columbia
acgagattttcgaacatgtattggtagtggtcagatctagtcatctatcttaaaagaaactgaatactaacttaaatcaaaccacatatacaaatggtctagacaaagtgtgatatttgtatatgaatttggtagatatcagctagttctaaatgatatactagtagtgtcattggttatatagataataataataataataatacaatgtagatctcttatcgactattgtgatttgcagattaaacaaaaaatgaagaataaaggtcaagattcgttctgagtaaaatgcaggagggcgggaaaacaacctgttgacttagaaaatcaatttttcttataaaaacaattgtcaagtgagaacatctaccgatgattgcggctcgcaaagttttttatactttttagaaaccaaaatttcaa

SEQ ID NO: 101695 - DNA, 373 bp, Arabidopsis thaliana columbia
ctaggccgagggatatcaaaacaccgtatgagaaaatgcttgagaataatgtggaattcgggtcgcctgataagcgctctggtggctttttcaactctggattgatagttctgttctacattgcagtgcttgcagggcttctccaccgatttcctgttaacttttcccagagtacaacgggacagctgatgacccgcaagtctggtggtcctggtgggggaaaagtttctggtgatggtgaaacaatcacttttgcagatgttgctggtgttgatgaagcaaaggaagagctggaagagattgtggaatttctcaagaatcctgataggtatgttcgtctaggtgctcgtcctcctcgtggtgtcctactggt

SEQ ID NO: 101696 - DNA, 411 bp, Arabidopsis thaliana columbia
aatgtcaacagcttcttgattggacaagtgctcccacaagccgtctgatgcaaatataagaaactgatcttctggatggattttgtgtactgtaattgccggctctgctctaaggatgggcttatggaaaacctcagggaccctgaactttgccaacaatggttcccggttgaattctgctttctttaagtatgcatcaccaatcgaccgtgaaaccttcaagaaccagccacgggttatatctagcgaaaaatcctcttcttatacatgcatagggcttacttagttgtatctttcacagtcaagctacttgcaagaaaagagtctagaagtcagcaactcgcattaccgtgaaagtatttttacctgtataatacctttgacacgccaaactttgtgcttcaagaccac

SEQ ID NO: 101697 - DNA, 382 bp, Arabidopsis thaliana columbia
acgcgtccgagtcagctcattaaacggttcagttccttcaaactttagtaactggaaaggcttgacgactttagttctcagcgagaaccggttttcaggaggtattccacagttcttgcctgagcttaagaagctgtcaactctgcagattgctagaaatgcttttggtggtgagattccttcgtcgattgggttgatagaggatctgatctatgacttggaccttagtggaaacggattgacaggtgaaattccagccaagttgggagatctcatcaagttaacaagactcaacatatctaacagcaatttgacatgatctttatcggttctcaaaggtcttacctcattgctacatgttgatgtctccaacaatcagttc

SEQ ID NO: 101698 - DNA, 239 bp, Arabidopsis thaliana columbia
acatctacacgtgtatctttttaaattgtcttcacgaatgacaaaagaaaacaaatcattcaatttgatctttcattgtttctaaacttggccggcgagcgagatcattgctttaagctttattaaactgccgctacagctagacatcgtggcttaccctttaagtgttcgatgaaattcctctgaggggttttgggaactgtgagaatcttctgtgagagtggggttggtgggtgata

SEQ ID NO: 101699 - DNA, 428 bp, Arabidopsis thaliana columbia
agttattgctgtgaggataatcaccgagtgctaatctatgagtacatggctcgtggtagcgtggagaacaatcttttctcaagagtgttgcttcctctttcatgggcaataagaatgaagattgctttcggagctgcgaaaggacttgcctttcttcatgaagcaaagaaacccgtcatttatcgcgatttcaaaacttcgaacattcttctagatatggattacaacgccaaattatctgattttggacttgctaaagacggtcctgtaggagataaatcccatgtttccactcgtataatgggaacttatggctatgcagctcctgaatacatcatgacagggcatttgacaccggggagtgatgtgtatagtttcggtgtagttctgttagagcttcttacgggaagaaaatcattagacaaatc

SEQ ID NO: 101700 - DNA, 252 bp, Arabidopsis thaliana columbia
cgacatcgatccagaccgggtggctgcgctggccggcgagatgctggccgaggccggcgcgggcgtcgctcaggccggcgcgcccgcctcgatgccgagccgtcgggcgtagagcgccagacaggcctgcgcgcagtcggcccagcggtaggcgagggcatgggcacggatctcggcggcgcgtgtccgcaggcgtggcagctccgcgcgcagcgtcgcgtccatcgccgcggcgttcagctccggccagta

SEQ ID NO: 101701 - DNA, 386 bp, Arabidopsis thaliana columbia
gcgtccgaggcgaatacgcatctatcaacaacaacggatggaggtggtttccggcgaactccctcctcctctttatgccctcagccttcttgatggcggaacaaatatccactgttctacacaactctcgatccggatttctgttaacacctgaagaacccttcaccttggtttcgttgatggcaggagacgcttctcttggaccataagttgcgccttgccaggtggagacgtcgacggcgcatgacgagcttttcttcaagggtacagtcttctctgctttttggatccccgccttaaccacatatcacggtcagagcttggtaggcccgaatctgtcttcaccggagacgcagaatacaacgcaaatctcaccttcatcttct

SEQ ID NO: 101702 - DNA, 187 bp, Arabidopsis thaliana columbia
caccaccgtaaacggatcttcttctccatcgtctgcgtcaaaagtagtcaacaacaatgtttccactagaattaacgatgtatcaaaattatattaaaagagtacgagctcaaatggaagaagatgaacagttatctgtgttgatgagagggcttcgtggccagaatttgaaggattcggtttttgc

SEQ ID NO: 101703 - DNA, 424 bp, Arabidopsis thaliana columbia
aaagaaaaatgaaaacacgtctttgtttaattttcttcaaatttacaattcccacaaatctcaggaacttaaaacgggaagataatttaaataaatgattctttttggaggttttggtttaatgtggagttgaaagcagaaattagttgatctgttcttcttcttcttcccgggtcggtgataaattttgtgattgacgaaaatacccttgttagtgggattgggttgtatgtaaatataagggtgttttaggtagtttgactagaatcgttttcgtgagatggacttttatggagctggtgcggttgatgtgtgttatcgttgactttgtccaaaagtagtggcgttgcttattttttgtgctctttctagaaatatttttgacgctttggaagtcttacactaaaagccaaaaacattccca

SEQ ID NO: 101704 - DNA, 416 bp, Arabidopsis thaliana columbia
actctccggctgttctttgaccagactttaacattttcatcacctgcgtttttagagcaagaggtgacagaatttgcatgttcatcagaagccaaagcttggaaatcttcatttgattggataggtgatacatctgatttctgtatagtacacagttttgcaaaaagctgagatatcatcacagcattctgcccgtgactctgatggccttcgtctaatttgaccggacaacctaataagagatgccatcaaaagtcaatatctattcatccaaaccgcataaaagcagaaatcaacatctttgaaagagaactgtgaccttgatttgctacttctacatccacaggtgtaaagaacctattcaaggaggacatagctgcaggtagattacttatattacttaagggactaatttc

SEQ ID NO: 101705 - DNA, 377 bp, Arabidopsis thaliana columbia
gcgtccgtaaaaatcttaaaccacaaaaattagaaatggagcggaaagcgactgagtaagatctttcaccttctatataaaccttagttctgctccggcgacatcgtcgggataccgctagtgattaacggtggttatggataccctccgattcgagttaagctcagcttccttcacttccgccgtcaccgcctcttctttacacagtcactcacggtatttcttctcctcagtgcaactcggccgagtcggctcatcatctccggcgatcacatcggtctcgaggacgacagtgaatgaaatctgcacggcggatgaacttcactacgttcctgttcccaactccgattggcgcgtcgctctctggcgatatcttc

SEQ ID NO: 101706 - DNA, 335 bp, Arabidopsis thaliana columbia
taacggaaagagacgacaatggcgggtcggttcttcgataacgtgatgcctgatttcgtgaaggtgaaggaaagtgtatctggaggagatacgcttaggaatctgcttgctatgccgtattcgtctctctcgcagcagctcaagcggtccgctttggatctcaaagaaaccgtagtgattgaaacttggggttttagtggacagactgttgaagacttcactctttactctggaactcttggagctgcgtttttactctttagagcttatcaggttactggcaacgccaacgatctttccctctgcttggaaatcgtcaaagcttgtgatactgc

SEQ ID NO: 101707 - DNA, 304 bp, Arabidopsis thaliana columbia
gcgtccgacctaatctctttccacatcgtacgtttcctctctctaaggtcttcagctttaaaggtgataagaattgaatctttcccacaacccacaagaaaattcgaatcctttctctctttctatctcttagtcaggctttcgatcagcaatctcctcgaattctggttggttccgtctctgttttctgtacacaaagccctgctgctgttgatacacgtgagccgccattaatgcccctttgttttcttcttccaggattttctatttcctctaaaatcaggatctttcagctgaatttcac

SEQ ID NO: 101708 - DNA, 413 bp, Arabidopsis thaliana columbia
atatctctcttgggattcaaggagatgaatctccaagcacaccactgaaagggaagttaattccatctcctataccagaagagatcaagaggttaaaggctggtctgcgcgaaaacaatgtgaaggccagggagcgtttgaaaattttcaacgaagcttcttcggtatttaacaagttttttcctagtgtacctacaaagaaaaggtctcgtccagaaggattttctaatgaccgctcaggtgatcgtttggctttagggccaggtatgggtaaaatgggaatccaaggtcagactctgcctggttgttttgagcttgaccagcaaaagctggacgaacgacctaaaagtggtgcattaaataagcggacacgtacatccatgatggatgttcgaagtaatgctattgttcga

SEQ ID NO: 101709 - DNA, 386 bp, Arabidopsis thaliana columbia
gtgagtcattatacatgaacaaagcttttctactggtattttatcgtgagttatcttttcacccaagttacaagttgtacaactagaattcatcactcattcacttttaaagttcttcagttctaccactaaagccaatcatgctatgttgcaaatatattaattggtgttttttctctctatcttacaaatacaccacttaaagttaaggaactaaatgagtgattggttgggctgtaactgtaaaaaaatttctatagagattttgatgtagctatgttggctgtaacagtagcttttatagttttattgctatagaattattgctgtaagttttgatttgaaatatttataaaaaatagattaataaatataataattgtaat

SEQ ID NO: 101710 - DNA, 319 bp, Arabidopsis thaliana columbia
aaaaaagaaaatggttaagctcagcaatctcctcgtgtgcaaccttcggggttctcctcgtccttaacggctgccttgcgaggcagtcacttggggttcctcctcagctacagaacgagtgtaacctcgacaacctagatgttctccaagccaccgaaactatcaagagtgaagccggtcagatcgagtactgggaccacaaccaccctcagctccgatgtgttggtgtttccgttgctcgttatgtaattgaacaaggcggtctttacttgcccaccttcttcacttccccaaaaatttcctacgtcgttcaaggaac

SEQ ID NO: 101711 - DNA, 399 bp, Arabidopsis thaliana columbia
tcatctaaggcggtgattagtccagctacacgtttcgcaccgccgctgaaccggccttttcaccgccgatcaatacttgcctcgtttcattcttcctctaggaacttcctcttcctcggaaaacccactccgagctcgacgatcgtttccgtccggtgccagaaacctgtttccgacggggttagctctatggaatccatgaatcacgttgcatcttcagtttcgtcttcgatcgatttcctaacgttgtgtcatcgtctcaagacaacaaagagaaaagggtggattaatcaggggataaatggacctgaatcaattgctgatcatatgtaccgtatggctctaatggcacttatagctggtgatcttactggagttgacagagaaaggtgtataaaa

SEQ ID NO: 101712 - DNA, 333 bp, Arabidopsis thaliana columbia
aagatatcaaacctttcaaggcttgagatattggcaagtgttttgggaatagctccagtgaactgatttgttcccaaaagaagtcttcttagatttggtagaagataaccaaaatcagccctaagattacccgaaaagctattgtcagctagagatagagactcaagagaggagatgttgtacaatgcaggaggaaaaccacctgaaaaactattcagtgctatttggaaaaacaccatttgagtcaatctagctacttcgtctggaatctcacctctcatctggttatatgcaaagtcaagcttctgaagtgacgtcaagtttcctaaagat

SEQ ID NO: 101713 - DNA, 166 bp, Arabidopsis thaliana columbia
agaaaatggttaagctcagcaatctcctcgttgcaaccttcggggttctcctcgtccttaacggctgccttgcgaggcagtcacttggggttcctcctcagctacagaacgagtgtaacctcgacaacctagatgttctccaagccaccgaaactatcaagagtga

SEQ ID NO: 101714 - DNA, 150 bp, Arabidopsis thaliana columbia
gtcgacccacgaatccgaattaactagataaccaaatcaatctttacaacttatcatgcaactagtttaattaattaattttctcacttttaaaatattatacacttgtacaatatctaaaagggagttagaactcacctgacacacata

SEQ ID NO: 101715 - DNA, 321 bp, Arabidopsis thaliana columbia
aattgagaaaaattatattgagtgctctagttcgttaaattggcataaggaaagattgagggagctcgaaacgaaaatcggttcattacaagaggacctcagctcttgcaaagatgcagcaacgaccactgaagagcaatacactgctgaacttttcactgcgaacaagcttgttgatctgtacaaggaaagttccgaggaatggtctagaaaggctggtgaacttgagggtgttattaaggccttagaggcacgcttgagccaagtcgagagtagttacaaggagagacttgataaagaagtgtctacaaaacagctgtt

SEQ ID NO: 101716 - DNA, 399 bp, Arabidopsis thaliana columbia
atccgaaaaaatcattttctctttgcacataagtcaactctctctctctctctcttttacttcttcttctctttgcactctctttggattttcttcaattgatgaacaatcagtctcagatttgagttctcccaaatcatctattgactttgcgaatctaagaaaaaactgaaattaataacgtttttgatgggtaacggagtaacaaaactgagtatatgtttcacaggcggtggaggagaacgtctccggtcaaaagacatctccgttcttcttccggatcctttagacgaaggtttaggtcactccttctgctacgtccgaccaaacccgactctaatcagttcctcaaaagtccattcagatgaagacacaacgactacaacgttccgtacaatc

SEQ ID NO: 101717 - DNA, 398 bp, Arabidopsis thaliana columbia
attttagtcttttgccgctgtggtttattgcaggaagaagcaagtctcatggtttctcaaagtttgctgatcaaagcattgaattggtgactaaactaatgaaaatgccatccacatgcttggtcgatagtctaaccgatggccctccaactgatgttagagttcggctgactgaatacagtgagatattggatctctcaggatgtccacagttaaatgaagccagcctgctactgtcaacactgcctaactcgtatttcgcaaacctcaggtggaggaagagtttggaaagtttcctaaagaaccctgatgacgatgaaagacatcaagaacaaatatctcacagaactttaccaattttgtcttttgaatcggtgaaagagattgatatttccaag

SEQ ID NO: 101718 - DNA, 391 bp, Arabidopsis thaliana columbia
attgaagaacttcacgacaagcaagaacaggttagagagtggctacacagcttggggatttttgatatgcaaggatcagttgtgcaagatgatgaagaacctgacgatggtgctcttcctctgcactatactgaagatagtatcaagaacaggaatgttccttcccgtgcagcgcttccaatcattcgtccaacgataggccggtcagagacagttgtagatcgtgggagaaccgcaatgcaaggctacttgagtctctttctagggaacttggacattgtaaactccaaagaggtctgcaagttcctagaagtttctagactctcatttgctagagagtacggttccaagatgaaagaagggtatgtcacagtgaagcacttgagggacg

SEQ ID NO: 101719 - DNA, 401 bp, Arabidopsis thaliana columbia
acccacgcaaccagctttcatctctctgtggtgcttgtcatcagtgtcagaactggtgtggatacttctgtcatagtcttcattgtaattgccatccgactgagaaacgttttcaactagctcccatccttcttcaacatccttcttcaaaaaattcccatttgaagcggtgtcaagcagcatccttatcttaggcaagacgcctctatagagtgtgctgagaagagaagcttgcttaaatccgtgatgagggcatttggtttgataacccttaaagcgctcccaagcttcatataatctttcattttgcttctgagtgaatccggatatctcattccagagtcttgcagtcctggagttggagaagaattttgccaagaaggcctttttgcaatcatccc

SEQ ID NO: 101720 - DNA, 367 bp, Arabidopsis thaliana columbia
aaccacggacgcgtgggtttgagcttgatgatttcgattgtagtttcctgttagtgtttgttttcttctgtaaagcttggattttttttggtttcttcgatggcgaatgtggaagctgatttcagaacatcagggtctaatgatgatgaattgtacacggagctatggaaagcttgtgcagggccacttgtggaagttcctcgttatggtgaaagagttttctacttccctcaaggtcacatggaacaattggttgcttcgactaatcaaggagttgttgatcaagagataccagtgtttaatcttcctccaaagatactttgtcgtgttcttagtgttacgttaaaagcagaacatgagaccgatg

SEQ ID NO: 101721 - DNA, 413 bp, Arabidopsis thaliana columbia
atccgattcttgagagattttggaaatttatgaattatacaagtgtttaatggaaacttaaaaacacttttttttttaaacatcgaaaactttattagattgtaaaaggttgatacaagaattgaactaaccaaggaggtgaaacagaatacaaatgatacaaagatgtaatgaatatagcatggtgattgatgagccatcatcgtatttggctatttgctgcactttttctgtaatattcaggaaatactaggttgtgtaatcttttgattataagcaaaagcggtgatattatttataattggattacatgatttgttagttcttactggttcacatgtttatataataaaatttatttagtggttggcatattataggagcatcatatgtgagtcaccacatggaactga

SEQ ID NO: 101722 - DNA, 389 bp, Arabidopsis thaliana columbia
  unsure (1)..(389): unsure at all n locations
cccacgcatccgatgtgaccttgcaaacctgaatccatacaaaatgatgtattaggtgactgagctaacctgaacactaatacaaatagaggatcagaggatataacccttaccttttctgatgattctccagaattagggacattttcataattcttatactgttctaatctagtttgtctgtatttctctctagaaatattaagtctgtcccacggaatcccctggatatctttccctttccgagcttgctcagccgtggtatcagctactttattgttctgaaaccatataacacgaaattacaacatagtttaaaaaaaaaaaaagctgtaaaatgagattagaaagtagcatagccaacanaacatgttccatctcatcatact

SEQ ID NO: 101723 - DNA, 373 bp, Arabidopsis thaliana columbia
aatttggtagtcgttttgttagcattgcctttgtttagtttttgttgatactcgatgtttatcgcttaagactgcgacaatttgggttttaggcttttagggttttgcattgtagctttgtcgtgtacgcgcgtgtgtgcttgtatcatctgtcattgaagattgtttatcatgttcgaaattgtgagatatgctttgtgatttaaagaaagatcttttgtggctttagatctaccaaagtgatgattaggccactagagttaatttcatatttattgtgtttggatgttggtaggtgtatttctttattcttagagagtatagtaacatttaagtgtatgataatgtcgacagaggcaagctggggctcaca

SEQ ID NO: 101724 - DNA, 375 bp, Arabidopsis thaliana columbia
cccacgcatccacttatttatacagatagtgtgtgctaagcttataatgtttgatatcattgtaataaaatagaaggaacgagagtatgtgtaataaatggtttagtgcgtttgttcagttgcttcagttggacccctttatatagtttcaagaatgtacgagattcaatcgaatctgattttaccttcatgcaggtcccaggactagctgtagttattgttgggagccgaaaggattcacagacctatgtgaatacgaagaggaaagcgtgcgctgaggttgggattaagtcatttgacgtgggcctaccagaggaagtttctgaagctgatcttattagcaaagttcatgaactaaattcaaatccggatgtc

SEQ ID NO: 101725 - DNA, 419 bp, Arabidopsis thaliana columbia
gatgaacatggtggtcagcgtgatatagtaggagtagttgatgaacactttacatttctagggtttttttaatgtcttctttttcgtggttgtacatacattgaccttatcgtgatttacagttttaaattatttgtgtgattgtaggagagacagttacatcacccacagggcattctgtgatgcactcatacaggagtcagcaagaaaccccaccgtgagcttcacggcaatggcagctggtggtggtggtggcgccagacatggcttttacggcggagcttcttccgctctctctcacaaccatttcggtaacaatccaaattccggtttcacccctctagctgctgcaggctacaatctgaaccgttcatcttccgacaagttcgaagactttgttcctcaggccaccaacccta

SEQ ID NO: 101726 - DNA, 393 bp, Arabidopsis thaliana columbia
cccacgcgaccaaatggacggtgccggagaatcacgactcggtggtgatggtggtggtgatggttctgttggagttcagatccgacaaacacggatgctaccggattttctccagagcgtgaatctcaagtatgtgaaattaggttaccattacttaatctcaaatctcttgactctctgtttattccctctcgccgttgttatctccgtcgaagcctctcagatgaacccagatgatctcaaacagctctggatccatctacaatacaatctggttagtatcatcatctgttcagcgattctagtcttcgggttaacggtttatgttatgacccgacctagacccgtttacttggttgatttctcttgttatctcccacctgatcatctcaa

SEQ ID NO: 101727 - DNA, 284 bp, Arabidopsis thaliana columbia
gcgtccgatcagaaatctcctcgttgcaaccttcggggttctcctcgtccttaacggctgccttgcgaggcagtcacttggggttcctcctcagctacagaacgagtgtaacctcgacaacctagatgttctccaagccaccgaaactatcaagagtgaagccggtcagatcgagtactgggaccacaaccaccctcagctccgatgtgttggtgtttccgttgctcgttatgtaattgaacaaggcggtctttacttgcccaccttcttcacttccccaaaaa

SEQ ID NO: 101728 - DNA, 287 bp, Arabidopsis thaliana columbia
aatcacgacagtatggatggctctttgtttcagtcaccttcagcaactgcatcagcgtttatgctcactcgcaacacaaaatgtctagcttatcttcaaaatctcgttcaaaaatgccctaatggaggttaaatcaacattcgtcttatcccaaacgctttaattaacttgaatatgattattcttaagtgcattttttaaatgtttaattaacaagctaggtgtgatttctttctcttagtgccacaaaagtaccctctcaatgaagatctcataaaactctccat

SEQ ID NO: 101729 - DNA, 353 bp, Arabidopsis thaliana columbia
cacgcgtccaataaaatgatcctcttccctctgtattctctatctccagttaaatttatttgaactgaattttatgtgttctcttaacattgcaggaaataaggcgattaaaagagaagataggttttctcacagacgaattggagaagaccaaagcagacaacgtcaaactctatgggaaaatccgttatgtccaagactataaccatgataaagttgtttcccgaggatcgaaaaaggtatttgttttctgcgatacatttcccttgaaccttttctgtctcgtgatcgggttttttccatggttgatatcgttttccaatctcagtatgtggaagatcttgaaagtggat

SEQ ID NO: 101730 - DNA, 408 bp, Arabidopsis thaliana columbia
acccacgcgaccaaattttaataccaaaaattgtgaataaaaaaataaatattatcatgtattatattatagatcaaattctaaaaaaaaaaaacgtattaatatcgtaaacttaaaaactgtacatgatcttgtcaaaaattattaatcaaagaattatatataacaaatttttcattttacaaaaatcaaaaataaataaaatatttaattagcaacatataattccaaaacgtctagtactaaccgtactacaaaagtctataataaacactttacatacaccgtatttatgattggcaactaaaattttgacatatgggaatatgggatacatatatcacgttaaataattacaatgaatttgcttttattaatcagcaaaaaacatttttttctaaaaatcaa

SEQ ID NO: 101731 - DNA, 320 bp, Arabidopsis thaliana columbia
agaaaatggttaagctcagcaatctcctcgttgcaaccttcggggttctcctcgtccttaacggctgccttgcgaggcagtcacttggggttcctcctcagctacagaacgagtgtaacctcgacaacctagatgttctccaagccaccgaaactatcaagagtgaagccggtcagatcgagtactgggaccacaaccaccctcagctccgatgtgttggtgtttccgttgctcgttatgtaattgaacaaggcggtctttacttgcccaccttcttcacttccccaaaaatttcctacgtcgttcatggaacgggtatc

SEQ ID NO: 101732 - DNA, 415 bp, Arabidopsis thaliana columbia
gcgtccgatcggattctggggcatctcatttcttctgctgatgtttccccttctctgacacgaatcacactttgaaatgaactcttgaccgtctttgaacatggttggccaccaaaatcctgcttgtaggattttagatattgtcttgaacgttgcaaaatggccgccattgctagaaccatgacagtgctgcaagataccgtttatttcatcttcttagacacacctcctatagattttatctttgcagagagtgtagaggtacggctcatcccagtagaagcgatttatgtctttgaagaacttctttctttcgtaccctcatagatttggaggctcttcacgtgccaagtagttgacataatcagcgtaccacggaagtttctcctctactacaagcatctcatcccaaaac

SEQ ID NO: 101733 - DNA, 404 bp, Arabidopsis thaliana columbia
cccacgcgaccacagaatcagcagatttacaacgaagcaattgcagtaacaacaatggcgggtgttcatcaaaatccttaaagtcttcacctttaggaatcgtcatgggtctaataggatcaatcctcgcagttgcaatctttggcggttcaacattcacatggtacagacgaaggaaacagaagattggaagcagtcttgatgcaatggacggtaggattagtactgagtacaacttcaaagaagtttctagaagaaaaagctcttctccattgatcagcttagagtacgcaagtggttgggatccgttaggacgaggacagagcagtaacaacaacagtgcattgtctcaagaagtctttgagagctttatgttcaatcttgaggagattgagagagctact

SEQ ID NO: 101734 - DNA, 377 bp, Arabidopsis thaliana columbia
accaggcacgtgatgattagggctacaaggaaatcgccggagttgtctggtcgatgggttcaaaacgttgatccaacctggtgctgggatacacaccaaaccctcacatgtcagcgagggtcgtgtggcgtcaatatcgcagtgtaaatagaccatctggatctcttcctcaccttcgaatcccaactcagtccggtctccaacagccagaattttctccttcttctcaacgttcaaacgcctctccgcgaaactcttcgattccaggattgatctccattgttttgagacggttttgaatctgaggattgattttaaaggcaatccaaggaaaatttcttcaagtagatcgggaactacgtaaatcatcatcggga

SEQ ID NO: 101735 - DNA, 418 bp, Arabidopsis thaliana columbia
  unsure (1)..(418): unsure at all n locations
accaaatccaacaatggcgatttctttcgcaatcgatccttccatatctccttgcttctccttctcctctccatcttcttcatcaaaaaccctacctttacgaaacaacctccatttccatggcagaccttcaccaatatctccactcatttcaaaacccagtcgaaaattcccaatcttctctgctcaccaaactaataacagtgaagaagcgaattcaaagcagcaagcagatgtaaaaaccctaattaggtcatattaacaagctcttctcaacggagacgaaacctcagttacagaaatcganacgatgttttgcanaatcgagaaggagaagaataaaatggatcaaaaggttttatctttatcaatgaagatagcttcagagaaagagatgaaaattcgattacaagctgat

SEQ ID NO: 101736 - DNA, 285 bp, Arabidopsis thaliana columbia
ataacaagaatgtatagagtgtagacaaaatgggttgcatggagaaaattaaaaaaaaagaagaaaataaattggccttgcctgctgcaaaagttctgcttctgttgaaaatggagaccattctagtagaatagagagactggatataaaatgttctcggtcttgcaatgtcttgaactcgccagctgaagcattaaactcgtaatccaactgaatattcataaggtaacacggttatattatagaaaaacaaggtacattaatatgtgtgagagaagaaaactc

SEQ ID NO: 101737 - DNA, 402 bp, Arabidopsis thaliana columbia
  unsure (1)..(402): unsure at all n locations
gcgtccgaagatgtagcaagtgtgaaattctgactgaagatgttgcaaatgatgcagctgatgttatcacctggtttgaagaaaacggaaagcccaaaatcaatggctttgagagagaagtcgtcgtccttgttaaccaacangaaattttcgggctttagatctctatgcatgacaccaagcgaatggcaagcctcaacaacaccaacgatgatctttatcagctcagctgcttttctctcgctgtaatgtcctctctggataattctgtcaaacaattccccacctgagcaaagctccatcacgatgtgaacatacaatggatcctcgtaagcacctttaatggtgacaatgttcttgtagccagccagatggtgcatgatttgaatttccctgcgtacg

SEQ ID NO: 101738 - DNA, 400 bp, Arabidopsis thaliana columbia
acccacgcaaccaccttgagttatttcaagtttattacagcgatggcttgttgttattggtaactgatgaggtagattccaagctcgtggtttggaatccgtatttgggacaaaccaggttgatccaatgcagagatactgagcatttcaaatataggtatgctctgggatacgacaacaaccgtaaccacaaaatcttgatgtataataggaaaaattgtgagatctacgattttaaatctgattcatggagggttcttgatatcattcccgacttgcatacaaatatttatgtacgtgatatgtcaataaagggaaatacttattttttctaccgaggagagaaaataggggaaggactagctggatgcttactttcttttgattttacaagagagag

SEQ ID NO: 101739 - DNA, 384 bp, Arabidopsis thaliana columbia
cccacgcgaccagtgaagaagtggaaactttaccaaaaggcaagtggaagtttaaatgggaatcacctgcctttgacatgccaaattgcaaatggaaaggaacgagtgaaaattttcttgatggtattcagagtgatgcaccttacggcctcaagccgaagttatataatcactggctgcaattgtacaaaaaatgtggaggcaaagatttggactcatctaagaggagaaaattcttctctatttgcaacagctatctggatatattgcattctaacaagaaacccttttaccattgtggctctgacgaagactcaagtgccatggatgcgtaccttatgcattctttgaatcacatctttaaaactagagatctagtgaaga

SEQ ID NO: 101740 - DNA, 302 bp, Arabidopsis thaliana columbia
gcgtccagatgaatttcatggcatcatctggcgaagcactccttgtttcaggtggcactgatggcttacttgtactgtggagtgccgatcatggcgctgactcaagggaacttgtacccaagcttaacttaaaggcacatgatggtggggtggtggctgttgaactgtcaacggtaagtgggagtgctccacaattgattacaattggggctgacaagacattggccatatgggatacaatgacatttaaggagctacgtagaattaaacctgtcccgaaactagcttgccacagtgttgca

SEQ ID NO: 101741 - DNA, 352 bp, Arabidopsis thaliana columbia
aatttaatttaaaacttctactacacaagaacgattttcaagctccatcaatttttagaacatcaaaaatgtagattgcgagcatgcataaaaagaaaaagagtatagtgcaagtgaaaacattcaaatgatccgagagtatcatcacgcaccatgatgaatccctttcggagtgtaagatagtcagaacgaacaacagaatgtccaaactgtctgaagaaacatatctgtaagaataaactataaatatttagcaattggtatcataataggatatttgctagctattatctaaaattttaaatgacctatcatattagtaaaattttaaatgacctatcatatttacctt

SEQ ID NO: 101742 - DNA, 336 bp, Arabidopsis thaliana columbia
acaacaacaaggccaaccatggcaaggacgacagggacaacaaggccaaccatgggaaggacagggacaacagggacaacaaggaagacaaggccaaccatgggaaggacagggacaacagggacaacaaggacgacagggacaacaaggccaaccatgggaaggacagggacagcagggacaacaagggttccgtgacatgcaccagaaggtggaacatgtgagacgcggagacgtctttgccaacactccaggctctgcccactggatctacaactcaggataacagccacttgtcatcatcgctcttctcgacatcgccaactaccaaaacca

SEQ ID NO: 101743 - DNA, 352 bp, Arabidopsis thaliana columbia
acgttaaccgaggagaagcagattctcaaagagatcaggctgcttgaagggacaagagataaggtcattgctaatgccgctatgagagccaaaatcaaagaatctatgggtcagaaggatgatatccaaggtcaagttaaggtaagagagttgtggccggattcttgctgttatatagtctgtagaagttggtttcatatgtgatgctttttgcagttaatgggtgctggtttggatggagtgaaaaaggagaggcaagcaatttcagcaaggattaatgagctgagtgagaagttgaaagctaccaaagatgagattacggtactggaaaatgagctcaagactgtgagcg

SEQ ID NO: 101744 - DNA, 340 bp, Arabidopsis thaliana columbia
agatgataagaattttgatttgacatcggagatccatatacggttatctgtgtcggttagattagaagcaccaccaccgcaatttaataggattttctctgttggagagtaatcagcagctgagattaaagttgctgcagatatgagaagaagaagaagaagagagagacggaattgtccctctgtgatcttcatcgatcaagagcacttctccgggaagatcttcttctcagatctatcaaacgaaagaaaatcgaaactataaacttcacagatctaacaatggaaagtgctacaggtacatgttcgtttggttacgaaaattgagcttaggaaacag

SEQ ID NO: 101745 - DNA, 318 bp, Arabidopsis thaliana columbia
tcttcaaagcaaaagaaaaacatcaattttttccaaatttttatcattttctcaatcgtcagtactcagtatttagagtcaaaaatctcgtcgaagaatttcttttggaggaagcgttatttttgctaaaggtcaaacaaaacattggatttcgagaactgaagaacaagttttgatgggttctctaatgcaatctgaaccagagatggagaaaaaaccgatagggatacgattcttggaacgtatcaaaggctcaaagctctcttacagtgcttatcaagccatagtgttgatcgtgacgtttctcgcttacgctag

SEQ ID NO: 101746 - DNA, 306 bp, Arabidopsis thaliana columbia
ttttcttcgtaaattagtttgaaggtataaaaccctaattcgaaaacctcccaaatcaggaaataatgacgatgaaaaagaggaagaaatcatcaaagtctcctccgacgacgtttctttctttaccagacgatatatatcgctttcaattgtttggctcgtatctcgagattccattatccaactctatcactcgtctccaagggtttccgatcactcatcgcttcgcctgagctcgaggcgacacgttccttcattggggaaaccgagaatcacctttgtgtctgcttaaacctcaacaagaac

SEQ ID NO: 101747 - DNA, 175 bp, Arabidopsis thaliana columbia
aaattctaaaaaaaggtcttgaactctttctcactaagactttaagttaatatattatttatcagattttaattaacttgatggtgtgtcctagtacttatatcttattttaaattcatgtaattaatcggtatttctttaaattgagaacaaaattgccaaaaatagacatttg

SEQ ID NO: 101748 - DNA, 345 bp, Arabidopsis thaliana columbia
gcgtccaattaaagttaatttacagtatattgtttttttcttttcctaattttgaatgtgttctacaacctagcttattttatgtacaaaaagtgttcaataaagtgcataaatcaatttgagatgaccaacattcttgtaaactatgatggtagatgttagagaatattttgaactaattggatttgagtttaatactaatttgatttcataatgataaatgagcatttagtaattgttggttttacgtttaaatggtaattcctatatagatgattagttttgttccatgttcaaaatattgttagtcgttaattagacagccgatgggtcctaatgattact

SEQ ID NO: 101749 - DNA, 355 bp, Arabidopsis thaliana columbia
gtccgagaaaaaatacacaaatagcaaaacatggctaacaagctcttcctcgtctgcgcaactctcgccctctgcttcctcctcaccaacgcttccatctaccgcaccgttgtcgaattcgaagaagatgacgccagcaaccccgtaggtccaagacagagatgccagaaggagtttcagcaatcacaacacctaagagcttgccagagatggatgagcaagcaaatgaggcaaggacgtggtggtggtccttccctcgacgatgagttcgatttcgagggcccccagcagggataccagctactccagcagtgctgcaacgagcttcgccaggaagagccagtttgcgtttgcc

SEQ ID NO: 101750 - DNA, 320 bp, Arabidopsis thaliana columbia
aaagaaaatggttaagctcagcaatctcctcgttgcaaccttcggggttctcctcgtccttaacggctgccttgcgaggcagtcacttggggttcctcctcagctacagaacgagtgtaacctcgacaacctagatgttctccaagccaccgaaactatcaagagtgaagccggtcagatcgagtactgggaccacaaccaccctcagctccgatgtgttggtgtttccgttgctcgttatgtaattgaacaaggcggtctttacttgcccaccttcttcacttccccaaaaatttcctacgtcgttcaaggaacgggta

SEQ ID NO: 101751 - DNA, 280 bp, Arabidopsis thaliana columbia
ttttgtggtgtactcacgggaagtgaacaattttaaaagacaaaagacagaactgtacagtacaagatacttggatgttactcgaggaggagaaagaataagaaataacggtgactctctcatctctctgactctcgttttttctctttctcctctaaatcttcattgtgatcaactaacaagctcacataaatgacacaatttctggcccattgcagagttggattaacaagcctaatccaaggtaaaactagcctataactataagtcaacatgtcct

SEQ ID NO: 101752 - DNA, 239 bp, Arabidopsis thaliana columbia
cacaaaagcaaaagaagaaacatacgcaagagttctcaagcaagctcaagcatggcactagatgaagaagagtctctctgctgctcttctctcatcaggacttctgatcagatgtcttagcgcattgcgcgctgatgcgttttcagtcggtgctcgccggttattggaggatactaaagcggagatgccgaaattgcctgagctagctaaattcgaggttcccacgttgtcggagttca

SEQ ID NO: 101753 - DNA, 415 bp, Arabidopsis thaliana columbia
ccacgcgtacgctcgacttcttgttcttgaattcaacaaagcctattgacatttgagctttgagttctaaatttctacaggggaatcatgagcattatagtggcagttcttctgttgatcccgactacaacatggatgacacagagtcgtcatcttcaaggccagatagagaacatagagaatatgatagcttcataagaaaagctgacatagcccgagggaagagagcgatgacagataggtatgagcttatagatgacgatctggaagacgagtacatgcctgagcatactcgcagagccaccaaacttctgaacaaacccgatgtattgcctactgaggaatatattaggctcttcaagctgaatgaattctgtagcacgacgtatccttactcgaccacacttgcacaact

SEQ ID NO: 101754 - DNA, 358 bp, Arabidopsis thaliana columbia
cccacgcatccagtgggacacagccgttgactgacaagatacagagacttatcacttccttgcagcccaatcctctatgaatcttcttgatttccttcccaagaaatttttgcactgtgacaacttcccaaatattccaaactttatagtagtttattttttcatttaccaaaatatcttaacccaaaaaatatgataacttagttgttgggttatgcgttgttatttattacgttaaaaaaatgtatacatttgttaatggtttcacgttcacctcttgagaggattagagaagatttgtttttagtgtttgtgatttgttttgtagaatatgaatcaaactgaataacgagtcgaa

SEQ ID NO: 101755 - DNA, 325 bp, Arabidopsis thaliana columbia
  unsure (1)..(325): unsure at all n locations
acggaggctgaatctgtggccaaaaaggtattctttagtaattggtggcaccatctgtttangagtttctctctttttcgagaatgtttgaaaaggcaaagaatttttaagctaggttgtgtcttccttgctagttttgcatttttgattttctttctgaaatcattggcctgatgtatgctatatctcttcttgtttggtaactaaattgttttagttaactgtaactcactttttttttttgagtatgactagttaactctgtatattgtaaaaggctaaaaattgtctctaagaaaacagctttgacgatgcaggtctcttc

SEQ ID NO: 101756 - DNA, 384 bp, Arabidopsis thaliana columbia
cccacgcatccagattatgataggggccaagtacgagactcatgatcctggcgttcatcttgacatttcgggcgatgtggagaaaccttcggtgaagatacctgcgaggagttcaaggggaaagaagggtaagactcctgccagaagtgaccgtcgagaatctgaacatactaattgaatggtatggtatattcatggatcagtgttaattctctttttattttcttgtcttgccttctctaaataatcagagaagtggtgcatgccaaagcactttactttctcttcgaggttgttgttttcgcttgcgcttcttattatcaaacatgttctatatatagtctattctcaatataaataaatgtatgaagcatggtgtggtcg

SEQ ID NO: 101757 - DNA, 354 bp, Arabidopsis thaliana columbia
cccacgcatccaccataaaccccttttgaaactttctctcgtctctctctctctctttcttgttagcataaggccccaagaagacataagagtgttttcatgattctttatttgggttttgttatgaaaaaatttagcttctatagctttggaaatggtgagagcttgagaggattataaaaatcaagggtttttgtcttcttttgctcacttgctcattctttaatatcgagaaaacgttttgggctttgatgggaggtgtgttcgtgttgaggaaacccagaaacggcaataaatgccgtcgtttcgatcgatgcattacaatgagacaaacggaaacagagttgttctcag

SEQ ID NO: 101758 - DNA, 411 bp, Arabidopsis thaliana columbia
caacatgggtggaaacaataagcctaaaggtggaaaagagagtaaccaagtcaagggtaaagctggtggtggcggtggaggaggtcagaatcatggacatggtcagccaatgcaattgaatcctcaacagattcaacagatgatgatgatgaaagctgctcacggtggtggtggtggtggtcagatgaagatgccgcctatggcagctaaggatcagaagaagtcagttaagtttgctgatgatgaagacgatgagtttagtgaagatgattatgatgatgatgatttcagtgaagatgattatgatgatgatgagttcgatgatgatgaagatgatgatgatgagatgggtcatggtcatggacatggacgaggtgggggtaatcacatgcctcctaataagatgatgat

SEQ ID NO: 101759 - DNA, 347 bp, Arabidopsis thaliana columbia
tcaagatattgggattgcaagtgtagttccaagcagccgcgttcgagagcagtgctaatccaactgtcagcagaagagaatcgatagtggcggccattgagagagagtctcttgatgggacaagtgtttaagcgagcaacagtttgctccaagaaagcagagaagccactagttgatgagtcttccaaatcgaagttgtctacgagaaggatcagattcctccacctcttggacagaacagatgtggaaacaccaagttttgtcggaagtaaagacaggattttgccaagaatctcatctggcagattgctgatgaactctctaggattcatcgaatcgcatgcaaa

SEQ ID NO: 101760 - DNA, 436 bp, Arabidopsis thaliana columbia
cccacgcgaccgacaatgtgaattcttggaaatgaaggtaatgccaaatcattggagatgacgttaacaacatgacctcacttgggataataatcctgataatcatttgattgtagccacatagaaagcagcaaactaaatgacaattatgatttaagagcaaagatagtgacagtgtaaattaagtccactcttctttgaccttaaggtaataatatatatatggatgaggtgatactaatagagtgattacacatacaagtggtcttgcttcttctatggttttaaaactgcaaataaagatttgcttcgcaggagagatagcgccatcacctcttctaagaagttaactagtggtgacggtatctctcctacgtagcaatccttatatatgcatcttaatacggagagatcaaggtatttcagttgttcaata

SEQ ID NO: 101761 - DNA, 243 bp, Arabidopsis thaliana columbia
ctgtttttctctgtccctattttactaaaaatgttatcttgattcaataaaaatattttacatttaagttaataattctcttttcacaacatcgttttcgattttcattctacttcatcgtttaccaatatttcaaaaacatgatacattgtaaaggttatgaattgtgcgattctcttaacatgtgaactaacctgctatactagcttctacaagaccaatcacaaacatcatgcaaagcat

SEQ ID NO: 101762 - DNA, 292 bp, Arabidopsis thaliana columbia
gaaacaaaagagaggttctgattctatccaaagaactcgtctcaatgcggttcttgaagaagttatggataggattgagatgcacaagaacatcggagatcaacgtaacaattggaactctttactgctcaattctgtcaacatgattactctcactgccgctttgatggccggaatagcctcggttaacggtcacggtgtagattctgtaaccgctgtgaagatagcttcaacggtgttgttaacatctgctacgggttttgctgccttgactgagcaagattcaaccttc

SEQ ID NO: 101763 - DNA, 383 bp, Arabidopsis thaliana columbia
acttcatcaagtactgacggaataaaggcgcccgttgttcttttgattgatgaccttcctctagccaatgggaggcatgcttttgaaaggctgcaaaattgcctactactattggtgaaatcaacgcagattccaacagtgatattaatcactgaccacaataacgcggactcttctgaccagactgcacgacgcatggaggacacacagtcatctcttgagcgagcaggggctttaaaggttgctttatcaaactatttacagtctaaatcttattagaaatatcattttttcaactctagttgattgtccaggtatgtattctcaggttgctttcaatcccatcacgaagaactcaattaaaaaggtacttcagagaatat

SEQ ID NO: 101764 - DNA, 373 bp, Arabidopsis thaliana columbia
attcctcttgtccaattttacgacgagttgattcttcaactgcaacatcagcttcctcttccaatctattttgccttcgtttacttcgcctaagtggagaacaaactgcggttgcatctgccacatcaacggactgacctcgagcttcttctccaatttgatttgcttctccttccggcattggttcaactgcatcgtgagcttcttcttccaatctgatttgccttcgtttacttcgcctaagtggagaacgaacttcggccacatctgccacatcaacatttgatactacattcgcttgacctcgagcttcttctccaattcgatctgcttctccttccggcgttgctttacctgcatcttgtgctccgtc

SEQ ID NO: 101765 - DNA, 356 bp, Arabidopsis thaliana columbia
taaatcaaaataaatattgttctatcattagcaagttggggataaatacaataacgttgacatagtgacggatgtaaaagtcaaactaatcacaatgctttgactctaattaattaaggctgatatccaccgtctactccttcgtttcgtttcgtttcgtttcgtttcgtttcatacaataatgttttttggaatgcatacatactatattgtaaaatgattgaattacacttctttataagaaatgataaatatgataaaagaattggtggacatacaaaaataagagatgctctaaataataatagaattgtgaaaacaaaaacaacaacgcattataataatatgattgtttt

SEQ ID NO: 101766 - DNA, 390 bp, Arabidopsis thaliana columbia
aaatgaaacaaaggcgccattcttgaacttagcccacattgaacagagaaattttattgtgttatgtcttaagctacagaaaaaaaatatttgggtaagaaaataattataatactcacccctggcagttccttggttcaatatgttccccaggcagagaataattttcataatctcttttagcttttgtgaagtacgtatctgataaacaagcaataaggagaaaatgtctaagaaagataaacgcaaatgggctgcgtaaattattgagttttaagtattgcaaatatcttacctcctcacatgcagaatttacggcatttaaacctttattaagttcttttatctgcaaagtaatcatcataaaaaaggagatcaagaatctacagt

SEQ ID NO: 101767 - DNA, 358 bp, Arabidopsis thaliana columbia
tctttggaattaggtgggttaggaggacttagtcttcgaatagacaatcaagatattcaataaaaaaaaaatttttttgagtggttgctattaaataattaatttcttttatgtttgtaggatgacctaaacaagtgccggcacaagaactttacttggaaaagccaggcaaagtacaaaaggagataaaactagactatagaagaaaatctccaaaggggttaaaaatcgactatgaagaaagacttgaccgttgttggcccttcttttactctcaactttcttattcagtttcagataaatgtgaaagcatcaaatggtatgtggacagaatgaagactgggacaagaaaaagatt

SEQ ID NO: 101768 - DNA, 321 bp, Arabidopsis thaliana columbia
aaaagaaaatggttaagctcagcaatctcctcgttgcaaccttcggggttctcctcgtccttaacggctgccttgcgaggcagtcacttggggttcctcctcagctacagaacgagtgtaacctcgacaacctagatgttctccaagccaccgaaactatcaagagtgaagccggtcagatcgagtactgggaccacaaccaccctcagctccgatgtgttggtgtttccgttgctcgttatgtaattgaacaaagcggtctttacttgcccaccttcttcacttccccaaaaatttcctacgtcgttcaaggaactggta

SEQ ID NO: 101769 - DNA, 298 bp, Arabidopsis thaliana columbia
agaaaacatacacaaatagcaaaacatggctaacaagctcttcctcgtctgcgcaactctcgccctctgcttcctcctcaccaacgcttccatctaccgcaccgttgtcgaattcgaagaagatgacgccagcaaccccgtaggtccaagacagagatgccagaaggagtttcagcaatcacaacacctaagagcttgccagagatggatgagcaagcaaatgaggcaaggacgtggtggtggtccttccctcgacgatgagttcgatttcgagggcccccagcatggataccagcta

SEQ ID NO: 101770 - DNA, 240 bp, Arabidopsis thaliana columbia
aaatcttcaaaatccataaaaatctctcctttatttagccctaaaacagagtattagagtttgattcgtaaaagagaatatttttaatctccgccgcaagtcgatgtcgataacgattccctacgatggctcaatctcccgcgagccatcaccgtctccaccgccgccaaaagcgaacacgaagaatctaccgacgaagattctctccaacttcctcataggtctaatcatgatccctgt

SEQ ID NO: 101771 - DNA, 364 bp, Arabidopsis thaliana columbia
aaaacctaatttggcattctaaagctatatgtgtacaagctaaggggaaggggaaacaaaaatatctttcttgttaatgtaaaccacacactatagtggagacaaattcaaactcaagatgttctaaacatcacctaggatctcttatccctataccgaatataaccgacaaaatgcaaatagagaaattaggcaacaaaaccaaagcttaatacggataagccgcttgtgtagtgtgacacacacaaaactttgaaaaacgagagaaaaataattgggtaaacgaagaggaagaaactgtaatctcacgtgctggtgagacaaaacaaggagacatatagacaagatatgttccgagaagatc

SEQ ID NO: 101772 - DNA, 226 bp, Arabidopsis thaliana columbia
cattgactagggtgttttttatgggtggtttgtgaaattgttttgaggatataaagatttcaattttgtttgaaaatggaaactgaggatgtgcttgacataccagcttcaagcaactttggctctgaagtaaagaaaaatagccttgaatctgggaatgggtcacctgaggctaattctttagttggtaatgatgagaatgtgaaaggaaatttagatttggatt

SEQ ID NO: 101773 - DNA, 298 bp, Arabidopsis thaliana columbia
ttccttttaaaattatgtacccacaacttattcttatttcaaatttgtattcacaattctggaaaattttgtaattcacgcattttcttaatttaaaacgagtttttaaagataaaaatcaatggttcacatgagaaagtaaccttaacatctccataaccattacagatcacacacacagagtttttgtagaagaagattagttcatctcggctacacccatatttgcagagaagatacaacaacaacataatcatgactttgaagctatctcaaacataacaacctgaaaaagaaa

SEQ ID NO: 101774 - DNA, 235 bp, Arabidopsis thaliana columbia
caacctaccatatgacctttgactgcataaggccgtcacatttaaagtagctttaggtgtgtagtgtatattccattttttaaaaaaaatgagatgaatttttatagagttatgcaaaattttatccggcttggatattttattaaaccctggatttttaactcacatgttatcatttggaacttggatagagagctgaagacaaatgagaaactatattattagttattactac

SEQ ID NO: 101775 - DNA, 142 bp, Arabidopsis thaliana columbia
agaagctgagtttgatacaacatgctattttgcatgaggtaccagcaattaaagccacacgtgagataaatctacagaacacgttaacggaaaaactccagtggcttccagattctcttggtaagttatcgagtttaacttc

SEQ ID NO: 101776 - DNA, 270 bp, Arabidopsis thaliana columbia
gacgaagaggaagcatatgtcgactatggagaagtacaagaggaagacgaggaggaagaggaggaagaagattccgaacgccaaaccagggaatacatcgatgtcctagactcacctgttagggtttcacagaacgagagtgaagggatagagaatcagaataggtcacaaggtgtttgttcatcgtcttccggatcgcaagaggatgtcgaatggaaacaaggtgacactgagggattgtcttgttctatctgtatggaagtttggacc

SEQ ID NO: 101777 - DNA, 392 bp, Arabidopsis thaliana columbia
ttcatcttccacaatctccgatcgaatctctctactcagccgagaaaaatgagtgattacggtgaaaagacttgccctttgtgtgctgatgagatggatttgactgaccagcaattgaagccttgcaaatgtggctatcagatttgtgtttggtgctggcaccatataatggacatggcagagaaagatcaatcagaagggcgctgtccagcttgccgcactccatatgacacagaaaagattgttgggatgactgttgatcacgagagactggcctctgaaggcaacatggatcgcaaaaaaatacaaaagtcaaaaccgaaatcttctgatgggagaaagccactaacaagtgtccgaatggttcaaagaaatcttgtttacattgttgg

SEQ ID NO: 101778 - DNA, 359 bp, Arabidopsis thaliana columbia
gatgttcacctcgaaaatcacgtcaatttggtagaaataataataaatatatagtaatataagaaacaataaatacaaaaatattgaccacaaaaacaaataagaaacaaatctatatgttttaagaaccttgaaaagtgaacggcatatattagaaaattttgatctaacgatagatgttcatcttgaaaataatatcaaaatagtaaaaatatttaatgaaaatagtattagaaagataatattatatagtataaaatataataaatgagaaacgttgactgtaaaaaaaaaacatgttttaagaacctcgaaacctgaacgacatagattagaagattttgatccaacggtaaatg

SEQ ID NO: 101779 - DNA, 373 bp, Arabidopsis thaliana columbia
ggagaaagttttatcgtcttgagaattgtatatgtacatttgagtatctacattacaacaatttggaaacttttgttcatacttgtgttgttgtcttcttttgtggcttaaggagatttgtccatttcttatttacgtctagtagcaatgcatattttcctcgaagggttggaaactattagtgagtcctatgtattattgttaagcgataataaacattcgctccttgttctcttatatttctgtgaattcttgttttctcgatgccatgttcgggtgtttctagctaatgaaaagtgcatttgactgatgtggttctactgatagcttatctttgattaggttgagattttcaagatcccttcagcataat

SEQ ID NO: 101780 - DNA, 99 bp, Arabidopsis thaliana columbia
acgcgtccggaataaatttcctggtcatattctcctgcatcgtcctcaacaacagttacatgctatactacatctgcccaatgcagactctgtttactc

SEQ ID NO: 101781 - DNA, 244 bp, Arabidopsis thaliana columbia
acgcgtccgaaaaatcgaaaataagaagaaagcgaaagatttaccttagccaaaagcccgtttcccaattcgacggttctgaaagggacagtggttttgttgaccaattggcaattatctccataatttggcttcttacaagttgaaaggaccattcacaactcacactgcacttccttctccacttcacaaatatctctatctctctctattttgtcggcagaggtacatttctcctttgttg

SEQ ID NO: 101782 - DNA, 370 bp, Arabidopsis thaliana columbia
aagaaaacatacacaaatagcaaaacatggctaacaagctcttcctcgtctgcgcaactctcgccctctgcttcctcctcaccaacgcttccatctaccgcaccgttgtcgaattcgaagaagatgacgccagcaaccccgtaggtccaagacagagatgccagaaggagtttcagcaatcacaacacctaagagcttgccagagatggatgagcaagcaaatgaggcaaggacgtggtggtggtccttccctcgacgatgagttcgatttcgagggcccccagcagggataccagctactccagcagtgctgcaacgagcttcgccaggaagagccagtttgcgtttgccccaccttgaaacaagctgc

SEQ ID NO: 101783 - DNA, 384 bp, Arabidopsis thaliana columbia
acgacgctctctaagcatttagtgataggtgtcatgttagtttatccctgactagaactatgttataacatcttcaggaaggaaaagatcaagctctttactttgacgccattgttcttgacgcacagagaagaagacatgatgtcagaggttgtcgttgtaggttcttggtgcgttacagccacgaccagtccgaggttggacgatcatctctctctctctctctctatcccttgcggttttatttacccgtcagctccatttcatggtttagaccataaagcagaaccctcctcactcacctattttggatttcttttccgttatcccagcaggaaatcgttcccttgacgaagatttgtctgcggcccgagacagattaca

SEQ ID NO: 101784 - DNA, 364 bp, Arabidopsis thaliana columbia
tttttctgtcacgaataatttcatttaagaaaaaaatatagaaagtcatttatatgccaacgagagacaggacattgctaaatccagctcaagacattagaaagttattctcacaatctctataaaataatccatgtcaacaaaaaaaaaacctctattaaacattaatcgaatttctaattcattatgaaatataatcagaagagtcctcatcttattgatcaatcgtaatacacaagaaaccatgactttagaggagcagaagaaagtcataatgcccgaggccgtcgcatcggagccatcaccaccatccaaggaggagaagtccgacgattcgaaagctattgttctcgtcgtcgctgca

SEQ ID NO: 101785 - DNA, 294 bp, Arabidopsis thaliana columbia
cgcgtgggcggacgcgtgggcggacgcatgggcggacgcgtgggcgtcacagtgagagactttatatatctcgaattgatcttgatctatacaactacgatatttagggttgattagggtaaattcaactgtgacctttacatgtggaagtctatggagatcgacactcatcgatcgtaccctaagccctttagacatgtgaatcatacactgctttgggcctttatccaagtgttttcttgtgaatctcctatccttgaatagacagttccatcctttgcaagtagaccctaa

SEQ ID NO: 101786 - DNA, 374 bp, Arabidopsis thaliana columbia
gacccacgcgtcagataactttatcaaaagttaaatattataattttaaatttttttataaagtttatctttaaaaaatgctttaaatatttataattttaaaacttataaagttttaaaaattataaattgaattttacaagaaatttaacattataaatatataaaaaatatattaatacgagacgatatattacagaaaaaatcttaaatataacaatcaaaattcaatgatgaattttgggtcgatattgtatttttttaagtttcaaattttataatattgaaatttataagaaaatgacaaaattatgtttaatttcacgggactgggttatatggtatgacgggtttgggtggataataattacgat

SEQ ID NO: 101787 - DNA, 350 bp, Arabidopsis thaliana columbia
aagctaaaaacatgcagctgctacggagacatacattctacatacctaaatatattacatagcatgtctcactccaacctcatttgtagttcatattagtctcaaaatattcccataaagcatatgttaaacctattttacatcacgttttcactaacttcaaaattctaatttgagggatagaagttggtcacatgatacatatttgttaacgtatgaacatcataaaatctaacatttgatacaagagtatgtaggatacaaagttacacgttgtgtttgtctcaaacaacattagtaacattttaaaaaaaaattgtgtacacaaacacaacattagtaacatttta

SEQ ID NO: 101788 - DNA, 364 bp, Arabidopsis thaliana columbia
agtgttttgttcgcttacgcgatttctcgaaggaaaaatctcgtattcctggatcgagacaaggctgattcgattactcgctgttgctgttgttgattttggatctgtgttttgttatctgcggatcgggaaattggaaaaaccctagatatttgagccatttcgtcgcaaaattagggatttttttttcaccgctgggtttttggatctaaaggtatcgaatattgtctggggaaaaaaggaattttgaggatttgtttgatattcgctgaggaaattgatgttgttcgaaggagaagatgatagaaggctatgcatgggagggtttgtgagcggaggcacaaacgtcgtcgtcggcacatgt

SEQ ID NO: 101789 - DNA, 334 bp, Arabidopsis thaliana columbia
agcaacaaacaaaaagaaaatggttaagctcagcaatctcctcgttgcaaccttcggggttctcctcgtccttaacggctgccttgcgaggcagtcacttggggttcctcctcagctacagaacgagtgtaacctcgacaacctagatgttctccaagccaccgaaactatcaagagtgaagccggtcagatcgagtactgggaccacaaccaccctcagctccgatgtgttggtgtttccgttgctcgttatgtaattgaacaaggcggtctttacttgcccaccttcttcacttccccaaaaatttcctacgtcgttcaaggaacgggtatc

SEQ ID NO: 101790 - DNA, 377 bp, Arabidopsis thaliana columbia
acagggattccttcaatcacaaatccatggccgactccatgttcacagtttggagtattggccattaggtcatcatcatcattggctctcagtagcgaaactagcctgatggatatgccacagtacactgaggatttaaaagaaaaaggattatagattttttcagttgaaatggaacttttgacaaaggttctcaagatgaaggattgtttagctgtaaggaagctttgaagacagttcagtagccaacaaaggtatggttaagtagctctctctctctctccctcccacttatcatgtctcttgcactatatcaaaaacagagaataaatccacgaaaacccacacataaacgcacaaaaaaacagaaaacagaa

SEQ ID NO: 101791 - DNA, 321 bp, Arabidopsis thaliana columbia
agattctctctctctatcacataggagaggaaattaaaactctaacaacaaccaacaatggtggtcgctagaacattgttctcaatctcagcaactctaatcatttttctagcactctttctccatgtaaatgcagttcaagaaacaagggaaccgaaacatgagagctcaagaaatacatcaacggtagataatttatcagacggtgaatggcatgaacacgccgttaaagacccagaagaaatagcagcaatggtcgatatgagcatacgtaacagtacgtatcgtagaaagctagggttcttctcctcatgctcaaca

SEQ ID NO: 101792 - DNA, 256 bp, Arabidopsis thaliana columbia
actttctccttccttttttattctcagattgtcacgaagtgtcactacttcgttcaacattttcaacattcatctttctcatttcgctattcgtctctcctcaactttagtaatgagtaggcattttctgtttctgggtattatcattcttctcttctctgggtttgttgcttcagctccttcatcaacttcacctgcgaagattgttaatagtttcatctcaaatcatggcacttccttattgaaatggttatgg

SEQ ID NO: 101793 - DNA, 314 bp, Arabidopsis thaliana columbia
aagtttgatgcacttaactgttttcatcagatacaagcggaatggtattttgcagatgattaagaggaatttatccgtgaaacttgctcctcaaagatggcaagataatgctggtgatggtgtgtttgatgtggttatgacttttgaagaaaaggttttcgattcagtccttgaaggtaattgaaaaatcctccctattttacagttagatactttgtttgaaaattgcttcatcctgattgctcactacgtacatattgatcacaaactcttataacattggaagaaaaaaatcctggtatcagtagatttgt

SEQ ID NO: 101794 - DNA, 277 bp, Arabidopsis thaliana columbia
aagctcagcaatctcctcgttgcaaccttcggggttctcctcgtccttaacggctgccttgcgaggcagtcacttggggttcctcctcagctacagaacgagtgtaacctcgacaacctatatgttctccaagccaccgaaactatcaagagtgaagccggtcagatcgagtactgggaccacaaccaccctcagctccgatgtgttggtgtttccgttgctcgttatgtaattgaacaaggcggtctttacttgcccaccttcttcacttccccaa

SEQ ID NO: 101795 - DNA, 327 bp, Arabidopsis thaliana columbia
ctcaacaaaaagaaaatggttaagctcagcaatctcctcgttgcaaccttcggggttctcctcgtccttaacggctgccttgcgaggcagtcacttggggttcctcctcagctacagaacgagtgtaacctcgacaacctagatgttctccaagccaccgaaactatcaagagtgaagccggtcagatcgagtactgggaccacaaccaccctcagctccgatgtgttggtgtttccgttgctcgttatgtaattgaacaaggcggtctttacttgcccaccttcttcacttccccaaaaatttcctacgtcgttcaaggaacgggt

SEQ ID NO: 101796 - DNA, 352 bp, Arabidopsis thaliana columbia
aggttagaaacaacaagagggttaaagacgaagatgaagatgacaacattggagatgaggaaggttctgcttctcagaggaagaaacagagacgggttgatgagaaggaggagaaattgcagcgagcggagcagtcgcatttaaggaagaggaatatggaacgttcagtgtcttcttctccgtcttcttcttcttcttcggaagacagtggtgatgtgtcgacttctgaggacgcggtttatggcgagaagctgagtccgccgcggtttgatctgatcaatgacagtctaagagataactacgctaagttgaacagctcctcgaagaaaccaattgggtcgcctgcggaaaa

SEQ ID NO: 101797 - DNA, 340 bp, Arabidopsis thaliana columbia
tcatgataattctgttatgctcattaatctttgtaattaccatcataattttcagaaaacagaagagagggacgaaaagaaacacacttccgtcaccaccgggactacctttgatcggaaaccttcatcaactcggccgccaccctcaccgatcactatgctctctcagccaccggtacggtcctcttatgcttcttcactttggccgtgtccccgttcttgtagtatcttcagctgaattggctagagacgttttgaagacgcatgaccgtgttttcgcaagccggccacggtcaaaaatcttcgagaaacttctttacgataagcatgatgtggcctc

SEQ ID NO: 101798 - DNA, 362 bp, Arabidopsis thaliana columbia
agaagaacaggtagactcatagaagggctctggtttagatactaggtgaactaatcgaggttattaacaatgcatgctttagcataggatttctcggcttctctggttatcttagctttaagtatagagagtttcgcggaacgccaccggttactctagaatcatagtttgagttcgagaacggtgcgataacaatcctaatattagctagatctacaatttatctatctcccgagacaattccttagacccgacgctttaatcacttgaatctacaactcatttacttgcttgtttgtcttttacattcaattacttcatttagcttattaaacaacatcattagtccattgtgtgaacat

SEQ ID NO: 101799 - DNA, 150 bp, Arabidopsis thaliana columbia
agataaaaatggctcgagtctcttctcttctttctttctccttaacacttttgatccttttccatggctacgcggctcaacagggtcagcagggtcagcagtttccgaacaattgccagctcgaccacctcaatgcgctcgagccttcac

SEQ ID NO: 101800 - DNA, 259 bp, Arabidopsis thaliana columbia
agcttgactattgcattgttgtgttcactggcggtgacgatttggaagaagacgatcagacattagacgattatttcagagctggttgccctgaattcttgacggtatattccctttcattaaaatctttacattttttttagtgcaataatacatctctcttttcctcttccaactatctttgtattaagttggaatatttatgaactttcagaaagttctcagactctgtggtggacggaaggtgctatttgataac

SEQ ID NO: 101801 - DNA, 356 bp, Arabidopsis thaliana columbia
taaaaacagcgttgaaaaatgtaaaagcgaaagatcgtctttttagagtttttatttttattttcctcttacatctgatttattggatatttttgacaagaattgatacattaaaagtactttttttttacgtacattcttagagagtaaatacataaccgatcattacaaagaagagatgaagaagtgaatttccacaatgttttaaaccttcagaatttatattaatggggtttgcaaatgattggaggtatacaattacaggtgattcacgtcattattgttctcatcaatggaccctttgcatggtttctattttttctatgcgggtcccgttttttattcacacccatttt

SEQ ID NO: 101802 - DNA, 348 bp, Arabidopsis thaliana columbia
acgaaacaagaaaacatacacaaatagcaaaacatggctaacaagctcttcctcgtctgcgcaactctcgccctctgcttcctcctcaccaacgcttccatctaccgcaccgttgtcgaattcgaagaagatgacgccagcaaccccgtaggtccaagacagagatgccagaaggagtttcagcaatcacaacacctaagagcttgccagagatggatgagcaagcaaatgaggcaaggacgtggtggtggtccttccctcgacgatgagttcgatttcgagggcccccagcagggataccagctactccagcagtgctgcaacgagcttcgccaggaagagccagtt

SEQ ID NO: 101803 - DNA, 342 bp, Arabidopsis thaliana columbia
aatgatgaattagattgtctgaacaaaacttgcaacttgtattattgtaataatctttagaacttttcattttaattgcttgaaaagacacgttgtagatgagtattagcataagaattatgtatgctctatgttggggatgtgtttagactgaaagtgcttatgattatgtagtttttttttttttttgtcgtatgattatgtagttttaaaacagtattttgtttccatcggacctctttctgtacgaattcaaattggataattatatttagtaacaaacagaattctacacaattaagtaaacgtcaatgagatcagtgtattgtgacattcgagatc

SEQ ID NO: 101804 - DNA, 353 bp, Arabidopsis thaliana columbia
agcattgttgcagaatttcgggctatgcgtacaaagctgcaatagtgctgcagttgcattctctttgcctcttgctgaacctaactccacaacttccaccaataccggtattcctccttcttcgcctatcgcaatctttccttctctaaccgttgcaagattcgctagcaccaccacagctttctccaccatcccaaaagcaggatccatcagttcaactaagtatctcactgctccagcttcgattactttcgttttgttctcatggtgtattgagaggttgaataaagccgtggctgcatctttcttcccactgagacttccacttcctaagaggtcaacaagtggctcta

SEQ ID NO: 101805 - DNA, 377 bp, Arabidopsis thaliana columbia
agccttaattgctgggatacgaaatcctttcacgtctcttttcaaattccaaacgttcactatatattatgtggctcacacacaactaaagtaacgaaacaaagtgagacagagcaatggctgattggtctaccttaccagtggatctcctcaacatgatcgccggtcgcttgttctctaacattgaactcaaacgtttccgtagcatctgccgttcatggcgctcctccgttcccggcgccggcaagaaaaaccctttcaggacccgtcctctaatcctcctcaatcctaacccaaacaaacctctcaccgaccatcgccgacgcggcgagtttctctcacgctctgccttcttccgtgtaactctctcctcctct

SEQ ID NO: 101806 - DNA, 359 bp, Arabidopsis thaliana columbia
tagaataagattcatctgatcatggccctcgaagcgatgaacactccaacttcttctttcaccagaatcgaaacgaaagaagatttgatgaacgacgccgttttcattgagccgtggcttaaacgcaaacgctccaaacgtcagcgttctcacagcccttcttcgtcttcttcctcaccgcctcgatctcgacccaaatcccagaatcaagatcttacggaagaagagtatctcgctctttgtctcctcatgctcgctaaagatcaaccgtcgcaaacgcgatttcatcaacagtcgcaatcgttaacgccgccgccagaatcaaagaaccttccgtacaagtgtaacgtctgtgaaaa

SEQ ID NO: 101807 - DNA, 245 bp, Arabidopsis thaliana columbia
aggaagaaaccaagctgctataggtactgatgtgatgaaaactttgtcatctgaggagagagatgaaagattgaaataccatcttatggcttctggggaactctatcctgcactcgtgtcacctgagagtgaatacaaggttcttcacaaaatagttgctggcatattatctgtggttctcagaccacgagaagctcagtgccctcttgttcgaacaatagctagagagattgttacttgcttgg

SEQ ID NO: 101808 - DNA, 328 bp, Arabidopsis thaliana columbia
cgcgtcagacaaatctccattgcgcaggagatatgaagcaaaagaatgtcgatgctgttaaagccataatttcaattgccattgaagatggtaatcacttgcaagatgcttgggagcacattttgacttgtctttctagaatagagcatttgcaattattgggcgagggtgctccaagtgatgcatcttattttgcttcaaccgagaccgaagagaagaaagccttgggttttcctaacttgaagaaaaaaggagccctccagaatccggtgatgatggctgtggttcgagggggctcatatgataacagtacaattggaccaaatat

SEQ ID NO: 101809 - DNA, 346 bp, Arabidopsis thaliana columbia
aaggcctttcgagagggaggcttacgtgatcgtagtggtaaattttactataaggatcatcttcccagaaccagtgtccctgtcttagctcttgcaggtgatcgggacttgatctgcccccctgcggctgtggaagacactgttaagctgtttccggagaacttggtcacttataagttacttggagaaccagatggaccacattatgcacactatgatttggttggaggacgactggcagtggagcaagtctatccttgcataactgaatttcttagccaccatgattccgcataagtgaaacatttcgggagtttctgttccttgcatgctatagcacatgtag

SEQ ID NO: 101810 - DNA, 414 bp, Arabidopsis thaliana columbia
acgcgtccaaagaaattccatctccataaaatcaaattttatggtttattaggttaacgtcataaacctaataccaaaccaaaaatctagtatattaaaccgaactgcaaccgattcaatttactctccacatcataaacttctaatctctcttctttagctaccatgtctctggttttctcttcaagcaaattggattctcaaaccaataagaaaaaattaaattatattggattgtacccataagtgaattataaacttctagttaactcattaatgggcttttggttcaaaagaaaaaaggcagaagaaaacgaattgcttgaatatatgacaacaacataggcttgtagctcagagttatgtataagacaccctaggaaaactgccaaagaagctcagagtcatgcatat

SEQ ID NO: 101811 - DNA, 309 bp, Arabidopsis thaliana columbia
agtagaccgccgacttagattttttcgccgacgagagaatatatataaatggctcgtctttttccaaacgatttcttcttcttcgtcgtcgccggtttagggtttccgttgctgtagcaattttctctcgcttctctctccccttttacagtttctcttatattgctcttgccttgcgtccaatctcaagagttcataagagttgacatttgtgaacatcgaagaaatacggtgacgtttcttctctgattactttttgccaacatgaatactaatgtatttatcaacaagtgctacagcctgtttttt

SEQ ID NO: 101812 - DNA, 396 bp, Arabidopsis thaliana columbia
aatcactcctaaacccttggtgttctcagtctcttcgtcatacattagcaatctctcccaatcatcagcttcatacttcaccacctcgcctcctgttggagaatcttgaggctgctggtggtgcttgatgaacttctttctcgccttttccaatccaagagctcctcctttttcttttcctttgaggttcttcaggcgttccaagaaaccccggttctgaaacaacttagccaagaaagagagcaattgcttctgacgttgctctgcagctttcagcctctggtttacagtgtccacatgtcgagctgtgcctctactttgctgctgaagctcaaccatttcctccatcaatgcacgccgctctttcctcagcttctcaatctctcctccaacctc

SEQ ID NO: 101813 - DNA, 388 bp, Arabidopsis thaliana columbia
tgagaaacccctctttagggtttataccttcaatggagaaacagagtactcaaccaatttgcggccaagaggctctccaacttctcaattgcgtcgcggagtctcctttcgatcaagagaaatgcgtccgatttttgcaatctctcagagaatgcgttctatcaaaggttggttttttatcgccccaaattactgatctacgaacctcgtgaatcatttttttttttaaaaagtcagttgaagttttaggacaaggtatctaaattttaaaattctatcatcgatcgatcaagatatatcgaatcgttattgtcacttatgctttatgacaattttggagctgctcttggtctctcatagaaaacttttgagaaattatcacattttt

SEQ ID NO: 101814 - DNA, 226 bp, Arabidopsis thaliana columbia
agcttaaagtaaagatgtaaccaatagaaatatattaaatctagggtgaatttggtaggtagcctaattttaagtataatgtcattttcatcaatttcagtgaaggtccaccctagattatattcatgtcatgttcagttttttgtcacaaagtaatctcaaatgctccagatgttgaaaggcaaccagccaattaacaacttaatgttaaatttacaagaaggac

SEQ ID NO: 101815 - DNA, 420 bp, Arabidopsis thaliana columbia
gacccaagcgtcaggaaagtgaggagagcgtgctctatcctggagctctctgaacctcccatgcttcatttcgaaaatgacacgtttcagaactacctggacattcttcaagccatagtgacaaataatccaggagtgtcgttggagctaaacgtagagtctcagctgatgacagtgtgtatgcaaatactgaagatgtacctgaaatgcactttgtttcagggtgatgagttggaagaaaccaggcagcccaaaaactggattctacccatgggagcagcctcgaaggaagaagcagcagcgagatctcccctagtggttgcagtgctgaaggctctgagggaactgaaaagagattcattcaagaggtatgcaccgaatttcttcccattgttggtggagcttgtgcggagcgagcac

SEQ ID NO: 101816 - DNA, 393 bp, Arabidopsis thaliana columbia
aaattagggcttacggaatttgttctcgctgttccggtttctgtcttcaaggttttcatcggttcgattgtggatattaaaaacgtctgctttagggtttttcttaggagatcgaaacctaagagaacgaggaagaagaacgatactgggttttctaaactggttaaatggttagtctcttttggtgtctttgtcattgcttatgagaggattggtggaattgggtctcttgtcattatctctttagggtttttgtttagttccaagaatgttgattcgtctctctctgcggtctcttctctgaggagtaatagttttaggagaagccatttcactgcttatttcactagagggataatgacgagattgaatactataattgccattggtttg

SEQ ID NO: 101817 - DNA, 373 bp, Arabidopsis thaliana columbia
actacaattggaggcaaaaatggtgaacctaaacagaccattagttacatggccgaacgtgttgttggaacaggatcattcggaattgtattccaggcaaaatgcttggaaactggagaatcagtagccattaagaaggttttgcaagatcgccgttataaaaaccgagagttgcaattaatgcgactaatggaccatccaaatgtggtttccttgaagcattgtttcttctctacaacgactagagatgagctcttcctcaatctcgttatggagtatgtaccagagacattgtaccgggttttgaagcactatactagttcaaaccagcggatgcctatcttctatgtcaaactttacacataccaaatct

SEQ ID NO: 101818 - DNA, 217 bp, Arabidopsis thaliana columbia
cccacgcgtcaggccaagaaagcagcgatgttcaggcagaacactacttttgaagattatgacgaattagaagacgtcttaaggattccgtgtgaacttagcaacacttcctaccaggcactctctttctctcagccaaacagaaggcggaagctcaatgttgtgatgtcctctgattcagaagatgagcctctgactgacataccggtttccattt

SEQ ID NO: 101819 - DNA, 412 bp, Arabidopsis thaliana columbia
gacccaagcgtcagcgattgtaacgctaaggtaatttaattgtggcaaaatcgtaaatatagtataaactgggggttgtaaatataatatgtttttgtgtgtgtatggttggttgcagcttgggaattgggaatcggcggttggagattacgagatattgagaaaagagacaccggaagatgaggaagtgataaaaggattgtcggaggcacagaagcagctcgtgaaacgccgtggccatgactcttgaaaatctcccgacgattaaaaaaccgccgtgagaacgatcgggaagttacggatttagaaaacaaccccgtgatcttgcttttttttttttttttgtttggccggttaaaaaacaaaagtgaatctttttttttattcaattgattcaattgtatatccataa

SEQ ID NO: 101820 - DNA, 369 bp, Arabidopsis thaliana columbia
tcacatctcaattccaaaggataatccatctgagaaagatatgaatcaggggacattagtggtgtttaacctggatccttcaatttctaatgatgacttacatggaatttttggtgctcatggcgagatcaaagagataagagaaacaccacataagaggcatcacaaattcgtcgagttttatgatgtccgcggtgctgaagcagcattgaaggcattaaacaggtgtgagattgcaggaaaacgtataaaggttgaacctagtcgccctggaggagctcgtcgaagcctgatgttgcaacttaaccaagatcttgagaacgatgatttgcactacctacctatgattggttcacccatggcaaactc

SEQ ID NO: 101821 - DNA, 400 bp, Arabidopsis thaliana columbia
agagatttcaaatcgtggactaggaaatttgaattttctgtaacaagagtactagatttggattgtatcgagcgtatctcatggaaaacgatccatttctccggcagtaccagccgtcggagcttaagatcgcttcggagtttctgactaattggcttccttttttatctaaagatctatgcaaggattgtaatcaccttctctccaatcgaatccgttctcttgacccagcacattgtagtaacaacactgacaaagttgatggagagtgtaaaactggttcttgttcagtggtggaaaatatgggatcagaaagagctagtaacaatgtggatgataattatgatgagaagtcggaaaatggcgaagactgtgataatcattcgttaggtagttggaa

SEQ ID NO: 101822 - DNA, 373 bp, Arabidopsis thaliana columbia
agtctgcatctcaatgtcaagcataaatatggcaggttctactccatttgtacttagagatatcaccaattcatcagttgggccacatggcagaatgggtggcacaccgcttacgtgtccagagactgaaaaaagatagagaaaaggttagtaactattattcaaactgtgaatattttaatacatgttatttatgctatacagttttcgcttataggcaaacaaagtatcaatgattcggagtgcttgacccaagagcaatcttcatgtgtcaacaccattagacttaacatgccaaggaaaaatctgcacatagactttgctatagcaagttctgaatctaatgctgaaggtgaatgattatctataagta

SEQ ID NO: 101823 - DNA, 264 bp, Arabidopsis thaliana columbia
gcattggtgaggcaagcattggtgtttggcggcgtgtttagtccagtgatggttgctgctggtcgggaaaatcagttttggtcgtatgggttgtttggtttgatcataggattgtgtggattgtttgtgtttggattgccggagactagaggaagtgttttatgcgacactatggacgaggaggagtataagactttggcaaaaagacaatttattggttgatacttgatactgttgtcttttgttgtaatggttaaaaagttt

SEQ ID NO: 101824 - DNA, 316 bp, Arabidopsis thaliana columbia
aaatatatgttatattttatttttcttttagtttacgtgagctttgtttcgtatataaagtatgatgaattcatattttttttgttttggtaaaatcatatatttgatatttctactcgcctaacatttaactaactacagttttatatatatatatgtttggtatgtaatattgacacttaatttttttgtgaaacgctccattagtcaatactttgatacgtacagatatagattagtaatatcatttactgaattattaatgtagaaataacacaaatattgatctctcaaataaaatcgcattatcatttat

SEQ ID NO: 101825 - DNA, 278 bp, Arabidopsis thaliana columbia
acgcgtccaaaaaaccttctctttcaactagaagcctttaagccatgtcttcttcttccttgatacttctcttctctactctctctctctttctcaatgtctcactcgcagacaatcacacggcggttgttataacaacctcagatactccaccgccacttcctccgccttctccaccgccacggcataacttcacttcctctctcatgcccggaatcgcagtcgttatcgccgtcctcactgcgtttttctctctcactttcttacttctcctctac

SEQ ID NO: 101826 - DNA, 339 bp, Arabidopsis thaliana columbia
tgggacaagatttgttctgggccattataggaggtggagcagctatctttggtgttgtactttcatggaaagtgaagctagttagggttccataaaacgttacgtgcttcagaaggaacctaccgttgacacagaacatgacgaaaattgttcatagatggcagcaaattgcagcagagcttgacgataatctcttcatccgagtcatcgtttccaattccggaggataagttcagactacattccaagcaaattatcttggaggaatcgacatactaattcctctgatgaatcagaagtttccggaattagggttaacgtttcatgactgttcggaaa

SEQ ID NO: 101827 - DNA, 374 bp, Arabidopsis thaliana columbia
  unsure (1)..(374): unsure at all n locations
agaaatatccaaccagtggttcagtcagaatatatttgcagaagccgtggaagaaggagacttgggaaaagatgacagtgaagacgaaatagcaaataagaaaaagagcaaaaatctgtctaaaccagacaagtcaaagcagaaggcttcaaaagcaagtgtgttgtctgatcagagcttgcccaatagctccaagaaggaagatgagtttgaggtagtccctgcaccagccacagattctgactcagattcatcctctgaagatgatgttcataccaaggccgagatactggcatgtgccaaaaaaatgctgaggaagaagcagagagaacagatgcttgatgatgcatataacanacacatgtttgtagatg

SEQ ID NO: 101828 - DNA, 276 bp, Arabidopsis thaliana columbia
aaacatggctaacaagctcttcctcgtctgcgcaactctcgccctctgcttcctcctcaccaacgcttccatctaccgcaccgttgtcgaattcgaagaagatgacgccagcaaccccgtaggtccaagacagagatgccagaaggagtttcagcaatcacaacacctaagagcttgccagagatggatgagcaagcaaatgaggcaaggacgtggtggtggtccttccctcgacgatgagttcgatttcgagggcccccagcagggataccagct

SEQ ID NO: 101829 - DNA, 315 bp, Arabidopsis thaliana columbia
cccacgcatccagcaaaagattcaagaatcgggaaggtaagaatcaggctttctactctcgagactgatcgagtttatacacattcataccctcttttggtgctccatcctaacggagtcaagaaaatgggagaaattcacttagctgtgagattcacttgctcttcagtgctcaacatgatgtagatgtactcacagcctcacttaccgaagatgcattatatccatcgactgacggttatccagcttgataacttgaggcatcaagcgactcagattgtatcgattaggctgacccgagcagaaccacctcta

SEQ ID NO: 101830 - DNA, 274 bp, Arabidopsis thaliana columbia
acgcgtccgataaatgaacaaggcggtctttacttgcccaccttcttcacttccccaaaaatttcctacgtcgttcaaggttcatacatgataattacccttccaataaaattaatgtatatatcatgtctaattaatgaagatataatcgattcaccatatgataactcttttttttcctctctacctaatattaatttacaggaacgggtatcagcggaagagtggtccctggatgtgccgagaccttcatggactcgcaaccgatgcaagg

SEQ ID NO: 101831 - DNA, 369 bp, Arabidopsis thaliana columbia
aatccaacaagttcaagggcagatttcgtggtggctcgggacggttcggcgactcatcggacgataaaccaagcattagccgccgtttcaagaatgggtaaaagtcggttgaatagagtgataatatacataaaagctggtgtttataacgaaaaaatcgaaatagatagacacatgaaaaacatcatgctagttggtgatggtatggaccgtacaattgtcaccaataaccgaaacgtcccggacggttccacgacttatggatcagcgacattcggagtgtccggggatggattttgggcacgggacataacgttcgagaatactgcaggaccacataaacatcaagctgtggcgttgagagtgagc

SEQ ID NO: 101832 - DNA, 260 bp, Arabidopsis thaliana columbia
attaccactcctgacataagatggagggtccttagtgggaagttgacctcttcagatgataccaaaatattgcttgcaaaggcactttccattcttcatgaacggtttgatcctatcagtgaatctgggaccaagggagatttgataccagccatggtgtatggaaggcaaacaaaggcccaagattttagtggcatgtactgcactatgttggctgtggactaagtgattgtttcagtgggaatctttacggtttttgg

SEQ ID NO: 101833 - DNA, 352 bp, Arabidopsis thaliana columbia
gaaaacatacacaaatagcaaaacatggctaacaagctcttcctcgtctgcgcaactctcgccctctgcttcctcctcaccaacgcttccatctaccgcaccgttgtcgaattcgaagaagatgacgccagcaaccccgtaggtccaagacagagatgccagaaggagtttcagcaatcacaacacctaagagcttgccagagatggatgagcaagcaaatgaggcaaggacgtggtggtggtccttccctcgacgatgagttcgatttcgagggcccccagcagggataccagctactccagcagtgctgcaacgagcttcgccaggaagagccagtttgcgtttgcccca

SEQ ID NO: 101834 - DNA, 362 bp, Arabidopsis thaliana columbia
gacccaaacgtcagttatattcgagaatttggttttctggtttcagttgggtctacaggattattgtttctcaagtcacctgctacatttctctgatcgtcttgttgaaatgtttgattctgtccttgtccagaaaacccttgtctaaatcctggatttcctgctaatccatgtggaggaccatagtttccaccgttctgcatattgtaatttgcggggttcactggaaatctttggttgaagtttgcagatgttccttgaccgtaaccgcctggtgttgcttgattgtagtttccatggtatggaggcgcctgtgctccatgggcttgattgtaactagcctgatatgaaagcactgcata

SEQ ID NO: 101835 - DNA, 319 bp, Arabidopsis thaliana columbia
acccacgagtccaccaaaattgaggaacaaaccctggagagtcacagttccgtgttagtgtttctgcagcgttgtgtcagtggtggttttgtatatccgccgctcgttaattgtggagatggagaccaactcttctctttttggtttagtttctcctaactcgcatgatttggtcattgagaggcttgcttctgtgggggttcctaagaaataccgctctaagcgtggcctagtggaattcgttagagctaacccggccaagatttcagagttagtctcggctctcttacctacagatgacgatgttaaactaggattg

SEQ ID NO: 101836 - DNA, 371 bp, Arabidopsis thaliana columbia
aggaacaggtttgggaagagattgttaccgatatcaaagatggtgtcttaagcaaccgtattactgtcccatcggtccgtactgcaatgtcgaagctgctcacacctaaccctgagctagctgagacgatccgcaccaaatgtatgagtttgagcaactggtacggattgattcccgcgctcttccccaacgcaaagtatgtttacgggatcatgactggctccatggagccgtatgtgccaaagctgagacattacgcgggtgatctacctcttgtgagccatgactacggtagctcggaaggatggattgctgctaatgttaccccaaggttatctccagaggaagctacatttgctgtgattccgaat

SEQ ID NO: 101837 - DNA, 378 bp, Arabidopsis thaliana columbia
cataatacaaaccataaaaatatctccccttctcttttttctctctttttttgtagccccgctaatatttcgacacctgtttcagtctctttttttgtttcattcttcttcttcttcgtattcctcgatgttttagacgaagcagggactctcagtttacgagttacggaatctctctctgtctcagatccatcagaatagtttcttgcgcaaacccattcttgaagatggacagggcagatacatggggatttgtcagcggtgggagatgtttatatctcaagttgcttttatgtttatagctctacaaggtggtgttctaagtatttattgttttggtcattctatctcctccgctgcattgttctgtctcttctc

SEQ ID NO: 101838 - DNA, 374 bp, Arabidopsis thaliana columbia
acgcgtccactcaatcaagccttcatgttcttctcgctgggttcctgtatcccgctacatgtttgaaactcgttgagtctatcgttgctgccattaatacctctcttaggtctcctcctaccttaatggcattctctgactctgtctccgcatggcttgagagactcagagatattgcttcgaaagaggaagtgatgatcgacaattctgatattactgttactccaaccctcttgggattaaccagttctttatctagtctttgttcaggtgctgaatatctcttacaagttgtacatggtgccatccctcatacgttttttgattcaaactctacgatttccgctgctgagattgctgtccatgttcttgat

SEQ ID NO: 101839 - DNA, 378 bp, Arabidopsis thaliana columbia
ttctgcacgtaagagaagaaggaagctatggatgtagagcaaaagaaaccgttaatcgaatcatcagatcgtaatctacctgatttcaaaaaatcagtgaagcttaaatatgtgaagcttggttaccattaccttatcactcatggaatgtaccttttcctctccccattagtacttgtaatcgctgcacagatttcaactttctctgtcaccgatcttcgtagcctctgggagcatcttcagtacaatcttatctcagtggttgtttgttctatgctgcttgttttcttaatgactatttacttcatgactcgaccacgtcctgtctacttggtgaacttctcgtgctttaaacccgatgagtcacgaaaatgcact

SEQ ID NO: 101840 - DNA, 345 bp, Arabidopsis thaliana columbia
aaatcgagcgacggcggcggagacgacggagatgaacagaatgagatgggtcggagagggagacatctgggacctcgatatgtcaactccggtgacgctcgagggcaccgcacgagctgttcctgacgatcctcttcctctaggtctctctagaggcactcgtctatctcgccctaagcaagttgagttcttccaccgcttcatggcctcacctctcatcccttccttctcccctatccgtcccaacaccggagatggaggcggtggtggattctctcttcaaagagtcctcactcttcctttctccaacaactggcttgtgtctcttctgggccaattcgatgt

SEQ ID NO: 101841 - DNA, 332 bp, Arabidopsis thaliana columbia
gcttcgtcgtctgacatcagcgcacgttagccaccgtcgtcgatatcatacgcccaccaccgccgtaggggagattcttggattgattttccaatttttgatcaattcgtcactctagtagatctgaggcaatacactgcgaacaaatttgagtgggaaaagaatcagatctaggtttaaggtttgatgcgttggggatgttcagtgatcggcggaagcgggaaatggctaatcatggagatggcaacaagtacgcgtctgtgaatctgaataagtcttatggatatcaatctcatcatcagtataatcaatctggaggttatgggcggggg

SEQ ID NO: 101842 - DNA, 337 bp, Arabidopsis thaliana columbia
ggatgatatttctccaccttaacctacttgatacttaacacacaaaacccattaacacattgggcatgttttacataatgtcccaatggcccttttcctttagtgaccaagtcgcgtttcttctccttagtttcacaaacgatataatatcaagtggacagattaactggcctttttgtatcattacttaatttgaagaatggagcttcacttcatccttggaagagaaaggtaggctaagcgagagtagccaaatttcctctccacttacggtttccatgatattcttgatattttaccttcacaaggagcttgtatgtgtggtagttgaatggca

SEQ ID NO: 101843 - DNA, 368 bp, Arabidopsis thaliana columbia
agaaaacatacacaaatagcaaaacatggctaacaagctcttcctcgtctgcgcaactctcgccctctgcttcctcctcaccaacgcttccatctaccgcaccgttgtcgaattcgaagaagatgacgccagcaaccccgtaggtccaagacagagatgccagaaggagtttcagcaatcacaacacctaagagcttgccagagatggatgagcaagcaaatgaggcaaggacgtggtggtggtccttccctcgacgatgagttcgatttcgagggcccccagcagggataccagctactccagcagtgctgcaacgagcttcgccaggaagagccagtttgcgtttgccccaccttgaaacaagctg

SEQ ID NO: 101844 - DNA, 371 bp, Arabidopsis thaliana columbia
aaaacatacaacatagcaaaaaatggcaaacaagttgttcctcgtctgcgcagctctcgctctctgcttcctcctcaccaacgcttccatctaccgcaccgtcgttgagttcgaagaagatgacgccactaaccccataggcccaaaaatgaggaaatgccgcaaggagtttcagaaagaacaacacctaagagcttgccagcaattgatgctccagcaagcaaggcaaggccgtagcgatgagtttgatttcgaagacgacatggagaacccacagggacaacagcaggaacaacagctattccagcagtgctgcaacgagcttcgccaggaagagccagattgtgtttgccccaccttgaaacaagctg

SEQ ID NO: 101845 - DNA, 390 bp, Arabidopsis thaliana columbia
aggaagaagtatgacaaaagaactggtgatctcatgcgtttacctttcatccagaaagttcttcagcaacctttttacactacacactaacagtagaacttccactcctgatctccttcaaaacccgcaaggcagcgattgtgctcttcatatgaagactctccatgaacttatgctctgataactctgcttggataatctcagactcagtttcgttagcagggaagatctgatcaagcattgcctcagattccttgacaagcttggaacgcgcttgagtacttcaaaactcatctcaagtatgagaagaaccctaagatcagagaagctattacccagaaattcaccgagtatctccgtcgtgctgaggagatccgtgctgttctcgat

SEQ ID NO: 101846 - DNA, 407 bp, Arabidopsis thaliana columbia
agaaaaaagcatctgtgttttcaaagcggaaatcaaatgctgcaacaaagacgaatgagacactgtttaagactcctctgcctgcaaaagaacaacagggtagccgaccagttcgagatggaaaccatgcattcccatttccagcatctattggggctttgtcagaagggagtccctcttttgttgctactcaggtaggaaacctaaaatctatgagccagcatgaatatcgaaatccttctcagctagattttgtcaagcctcaaaataggattcctcagcaagtagaactgaatttacccccaccagcagaacaaaccaattccggttctggctgtgttttggaaaaccaaagctttggaaaatcagatacggtggcatcatacaggtcatcaagtgacatgatg

SEQ ID NO: 101847 - DNA, 415 bp, Arabidopsis thaliana columbia
acccacgagtcaggttcagttttgatcgttattgcgtttggagtgtttgcattacgatatcactgggaaccaacttggggaatgaaaaattctgaaagattttctgcagcaaagccattgatggaacaaggttcgagaaagccaggttttatgagtgaggacagaatcagtgagttgcctgaagttttgcttctgcagatactgtcttcacttcctacaaaacttgtcatatccacaagtgttttgtccaaacgatggctatctctttggaaaatggtacaaagactcgagtttgaatcttctcgaaacatatatgactttgctgaaaacgttaccaggtctttgctttcacataaagctccagttctagagagtttgcatctgaaagttggagatcaatttgatggtgtttatg

SEQ ID NO: 101848 - DNA, 270 bp, Arabidopsis thaliana columbia
tggccggtttcggattgtacggctgaaagttaaaagtgttgccttgtctttggaagcatgccatcggagttgattggcgagaaaatggatgtaaagaggctctatgatgccgttaatttacttctctattttcagagcaaaaatggaggtataacagtgtgggaggcagctcgtggaagaacctggttagagtggcttagtccattggagtttatggaagacacaatcgtcgagcatgagtatgtagaatgtacggggtcagcgatagtg

SEQ ID NO: 101849 - DNA, 493 bp, Arabidopsis thaliana columbia
ctattacagttttgccaaaatgtgtataccaactaaaataaaacgatttagtaaaaattcatatatacgtgtgtaggtgcatgccctacgaaatagtaatttagaaaatgaagtatatatattattgttttttaagatccatcattaatagtcaacatgtaaaaaacgaaaatctctactagttcagagattcatacatattaacattttccaaatatgtatagttggttttatcaattgattaaacaaaactaaaacaaataatatgaaatatattattggtttccactttccagctgtagtacactgtagatatcataagttcaatttccttgttatcatttcatatagaattagaaagaaattaaacattaaaacctaggtctggttgcacatattgataatgaaagatctaattaattaggtttccttcattaatgagtgaccaaccaatatttttgacattttgatttagtgaaacagacaaatatat

SEQ ID NO: 101850 - DNA, 356 bp, Arabidopsis thaliana columbia
gactaggttagcttgagagtctctattgcggtggcacttagatttggttaacgaacttgttgtctaaggttaatttgttgagcatgtcaatcacctgtaaactgaggaaacgaaactactcaattaccccatccttaggaattctttgtctgattgattttattgtttactctactgctgtttactgcatcctgtcacctgttgcttagtttctgcaattctttactgttactcgacctgatactcgaccacccagttgtcttgcaacagactgtgcagtcgagtatctttgtttcattttctgtctgttactcgacctgtcactcgacctcacccagtgctctgcaaagagctgt

SEQ ID NO: 101851 - DNA, 236 bp, Arabidopsis thaliana columbia
ggaattgaactgaatcacacattcaccataagcagacctgaaaaacctgcttatcaatttggcgtcattgccaattcatcgttgcattgttacattcaagatatcagaatcttttaagatcaagttcttttacatttttcaagttactaactcatcatttcgtctgcttgtttttgtggtaaaggtactaatctttgtgcatgcaaaatcgatccaaaggttctgcacacctatta

SEQ ID NO: 101852 - DNA, 225 bp, Arabidopsis thaliana columbia
acccacgagtcaactctcattgaaaccagaaaaggagattggttcccttctaatgttgactctagcagcatgaacggtcttcaggcttacaaggtgttcatagctgtcgctacgatcctaggagatggtctatacaacttttgcaaggtgttgatccgaaccttttcaggactgatctcgcagatccgaggtaaagctggttcgagaagctctcttgcacacaaa

SEQ ID NO: 101853 - DNA, 300 bp, Arabidopsis thaliana columbia
tgcgttctgcgtcagtcatttcgaagtagatatcattgagaagagttttaacagtagtatgattctcttttaagtttatagtatgattgcaaataatgatataagattcgcgagacagattcagataaacatacgtaacttagataatgagagagacttctcaagactttagaagaaattaaaacttacgaacctcataaattgatctagaatgtagtactgtaaacatagtatagaaacgtctaaatctcttaatcaatcacttaactaataacggttccaaattatattgattacaat

SEQ ID NO: 101854 - DNA, 260 bp, Arabidopsis thaliana columbia
tacagaacgagtgtaacctcgacaacctagatgttctccaagccaccgaaactatcaagagtgaagccggtcagatcgagtactgggaccacaaccaccctcagctccgatgtgttggtgtttccgttgctcgttatgtaattgaacaaggcggtctttacttgcccaccttcttcacttcgccaaaaatttcctacgtcgttcaaggaacgggtatcagcggaagagtggtccctggatgtgccgagaccttcatggac

SEQ ID NO: 101855 - DNA, 318 bp, Arabidopsis thaliana columbia
acccacgagtcaggcaaggttatttctcaagaagaatctgaatccttacctgtgcctccagtttccggcggagttgatcatctcaacggccataacagcgccgccgcacgagttccaggaatgaatcttgttccgattgagaaatctgatagcaatccgttgattccacagcatcgtcataatccactgaaaccccttagcatgacggatctctcgccggctccgatgcacggatctaatctacgcgtcgcttatcaaggtgttcccggtgcttactctgaagcagccgccggtaaagcttatcctaattgtcaagct

SEQ ID NO: 101856 - DNA, 404 bp, Arabidopsis thaliana columbia
aacggacgcgtggggtccactgttcccattgagtctcttctccaccattcttatcttcgtcacaactctagaatctatcgcggaactagaactttcttaccttactcgttgaatctcccttctcatttcacttctaacaaactactacactcaattagaacaagcgtcggtgttaactcgaagcatagaagaagctccgtcgcgattcgtgctagctcttccgatactgccgtcgtggaaaccgctcaatcggatgatgtcatcttcaaggaaattttccctgttcagcgaatcgaaaaggcagaaggaaagatttatgttcgattaaaggaattgaaggagaataattgggagctgattgttggatgttgtatacccggaaaatggattttgcattggggagt

SEQ ID NO: 101857 - DNA, 374 bp, Arabidopsis thaliana columbia
gttgaaaaacatctccccaaacattttcaggctgacaaatctaatggtcgccgactttacagactgtagaggtgtcatcaaggcgttgagtgatgcaactgtggtagcgacaatggaagatcacgtttcttgtgtaccattatctgaaaacatagaatatacatgtgaacgtttctgggaaaagttgtacttgtatgatgatgataatgatgatgctgatgttaaatacttccaggtagattgggactttgatggggaatattttagcttccgtaattgcttcaaattggaaagagatgcgcgagaactcatcctacgatcatgcttcaagcctgtggccttaccaggtggagaaatccctaactatttcacgt

SEQ ID NO: 101858 - DNA, 365 bp, Arabidopsis thaliana columbia
aacaaatttgtctcaaatccttagaatcaaaaagactagtttgctgttgcataaactaggcaatgcataaatttaaggtttatatctgcttctctttgtaattgtatgctgttcgttgtttataatatgaattttaaatctgaaaattcatcttcccttgttaatgcagtggaaaactgctacagttgatagagataaggttctgacagtccagctgagatgctgagtatcaccatttgaagactaacatgtgtacttgagttgtctctcatgtctagaccatttgtgagaagggagtttttgtttgcaccaatacccaccaatctctatatttgtaagaagtattatgctcaattaaggaaaat

SEQ ID NO: 101859 - DNA, 400 bp, Arabidopsis thaliana columbia
ttagcattaactaatattaatatgttttgtgtttttaagaattaaaaaggtttgtgtataaaaaattaagagtgtggatgaaagtgaaagcattcgtaaaaagagacgagcggtcggatccatgaatgtgtttgggtcctactttttcctcgttctcccacgtggaccattctgaactatctacgtgtcattttctgtcctaaattcaaaagctacgaacctacgtcgttttgtaggctcgtattctcagcgaatgaactgggcaactggctatgagtctcaatgacattggcttcatcatttatcgttctatgcttttaacattgttagattctagtcagtcaacgtgtttgtgtatatttatttcaacccagatttggttctttttttggaaatgaat

SEQ ID NO: 101860 - DNA, 404 bp, Arabidopsis thaliana columbia
acgcgtccacaacattttctcgaactcttcggttccagctgctttagtgatgctatatgcttcttctttagagaggaataagtcttgtgctaagagctctgttaagctgttcttgagtaattgtgtagctttaccgaagaatcagaagaactattgtttaccaatagtgttagagttttgtaaactgcttaggaaagtttgccctgatcagaagctatatgttacttgccggaacaccttgggatcgatgctggaaacgtttgataaccctcatggtgtatataatgatcaatatgagacttttggggtggagattttcccgttctttactgagttaactggtcttttgttgaatgagttagctcagaattcagggcctagtttctgtgactttcagaaagttt

SEQ ID NO: 101861 - DNA, 285 bp, Arabidopsis thaliana columbia
accttcggggttcccctcgcccttaacggttgccttgcaaggaattcacttggggttccccctcagctacagaacgagtgtaacctcgacaacctaaatgttctccaagccaccgaaactatcaagagtgaagccggtcagatcgagtactgggaccacaaccaccctcagctccgatgtgttggtgtttccgttgctcgttatgtaattgaacaaggcggtctttacttgcccaccttcttcacttccccaaaaatttcctacgtcgttcaaggaacgggtatc

SEQ ID NO: 101862 - DNA, 376 bp, Arabidopsis thaliana columbia
gcaaaagatttccttcaccaaccaatgttcagaaacatccttgttacaacggagtggttaagactgatgcaaaaatagagtttctgtgtcaagatagcggtattagaggctgttggtttagatgcactgtcctggacgtatcaaggaaacaggtaaaactccagtatgatgatatagaggacgaggatggatatggaaaccttgaggaatgggtgccggcttttaaatctgctatgcctgacaagcttggtataaggttgtccaaccgcccaactatccgacctgctcctcgagatgttaaaacagcatactttgatcttacaattggtgaagctgttgatgcatggtggaatgatggttggtgggaaggtgttgt

SEQ ID NO: 101863 - DNA, 380 bp, Arabidopsis thaliana columbia
agttcaagatcgcacggccgcccttttttttttttcaaagttgaggcagaacaatttcaaccatgaaaaaaaagcaaagcagacgaaaagcacatcatgaatatggccaagaaaataatatgagaatcagaaaaaaaaaactgaatgaggacgagtacgtaccttgtcaaggcataatccttgaagccactgatcaagcggcgtgcttccagtgtaccaatacatccacgcaaccgaggctctccaccattcactattttcttccaggtaacaaacaatggactacacaaaaagcaaaaagactggaccatcagtaagaatggacacaaaaagtatgcgcttcagattatatcacccatccataaacattcaacacaaaa

SEQ ID NO: 101864 - DNA, 370 bp, Arabidopsis thaliana columbia
gtacacgtgatttttttttactagattagcgtgatttctcccttctcgatgatagtgatggaaccagtgaagtcttacattgagaggagaaacgatgatttttataagattctatgataataccatattactatgtcttttgtcattattcaaggattaacattggctggccatagacacgatcgaggtgtactttggcaccaaaattgggatgaggaagtccgcgatagatcatggattaactagctgatcaggatgaccatagattgcattgttacatagccggctcgaagtctttgaacaaagtcccaatcgacttatatattttatgttttcttcaatcagttagttgagacttttacacaataat

SEQ ID NO: 101865 - DNA, 384 bp, Arabidopsis thaliana columbia
ttgaccatttgtatacatggtttgaggaaacttaatgctcgagtctttttttttttggatcaaaggttgttgaaggctttgggagcacctagtaatgcgtcgatatatattgcaggaggtgaaccatttggtggctcacgagcattagagcctctcgctaaagagttctctaatttggtgacaaaggagacattggctcataaaggcgagctcttgccttacaccaatagatcttcagctttagcagctattgactacattgtatcacttagcagcgatgtttttattccttcccatggtggaaacatggcaaaagctatgcaggtaacacagaagaatagtcttttgagattttccaaagtttctttcttaaactctgttttt

SEQ ID NO: 101866 - DNA, 342 bp, Arabidopsis thaliana columbia
agatcaagacatctgagagagacactaccgacaattatagagaaaaaaccgcctttggctccaacaagaatgcgaatgccactcagaaggatcacaaacttcatgccccaacaacaaccatctcagggtcattctaagagattctcagacacaacattcaaagagaataataacagcaacagaagatcatcatctatggacgtgaatacactaatgaaaccaagaagaagctccatcgcattcaggccagctcctgctccatcagccattgcttcaagcaataaaaccatcatgcccagaaggagagtctcaattgcaacgctaagaccagaaccatcatca

SEQ ID NO: 101867 - DNA, 436 bp, Arabidopsis thaliana columbia
cccacgcgaccgattgcgtctttgaattgccgtcaagtgttggtgttgatcgacatctacgcgattttttggtcttgggatatctttctcattcatacatgttgtttgtttcatccatcatgtctgagtactctgcttgttagggttagatttctcattagggattcatatgatttagtagatcggccccttgctaggttatctgtaggattcttcatctttagttgttcttaatgctagttctagagtagttaactagaatatgatctcatataataggtatacccaccataggtagttgttacaagaacttatcaaattcgtttagaatacatgtttaggtaaaagattttacggcacaccactgggaatctttcactctagacatagtgagtagcacggcacaccaccggttattctataattagggtttgag

SEQ ID NO: 101868 - DNA, 229 bp, Arabidopsis thaliana columbia
agatcgtcctcaaggtggtgaaacagtgtgtaagtacagagggtgttgaaccggaatacattcgtagtgatattctgcccgagtttttcaggaatttctggacaaggaaaatggctctggagaggagaaactataagcagcttgttgaaactactgtggaggttgcgaacaaggttggtgttgcagatattgtgggaagagttgttgaagatctcaaggacgagagtga

SEQ ID NO: 101869 - DNA, 422 bp, Arabidopsis thaliana columbia
aaagaagaagaggcgtttctctctctctttttgcttcagaaaaaatggggtttttcttgtgttcctcttcttcaatcttcttcaagttcggaatctctataatctttctagtttctttctctggtttaactccttcagaagcttatgatcctttggacccgagtgggaacattactgtcaaatgggatatcataacctggactggagatggctatgtggcgactgtaacggtatataattttcagcaatatcgacacattcaagctccaggttggactcttggatggtcatgggcaaagagagaggttatatggggaatgaatggaggacaaaccacagaacaaggagattgttctaaattcaaaggaaccattcctcattgctgtaaaaagacaccttctgttgttgatctcttacctgga

SEQ ID NO: 101870 - DNA, 374 bp, Arabidopsis thaliana columbia
cttagttatctctcttttccctgcttgtaggttgccgacgattcaacaagaggttcagcagcggaaactgctatacatgggactctatcttttaatatggggagaagctgcaaacctgagatttttgccagaatgcctttgctatatatatcaccatgtatgtgaaaacatcagtcttccctatctctcttaagcaactttgtggtgtgtccttctctaaaaatatcagttcaatttagacaagggcactgtgataaaatggtgatcttggctgatacctagtaatcaactagtaaaatttgaaggcaagaaaccagtgcaaggatttagtaatacttatttctatttagagtacgagtattttgctacttgtg

SEQ ID NO: 101871 - DNA, 310 bp, Arabidopsis thaliana columbia
gaccacgcgtcaggggaactatgcaatacaacagcaggacctgattacattccctgtctcgataatgtgcaagccattacgagtcttccgagtactaaacattacgagcatcgtgagaggcattgcccagacagcccacccacctgccttgttcctttgcctgatggatacaagcggccaattgagtggtccaaaagtcgagaaaagatctggtacaccaacgtccctcataccaagcttgctgagtataaggggcatcaaaattgggttaaagttaccggtgagtatctaacttttcctggtggaggaa

SEQ ID NO: 101872 - DNA, 417 bp, Arabidopsis thaliana columbia
acccacgacgtcaggttgattacaaacttattctgacacaaaacataaattcgatgacagttcaaaagaagcttcggtgaaagaattgcacgatatggcggtctgtgtttttgccaagaccacacccgacaatgcagagaacaaaatgaaacaagctaacaaggagtttagttccaacacaaatgttagcccactcggcagattcttactctcaaggtttgttcgaatgatgaaaatattgatacatgaaacaatttttcctgagtttgaaatctgaatttttgagagcttcagtgtcttcttaatgaagatttgattttaaaatttcaaaatgggtttatttatgtctctctgcagatggctaggccaatcatcacgtgatctttaatcccccaccctgagacaacctacagagat

SEQ ID NO: 101873 - DNA, 336 bp, Arabidopsis thaliana columbia
cacgcgtcagcaacaaacaaaaagaaaatggttaagctcagcaatctcctcgttgcaaccttcggggttctcctcgtccttaacggctgccttgcgaggcagtcacttggggttcctcctcagctacagaacgagtgtaacctcgacaacctagatgttctccaagccaccgaaactatcaagagtgaagccggtcagatcgagtactgggaccacaaccaccctcagctccgatgtgttggtgtttccgttgctcgttatgtaattgaacaaggcggtctttacttgcccaccttcttcacttccccaaaaatttcctacgtcgttcaaggaacg

SEQ ID NO: 101874 - DNA, 238 bp, Arabidopsis thaliana columbia
aaacggaatcttaaaatgacaataaagtaagtcattagcaatggtcaaaagaaaaacatgcttatacagtatttggtctgtaaactacgcacgaagacgtatgaaccgggaaccgtaagcacaacattagtccactcaacgtttccccaaatttcataatcatcgccattaccgttacgtctttcaagagcaatcacctcacaccaaatatgtttatctccaaattgaccaggatgca

SEQ ID NO: 101875 - DNA, 433 bp, Arabidopsis thaliana columbia
cccacgcgaccaaaacatagtcgttcctctgaaaaagtgggattacaatcactgatcaattagcatagaataggtccggcctgttgaaatccccaagagtacgacgtggttccgcagatggaagaatagctacaggaatctggggttggtgtcgatagacacctctgttgtgtcgctcgacaccaatcgcatcttcgttctggtcctgaaggtgtcgatcgacacctagttggtgtcgctcgacactgagccctgctgcatctctggcagctaattgtgcattgaggcgcgcctgatcctcattggcgtcctcagggtggataagtacatgatcatctaatctctgacaagcctcattgtaagcttgcccatcctcatctctcaaactccttcctcatcagctctgatggctctgtaagccattgctaatctc

SEQ ID NO: 101876 - DNA, 356 bp, Arabidopsis thaliana columbia
agctgtattgacgtttttgagacatcaatcctacctttcaattatgaagtggagtacataccttggcctggtgcaattaactacaagaactacaacgatcttgtgtacacactgtatagccagaaagacaagtacgatgcagctgttggggatatcacgattactgataacagatctttatatgtagattttacattacctttcactgatatgggactcgcagttgttactgccaaagacaaaagcatgtggattatctttaagcctttgacacttagtctttggctaacaattgcaagtttctttatcttgacgggggctatagtttggttgatagagcggcatgataacgctga

SEQ ID NO: 101877 - DNA, 310 bp, Arabidopsis thaliana columbia
aaccgaaaacatttagccagacaatggaaaccgcaagaatccaattcagtgcatcaatgtatgagatagtactgtagaatgtaaagtcctaaaagacaaatctgacatacactacattttgcaagtgtccaagattttcatctacagagagagcgatatatacacacagagagatttgaagatgaaaagactattgctagatgccggataaagagagaccaaaagaaaaagactacctgtgtgaatgtacttcagtgcacgcaataactgatacaggaaaaactggtaatgctctctagtcaaatcatca

SEQ ID NO: 101878 - DNA, 402 bp, Arabidopsis thaliana columbia
aaaacaagtgtaacctcgacaacctagatgttctccaagccaccgaaactatcaagagtgaagccggtcagatcgagtactgggaccacaaccaccctcagctccgatgtgttggtgtttccgttgctcgttatgtaattgaacaaggcggtctttacttgcccaccttcttcacttccccaaaaatttcctacgtcgttcaaggaacgggtatcagcggaagagtggtccctggatgtgccgagaccttcatggactcgcagccgatgcaaggacaacaacaaggccaaccatggcaaggacgacagggacaacaaggccaaccatgggaaggacagggacaacagggacaacaaggaagacaaggccaaccatgggaaggacagggacaacagggacaac

SEQ ID NO: 101879 - DNA, 413 bp, Arabidopsis thaliana columbia
atttaaacatattacaactgatttcatatctagtaaattttgaatatgacaaaaaatctatcaaggtcaaacaaatcgaaaaaacacaagcacatgtagccatgtagtcttaatgactggtttcgacacaactctggaaggtgtcaactactgggaaattcagaattcttggggtacaaaatatgggcataacggttttggcaaaattataaggaagtccagccagtgaaacaacaaacaatctatgtttctcaaaatcattcagttgttggtttgatattgagactctctcttctataggtttgctaaataacttaaggcttcctttttctaggtttagttgcgagtagattttgaaaaacaaaagatgcatgaatggtatcaagcgctgagctttactgatagacaatact

SEQ ID NO: 101880 - DNA, 423 bp, Arabidopsis thaliana columbia
aacaagtacgaaaataaaaaaaaagacaactcgaaacgacgtagtaggtttaattcgttagatagaaaagaaaaaggaaattccgaggaggagaatatgccgttctcctcgtacatcggcaacagccgccgtagctccaccggcggaggaaccggtggttggggccaatcacttctcccaacagcgttatcaaagtcaaaactagcgatcaatcgaaaaccacgaaaacgaactctcgtagtcaatttcatcttcgccaacttcttcgtcatcgcactcaccgtctcactcctcttcttcctcctcactctcttccacttcggcgtaacagtaccgatctcctcacgattccttacctccagatccaatcggatcgtcaagccacggaagaatattaatcgccgacccttaaacgattccaat

SEQ ID NO: 101881 - DNA, 352 bp, Arabidopsis thaliana columbia
acccacgcgtcagaggccttctagtaactccaagggtccctgagcttgtagctaagacagagcttgaaaatattgccaaaacttatgggaagttttggtgcacttggcagaccgatcgcggggataaattgccacttggtgcaccatcacttatgatgtcaccacaagacgtgaatatgggaaagatcaagccagggctattgaagaaacgtgacgatgagtatggaatctcgacggaatctttgaagacgtctcgagttggaattatgggaccggagaagaaaaattcgatggctgattattgggttcatcacggaaaaggattagcggttgacataatcgaaactgagat

SEQ ID NO: 101882 - DNA, 383 bp, Arabidopsis thaliana columbia
acgcgtcaggttattaaaaaaaaaagacaatgtaaattcaatttgattttccattcaaagaaatataaattttgagaaagtctactacttctctgaagaaaaataactaataatctcaaataaaattggttattttcttaaaaaaccatcccataaatgcatgaaaggatgtgtacctaccaatgatcaatccaactcaatgcaattcttacaaccatttatacctcacataaccatctaaatcaaatgtttttggactcatttaactaatgatttttgaattttattccaagaatttgtgtaaaccagtaaacaccaacaaaaacgtatgtttttacaatctattttttgattgatttcttcacatggagcacatatataca

SEQ ID NO: 101883 - DNA, 403 bp, Arabidopsis thaliana columbia
agggcaaccattaggaaaaccctaactaaattccattattaatttcttttataatccctttctcttgacattgacttctctctctcgattcttcttctccagtttcaatcaaactcaatttcttctcaacgaaccctaatttccaacaaatcggattcagtttcttcttcggagactaatcgaatcgcaatggctaagagttccttcaagatctctaaccctctcgaggcaaggatgagtgaatcttctcgaatcagagagaagtaccctgacagaattcccgtgattgtggagaaggctggacaaagtgatgttcctgacattgacaagaagaagtatcttgtaccagctgatctaacagtgggacaatttgtatacgtggttcgtaaaagaatcaagcttg

SEQ ID NO: 101884 - DNA, 310 bp, Arabidopsis thaliana columbia
acgcgtcagtgatcctatcctctgttcttcctcgatctgcgcaacgttctctctattactttaaactgccattttcatctatcgattaacccctcttcctcaatttgcctctcagacgaatcttgcttccgcgtccctcctgtgatgttccttaagaagagagatttatcgttgtgtgtgacaatcaaatgacgatgggtggtactgaaaagaatgtagagaataaagagtagcgtttgcctcgagaagtcaaggaagctttacaagcaatagcaatcagagtgggaagatgtgattgattcaaaggctt

SEQ ID NO: 101885 - DNA, 332 bp, Arabidopsis thaliana columbia
agaaattatattaactcaattcatcacagaaccaaatacgagaaagcaaatgagaattcagatgcaaattaaccccaaaacctggagctagaatgttaccttggcagcgcatttcttcaagacgccaaaagcgcggacaattggttcaggcattcgctcgcgctcaccaccgatttcgaagttctgcagcgatctctgcgtctgggctccccacaatctgagacacacaacaaataaaacactgtgaaacgtttccctcgaggataagagaaaattcgacgttgcgtaaagatcagatcccgaacttatcggaaggaacttgaatcggcccg

SEQ ID NO: 101886 - DNA, 403 bp, Arabidopsis thaliana columbia
agaggaactgtgcttaatagtgacaacttcgacaagttaatccatgatgcatttttgttcttggggagcttctctgcctcggattattttccaaatgtcggctggatcatcgactggctcacggggttacaagggcagagagagagaagtgtgagaggtcttgacgcattctatgaacaaatgtttgatctacataaacaggggaacaaagaaggagttgaggattttgtggacttgctcttgaagttggagaaagaagaaactgttcttggatatggcaagctcacaagaaaccatatcaaagcagtcttaatgaatgttcttcttggaggcattggaacttcggctataacaatgacatgggcaatgacagaacttatgagaaacccgcgagtaatgaaga

SEQ ID NO: 101887 - DNA, 331 bp, Arabidopsis thaliana columbia
ccacgcgtcagctcagtggtgatcaagttgttactgatgtaaaagtacaaaagttttgacaaagtacaactgggattttctctaagtggccagttttagacagggacactaattaagtgtcaaaaatgtgaacttttttgttttttttaatgcaaaggtttgtactttttttgaattgaaaattcctccaaaagcaaccaaattatcacaagttgggcatgacataaacagtgacatattaatacgtcgccgaaattgaatctgaagccttgtggacaacgtatatagataatggatcaggtgaatcatcaacttaaagaacgcctggttg

SEQ ID NO: 101888 - DNA, 347 bp, Arabidopsis thaliana columbia
cgacccaaacgtcagctctcgttttctttgatgaacccttttacttcattcttactcttgataaatccaaattcccgagaaacccatttcatttccttcttctgtttctagaaagacctcttcttttcgataaaccgagatccacgaaacccgcatttcctctcgctaatctattctaaatttcgatacttttttttttttttttatcggtttgaatctcgagaattccgaagattcagagtctccatagtcgaagaggctcttgagaatggaagcagaaacgtcttggaccaattatccgtacagctacattacatatgtccctgaagctgaatcataccgtgagc

SEQ ID NO: 101889 - DNA, 310 bp, Arabidopsis thaliana columbia
atctgcttgacttttcttcagaggaactcacttggtctgcttctgcttctgagaatccaaaaggtaccttagaggcttaaactctagtttacaacatatatctatctctctagttttatcacatccttatagagttggaaactttgaatgcatagacctttttttaactctgatcacgaggtcaaaattactgttatgagattaatacatattttcttgggtgaaatttgaaaagatgataataaccaaatttgagtaatcgacaacttaaattaacatatcgaaacaaacaaaccggatatagatatgc

SEQ ID NO: 101890 - DNA, 404 bp, Arabidopsis thaliana columbia
agtatcactttcttcagagaatccaatagatcataagaaactgagattgagattaagaaaaaattataaaaaaaacaatgttttcgttctatgaccgagttttatggtcaaggaatccaaccaaaactaagaagaagaacaaaatgatctttaaaaaatcacagtgtttcatgagaaaacagactttctacacatgatactcatggcctcattcagcatctaatgataatttgacatctcggagaacgttttgtgagtttattaagttcctcgtagatatctgattccgaataatgttgaggacaacccatgaaactcagaatcagtttcttgaggactgctgagttttcgagaaagtaactcgctattttcatatcctgttccccccagtcaaacaatccttt

SEQ ID NO: 101891 - DNA, 410 bp, Arabidopsis thaliana columbia
aggagaaatacaaaaatggagtttagagactagttacttcatgtatcgagtgatactcaatccaaactaaaaatgtcgaagtttcgggtaattcatatacttttgagtctttgaaaaaaataccttaatcggaactaaactggaaaaataaactaaaccgaatcggaatcaacgtaaatgtcagaatggatcctaaactttagaaataaaagaattagaaccaaatcaaaatatatcagatatccaaaatactcaaaaatatatacactcgaataattaaacaaatactcaaccaaaaatccaaaaccgaatgaactcaaattgatataaccaaaagtataagaaaatactcaaactccaaaattcccgtattcttttggatatttgggtatcttaaaacgagaaccaaa

SEQ ID NO: 101892 - DNA, 412 bp, Arabidopsis thaliana columbia
cacgcgtcaggcgcctcaaaacaaagagaagcaaacttcattttatttcttggatcaaagacactagctatgatcagcattttattaatcttcttcaaaccaccccaatacttgtcatacttgtctctcattgccttggcctttttcctcagcttttcatcagggttcttgcttaatgcgatcaaattcctttcaatagtaactatctcattatcgcacttgtaagaactcacagtcgaagatgctgaggcaactaaagttgaattgtataagacaaccacgaacttcaccaacctagctaattcatcccaatcgtctgaactaggcggccctttccttttgttcccatgcactttctctgcaaaataatcgttatacagcttatcttaagcttccattttgtcaaatgctg

SEQ ID NO: 101893 - DNA, 419 bp, Arabidopsis thaliana columbia
acgcgtcaggaaaaaactacaaaacacggcaacaaaacagagactgcaaccaccatttgtctgaatgcttcattggttgacgaaggcgaagccaagggggaatcaatggcagttatgtttccagtgatattacccgccattgttctgttgaatctgcaaaagtaacaacaacaacatcagcaagtaagattcgtttttccagttcgatagattcaagattgcgtaatcagagagagaagtcacccgtcggtagccggagcaatcatgtacaaacagttaccataacctgcaatttcgagagctcaaatgagactactatggcttcacattactcttaatggatgtgttttggaaagtgtatgtatacaaatacttacttggatccttgtcaacttcaacgctggctccattaaagctgc

SEQ ID NO: 101894 - DNA, 298 bp, Arabidopsis thaliana columbia
aaccctaaatttgatgtaagcagagagcgcaggtattattatataatgcaatagagactctctcattcgcagtttctctcagattctctaatttccttgtgtctcacgatttgctctcagaagaacttgagttttcgattctatgaaaaattcacaatgactagtatctatcacgatgatgacgatcatctcacggcttcaggtaaagacctgtggtcgaatttctgtgtactggttgatgcggcggttatgttatatgaagaagaagaagaagaacaacgtcgtaagattgtctctg

SEQ ID NO: 101895 - DNA, 362 bp, Arabidopsis thaliana columbia
aatagtgggcggttggatttttatatatatgactgactaagttatggtcaatggtcaacgacgattatttctctctctttcatgctaattaacaccttcgtgaccaagtctctctttctttctctctcgtaatttagtcaaattcacgtcggtgcccaaattacctttctctataatttgttttttctagtggttattaaattgccataacgagagatttgaatagaaggttggactcggtgatcacgtgaaatcttttaccttagaataagtgatctatattatgcgccgtccattgaatacaactgtattagggcattctttagttttctttgaaatggaactatatgtgaagttatata

SEQ ID NO: 101896 - DNA, 360 bp, Arabidopsis thaliana columbia
aacttcttggtcggtcacaatctgttctgcacgagcactgcacaatcacttggagtctgtgaatttcacatctgaaagaaatacaaactcccatagttttcaattttcacgatctccgaatttcacgactttgatacttggtttctttgcacattcacgcgacgaagatgaggctgttgaaggttgctacgtgtaacttgaaccaatgggccatggatttcgagagcaacatgaagaacatcaaggcttcgatcgctgaggcaaaggctgctggtgctgttatcaggcttggacccgagctcgaggtcactggctatggttgcgaggatcacttcttggaactcgacactgtcactcatg

SEQ ID NO: 101897 - DNA, 346 bp, Arabidopsis thaliana columbia
aggagagattttggtaacttggaaataccagaaaggaaactattgatttgaagccatgtcagcgaataatcttttagcaacataaagcaggtataccttaacggggtcacctggaggagggcggaaaggaacctccacttccaaagggggaccaactggcctctccctgtacctagcttcaacatgttcagcttctgactcgtattgaggatcttcttcagggattatatcatcaagcaccatatcatcgggtctcagatccttctcagagccctcttcatcttcgattggcgatctctacaaaattagacatctcatcatacatacatgcaatttcatatggttt

SEQ ID NO: 101898 - DNA, 353 bp, Arabidopsis thaliana columbia
acccaagagtctctcttgcacaaaaaactgtctgtaaaagggagtgggcatcatcgttgacgcttcagttgtagtactttaacctgctaaagttacagtcttttcaaaagagcctgcgagtgaaatcgatgaatcacagcgaagctaggggttccggtggccataagggttatcggggacgttctcaagcatctgagcaatgggttccggttgcagctgatgataagtctttggaagattcttctggtaatagggttaggggatctcaagggaaaggaagaagtagaacatcgtggtctcctagaaatagttatgggcgtggtaacgatgaacacagtcaagtgcaagcgtac

SEQ ID NO: 101899 - DNA, 356 bp, Arabidopsis thaliana columbia
aatcatcatcacaaggagagggggtttggtaggaaaagactctcatcaaaccttttagcttcttctacctaaccttttttgacctttatataaaaaaccttacatcaaagtaaataaacaagcagatgaatatgatggacttattctttgcaacctaaggcccatctaccattaaagctctgaatgtgatgggcttatttattgcaacccaaggcccatctgtcattaaagctctgaatgatatgggcttattctttgcaacccaaggcccatctaccattaaagctctgaatgagatgggcttattcattgcaacccaaggcccatctactattaaagctctgaatgatatgggc

SEQ ID NO: 101900 - DNA, 336 bp, Arabidopsis thaliana columbia
accaaaagataaagaaaaacaagaaatattttgtttttcgatctgaaaaagtgaaagcttcttcaaaatctttgctttagagatcgtttggtgattttgtttctttattttttttttatagtttcttcttcttgattctttcatatggatggacatcagcatcatcaccttcaccagcttcaatatctcaacaagcatcatcttcatactcaatcgcaaacgccggaaatagcctctccggtagctgtcggggataggtttccacagtggagcgtcgaagagacaaaagagttgatagggataagaggagagctagatcaaactttcatggagaca

SEQ ID NO: 101901 - DNA, 390 bp, Arabidopsis thaliana columbia
accagaaacagggatatggggatggattgattgactttataaactagtcattgattcataaagatgtatttttgttgtgtgtttttgagtgtgctaattgtgtgtctcaaaagaaggtggtggaggtcttgttttacccagacattttctgtttttgtcttttgctattgtgtttgatcaggttaccaaatccattgaaggactgcttcctttgccaaagatccataacccaaatgaccctcggagaatcgagtttaaagagcttgaagctgaaaaggcagtgatcgatgtgaaagctcacactttggtgcggaaagagctttgggctggtctcggttacttgatcctacagactgcggggttcatgaggctaacgttttgggaactctc

SEQ ID NO: 101902 - DNA, 371 bp, Arabidopsis thaliana columbia
  unsure (1)..(371): unsure at all n locations
nagaaaacatacacaaatagcaaaacatggctaacaagctcttcctcgtctgcgcaactctcgccctctgcttcctcctcaccaacgcttccatctaccgcaccgttgtcgaattcgaagaagatgacgccagcaaccccgtaggtccaagacagagatgccagaaggagtttcagcaatcacaacacctaagagcttgccagagatggatgagcaagcaaatgaggcaaggacgtggtggtggtccttccctcgacgatgagttcgatttcgagggcccccagcagggataccagctactccagcagtgctgcaacgagcttcgccaggaagagccagtttgcgtttgccccaccttgaaacaagctgcc

SEQ ID NO: 101903 - DNA, 345 bp, Arabidopsis thaliana columbia
agtatgctcttaagggaagtatggaaatgggaagtgcatcagtaatcggtctcggccaccttgtgggatacgcaatactgggagggttggtgagtggaggagggttaagcttcaatgcatgggtgattaagaggaaaggaccagtgattgtgtctctctttagtccaattgcaactgtggtatgtgttgttgtctctgcttttaccatggaagagagtttcaacctaggaagctttgcgggaatggcgttgatgttcggaggactctacttcgttctgtgggctaaaggaaaagaggattgtgaagaaatagatgaaatgaaacaagatgatgaagaaagtttgc

SEQ ID NO: 101904 - DNA, 369 bp, Arabidopsis thaliana columbia
agattcttcagttcaatctaagtggctcttttaagcgggaagacaacttgaagtctaagcttgttgattcaaaggaacgtttagaagctaaggaatgcgccttgcacaagcttgatagcagcaatgcaagacttgctgactttcttgtggcacaaacagaaggcttaaaagagagtttgcaagaggctgaagaaaaattgattttgttgaacactgagaattccacattaagtgagaaagttagctcccttgaagaacaactgaatgaatatgggattcaaacagaagatgcggatgctacttctggtgctctgataacagatcttgaacgtatcaacgaggaactgaaagataaattagccaaaactg

SEQ ID NO: 101905 - DNA, 401 bp, Arabidopsis thaliana columbia
agggggtgtgaaaaagagacaaaaggagggaatttagaaatgaggtggtgaaggtatgttggattgttgtggaacgatatggtcaataaagcatatcgcattattggagagacattacatatttaccattattcatcttattatttctctgtacttaaaagaacaatgtgtttcaaaaagataaataaagtgacaagaaacctaattattagatatgggtcatttcagctccatgcacattctctttacatattttcttactatttctctataaagagattaacattctaatcaattgccaaaactatcaaagccataaaatcaactactaaatgttcatgtttctatcaatagccataatagttcgcatagtttagatatattcatgcaaccttttgtgt

SEQ ID NO: 101906 - DNA, 394 bp, Arabidopsis thaliana columbia
cgcgtcagctttaattcgtttaattgacttttaggtatttgatattcaataggccggaaattttttaaaccaaagtctatatatataaaagtttattttttttttcataaatttacatcatcatccatattcaactttatcatcatcattaatattatgttgttgtggttaaccatctgaattattgacctactttcgtattaatcaattttaattttgtacttatcctttatcttttaagtatcattccacttatgtatatatgttatccttagaagtccattgactagctttatatcaaattgatattttccacttatgtatatatgttactaaaaaacatatggatactatcaaaaatatatatgttactaaaaactatccatattttttt

SEQ ID NO: 101907 - DNA, 362 bp, Arabidopsis thaliana columbia
agaaacaattttctttatataggaaaactcttgaacagtctaaactctaaagattctacttcagttgaacagttgtgtagatcactcaattactcaccaataaccataaagcttctccgctatctagatcttgaatctcatcaatagctcctaaacctaggattaagctaaagtatatattataagctagtgaaattctccttgaggagatagctttgcattgcactcaatatatacacggtttagcaacgatctttcctagattctaggtacatgagatattaacaaagtcttatctaaacttgtaacaaacatatcgagacgaaatattgaatggaatattctatctcctaatatatata

SEQ ID NO: 101908 - DNA, 385 bp, Arabidopsis thaliana columbia
  unsure (1)..(385): unsure at all n locations
agcggacaatatggaggaagatactgataatgagactcttgaagatgaagaagatgacgagagtgcaaatgagtacacagatgatgaagatgccagctggaaagttaggagagcagcggccaaatgcctagcaggattaatcgtttcgcgttctgagatgctcactaaagtatatcaagaggcctgcccgaaactaattgatagatttaaggaaagggaggaaaatgtgaagatggatgtattcaacacattcattgatctgttgcggcaaacgggaaatgttacaaaaggtcaaactgacaccgatgaatcaagtccanaatggctactgaagcaagaagtctcaaagattgtgaaatccataaataggcaactgcgcgaaaag

SEQ ID NO: 101909 - DNA, 323 bp, Arabidopsis thaliana columbia
agcaggtctaaaactaaacaggcctaaacggctacttgttaaattgccagagcttaaagaggtcaagaaagcatgttttaggtgaggatttgtttgcttttaatctccatttttataggtaacaatgtattttcaatttgttcaactatttagcacaatacagtatagtacataggaaaaatatgcatgttatccttcattattacaagcataattcttataagtccagtaaatttttcataaaacttaaatcctcatatgactcgtttgataaatcatctttaccaactagtcttttaagtatttaacatttgcaataatcg

SEQ ID NO: 101910 - DNA, 344 bp, Arabidopsis thaliana columbia
agaaaatcattacactcccacaaaaaaccatctttagtatgttttatcataattgtcaatcttttacctaacttgactacctctaacttcatgcaactgaactaactagtgtgttcaagataattggtgcaaattctagcaatacttggttcaatggctcttgtccatttgttctattagattaagaaatcaaagtccaattcacaattgttttaactaaattgttgtttttagataatcaatcatgactcatattataacatataatcaatgaataacaaaaattggatttgtggggataaaaaatgatgaattaggaaatgtacatgaaaatctctaaacct

SEQ ID NO: 101911 - DNA, 404 bp, Arabidopsis thaliana columbia
gacccaaacgtcagttttaaatcaatcgtatcgtgattgccatggaaccattttttttattccgtaagtttggtgacaaaacattataaaagttgtttccaactacatttcagaaacattcatttaatggtacgttatttatttccacaagtatattcattacatgtggtttttttcactttattaaaatattggagaattgtaattgacaaaatttattgtggaataaaacaaaatattctacatatcaatttattgaggcgaataaacaaaaggggagcgagatggtcattggtcactatattagctaagcccaaatttgaatctaacggggattggtagatgtttcagagatgggcctacatttagcccaaaatgcggattcagatttttccccgtgacta

SEQ ID NO: 101912 - DNA, 339 bp, Arabidopsis thaliana columbia
ccttgctcatttccttgagcatatgctattttatgcaagtgagaagtatccggaggaagatagttactccaagtatatcacagagcatggaggcagtacaattgcttatacagcctctgaacagacaaattaccatttcgatgttaatgctgactgtttcgatgaggctctggacagatttgctcagttctttatcacaccagtaatgtcagctgatgctaccatgagagagattaaggttgttgactcagataatcagaaaagacttactctcagatggttggcgaatccgacagttacagaaccatcttaccacagaatgaccatccgtatcacaaa

SEQ ID NO: 101913 - DNA, 345 bp, Arabidopsis thaliana columbia
agagaaaacatacacaaatagcaaaacatggctaacaagctcttcctcgtctgcgcaactctcgccctctgcttcctcctcaccaacgcttccatctaccgcaccgttgtcgaattcgaagaagatgacgccagcaaccccgtaggtccaagacagagatgccagaaggagtttcagcaatcacaacacctaagagcttgccagagatggatgagcaagcaaatgaggcaaggacgtggtggtggtccttccctcgacgatgagttcgatttcgagggcccccagcagggataccagctactccagcagtgctgcaacgagcttcgccaggaagagccagtttgc

SEQ ID NO: 101914 - DNA, 347 bp, Arabidopsis thaliana columbia
aggcactgttgagtcttttgagactgcacttgactcattggtgaggacaaaggagaccattggccgagcaactcgcttggctatggacttggcgaaatttggcgtttcggcaaaggcgatggaaattctggcccacactttggaaagtgagtcaaatttacaaaggagggtggatttatttttccttgtggattctattgctcagtgctccaaaggtttgaatggtgatgctggtggtgtttatctttcatccattcaggctatgctacctcgcctattaactgctgctgtcccagctggagctaccacacaagaaaaccgaaaacagtgcttgaaggttttgaggc

SEQ ID NO: 101915 - DNA, 373 bp, Arabidopsis thaliana columbia
agaagacccgtttgagacaaattatgagactgttgagttacagaatcaacatgatgtactcttggaggaactggaatctggatcttcacagctatgcagtcttgaaagcgagctggagttgttgcagatggctgcggagaggttattggatgacaaaaagccgggtgggtcatatctcgaacagcttaatcaacaactagtggtcaaaaggtgtaatatcatggatcttaaaaagcaatgggacgatgtaaggctgactctggaaactaaaaagctacttctcttggaccaacttcatgtggaggagccagaggctaaagagaaattccataagttgagaaagactgaactggatttacaatctctctcatca

SEQ ID NO: 101916 - DNA, 349 bp, Arabidopsis thaliana columbia
agaaattttcgtttagccaaggttttgtttctcttttgtgactttttgaaattaaaaccctcaagcattaccaaaaagatgatgccttaaagcaaatatgccttaactcacaagattctctgtctctctcttccctctttttcttattctttctctttcttttcttgtcctctttctcctaaactctttcgaatctcttttttcctttttctttctggcttctctatcaggaagattccgatgagaaactcgccgtctaagcacgggtcggcgggagggcattctcgtacttttacagacacaatctggtctccctttgtcaagtccggtttgggaatatctcccaaca

SEQ ID NO: 101917 - DNA, 320 bp, Arabidopsis thaliana columbia
agcgggatgatgtttccaatgcatggaactttgattttgatgacgatgaatcagacggagcagaagttgctgcttttgaatatgcggattccagtaaaaagaatgaaaaccttctccgggagggtttgagagatcctgaagaagaatttggtaatcttcctccaggagcccgagaaagttctgagtttggcagaagcagaagacctggagttgggtttgatgattttgacgatgaagatgacattgatagctatgaaatagacgaatctaaagagagagatgtcccagtggaaggagctcgatcttcttttgcttctgac

SEQ ID NO: 101918 - DNA, 384 bp, Arabidopsis thaliana columbia
agaccaaattgataatggagtagctgctgggatgatgatggggattcctgttgagcttgaggttaccacggttgagaatcataatgaaatgggtgaaagctctggtcaagcaatgattgagcaagatgatgacaaccataatgaactcggtgacaattctggtgagcaagatgagaaggtggatcttgattctattcctctggctgttgcagatatgacagaggctcaaggagatgagccttatgttggccaggagttcgaatctgaagcagcggctcatggtttttataatgcgtatgctactaaagtatggttcgtcatccgtgttagtaaactgtcacggtcaaggcatgatggatctcccataggcaggcaacttgtttg

SEQ ID NO: 101919 - DNA, 273 bp, Arabidopsis thaliana columbia
aacgtcagcaatcagtacgcatcttttgtccatttattgagaattggcttgagactggtattaagtgatacattgctttcgttttgtttgaatgtatatggattaggtgaagaagctgcatgggttctgtaaaatggagaaatcagatgatcttgtggctagaatttatccacaattcaataaagtcttccatcgttcggttgcttcactatctcagtccgagtcaggggcgtccaaaggccttctcttgctagtacattattctccctgaag

SEQ ID NO: 101920 - DNA, 373 bp, Arabidopsis thaliana columbia
gaagaaactagagagggttttttgacctgattatttattttggctgactcattcttctcacatcccaacaaattttcgttgatatctgtctctgtcttcatttccgacatggaatttgttcaacatcaattcttttctttagctttatgatccctcacaaataaataatgtccctctctcaatttgcagcaaaccgctgacgatcaaaaggtgagccaagtcttttacatgtcgataattaggtttggtcaatgaaatgtttgaatgtttcattcttggtttctgataccatgagaagaagtttggtttcaacacatttttttgttgttgttgtgatatctaaattctgatcatttcaatttgatcaaatgat

SEQ ID NO: 101921 - DNA, 364 bp, Arabidopsis thaliana columbia
gagagagagagagagagagagaaacagagctcaagatcacgagccttccttcttcatcttcttcttcatcgagagcgatcaaaggaacaaaaaggatctcaagaaacccacttgtgttgttggttagatacttcacgggtctctgaaaacgtctctttctcacaaccataacttgatcacccaatactccttttctcatcttaaaggctcaaattcatccacgtcacaccgttgttcatttcctctgatgtcttggtgtcgttagatattgtctcccaaaaaagaaatcttcttgacacagagattgacgtcgcaaagagacagaggaaagagaggaaaaatggatcgaccagcagtgagtggt

SEQ ID NO: 101922 - DNA, 397 bp, Arabidopsis thaliana columbia
cacgcgtccgacggtgtctcctcagacatttcaatgtatgttggtgccaagagggaaaagggctataaagctatataggggtgggtgtgtgtagtgggaattttgcccgcacgcgcgcgcgcgaataagaataagaataagtaataagaataagaataagaaaaagaaaaaaaaaaaaaaaaaaaaaaactccatagagttgttttctcaatcgggtccgaggaatcgtcgaccgggtccgaggattttgccgaccaggggttgaaatcgtcgaccaggtccgagacttcatcgaccgggtccgaggaatcgtcgaccaggacgatgaatggtcgatgaaaatctatcgggttcgaggaatggtcgaccacgggttgaaatcgtcgaccaggtccga

SEQ ID NO: 101923 - DNA, 266 bp, Arabidopsis thaliana columbia
taacaaccaccgaaagaatttaatcaaaattgaatgaagctttcttcctctaaactctttggccaagtccttcatcgttctaatcgattgtgataagatctttctagagatctaatcagaaccttgtgccgcggatttggagaaacatcatcatcatcgtcatagaaatcctgctctttcttcgattctgtaagagttcttcgagcagactctagattcgatttgttttttttccttttcgggtttgtttcaaatcaatctcaatt

SEQ ID NO: 101924 - DNA, 163 bp, Arabidopsis thaliana columbia
aaactttatttgatctgcgtgatattttcgtatatctaaccacaacataagagcatccccaaccacaatacaccaaattttaacaccaaatttgatattttggtgtttcaattgttttatcatctccaaccataacaccaaatttcacactaaaagtattttt

SEQ ID NO: 101925 - DNA, 138 bp, Arabidopsis thaliana columbia
tgtgatgcaaacagatgagatgtgatcagaagtcactaagtcaagccaagcaataacagttttggggtttctaacagtcctaagtgaacatgcagaaaacagaaacaataacagaatcactaaaatcactcgaccaca

SEQ ID NO: 101926 - DNA, 385 bp, Arabidopsis thaliana columbia
cgcgtccgacagagtttgggtttctctccgctttagggttttctgtggaagaagaaaaaggcgggggttttctctctctttgttctgaggtttttttttttttaatgtaatcagagtaacgacattggtagtatctggggatggaggaaacgattaggaaaggttctgaagtggaagtgtcttctacagaagaaggttttgcagatgcatggttcagaggtatcctccaagaaaatcctaccaaatcaggtcgcaaaaagctccgtgttcgttacttgactctgttaaacgacgacgctttgtctcctcttatcgagaacattgaaccgaggtttattcgaccggttccgccggagaatgaatacaacggtatcgttttggagga

SEQ ID NO: 101927 - DNA, 257 bp, Arabidopsis thaliana columbia
agaattgaaagtttagattttttgaaaaataaatgcggcgtttgtagcttcgatgtggcggttagggttgcgaggtggtggaggtggaggtgaaacgttcccggagcgacccgatgaacccgattgtatctattatttacgaaccggtgtttgcgggtacgggtctcgatgtcggttcaatcacccacgaaaccgtgctccggtaataaaaactctctctctctctctctttctctctctctccccccttccatgat

SEQ ID NO: 101928 - DNA, 333 bp, Arabidopsis thaliana columbia
accacgtctccggtcagttatcgctactctaagcagagcacgacccggtaaccaaaactccgggctcgggtcacgggtcgtgggtacacttttcgggtctcgtcgtggtcacgtgcatttctctatccagaaagatcctaattctccaccggcgtttttaatcgaactcgctactccgattagtgggttagtcaaagaaatggcttcaggactcgttagaatcgctttggagtgtgataaggggaaagaggaagaagaaggagaagaaaaaaacggaactttacgtcacggcggaggagacaagacgaagacgacgacgacggcggcggtttc

SEQ ID NO: 101929 - DNA, 395 bp, Arabidopsis thaliana columbia
  unsure (1)..(395): unsure at all n locations
agttttgaagcactcgaatcaacaacacctttacttaataagcacgcatacggtaatacctctaagcctggcacattcaaaccttgtatgcatcatctgaacccgagtttttatccgttatttctccatcnccacctccaagagtgctaccatttccgaagtcagaattttcctcgtcttcaatccacccgttactgttacccactccctgaacctctaaaccattatctctctctactttcacagatgcatgtgacacataatcagtagcttcttggggttgttgcgtcctctgtgtattcgaggaactagcgggatattctattacggatgaacaagcagcatgatcagtaacattatcagatgtcgatttcacttccaaatacaactccaca

SEQ ID NO: 101930 - DNA, 283 bp, Arabidopsis thaliana columbia
  unsure (1)..(283): unsure at all n locations
actgaaagaaatgaagtcagagaagctctaaaagctctctaatggaggacaagaaagcanacataatcgctactatattaatcttagcccttgtcgtggtgataatcgccgcccgagtttctctaaaactctccaaaacattctatctcatagccggcgtcgacatttccttgatcctcgccgtgatctgtttcctcataatccgtagccgttacaacaaagaaagaaagctcttggtatcaagattcgtctccgaaggcagagagctacgaatcgagtacag

SEQ ID NO: 101931 - DNA, 383 bp, Arabidopsis thaliana columbia
gtgagttttgaatctgggctttgtttcttttgcttgattttgccccaggtaagcggagagggctcttatgttggggtttagtttgagattttggttggggtttatgcagtggggggcgtcctcttttctttttggcaggtacagaggaagctgcaatgacttcctcaggatgtctgggtaaatcttcagcagacaactgatcatttaactgtcctggttccaaagaagccaaaaagttttggttagatatagtggctgcttctatcatttgggaagctgtctcagccatgagtcccttagcttctccttgtgccactcttctctttctagcagcactttcagtagggtctgaacagctgatatattgaactgtaacatccctg

SEQ ID NO: 101932 - DNA, 440 bp, Arabidopsis thaliana columbia
gacccacgaatccataagactttagttgtggaaactcaagaaactgttgaaattgaaggagacttacttattgcagctgatgggtgtttgtcttcgattcggaaaactttcttgcctgactttaaactgaggtttgaaataagagtgtgatcttcatttatcgatattttgtggacttgatcatataggattttgtttttttcgttttatgtgaaaggtactctggttattgtgcttggagaggtgtatttgatttctcagggaatgagaactcggaaacagttagtgggattaagaaagtgtatccggatcttggaaaatgcttgtattttgatctcggtgaacagactcatagcgtgttttacgagctttttaacaagaaactcaactggatttggtatgtcaatcaaccagagcctgacctgaaagtaagaagacta

SEQ ID NO: 101933 - DNA, 262 bp, Arabidopsis thaliana columbia
caagtatttgtaatgctacgaaagataaaaatcaattacttcttggtataagacgagccaaccgaccacaaactgtcatgccttcatctgttttgtcaggtgacaggatgcatttaggccttcttgctggggcagcgggtgctgccgctacaaacagccgattcaccatcttctataacccgaggtatcgtcttaagtaccttctgaatgcacttatgtgttgattctcttcgttttgcatcaaacggattcggtttttctg

SEQ ID NO: 101934 - DNA, 266 bp, Arabidopsis thaliana columbia
caattgtcccctgagaactcaagaatactcaaatttcaggaatctaacttgactaatctgctaacaagaagtaagagatcatggactattaagacaatgtaactgaggtatatagggcaaaaacagagaaagcagttgaagaattggaaggaacacgaagactatcagtcttgatcaagacataatcttctcctttcctagattgagcagcttgtccaaatctcacaatcggtttctccattttagcagctttcgtctctctactt

SEQ ID NO: 101935 - DNA, 190 bp, Arabidopsis thaliana columbia
caccatcaccaccaacaacaaaaactccatcacctccaccaacagcaacagcatcagcagcaccagcaacgactcacttctccttacttccaggaccatggggaccaccatcaccaccttccagcgggcctgggacccaccgcttctaccggaaacgccgttccatcttccaacaatgggcttttccctc

SEQ ID NO: 101936 - DNA, 231 bp, Arabidopsis thaliana columbia
ctaatatcacaaaaaaagagaatatttaactaccttacctcaaagtgtatgcttaacacaagaagaacatggcgtcttaccagaaccgtccaggacgtcaggccactgaccactacagaaaccggatccaggggcactatgacgagtaccgaaatccgatgggaggaggaggatacggaactggtggtggtggaggacctacaggtggccaaggataccgaacacgtggcc

SEQ ID NO: 101937 - DNA, 262 bp, Arabidopsis thaliana columbia
tgatactggctcctctctgtattacgatataacagatcttcaatcctggcttgcctctgctcctgctgttggagatgctgttcaggggcctgagctaggcgactgggatcatgttcattttgattcaggggctgggggcccagttgctgttctctatggggctgttgggactgattgctttaggaagtttcacctgtcgcttgctaaagcatccaaggagggaaaagttacatatgttgttataccagtattacctttgggt

SEQ ID NO: 101938 - DNA, 145 bp, Arabidopsis thaliana columbia
gaagaagagactgatgatgaaagcttaatacgtgacaaagtcccaagctttttcatcaattagtatatagattagaatgttctgttttgtcgcctgttgttgactgtgttgtattgtctttagaataagggcaatttaattgatt

SEQ ID NO: 101939 - DNA, 169 bp, Arabidopsis thaliana columbia
aaaaattgcaaacaagctcttcatagtctgcgcaactttcgccctctgcatcctcctcaccaacgcttccatctaccgcactgttgtccagttctacgaaggggagcccagcaaccccatgggcccaaaacagaaatgtcacaacgagtttcatcaatcacagcaccta

SEQ ID NO: 101940 - DNA, 265 bp, Arabidopsis thaliana columbia
gcgtccgggatatgacgttagctttctcccagattatggtggagaaaacacttttagcactcaagatgtggaagcaggtttaaagtttgaaattcttgatggaattctggatggagttgatggggtggaagatatctacgcatcacatgaacttggtgctattgttaaccatttccctccagaaactgaagtcaagaagaatgaattacagggtgacccctatggtcttatgaacttcagttcagaatcttattctcctggaatt

SEQ ID NO: 101941 - DNA, 206 bp, Arabidopsis thaliana columbia
tgagtacctctacatgatagacctcaaaaaaaaactgaacactaacggcagcaagtaattgacttcagtacttcctcatataaaattattgactctagagatatagtggtgggcagaagacaaaattgtttcaaacaccgagagaaccataatcgccccttgtttcaaatagaggaggacgggttattcacatttcatttgatggt

SEQ ID NO: 101942 - DNA, 191 bp, Arabidopsis thaliana columbia
taagtttggtcaacctaaaggtttaacaaaagtcgaatttgtggaagtataagctgttcagaattcgcttattttgaacgagtcagaactacatggtcgtcacatgggggtgcaaactcgttcaataccatatactgagtgagtttccatattacgatttgtcattactaaactttgtttaatctattttc

SEQ ID NO: 101943 - DNA, 257 bp, Arabidopsis thaliana columbia
acttcacaaggttgacgcatacctcacgcgcaacaaacttgctacgattgacatgagcggatacgagcgtaagaacacgacggcgaactcaatcaccatcaccaggcggaggcgtaactcgatttcggaacaatcggggaacggggaggagaaatcgaataggaaggagtcaataaccttaaaacctcaccgttcttttacgccgggattcagccagcgtgattgtaaacctgtcagacatagtaagtcttctctcc

SEQ ID NO: 101944 - DNA, 180 bp, Arabidopsis thaliana columbia
attcaaacttaaccaaaataccactctccatatatccaatgcaagtacctgtaccattctcgcacacaccatctccaatatatataccagcgggtacttccactgtcttcaccataccaaatcgggcgccacaatactctcacgttcatgcttcacctgttacacccacccgaacatatc

SEQ ID NO: 101945 - DNA, 246 bp, Arabidopsis thaliana columbia
tttcaaatggcatgacataacattttgcacataaagttgttccatggattagatgtcaacatcgccggtgcttcgtcgtctcttattcgctatatttcactccccatttggttgtctacgttttgtaatatgtttcttctgtggaaacgcattgtaatacttttggattcttaacttcttctatttccccatttgctcaatcttcttattgtcttgttgtttacctttttgtgtcatcttttcttt

SEQ ID NO: 101946 - DNA, 310 bp, Arabidopsis thaliana columbia
taacagagcggagggtaatatcatcaatagatcatggcacacgaaatgatcagagccaaaaaggaacgatgaacaagataggagatagaagaaacagcaccttcggatcctgtgggacctgttattacaggaaaattggcaaaagaggataaagaagaacacaatagtctcatgtaatcacacagagaggacattcttggtctgataaagcatcttgagagtttgtggttttgcaatatggctttggcttcttgcgtatttgagatacagacctatttctaagtaaacgggacttttaactatcattttc

SEQ ID NO: 101947 - DNA, 360 bp, Arabidopsis thaliana columbia
aactaagacatgaatgcgaaaactacctttacaaatgctattttgtgtatccatttcaaaaaaaaacatgtgagttcatcttcaaaaatatccctcattagatataaaaggtttataaagctttataaggtacttatgaatcgtaattaactactatttaaatactcgatccaagttttttttatagtttatatatacttatagatatttaggtgcatatttaataaagtttttagggagaaaacatttttaaaaagttgtattgggaaatgaacatttctagcaactcttccaattttttttttttggttttaatgtgaagattccattcataaaataaaagttttatgaatggaattg

SEQ ID NO: 101948 - DNA, 376 bp, Arabidopsis thaliana columbia
gccaaattccgtagacgttaccttcgtggctaaggaatccatgattcctgaatgggagaatgaatcgcatcatcgaacaatgtattttatcaatcgtcggagaacgtctatcctagtttctgaaccgccgggatacatttctttcctggatgtcatggcaacagtggtgagcgaggttttaggctttccaacttccctgcctataggatcattattttcatgtcctgaaggatctgaaactgaaattaccgcttacctgagactatgctcttattctcttactaacaccggcacagctgatagttctgttggccaagagataatgccacaagatgctgtacaagtacagcttcaccctctgagaccattctacaaa

SEQ ID NO: 101949 - DNA, 293 bp, Arabidopsis thaliana columbia
tcttctttctcgtgaagacaccgctctctactcgattcctatgattactctctagatccttttcaatttccccccgaaaggtttctcgattttgatgccgggaatcggagcttggagctaccggatcttatggagtgaagcccgatcatccgtttctttgttacaagttgtcgttttgtagctgcgaagattcctcggagaaggagatttggagacatcaacggcgccattctcagctcggcgatcacacggacgttctcgttccttgaatctgcaggaacttttccaggatt

SEQ ID NO: 101950 - DNA, 411 bp, Arabidopsis thaliana columbia
aaacaaataatcgataaggttttgatatttcgaattcaaaagatcgaaaattcgcgtgtggttatttttttatttattattattattctttttgggttcggtttttcggatatataaaaagagagtagacattataggagtagagtcaaactatgatactaaatattctatggttttacacaacaggccatggcgaagttcatggggaaaatcagagagaacaaagtgaaattcgatacgaacaagatggttcttacagctggatcaacctcggctaacgagactctaatgttctgtcttgctaatcaaggagatgcctttcttatccctgcaccttattatccagggtacgtgtatttttttacactaacgtttttgaatatgttagtgttatttacaagagagactaaa

SEQ ID NO: 101951 - DNA, 369 bp, Arabidopsis thaliana columbia
gtattagcatttctgaattccgactctgagaatcggcggttaccgggaaatatgtcggagactgatagagagcgtccgttattagcatcggaggagagagcttatgaggaaaccgagaaagttctcatagtcggaatcgacgaagaagaagacgctgattacgacgatgaccccggaaactctcctaaattctcatggaagaagctttggctattcactggacctggttttctgatgagtatcgctttcctcgatccaggtaatctcgagagcgatcttcaagctggagccatcgctggttactctttgatttggctattgatgtgggctacggcgattgggcttctgattcaacttctatctgcccgt

SEQ ID NO: 101952 - DNA, 354 bp, Arabidopsis thaliana columbia
agacgaagagaaagccttgtcaaaatctattcttggtggcagcatgaatacatgcacgacaagagtcataaacttccttcggatggagcgtgtgatgcaaggtaatgtgcctgccgccgtcgctaaaatagtaacaagactggtgatgtcagagaagcccatcgacgggacagtaccatggtatcaaggggaaatagatgatggtgatggttttccggctgaagatcatatgttagcattgcccaatactcacatcgccgatctacttgctgctcaatttaaatcactgatggtccgtgaaggataccgcatagatgaacatattcatgagaagccaagtcgcggggatgctgg

SEQ ID NO: 101953 - DNA, 356 bp, Arabidopsis thaliana columbia
ggaggcaacaactatctccgcggcggagcattttccgatgaggttgatagtacctctccgtggagtaattcaaggccgtggtggtctcttcgtcgggtcgctcattccttgttgtctcttctactttctccagctctaccttaaacgacgccgtcctcctccctccgacccgacggagttaccgagaactttttcacggactaatctcttctctcgcgggaactcgatcggacgagttcgagtctcctctcgagcagttcctgtagctaaaccttccgattcgccttattacattgggttggagagagtcaaaacggatccgtacgatcggattaccaacacggatgggattattc

SEQ ID NO: 101954 - DNA, 345 bp, Arabidopsis thaliana columbia
gaccaaaccgtcgaactgaatttgcccttaaaacatcattctttgttgtttttctaattggtattgacccaattggacaactttcaccggacatactccataactgattaaaactttcctcatatgttgtttcatttcctttacttggcctgtaaggtgagtcctgcatgtttatattaatagaattacttcttttttatacctaaaacttacaaaagaagtaaagttaaagagtagattcattacaagtggtttctggccttgtagctgaggatgatcaaatgcgggttgtatttgatacggtacacattctattacatctccgtctgggctctacagtttcac

SEQ ID NO: 101955 - DNA, 412 bp, Arabidopsis thaliana columbia
taaacaagtacaagaacacatcgctggtgctataagcaacatcgccgccgttgaagaaatcagaacaacattagctgaagaaggagctataccggttcttatccaactcttaatctccggttcatcatcggtacaagagaaaaccgcgaatttcatctccttgatctcatcttccggtgagtattacagagatttgattgttagagaaagaggaggattacagattctgattcatttagttcaagaatcatcaaatcccgatacgatcgaacactgtttgcttgctctctctcatatctctgccatggaaacagtttctagggttttatcttcatcaacaaggttcataatccgattaggtgaattgataaaacacggaaacgtaatccttcaacagatctcaacttctctt

SEQ ID NO: 101956 - DNA, 260 bp, Arabidopsis thaliana columbia
ttgatattgattaggcatggagaatcgttatggaatgagaagaatttgttcacgggttgtgttgatgtgccattgactcagaaaggtgttggagaagctattgaagctgggaagaagattagtaagattcctgtagatttgattttcacttcttctttaatccgtgctcagatgactgcaatgcttgccatgactcagcatcgtcgcaagaaggttccaatcatcttgcacaacgagagtgtaaaggcgaaaacttggag

SEQ ID NO: 101957 - DNA, 405 bp, Arabidopsis thaliana columbia
cagcctcagacttgatcaacttgcaagcaaaagagatggtgcaaaaggtggaagcaaggggtggtgagataggagatgtatgggatgatggtgcttacgacggtgttagaaaagtatacgtagggcaaggcgaagatggtatagccttcgtcaagtttgagtatgtcaatggttctcaagaggttgttggagatgaacgtgggaagaagactttgctaggagctgaggagtttgaggttgatccggatgactacatcgtatacgtggaaggttatcatgagaaagtttttggggtaacaacaaaagaaatcatctccactcttactttcaagacttataaaggcaaaacttctccgccgtttggaatcgtctcggggactaagtttgtcctccaaggtggcaaaa

SEQ ID NO: 101958 - DNA, 360 bp, Arabidopsis thaliana columbia
gagaaagatctcgccggagatggagagtgttctcgaaccaaaacatcaaagcctcgattctctaatctaaacaaccaaactcatcaagacgacaaaaccggtcagtatcatcagaaaggcgtcgactttctcaacgtccggtccaacaatctcgatggtgggttttcttcaaaatcatcacccagatcaggaaacgagctcactcttagctatctctgtgaaaactccggtaaactcgctgaaagtcttggtcaaaaggggaaagaagtagtcaccttttctgagaattcaagctacgatgataaatgggtcgagagagatttcttcaatttgagagaaatgaatccgaattcttctaaa

SEQ ID NO: 101959 - DNA, 413 bp, Arabidopsis thaliana columbia
aaattctctagcatagcaaagtagaagatacattaaggtaccttacttaggagataaagtgtccaagtgaggacagatccagtggtttcatgacccgctacgagcattgagagaagatcatctcgtaactgcacacttgatacctgaaaaccctcacaatgcaacatcagcttcgattatgcgataatgaaaggccaaatttgcttataaacttaaggaaaaaagtttaaacctcttctctgcttgcaagcaagaaacgcaggatacttgggtcagcatcatttacatactcctcatcattgattctttcgccttctctttcgacaatttctttacacttagcaataaggtcttcaacagtttcccttatcaaagttacagccttttcagctttcacctgtctcgggactatc

SEQ ID NO: 101960 - DNA, 374 bp, Arabidopsis thaliana columbia
gcagcagcctctcaatggtagacataacaacaacaacgagaagcggattgagaagcagcagcctctcaatggtagacataacaacaaggagaagcagagagagaaacagcagcctctcgatgttagacataacaacaacgactctggtgagtaggtttgtgtgtcttccttccccggggaaggaagttgtattcttgttgggtctaattaccttatcaggacattgatgacattctttcttcaaattgttgatatgaatttgaagaaagcatcattcggattcgattgcctattcgaaggcagaaagatcccgaggtgatgatgaccaataaggatcaagaaaaaccaggtccttctcggggaataaagttaga

SEQ ID NO: 101961 - DNA, 328 bp, Arabidopsis thaliana columbia
aaaatcagcatgagatgggaggatggtgacaacaactcctgtggaattccttcacgagttgttcagtatgaagcgcttgattcaacctcaaacgactcatatggagtgtggaagatagatgataaggatagtagtagcttaacacagaccttgcgcattaaatatgcaaggcaggatgttcgtctctgcatgatggtctcatttactatgcctctggaaagatatgaggggtcaggtacatcggctgttatattgaagtttgagcttttggattctccaatcatggaggatatacctgtgacacattcagatgcttgtgctgcggcag

SEQ ID NO: 101962 - DNA, 373 bp, Arabidopsis thaliana columbia
gctgccacgtgttgatacatctgcatcgaggtttttattttcaaataattggtctcccgagatgatacagtcgctacaggcccagatattattaagcccacggtattccaacttcataatcactaggataatatacagtcactacaagcccggataatagcccaataagcttcaagatcgtttggcgatgagattttaattcggaactaagtaaccacgtgtcagtacctcgtcaaagtagctccatgcagaactgacacgcccgcgtgacactcttctccattgcctaacacgcctcgtcgttcgacacatgtctcgtttaagtttagcctctccttcatactagtctattttcattcttcataataatcac

SEQ ID NO: 101963 - DNA, 429 bp, Arabidopsis thaliana columbia
gcgatttctccacctttccacaatcccctgggttgttccacgaccttttttctcgaaatgggtcgttcctctcgtcagattcgtatatatagcttcttccatcgattccgattcttcatcaagcagataaacaaacaaacagaaatcaaataactcactttccaatttcattcaattactgaaggtgttttagcaacaatggcgacgaaatcagataaagctattggaatcgatctcggcactacatacagctgtgtcggagtttggatgaatgatcgtgtggagattattccgaacgatcagggaaaccgtacgacgccttcgtacgtcgccttcactgatactgagcggctgatcggagacgcggcgaagaatcaagttgctttgaatcctcagaacactgtattcgatgcaaaacgtctcatcgga

SEQ ID NO: 101964 - DNA, 401 bp, Arabidopsis thaliana columbia
gtcttgctcgtgttttcttggtaacactacttggaaaataatgttttttggggtctagggcagagcactctgttttggaaacttatagggttttttcttgtttgtgggtctaaaatcttagaaagaattatgaaaagttttgtggatcttgttgcaggtgctttagttgcagtggaatgcattgacgagaactcgaaaccgagtttcagacaagaagtgaaaacagacaagcgcggcgaattcaaagtgaagctaccattctctgtgagcaaacatgtgaagaagatcaagagatgctctgtgaagttgctaagtagctcacagccttactgttctatagcttcgtctgctacttcttcttctctcaaacgccttaaatcaaaccatcatggagagaatac

SEQ ID NO: 101965 - DNA, 301 bp, Arabidopsis thaliana columbia
ctgaagtgacgggcagtgttcccttagataatcaaacccatctgacctcataacagctgcatcaagaaaaatgtttatgcaatgtaagtttggtgtgaaatcaatttcagtgatgagcctgtcagaaaagatcattaccgatgagattttctgctgcgaatttcagacaaacggatttcaaggcggaagcattgtaacggtcagcaagcgccaaaatatttgcaacggaatctactgatatatccttgcagagcactgactcgcacattagacttagtctaggcaacttgtatttatcagc

SEQ ID NO: 101966 - DNA, 422 bp, Arabidopsis thaliana columbia
ataatatcccacatcgctttaaaaaattagacaatagtttagagtcatactataaaaaaggccaaaatgattatgcctacgaataaacaagaaacttgagttctcaaacgtccaaactaaaagtgttcggtttaatccggttctttatttcaaagaatggaaacttttaaaatgtttcaaaatattataaatatttaacctttattaaagtgaaataaatttaaacattataaatatttaaattatattacgggtgaactcctagaattgatgggtttaggtcgataataataagagactgtatattgcgggtgaaaacctagaattagtgatcaaaatataattatacaatctttaacactacacaaaacaaacaatattaccaaaacaaatacaacttttttaaaacgcatctcgattct

SEQ ID NO: 101967 - DNA, 352 bp, Arabidopsis thaliana columbia
gcccacgcgtcgggaccgtgggcttcatctattatctattttctttagttattcactagagcggtatgatctggaagtcgatctgggcaagtgttcggatctattatgacatatccatagggtgctcaacggacccttttttataattaaaaaaagttttagcgcctttacattggtacacagagagctttttttataacctaatcgagtgtattcatatttcaattattaagttccgaaatgtagcctattttttttatagataatattatcctatttcaataaatgcttattagtcattactaagaaaaagtctagtattgatatttagtcattttgaaatatcttttat

SEQ ID NO: 101968 - DNA, 423 bp, Arabidopsis thaliana columbia
atctcatcgatatcatatataacgtatggaattttcacatgattttgtcaccttatggttgtctccattttcttttgttcataatctttcattcttgatttagagcgagttttgatggtatttttaacatgtatttataggctcttacgaagagatacgtcggagaaggaagactagaaaatccgcctttcaagtttgagaacttaacagaattcaagatttcctttataactccaacattttgcactctatttgacatcgctgaattgctcaaagagtgccctaaactcaaacaggttgtgatcgatgtaagtctctctctctctctctccctccttgtccctccctcactgcttccttatcgtctacatataagttcactaaaacttttggttgctatgtgtagattcagaatttcacatt

SEQ ID NO: 101969 - DNA, 365 bp, Arabidopsis thaliana columbia
aaaaaaactctactctcggtggcaccagatcactcctccttctctcttctcctaccgttttcacattctctccttcttcttctcgtgagacttcgagtgagagactctttattcattagatcgaggcagggatgttcagatcgccgacttcaggcactactgcatcaccatctgcaccgtgtccttgtacagactcgacaaccaccactcctcctccagcagcctcttgtcctccttggaccacaactccttcttctcctcctccgtcgccggcatctatttcaacctctcctcctccttcttgtgctttacctacttctcttcctcctccatctcctcctggatctttaactcctcctcttcct

SEQ ID NO: 101970 - DNA, 423 bp, Arabidopsis thaliana columbia
aagaatctgaattttttctttttggcgactttggagtctcggtgaagccagagaacatggtcttctgtctgctgctacgtgtgccggttttatgccggctgctttgagtaaggttagatgatttcttagaggaattcgtcactgatccgacaagcttctgttgtgttctagccttcattttctgaagcaactcgtttggttcagggtaacgaactaatgcaactcgccgagtaatcttcccaactatcataaaacgaacaacaacagaagaatcattattaacgaaacaggtggtaaaacaaaactgtgtaaactgaacgaccaaaacctaaacaagacacaactgtaaagtaatgggaatataccaatcattgattcttcagaaggtataatcaactctgcaccagcatcttgagaatgaaa

SEQ ID NO: 101971 - DNA, 393 bp, Arabidopsis thaliana columbia
ctcgcctcttctttaatttcctctgcagagaatcctccttacgaaaatgttcacgaaagcggcattgaatctttcacttgctcctttgctacttgtttttcttttccttctctcgtgtgttgttcatggcgtctatgagaagaagattctcagtgtacataacaacatctggtctcccaagaaatcatacgaagcttcaacttcatgtttttctcgcagtcttggaaaaggaagagaatccactacattggagatgaaacatagagaactttgctcaggaaagactatagattcgggtaagaagatgagaagagccttagttttggataacattcgagttcagtcacttcaactcaaaatcaaagcaatgacctcaagcaccactgaacaatc

SEQ ID NO: 101972 - DNA, 420 bp, Arabidopsis thaliana columbia
actcaagcagccattacatatgttgatgtctacactgcgaaatatgaaatgatgagcaatcccaagaaactaggatttgcaaaccccttgaaggtatgttgcggctaccatgagaagtatgatcacatctggtgtggaaacaaagggaaagtgaacaataccgaaatctacggtggctcttgtcccaacccggcaatggctgtgagctgggatggagttcactatacggaagctgcaaacaagcatgtggctgaccgtactctaaatggtttgctcacagaccctccagttccaataacccgagcttgttatagacagtgagatttagtagaagcgctagatgaaccgaaataaagatttgatccttagactcttagggcaataatgtaagtgttttaaggaacaatcaatgatctatgc

SEQ ID NO: 101973 - DNA, 120 bp, Arabidopsis thaliana columbia
ggacaattacgacgacagcaaaaaaataatatgtgtggacacacaatgacagactgacattgaactagcttgaaataaatttatactaaagagtagggaatatataatcagtaaatagaa

SEQ ID NO: 101974 - DNA, 273 bp, Arabidopsis thaliana columbia
cggacgcgtgggcggacgcgtgggtgggtttgctgcaaaacatagggtaatgatgcgtcatcaagttcacctatatcatagatttattcaatcttcatgtttagcttgttcttaattatgtatattaatggtcatatgtagctaaggaactatgaacacacttttaaatgggttgataaagctttgctcaatgagatcgaaacattgacagacaaaacacgtgaatttgagcaagatcttaaagagcttagaacagagaggatggtgtttgaa

SEQ ID NO: 101975 - DNA, 412 bp, Arabidopsis thaliana columbia
gttctagatcgcgagcggccgcccttttttttttttgttaagtctcgcaattccttggagagttcgaagttgcgagacttaacaaggaaaaaaaagggttataaaagatttgtcttctggtagccaaaaactttttaatgcatgaactaaaacaagaaggaagtgagaaactacaaccacaaagacatactctattaatagcatgagaaagcaaaagttaatataaacatacaaatcctcaccaaggattagtttttttcacaacatgttgaagacaagttagttgtcttgtaatttaccctctgtactctaagctagaaccaactaaagcctacccatactagtacgcaaacaaagtaccattccccggtatagccctaaaacgatagatgccgataaccgaagtggtctc

SEQ ID NO: 101976 - DNA, 422 bp, Arabidopsis thaliana columbia
ctcttatgtataagtacattatgtgacccttcaattgcagctaattctgatgaaaaatgggggaaaaattatctattacggacctcttggacaacattcaagcaaagttattgaatactttatggtcagtttctatataatactgaaactgttgcaaaaaaagtgtggtctcttctctacttacaaattattacaataattttcaactttagaggattcatggagttccaaaactgaaagaaaactctaacccagccacttggatacttgacattacttctaaatcatcagaagacaaacttggagttgatttggcacaaatgtacgaggaatcgactttgtttaagtaagtctaaacacaagtatcacttaatactttggatgtttgcctgaaactgattctgctatttgcttttagggag

SEQ ID NO: 101977 - DNA, 370 bp, Arabidopsis thaliana columbia
ccccgatcgaacatcaaacaaaacatggttccaatacaagaaagaaaagagtgagcattacaaataccaaaataaaaggggtctattgggaagtagcgcaaccaaaggacttattacatagtaatgcaaacactaaactgagtgttgtttgtgaagacgggaaataaggaaacaacaaaaaaagctgaaatctgtcaggtttggttttaacattttgacaacaatgttaatcatcaatgcttgaagacaagctcgacagcttcaaagaacagaggtgccaataaaaaaaatcttattaatacattatatgagaatcaatacattttttgggtttaatgaacaatgtgatagaagtaagaatcttaaagct

SEQ ID NO: 101978 - DNA, 388 bp, Arabidopsis thaliana columbia
aacttgtataccctctacaagattccgtgaagcaattttctcaaggatggcttgaaaagggtaagttacgacatggtatcaagtcttttcgtcgttttggagagagtggttctgttgatacacatgacatggaaaagaagctggaagttatcagggaaaaaatagatcaatttccattgaaagatgtttttaatatggacgaaactggtttgttttacaagttacaagctgatcattctcttgctacgaaacaacttgaaggaagaaaacaagataaagaaaggttgacagttgttatttgctgcaatgcggatggctctgaaaaagttcctttgtggattattggaaaatatgcaaaaccacgttggtttaagaatgtcaacatgag

SEQ ID NO: 101979 - DNA, 339 bp, Arabidopsis thaliana columbia
cggacgcgtgggaaagaatgtggtcaacttacaatcaaagagacatgagtccagagaaagtgactaaccaggaacagatggatgaaaatatccaaagcatcgacggcctattcccaatcttcttttaagatccaagaggttgctgattggatgcaccgccttataaataatgcgttattagacaaaacttttaacattctgaaatagctgagattactataatggagactagtactgcatacctcatatgcaacaattttctcaagcaatgaagcaggatcatcccaagtaatttgatgaagctctaaagtggcaggactaaaccacataccgagtttc

SEQ ID NO: 101980 - DNA, 463 bp, Arabidopsis thaliana columbia
caaaaccctaaaaataccgtgattaagataaaaagcaaaacaaaaccctaaaaatagaaattacaatacccaataaagttaatagcgactttaatcggtagagatttcgtcttcctccaccagcttctgttgttcttaatcactagatcccttgtttttgacgtgacgaaaagcctgagattgagatttgtgtactatggtagaagaataaatttggtgaaaccttcaccggatatctaccttgagaagaaggatgggtcctggagaaatgtcgcttcgttgaatataagaaacttaagaaagtgttgaagaagtgcaagacatgtaactctacaaaatctgatgatggacaaatcatcccatctgctacttcttcatctttgtctgattcatgcgaatgcaaagcttgcccttggtgtgatcagatgttcttcgaggagctgatgaaagaagctactgacat

SEQ ID NO: 101981 - DNA, 227 bp, Arabidopsis thaliana columbia
ccgtaacaaagaaagcatggagcctttgcttgagtttctccgcactcacaaacatgatggccgtcctatgatgctgaatgatcgaatacagaatatccccatacttcagggagctttggcaagagcagaggagttcctttctaaacttcctctggcaacaccatactctgaattcgaatttgaactacaagggatgggatttgaaaggcgatggggtgacacagcac

SEQ ID NO: 101982 - DNA, 318 bp, Arabidopsis thaliana columbia
cgccgataggattcaagaggaaaaatacattattttgggaatacaaaaccacataaatattgaagaagctttataatataaccaagtttggttgatatatagtttggggttcactttattttctgctaaattgatgagataataaaatatacaaaccaacacccaaccgaacacataagattgaagaatcaaaagttggagacattggcgcgatcaaagaaaagaccagatgggtctccattagggaccaaagccagtttcactggactcgctgcaccttcttcaacgctcaagatcccagtgttgaaattgatttct

SEQ ID NO: 101983 - DNA, 231 bp, Arabidopsis thaliana columbia
cggacgcgtgggcggacgcgtgggcggacgcgtgggtaccgtcaagaatttttgactatcgcatgggaggaggttcatcttcgaagcattttccctttccaatatttatccattggagcttatctaattccttttatcgaacatagtgctgctaatcgagctctaatgagttctaatatgcaacgtcgagcagttccactttctcggaccgaaaagtgcattgctggaact

SEQ ID NO: 101984 - DNA, 312 bp, Arabidopsis thaliana columbia
aatagtctcacatcgatgccgatgcacagaagatacaagaggttccattaatattggcatacaatcagagagccctctttattagagatttgacaacttactactgggttgctgaggcttagcacgagttcgtgagcggttgctggacgtgtccttcagagatgcaagttcctccagcaactcccgttctccagcactgtccgtaggtccagaaaacgaattgaaagaaggtatcgacagactcacaaaattttgtttggattcgttaaataagccacaagacagttcaaacggtaataccttatttgattt

SEQ ID NO: 101985 - DNA, 435 bp, Arabidopsis thaliana columbia
  unsure (1)..(435): unsure at all n locations
cttcagatgactttctcgcttaataaaaaaacactaacccaatcaaatccactttaatccttccctctgtcgcgtccgattctccgatggctttaacggaggacaaatcagattccgatggtcgacgttggggcaaattcaaacttccatttcgaaactctaattcccaagctccttcagcctcctcgtcctcttccatggctacttcttcttcttctgtaacatcttctcatctaaatcaaaattacattcatcaatcttggcattttcaatatcacggtcctcctgtcgtcgaaagattgggtcaaaaccatcatcaatccgccgncacgatcccttctatgtcatctgtcgcgagatcgcttcttccaacaaaacgccgattaaagcttgatccttcagcaaaactttacttcccttatgagcctgggaagc

SEQ ID NO: 101986 - DNA, 334 bp, Arabidopsis thaliana columbia
  unsure (1)..(334): unsure at all n locations
tcgattgtgatcaagcgtgcgatccaaaggacaagaaagcatgcgacaatggatgtggcggnggactgatgacaaatgcctacgagtatttgatggaggcaggaggattagaagaagaaagatcatatccttacactggtaaacgaggccattgcaagtttgatcctgagaaggttgcggtaagagtactgaacttcacgactataccactggatgagaaccaaatcgcagcaaacttagttcggcatggtcccttagcagtgggattaaacgccgtgttcatgcaaacatatataggaggagtgtcatgtccgcttatatgcagcaagcgaaa

SEQ ID NO: 101987 - DNA, 260 bp, Arabidopsis thaliana columbia
cggacgcgtgggttccgcctcccgcccccacttttgcgacatttccggcgaacatcggcgctctcgggctccctcgctcccctaaaccgcaaactccttcccgtacactccttattcctgctatctccgccgtgctcgccgccgcaacattaatcgccttggcctttttcttctacggacggtggcgagggcaaaccagtcatttcaaagatgaatccaagagcttagcttcagacattagccaatcccaacaacaaact

SEQ ID NO: 101988 - DNA, 422 bp, Arabidopsis thaliana columbia
tgcatattgtgctacgaggtagataccacaaaatacaaagtaaaagcgtcctattgaatatttagagagtcatacaatttggtgatagagtatgacggttgtattttatcattatcttaggaggagccaattgataagagcaagcactggggtgatttagaggaagaggaagaagaagaggaggaggaagaagaggaacaagaagaggagatggatgaagaggaactagaagacggcactgaatctgttgatacactgtcaaggtattgttatcactatgcatttatgaggtgtatactatttatttgtttgcttatcagtataatctaagtataaagctgatttgtgattttccccttctttcagcactcctactggtatagagacaccggatgcaattgaacttcgtaaggatcagagaa

SEQ ID NO: 101989 - DNA, 352 bp, Arabidopsis thaliana columbia
gttattatacccttatagtttcatctttttcgcagagaaccaccgtagagttagatacattatgaaaagcaccgcaatagttttaggatctgcatatcagaattcatgatattgggcttgcccaataagcccacggacatctttttgtggctattgcatgatgtttggttactaaaatcccattcctaagttttaagttttaacgaacgatgcagttttaagttggaaaaagggcattttttttaatcaagcaatatactgataaagagttacaaaagatgcgcggtaaaaatcatcgatcttggaagtagttgtttccgctctgataacttgtgcttgtatgtacaatcac

SEQ ID NO: 101990 - DNA, 256 bp, Arabidopsis thaliana columbia
aaaaaacgatatgatgcattgtgtctttcttgtgggattagaaatatgtgatgggttcctttggaatctagagtctacctttacattttcgcatgattttaatccatctacaatctcttaaactagatcacttagctctattgcagtgtttatattgtacatacggatgatgactaacatagaactcatcaaagcctaaattctcaaagtttgctcatggcaaaaaaaaaaaaaaatttaagcttaaaacaaccat

SEQ ID NO: 101991 - DNA, 440 bp, Arabidopsis thaliana columbia
aaagagtgagcagtctacaaaatagaaccaaaaagtttgaaacttgcattaaatttgaaccatttggctattaaggaagaacatgtgagcggaagatgagaggataggtgcaacagaatccggtgctccaacactgcaacaaggtttatttggaagattaattaactaaccgattctacctgtatgaatactttggcatgaaaagagacttaatcaagcatatgccttaccacagaaaggagtggaccttgcttgaacttgtcatggaatgaaaaggagagagctttcgggttttctccaggtcctctgatgaaaccgctgtaatcataaaagcatcagattttgtctatccatttagacaatgcaaagatatacaaaaggaggtcaagaccgatggaatggataacaagtagagttacttacactagtgatgctgatac

SEQ ID NO: 101992 - DNA, 328 bp, Arabidopsis thaliana columbia
  unsure (1)..(328): unsure at all n locations
gtagcatatgaattttagaagtccctatagttcttgaaaaaaaatcttagatacatgttgtcagctggttttgctcaatagtcagcttaatccacttttatctgtaggtagttgaggtaaatgttagagttgacgagcgaggtgagaacaatgtccacaacaatgcgttttatgcggaagagaagttacttaaatctgaggcagtggcgatgcgtgactgtgaccctctttctgctcgccattggattgtaagcaaaaaccgtaccttgcatgttctcgtccatttattgcatgtttaactntcacattgtcagtgctcgtacccgtc

SEQ ID NO: 101993 - DNA, 377 bp, Arabidopsis thaliana columbia
tgactttgtttctgctttatttcagactattggttatttgttttgaaacttgttgcacttattttcctatgctttgttggaactattgatgtgtgttttagtgatttaacagtctaactggaggatccatgtgaaaacactaaccaaggctctacaacaatgagcagaattcacaaagcaatgcaaaacgaccagagtgtcgatcaacaccatcatggtatcgatcgacactactctcaggtggcaactcacgttttctaactttttaacttttgattatttctctttcgattcctctagcttaataactctggggacaatgttatctaagtctaggggattcaattactaactacatcttttcttttctatgagtc

SEQ ID NO: 101994 - DNA, 121 bp, Arabidopsis thaliana columbia
ggaaccagacacgaatcccattcccaccgatttcttagcttcttccttcaatccgctctttccctctccattagattctgtttcctctttcaatttcttctgcatgcttctcgattctctc

SEQ ID NO: 101995 - DNA, 352 bp, Arabidopsis thaliana columbia
  unsure (1)..(352): unsure at all n locations
ctgcgttatacaactcattaatggcctctttgaagttgaagaaaagggataatggcgctgaacctgacaagaaaaagctggtcatcgccggaattcgccaccagttactccttctccttcgccgccgtcaccgtctatttccgctggtatctgccgtctccggctgtctcctcctcatcctcttctcattctccaccctctctcctcctccattgatccatcataacaatcaagtggccgtcgaacccaatccaaccactccatttcgtgtacccgtacgtaaactctnttttgtttcattgaggttttacacaaactttccaggtcattcatgatcattaatgcgtgtcac

SEQ ID NO: 101996 - DNA, 286 bp, Arabidopsis thaliana columbia
aagaaaacaggcgatttgcgagggaaatttgcggtggaacaaatccctcgcaaattgctacggatttgcgagatgtttgcgagggaagaaggcaacctcgctacaccctcgcaaaaattgcgacgaacacttccttcgcaaatttgcgagacgattgcgatgaaactgcagggaaagcatcattcctcgcaaaaacgttgcaaatttgcaagggagttacaggtaacttgtctcccccgcaaattgcgacgaatttgctacgcccatttattctgtcgcaactatt

SEQ ID NO: 101997 - DNA, 333 bp, Arabidopsis thaliana columbia
agcagatataatccaaccacatgatgtgagagcactttgctctgttttagtcactgtagccggagaagcagcaaagacatcaacagataaaagaaatgaaatagaaaatcgggtggacgatcaaacagaaacttctttagcttcttctgcacaagatcagcctcaaggcaataacaatgcagctgatgtggagatggttgcaactgatcataatcaagctgataagtctggaccagaggaatccaattcagatggtgttgatgcctctaaagtgaccccgctatctccagcaactttggctttgatgtgcgatgaacaagacactatcttcat

SEQ ID NO: 101998 - DNA, 308 bp, Arabidopsis thaliana columbia
ctctcctcacctatttgatggcattagttttgtttacgattttaaaattacaggtcgacttcacttaaaaggaagagaaaactttcgtttatgttattacatcgtattaacgcggttgagtttacaacatcaaaagtgttaatatataaaaactcatcgtacaaccctatctatacggctctcccatatttaattaacaaaaatgaaaactaatatatagtacaaaatatgtttattcgatacatcggcaaggcaagtacaatcatataattatagaaatcaattttatatttaaaaaacataaataa

SEQ ID NO: 101999 - DNA, 179 bp, Arabidopsis thaliana columbia
agcgaagataaagtttctatgattaaagtacctaacaaaaaataatattccgttcatgtgagatgaattttttttcttttggattagaagaaatgtaagatatgtaataatacaaaacaaatcatgtgatataaacgttactcagagaaatgctcatccttatcatgcagccatactat

SEQ ID NO: 102000 - DNA, 221 bp, Arabidopsis thaliana columbia
actagttctagatcgcgagcagccgccctttttttttttttttgacaatatgaaacctctggacaaagggagaaaaaaaggagaaattcttgaaattcataacagacaagcaggcactcaaagacaacttacaatcccacaatcctcagatcagtgatatttggacaaactgacaacgcatcgcataaggacctgtattttataggtctgagattgtaaag

SEQ ID NO: 102001 - DNA, 350 bp, Arabidopsis thaliana columbia
gccaaaaccatcggtgtctatttgattgaacattgctacatccaaatccaagccttcgttgctgcattggtctactattctcacagttactgcagcatttgttcttgtgttcttcacctgaatccatttatacccaccggttaatcacaatttttaccggctatacatcttttgaaatatttcactaacacgttgacgttggtaaatggtaacaaattttatcttgtattcgtcttaattccaacactttctatatgatctccttttgcacaaacatacttatataaagatttgagaaaaagataattaattaacttacccttaaacacttgccgcaagaagcttgacca

SEQ ID NO: 102002 - DNA, 322 bp, Arabidopsis thaliana columbia
cagcaatgcatttgccactgcttggtacgcatcatcccccagttcattcttcagggttcttaacttctcgtcatcctcatcaattacttcctgacatagatatcaacagcttcagggttctacatatcaaacaccataacatgcataaacaaatctgcatatgcagctggtagttgtacgcatgcacttgaatggaggtcttctgctagtaacacttacgaaacatattatttaggatgagaaataaaaaacattgaattagtgatatacaggagaaggaataccactattgtttctgcagtctcaagctttatccgtttaa

SEQ ID NO: 102003 - DNA, 194 bp, Arabidopsis thaliana columbia
tcttaagccgttcttctattttcttgagattctctctagtgaatttgagctcttcttggttagagagcttgaggacgtttttaattgtggagagaggagtttcctgagttttggttaatctgatacgttcaagaacacttaacacttggggtacactctctttcgttgaatcttcaccgttggatccatttccc

SEQ ID NO: 102004 - DNA, 287 bp, Arabidopsis thaliana columbia
gcaatctgtactttaccaaatacaacaggtcagcagattcatgagcaatgtttttaaaaataaacgtaaaggacatgtgtattcataaaaagaaactcataagaaataaaattttagtatttcatacatcacaaatcacatcattagaaagtataaagaataaaatacaccaaatgaaaaagttgacgcagttattagaacatgtgttgtatcttatcgtcttttgcagttttctctattttcccaatcttttaaaagtgttttcatagttcaacaacttcaaggat

SEQ ID NO: 102005 - DNA, 413 bp, Arabidopsis thaliana columbia
cgtctttattttcgctgtccctgatcattcgccggagttatcgttaagagactgagattcaatcatcagagttcaatggatgtccccttaccagtcgagaagttatcttatggatcaaacactgaggacaaaacttgtgtagtgcttgtggcaactgggagtttcaatcctcctactttcatgcatttacgcatgtttgagctggcgagggataatttacactcaaaaggatttcatgttcttggaagctatatgtctcctgttaatgatgcatataagaagaagattctgtgtagggacttttatctgcagaacatcgtttagagatgtgtaatctggcctgtcataactctgactttgtaatggatgatccgtgggaggcatctcaaagcagctaccaacgaactttggcg

SEQ ID NO: 102006 - DNA, 408 bp, Arabidopsis thaliana columbia
catattttgggatatattcaattaattatttaattttaatcagtattggtaatatttttaaacaaaaattataacaactttagtttttgttaaaaatcatctaaacctaaaatcatttacagaaactgaactaaccctataatattttagcctagtgaccaatactaacatccaccttgcatcgaagtactgtatcaaaccaaatctaatattgaaatggtcaaggagaatccatttattagtggaccttcataatacaacaaagaaagaaagaaaacgaaactcaaagagacaaattaaaagagtcaaagttcaaaatatgtactctttattttattgtgtttaataactttgtatttattataaaccaatccatatatatatacacatagaccatccaccattttc

SEQ ID NO: 102007 - DNA, 134 bp, Arabidopsis thaliana columbia
ctctgattctcgtatagacacacacatacctatacatacacactttaacactgatatctgtagagtatagccatgggagaaggagaagcataagcagagcacgcagccaaagcagatcacaagaacgctccctc

SEQ ID NO: 102008 - DNA, 258 bp, Arabidopsis thaliana columbia
aatgtgtctcttctcatcggagcaattctctcatggggtgttatgtggcctctcattggtgcccaaaaaggcaaatggtatgctgctgatctctcatcaaccagtctccatggtcttcaaggctacagggtgtttatagccatagctatgatcctcggtgatggtctctacaacttcatcaaaatcttaggccgcactgtcttcggtctatacaagcaattcaagaacaaagatgttcttactatcaacgaccataca

SEQ ID NO: 102009 - DNA, 403 bp, Arabidopsis thaliana columbia
  unsure (1)..(403): unsure at all n locations
gtgttgatcttcttgattctgccgccgaagagctttcttggatcatctctgcttctcaatcccccaacggtaaattttaactactagtctttttccttttttgcatgcaaaatatgagtctttaaattaatataaaagactaagaatgtaatttattaccaacttaaatacaaagttacaaaactcaccgaggaaatttcagttcacgtggtgatgcacattatatagtttgttcgttgaatttccaccaaatttataaataccaaaacgtttgtccccaaaaaaaaaaagaataacaaaagataaaaattacgataattagcatttgttattttaattatttggtggaagactagctntactaataagcccattttttccatggactcgaactagtagtact

SEQ ID NO: 102010 - DNA, 426 bp, Arabidopsis thaliana columbia
ggatccgacgcgtagatggctccgtgtacggcggtgctttgacgacggagctaaatcggagcctccgtgtcgtttagcaccaccgattatggagacacacgcacctatgtttctcctttttgttgacctcaaaacaaagtacacaaaaaaaaacagagcaaaaacaaaatctgtgtctttctctatctttttcttctagggtttgttcaaaagctttttcaggggtttcgctgtgaaatccaaaaatgttgtttctatgaaatcttcttctttgaagaaaggaagaagaaagagacaacaaaacctaaaaatggagtctttgattggctaattttgccgcgctgaattttcgttgtggttagtttgaagaatctttgatgtcaattagatattaaacaatttttttgaagcttattattctacaca

SEQ ID NO: 102011 - DNA, 165 bp, Arabidopsis thaliana columbia
ctgaaacatgctgacatggctgcaaaacttgctgtagtggagtatgatacaaagaatttaggacaaccgatattaactgtcgaagatgcaggtaaaagatctagctttttcgaggatcattcgatgttttacccctaaccagttggtgatgttataaaaggaatg

SEQ ID NO: 102012 - DNA, 374 bp, Arabidopsis thaliana columbia
cataaatcatatcggcccatgaaaccaagtgtgtgtacttatgtctgtactctttgaccatttcactttcagtgtgattcatgcgtctatagattcacactcgggatttcattcaaagtccatagataatttaaagaatcttaaactaaaagttgacaaaacaaagcgataactagagaacagagaaggtcagatagaaagctaaccagtaactaaaccaaattaaattttaacagatatcttatgatcttggaataggccactacctctcagtttagcaaagcagatgtcatcaaagtttccttgccgatctggcatgatactcatgtttcatgaggttggctcttaacagcatctgcctgacatctctatcg

SEQ ID NO: 102013 - DNA, 375 bp, Arabidopsis thaliana columbia
gacacacttactattcatgttgtgtataaccagcataaaagcctaatgagtatgttaatcgcttgaaataatcgagcatttttggaacaaattcgaccattaatcagcatatacctatcacttttcgcatttagtcgaagactttttagtttttgttttgatattttaataattttgtgaattgaaaaaggaataataatactaaattattattatggggctggaagaagcatttagcaattgggcttcacaaaggtttaattcaatcaaattaaagacttctaaatggccttatgtggatattacttgggcattattaaaaattcatcttaatagtgaagagatcactttgattacatttcgagcatttatata

SEQ ID NO: 102014 - DNA, 376 bp, Arabidopsis thaliana columbia
ggaagagaagaccgaggatagattctgaccaagaaacataacttcctcctctgcattatccctgtcggtgaaccctagtttcggctcggcctgttttgagactaagcaaccgtgatcagacgatggacggctaagattggcattgagaagattgacggtggtgatgtcgtgaatgctaggccgtcgtttgtctttcgcaccggaaagctgtctttggtagtacttttgggcatgacttgcaacctgagttggtgtttttgatcccacaaagttcctcgatatgtttctccaatctcctttcccatacttgagaagccctaacaagaatctcctgcagaaaacaattaaacaaggtctcagcaaaccaagaaaacaa

SEQ ID NO: 102015 - DNA, 389 bp, Arabidopsis thaliana columbia
gaggaaccgttattcaacatgagctccgggcgtttagaggcatcactagacagagtagaggccattgtaacccattcagattatctatagccaatccgtacctttcgtgtgcaaacgaggacgagatcttgcattatcagaaggcaaacatgtgaaagcacaagcactttggtgttcacaaccaaaacataagaatgtccataagattttgcttcagagagatatgctgaaagcacaagcactagtgggtagtttcatcagttattatactatctggtaatcactagtttgatggacgttcatacaatgcatctaaagaaatgtataatcgttggatcgttgatacaagttaggttagataatgtatatgccaaatctagtatatggca

SEQ ID NO: 102016 - DNA, 374 bp, Arabidopsis thaliana columbia
acccaaggaaaatgggaacaaatggagcttgaatccgtcttcactgacaccattgatcttcgttaggttgcagagcctatcgaattcatcaaggtggtcgagtggatcctccattggcaaaccatggaatttgttcccctgaatcatcgagatgagaccactcttaatctcgaagttgttattctggatagcaggaggtgcgattcccttcctctgacggtgatcacgtggtgcatctccagcaccaatgttggcatggccattttgctgattctgttcttcagccataacgagtggttgctgaggtacagggttgactgtggttctcctttttctgatttcgcgggctgtgcggttgatattgtcgttgaaaa

SEQ ID NO: 102017 - DNA, 241 bp, Arabidopsis thaliana columbia
ttctccattaactattcatcgaaattcgtattcccctcaaataatatcaactttactcttattttgagtcgtaaaactaatcttaactgtttcttaaatagtgagtttgatttcgtcgtatgtcgtatcctaaatctatactttttttttcttttaaaatgaatattaccaccatttctttataaaccgttggcttcatatcttaatgactttgatcaaaaaagaaaaatatacccacaat

SEQ ID NO: 102018 - DNA, 356 bp, Arabidopsis thaliana columbia
caactatttcgccattgattgcccgcggtcattaaatcaaagataagcatatgaaagaaattcaatgggagattcctctactttctcctgaggaagctaatcttgccatactactcattcactctctttcgtattatcctgccaatgactatgttagtacccgaagctgagctttccgcttgggttgcttgctacatacctgccacaatgtctgtcctcaacatccttcccgccccgaagtcgtttccgtttatcgtcccgtaccttctctttgagaacacaatgtctgtgactaagttcaacgcaatggtctcaggtttgattcagctaggaagtgcttatgaatgggttgttac

SEQ ID NO: 102019 - DNA, 180 bp, Arabidopsis thaliana columbia
gtttaattttcggggcaacatggagtttccaaatcgcttgttttacttcagtcgatccaggtgggggttgtattgcctcctcctcaagaagatcctcatgtgttgcaacccaataacccgagcgaactgtatattcggcattttgagtgtaatcccattcaaacgtatcctcttccgcat

SEQ ID NO: 102020 - DNA, 412 bp, Arabidopsis thaliana columbia
gttggatacacataaatgattttagaaagttaagatatctggattcacataggacatacagctatcatggtcaaatacataccacgtcccaacaatatgcgcaagaatcaccagctgctgtaaatacacttcctgactatcaaaacgaaagaagtgagagagggtgaaacagttatcctgtgagactgtctaaccaagcaatgaaacttaaatacaattccaacctgaggatcaacagacatggcattgatctcaggcatcggtgaaagcgcaccccaaggacctctataagaaaaagaatggtgattatacacacaactattacgaacactgacatttgaacccacaattatagcattttcagtaacagagttatcaagtagaataaaaaatgaacaaaactcatactcac

SEQ ID NO: 102021 - DNA, 376 bp, Arabidopsis thaliana columbia
  unsure (1)..(376): unsure at all n locations
cccaaatagaatattctgtattgagtatgttttagctagactagatagttcaaagatatccggtagccaagtgtcgatttggtgttgggtaaaaaaaatgtaagaaaaaaaagctggatcttatccttttactaaagaaaatctgaccatagttatttccttagttaagagccaaaattaggctcagattttaattaattgaaccattagatttgttcttactcaatttctatgtattttaataagtttcacttctaaaagtgttttctaaagttttacaactacttcaaatcttaagactgtttttaatgaattcaaaatttacactttaattcaaattttcaacttgtgattaacanataattatactttatcg

SEQ ID NO: 102022 - DNA, 406 bp, Arabidopsis thaliana columbia
gagaattattgtgtacagctatatcatcttctcaatgaccggggaatttcagagattcaagttgggtagagataccatcaaccaggagatgagatcacagttgtggtgacagcggttgctctctccctggatggctcagtgatgagtacaaccgaggtgaaacttccggaagatggaataggaggcttagtgtccctcaagttttgggcgtctgaaccagacagcaaaactttcaccttatccacaatcgtatatgaacctcatagggatgccggtgtctcagccattgtgttccaccctacccgctccatggcagtgagtacatcattcggtggtgacttcaagatttgggtatgcaacagtgacaagaaccagacggataaagactctagctggatatgtcacg

SEQ ID NO: 102023 - DNA, 365 bp, Arabidopsis thaliana columbia
gttttcttcttccaattttggatctctcttccttttgatctgattcgttacttgctctatgttggttcaattttgaattcttttgatttttgattgtgtgggggagatggggcaatgttacgggaaggttaatcagagtaagctaaatggggaagaagaagctaacacgactacttatgttgtttccggcgacgggaatcagattcagcctctaactccggttaattacggtcgagctaagaacactccagctaggtcatcgaatccgagtccttggcctagtcctttccctcacggatcagcgagtcctcttccttctggtgtttctccttctccggcctgaactttcacttcgaggaggtttt

SEQ ID NO: 102024 - DNA, 295 bp, Arabidopsis thaliana columbia
gttgtatactcctatgaaaaaaacaaaaatttcaattttcaaattctgaaaaacaaacaaacatagttttaagctttttatgtctcttcaacatatgaatcaagtatgcatgtgaaagaacaaaatcaaagataataactccaatataacatattctaaagaatctaaaatgactttaacttctccagaattagcaccttttaactcttttcacttttgtttttaacgactcaatagatgttcataaagcaaaatattagcttctaaaacttataaaggctatatagatcttact

SEQ ID NO: 102025 - DNA, 402 bp, Arabidopsis thaliana columbia
atttttgtttattataataggaggtgaataaaaggattcacccctataaatgaatctgagtattgttgaaaaaaacgcaaatagagtaacagaagttgcataatgttttagcaaaaactactccttacatctccataagaataacaaagatattattaaaaaaaatcaagcagaagcaaataaaaaaaaagaggattatgtaaaaaagggaaatgatcatcttcattagcttccctttcggctccatggaggaaaacagcaaccctacacataacaacgtcaattgtaaaaaaagaggatttatgaaagaaagggaaatgatattttggttatctaccttgggactagaaggtaatggttgatgatgttggtcgatgatgggtcgagtcggggtgctatgat

SEQ ID NO: 102026 - DNA, 387 bp, Arabidopsis thaliana columbia
caaaacatcatttaccttcttttagatttgttgttttttaatcagttgaatcggaataaaatatcgcatcagagatgagtaacgagcttctcaccatcgatcctgtcgaccttcaattcccttttgaattgaagaagcagatctcttgttctctctatttgggtaacaagaccgataattatgtcgccttcaaggttaagacgacgaatccaaagaagtactgcgttaggcctaatactggtgttgttcatcccagatcctcttctgaagttttagtgaccatgcaagctcaaaaggaagctcctgctgatctgcagtgtaaagataagttcttgcttcaatgtgtagtcgctagtcccggagccacccccaaggatgttacacatg

SEQ ID NO: 102027 - DNA, 383 bp, Arabidopsis thaliana columbia
cctttatatattacacacacattttatgtgtatctctgtgtttcagaatcagacctaagccattgttgaagcctttcctcatttctccatttagatcaagaaatatggcaaaccgtccacacgttccgaagtttggggactggaacaaccaagaccaaccattcacggtcgtctttgacaacgcaaggacgaacaaacgacaagacttgtatgaatctatagagaaaccagagaccaaacctcaagagctagctcctcctcctcctcagcctgctcgtagaattcaaaaaccggaagcaccaaaaccggttaagcaagacacgccgagagcacctccaccaaccgaaaaaaacagagtcaaagctccaccggcagatcaactc

SEQ ID NO: 102028 - DNA, 311 bp, Arabidopsis thaliana columbia
ctccttcctcggctgtaacaagatagagaagaagatgaatatggaagtggatacagtaacaaggaagcctcgtatcttactagctgcaagtggaagtgtggcttcaattaagttcagtaatctctgccattgtttctcagaatgggctgaagtcaaagccgtcgcttcaaaatcatctctcaatttcgttgataaaccttctctacctcagaatgtgactctctatacagatgaagatgaatggtctagctggaacaagattggtgatcccgttcttcatatcgagctcagacgctgggctgatgttatga

SEQ ID NO: 102029 - DNA, 384 bp, Arabidopsis thaliana columbia
  unsure (1)..(384): unsure at all n locations
gaaagaaagcccacccgggaatctccgacccgaccgagaaatgggatcgtcagcgaatacagaaaccaacggcaacgcaccgccaccgtcgtcgaatcaaaagcctccggctacgaacggcgttgatgggtctcatcctcctcctcctcctttaactcctgatcaagctattatagagtcggatccgtcgaagaagaggaaaatggggatgcttcctctagaagtgggtactcgtgtgatgtgtcggtggagagacgggaaacaccatccggtgaaagtaattgagcgccggcggatacataacggcggtcaaaatgattacgagtattacgttcattacactgagtttaatangaggctggatgaatggactcagctggacca

SEQ ID NO: 102030 - DNA, 396 bp, Arabidopsis thaliana columbia
ctaatctatcacaaacccttccacattgcttttgtcagtctgtaaaattctctttgaatcagtgaatcactcacttaaatccaaaacagtttttttttctttctttctttatttgcttgttgtggaatcaatagctgtctccgggaaaattcgttttttttctccttcgggatctctttttttttttttttggttttatttaataattatccccgagccaacatttattgtcgattcggtttatttcgtctccttcgtcttccactcttactagtgcatgctctgaatctgtatgtaatgggagttcaacagtctggatccattatcctagccgggtcgggtcaaggtctttgagtaagagagacaattcgttttgattcggtgtagaagacatca

SEQ ID NO: 102031 - DNA, 288 bp, Arabidopsis thaliana columbia
catcagtagttacaactacaccaacaacagtagtaacatcaacacctacaacagcattaccaacagtaacaattgcacctacaacatcagcacctatcacaactagagcaccaccaacaacatcatcatcacccacaacatctataccattggtaacagcatcaccaattattggtaatgctacaactataggtccaattgctgtcaatcttgtgaataatgggatatcacatgatatgaatggtgtaatgctatgtctgatgatgatcggtgtattgttgttgtgat

SEQ ID NO: 102032 - DNA, 426 bp, Arabidopsis thaliana columbia
cccacgcgtccgcccacgcgtccgcccacgcgtccggctttctctgcccttcaatggattgcctctggaacaaacagcaccattgccctcagtgtgggaacaaggtacttttatatgtcttcttcatgcctgctactcgtgtgcgttttttttttctctgtatggaagattgtttcattcatatgattgatttgtttacaggttgctgactttgagaaatcagatccctgcctggtgatggatccgccacagtggaagcaacctagtttcgcactcccagcatgataagatgcattcttttctcttgtgattaatattgcttgtgaagttgagtcgttctgttgcatgtactggaaaaaaactaagatccagaataaccctatagaatgtgtgagaaatgaaatatttattcttctgtatcgtttc

SEQ ID NO: 102033 - DNA, 425 bp, Arabidopsis thaliana columbia
attcgctgtttgaccaaaaaataaaaaattattgtttcgctgagaaatgtatagataattatattatacgttagattggtaactaccaaaaatattactatatgttagattggtcacaaaataagaaaagaaaggtagtgtatatcaatttattaatgacgtatttaataaagttggtctcaagcgaaatgaattgttctttactgctacaaggcatataatcctgtaaagaaaatctgggtggtcgaattgttcttttccctttttctaatttcaacatcaaaagttgttccaccagaagaatttgttctctgcagcagtaaagatcgatccgttcttgcttacaagcagaaaaatcatatcgacagagagagatgagacagaactcagcaactggtggtctttcatggcggcgtttactgttc

SEQ ID NO: 102034 - DNA, 365 bp, Arabidopsis thaliana columbia
attgcattcagttcctccatgacaagacgattctcgtcaccggtgttcccggtttcctcgccaaagtgtttgtggagaaaatattgaggattcaaccaaaggtaaagaagcttttccttcttttgagagcagcagacaatgaatcagccatgcaacggtttcacagtgaggttttggagaaagatctttttagagtgttgaaaaacgctttaggtgatgagaatctgaaagctttcataacagaaaaagtcgtacctattcccggtgatatatccgttgataatttgggagtgaagggttctgatctcttacaacatatgtggaatgagattgatatcattgtcaatgtagccgccacaacgaac

SEQ ID NO: 102035 - DNA, 283 bp, Arabidopsis thaliana columbia
tcttttgcggaaactttgagtatgatgcccgtgagagtgatcttgagcggcttttcagaaagtacggcaaggttgacagggttgacatgaaagctggtaagtcttggatcatgtttttccttagacatgcgcttagtttttctgtttggttgaattgaaatggataaagaagtctcgtaaaccactaccaatccgatgagcaacaagcgaaattcagtcaaatgcagtgttcttaacatccacttacgtgcgttcattccatgagactctctggaggactgtc

SEQ ID NO: 102036 - DNA, 350 bp, Arabidopsis thaliana columbia
taaggtggtgaggggtaagcggtttacaaaagaagaagatgagatggtaaagaatgctgtattagaatacattgataaccatgctttaggagatgaggggataaagatggttatggaatgcaaggcatacccacaacttaaaggctgttggaaagaaattacatctgctttaccttggaggacttataatagtgtgtatcatcgtgcacatactatatttgaagcaggatctcaggggatatggacgaaagaggatattgaactcgttatggagtttcaaaagacacacgggaatgattggaaaacacttgcagatgcaatgggtaagcacaggaagcatgtgaaagacg

SEQ ID NO: 102037 - DNA, 416 bp, Arabidopsis thaliana columbia
  unsure (1)..(416): unsure at all n locations
cggacgcgtgggatctctacaaagcttaacttacaagctgattcaagcaaagagtcagaggatttcttgtactctttcaaggcgcaacaccttccaccgattgtgttgaaatgtttattaccaaaagcttatccgagccacttaccgccttatttcttaataagtgttcagtggatgaatcctgataagatttcaagtctctgctctaagctggactcgttatggagtgaacagccagggcaagaagtcttgtaccagtggacagattggctacagaactcgtcgatttctcatcttggttttgataatgagattgttcttggtccttatggtgttacatgttccagagataagcgtgctgtgtctggaagtcgttctccggattcagatattccttatattangagttatgacga

SEQ ID NO: 102038 - DNA, 391 bp, Arabidopsis thaliana columbia
cccacgcgtccgggtgaacaaccaagtggctttcacgacagatccaagggcggggagatcttcccagtattgtactgatgttgcaaaggctttgagtgctcccatctttcatgttaatggggatgatgttgaggctgttgttcatgcctgcgagcttgctgctgagtggcgtcagacttttcattctgatgttgtcgttgatttggtttgctaccgtaggttcgggcataatgagatagatgaaccatctttcactcagccaaaaatgtacaaggttatcaaaaatcatccttcaacccttcagatctaccacaaaaagctcttggaatgcggtgaagtatcacaacaggatattgaccggatacaggaaaaggttaacaccatcctcaat

SEQ ID NO: 102039 - DNA, 369 bp, Arabidopsis thaliana columbia
tctactctctctttctatctctacagagtaaagttctgatcgtgtctcttatcgtttacccaaaaacccttgtttgatctctcgtctcttgttttcttctgccctcgaagttttcaggttatgtggtggaggttgtttccaatttaaagtatgtacctttaggttagaaattaggcttatttgtttctccagtgggtttcattgtagaaacaaattgaattttaggtgttaatgtgagattaggaaacagaatctctgcttttaacaaggtaataggagaatagggtttagtacaagaaaggttaaaactttgtgatgggtaataagttgggaaggaagaggcacgtggtggaagaaaggtatacaaag

SEQ ID NO: 102040 - DNA, 383 bp, Arabidopsis thaliana columbia
accagatctagtggaagctatgtagtctcgattctgtcttaggctaatattaggttgcctttggttgggtaatttagtctctgctcatagtttgtccttggttttgctaagtcttggctcgtttgtgttaattttcctagttttaggtttgttttgttgcgtttaaccaattgaattagctaagctcagagatccttcttggtttgtgttttgcgcaagtcagtttctctctggttatggaattgcctttatgtcctttgctcttctgctttgctgggtcctcttgggcgtttggtggttttgtttttggctaggttacgggttgtgcttgtcttttggatggtgtttcgttgcagcgtcatctacaagctcctttctagctt

SEQ ID NO: 102041 - DNA, 186 bp, Arabidopsis thaliana columbia
cccacgcgtcagcgaagcttagattgcagcccgattttcacggcgattttcgcggacatgccagtcatgctatcagtccagagtttaaagcagtgtgagaacctggtgagagttgttgtgtgagttcacatgtcaccgcacacgaatctggatatgtgactggagaactgtgaaaaattcggggac

SEQ ID NO: 102042 - DNA, 368 bp, Arabidopsis thaliana columbia
cccacgcgtccggagctcggatggggatgaagctttgcaggagcttttatgactcatggattcagatcctggttgatggagaaccaagttaaagctgatgagcatgtggttacagtaaagattgcctaagtgaaaagaaaggagaattgagtcttcatcttcaatagaccaaggttagtaagcgtgaggaattgcgtgcaatattttgttcgtgtgtgaagttcaaagaaaacgtttttggcaagatcagatgaaaacatgccgtcttagtctatatggcggggcagttgctcacgtttagttgtctccctcgtttgggttgtcgtctccctcgtttgggcttaagcttctcttcctcgactatatta

SEQ ID NO: 102043 - DNA, 348 bp, Arabidopsis thaliana columbia
ctgagagctaaaggagagacatacgaagagattgtggggttagctagggcaatgatgaagcatgccaggaaagtggaaggattagttgatgctgtggacatagttggaacaggtggtgatggagcaaacacagtcaatatatcaactggatcttcaatacttgctgcagcttgtggtgcaaaagtagcaaagcaagggaatcgttcaagttcttctgcttgtggaagtgctgatgtactagaggcactaggagtggttctggacttgggaccagagggcattaaaagatgtgttgaagaaggggggatcggttttatgatgtcaccaatgtatcatccagctatgaag

SEQ ID NO: 102044 - DNA, 291 bp, Arabidopsis thaliana columbia
ggagaagaagccagaaacaccagttttacctgagtgttgcagcacggataaatttcggggctgaaagtgaagcttctgtgaggtacccggatgatccgtatgatagaatatgggaatctgatttgcaaaagaagcctaattatcttgtggatgttgctgctgggactgtgcgagtgtcgactacattgccaatcgaaagcagggtcgatgacagaccgcctcagaaggttatgcagacggctgtggttggaacaaacgggtccttaacttacagaatgaacctagatggct

SEQ ID NO: 102045 - DNA, 421 bp, Arabidopsis thaliana columbia
cccacgcgtccgtctgaatcttctacttctccttctactatctccccacttcttgataccttgtaatccatttcagcgattagatataatcaaaactttttcaacttgtagtggccaaattttttgtttaatggttgtaaagatatcgaaaaagttttttgatgttaaagataaagaaaaaattgatttaccacctggtttcagatttcacccaactgatgaagaacttataacacactatctaagaccaaaggttgtaaactcttttttctctgctatagctattggtgaagttgatctcaacaaagtcgagccttgggacttgccttggaaggctaagcttggggaaaaagagtggtacttcttttgcgtaagagaccgaaaatacccgactggtttaagaacgaatcgtgctactaaa

SEQ ID NO: 102046 - DNA, 342 bp, Arabidopsis thaliana columbia
cttatacaactgtattacctaccgttacacttcaccagcagttgacctcaatagagtcaagctggataatcggagggctcttgcttgcttcacagtattttcttatatccgtctggtatattcttcagactcgtgtcatggaggtttaccctgaagagataaccgtagtcttcttctacaatttatttgcaacactaatctcagtaccagtatgtctttttgcggagagcaacttgacttcttgggtgcttaaaccagacatttccctcgctgcaatcatatactcgggagtcttcgtttcattattcagcgcgcttacccacacatggggtctgcatctga

SEQ ID NO: 102047 - DNA, 405 bp, Arabidopsis thaliana columbia
gatatctgaaacgtgtctctttgactgacttcaatcttctttatcacttaccgtttctgggttttatgaagcaactgagctaatagaaagcttcttcttagactcggaagaagataaaaaacagaatctttattgtttaaagcttccaaattcgagaagagaatttgaaacgaccaagttcaggatattcgtttcttcgtctactttggtctcttcctcttctctttcgaaaagggtttattctgtcttaaaagaaacctttttgagagggtaaaaaaagcttcaattttcagagaaacacaaaaggcagagacagagaaaaagatatcatcgaattcatgaaacagggttcaatgaatagatcgtgtctctgtaatgtcgtaatcaccactgctctgatttgtg

SEQ ID NO: 102048 - DNA, 193 bp, Arabidopsis thaliana columbia
cactactggttccaagatttgtgtcctcagtcaatcttactataagcagctctgagtccacagggtcgtagtatgctcacgtacgttactatgtacatgtaacaaagatatgtggtcactatacatatggttcatgagtgacgactgtataaatacttgtttaaattataatcttttgggtcaaattgagaat

SEQ ID NO: 102049 - DNA, 334 bp, Arabidopsis thaliana columbia
  unsure (1)..(334): unsure at all n locations
agacactaagcagttgattgcttatgctcgtgctaataataaggttattattggaccagctactgttggaggcgttcaagctggagcctttaaaattggtgacacagctggaactattgacaatatcatccaatgcaagttgtacaggcctggatctgttggctttgtctcaaaatctggtggcatgtctaatgaaatgtacaataccattgcccgtgtgacagatgggatctatgaaggcattgctattggtggggatgtgttcccgggctcaactttatctgaccatatcctgcggtttaacaacatcncacagattaagatggtggttgta

SEQ ID NO: 102050 - DNA, 368 bp, Arabidopsis thaliana columbia
cttatgccgctcgcggaaagtgggagcaaggtctcgctgggtcgttgcagggagggagtggggcatgcatttgggggaagcattgtacactgtggaggcaaggcctgccgttgcaggcaagcacgaagcaatgtggggatgtcgcatgtgatctactgacggctgacaagagggaggtggcggaggaggggtggtgttgctatgatgtgggcggcggctgctgttactgggcgcatctgccctgtacttgctacggtgctgcgagccatgtactgctggagatccaaagagttgtgcggctgctgccttgccagcagtctgctgacgttttctgttgtcatgcacactggggaaggcatggcatggtg

SEQ ID NO: 102051 - DNA, 383 bp, Arabidopsis thaliana columbia
gagaaaacaaatacataatcggagaaatacagattacagagagcgagagagatcgacggcgaagctctttacccggaaaccattgaaatcggacggtttagtgaaaatggaggatcaagttgggtttgggttccgtccgaacgacgaggagctcgttggtcactatctccgtaacaaaatcgaaggaaacactagccgcgacgttgaagtagccatcagcgaggtcaacatctgtagctacgatccttggaacttgcgcttccagtcaaagtacaaatcgagagatgctatgtggtacttcttctctcgtagagaaaacaacaaagggaatcgacagagcaggacaacggtttctggtaaatggaagcttaccggagaatctg

SEQ ID NO: 102052 - DNA, 244 bp, Arabidopsis thaliana columbia
agcaacgataccaatggaaaaaagagagagctaaaaacaaccttaaatacttattagaagctccaacggtcgagttgttgctgttacactttccgcttgatttagaacttgtaggtctctttggaatgttataaaaaggacctcttcggcttttttgtattaatcaacagctacgtacaaataagccgaagaggtcctttttatacgtagctgttgattaatacaaaaagagaactcttctcgc

SEQ ID NO: 102053 - DNA, 398 bp, Arabidopsis thaliana columbia
ggcgggtgctgcagctgcttcgtatcctgctggtggagctgctttgaaatcttcaagtggaactgcttcgaagcccaaagagacgaagaagaggaaacaggaagaaccatctacgcaaaagggtgcaaggaaaagcaaaatagatgaggaaactaagaggaatgacgaggagactgagaatgacaacacggaagaagagaatggaaacgatgaggaggatgagaatggaaacgatgaggaagatgagaatgacgatgaaaatacagaagagaatgggaatgatgaggagaacgacgatgaaaatacggaagagaatgggaatgatgaggagaacgagaaggaggatgaggaaaacagcatggaagagaatgggaatgagagcgaagagagcgggaatg

SEQ ID NO: 102054 - DNA, 341 bp, Arabidopsis thaliana columbia
cccacgcgtccgccaaaaggaagtctttacgacgttctccacggtgttagcccgaaagaaaatgtgctagactggtctgcacggtacaatgtagcacttggtgtcgctcatggactagcctatctacactatgactgccatcccccgattgttcaccgtgacatcaaaccagagaacatactcatggactcagatttggagcctcacattggggatttcggtttggctcgccttcttgatgactcaacggtttcaactgcaactgttacaggcaccaccggctacattgcaccagaaaacgctttcaaaaccgtgaggggaagagaatcagacgtttacag

SEQ ID NO: 102055 - DNA, 323 bp, Arabidopsis thaliana columbia
gaagtggttgattaaataaaaatggagataacaaacgtgatggaatatgagaagatcgcaaaggagaaattaccacagatggtttatgattactatgcatctggtgctgaagatcaatggactcttcaagagaatcgaaacgctttctctaggattctatttaggcctcggattcttatcgatgtaagcaagattgatgtgagcacaacggttttagggtttaatatttctatgccaattatgattgctcctactgcaatgcagaaaatggctcatcctgatggcgagcttgcaaccgcgagagctacttctgctgctggaac

SEQ ID NO: 102056 - DNA, 395 bp, Arabidopsis thaliana columbia
tttatttattaaccagccctctctcttcttccccaaatctccattttctctgcaaatcccaaatccatcacaaaccctaattttagtctctcaaaatctccaccgtttctaccaccgtcaatgtggcggccgtggcgtaaatcgtcggttaagattcacgacacatactctccaaccaccgcttccttcaaagacattcaccatctctgctccgacgactcaccttccttcccttcttctccctctccatctccaaaaaccgcttctagagtcttccaccgagtccgtgcagctaatttgatcctcaaatcgtggccaactcgtcaatctaatcacctcctccgcgcagattccgaacctatcaatctaagccggaatcaagatccagaatcaga

SEQ ID NO: 102057 - DNA, 429 bp, Arabidopsis thaliana columbia
ccaaaggctatcatcggaaactgagggaacagagatcattcatcgccgcggttgatatagagaaagatggggaagacaattcaagtgtttggattccctaatggtgtgagcgcagaagaagttaagaagtttcttgaaagactcactggttcaggcactgtttacgcaatcaaagttagacaaccaaagaaaggtggtccaagagtctatgccattgttcaattcacatctgagagacatacgaggctgatcatcactgcggcagcagaacgtctttactatggaagatcttatctcaaggcttttgaagttgaacaagacattgttccaaagccaagagcttcattacacaccatctctggtttaaagatgttctttggatgtcaagtctcgactaagaagtttttagctctatggagtgctcaagat

SEQ ID NO: 102058 - DNA, 203 bp, Arabidopsis thaliana columbia
attttgcaaaggttgaaaagcgtgttagaacaactggtggtggtagcacaggaacggttaggaatctgcgtatcagagaagacactgcaaaatacctgttgaacctcgatgtcaactcagctcattatgaccctaaaactcgttctatgcgtgaagacccacttccagatgcagatccaaatgacaagttttatctgggagat

SEQ ID NO: 102059 - DNA, 227 bp, Arabidopsis thaliana columbia
tttgaccggttactgtttgtactccatgggctgttaagcaatcaccagccaaaatggctaaagccaaggccttcctctaatgaatcatccagagactttaccttgtttgatcgcgatgcagcagatagcttacagaatgagctttcgcggatgcagttaccagacaccattagatggcggatccaagcagcgatgccaatcctccttccttctctacgctgttctct

SEQ ID NO: 102060 - DNA, 363 bp, Arabidopsis thaliana columbia
agaaattatgaacgcaaattcaaattcaactatgatcgaattctaaacacaattatgaagtaacgacgatgaactcgaggctttgtcatttggggacttcgatggatacgattcgctgcgattccgatatcttctgatctcctacttcctcttgtacactgggaagacacgattcgggtatctgtaacagtaacttgaatctggtaagatatggacaaaatcaatggattgcctgatgatttgctggtgaagattttatcgtatgttccaacggatattgctgtatccactagcattttgtctaagcgatgggagtttctttggatgtggttgcctaatctcgactacacttctcggtggtgt

SEQ ID NO: 102061 - DNA, 378 bp, Arabidopsis thaliana columbia
  unsure (1)..(378): unsure at all n locations
gtgtatgcattcggcgttgttctcctcgagttactttcgggaagaaaaccgattagcagcggatgtccaaagggacaagagagtctagtcatgtgggccaaaccaattctagatgatggaaagtattctcagttattagacccgagtttgcgggataacaacaacaataatgatgaccaaatgcagaggatggcgttagctgctactctttgtattcgacgtagtcctcaagctagaccgaaaatgagcatcgtattaaagctacttaaaggtgatgaagacacgcttgagtgggcaatgcagcaagtgaatagttcatcagaggagtcagagatgctcanagatgagcaatgccaaagatctaacttgcaatcacac

SEQ ID NO: 102062 - DNA, 368 bp, Arabidopsis thaliana columbia
attagcctaccctttttccttcctcctctccgattcttcctccgtcagtaaaagaaaatcaaaatggcttcacacattgttggatacccacgtatgggccctaagagagagctcaagtttgcattggaatctttctgggatggtaagagcagaagaagctcaatctcccaatcctaccaaccacaaccattggatccttcccacagactgtagagctcaggagagttcgtcgtgagtacaaggccaaaaaggtctcagaggaggactacgttaaagccatcaaggaagagatcaagaaagttgttgacctccaagaggaacttgacatcgatgttcttgtccacggagagccagagagaaacgacatg

SEQ ID NO: 102063 - DNA, 279 bp, Arabidopsis thaliana columbia
atcattatcctcggcgtattcataccctgggcaggatctcctttattcccgtctccaaacaaactctctccttctcatcccaaatggcgcgactattccctccctcaaggtgtcaaattcgtaactaagaacgggactgtgatcgtatgcgccgttagctatccttacatgccgtttctcaacaattggttgattaatgtttctaaacagaagcatcaggatcaagttcacgtcatcgctgaggattacgctactcgctataaagttaactacaaatgg

SEQ ID NO: 102064 - DNA, 273 bp, Arabidopsis thaliana columbia
  unsure (1)..(273): unsure at all n locations
aaaaaatccgcaaagtcgtcaaatttcacagcttgattctctctcaacccaaccacacaatcgcaatctctcttctagacacgctcgctcgtcgtctaggtctcggcttcaagcaacacgaaccaggtgcttttctcctcaagttcccacacgtgtttgagatatacgagcacccagttcaaagaatcctctattgtcgattaacccgtaaagctttggatcaaatccgtcacgaacacgaagctgttctcgaccaaatacncgacgccgtga

SEQ ID NO: 102065 - DNA, 307 bp, Arabidopsis thaliana columbia
aacttcctcatgtgttgtgatcataaatgcaaatatttagttgttctcaagacatgtgtcatactcaaagtctgggacttttaggtgtttttgaatgttcatttggtgattgatcatcgtctctgatcgttacttggaggaaagattccaaatttttgaatgagaagttgatttgttgatcggcattgctatggaaacacgaccggttcaaactccggtttcaaattctccaccggtgacttcgctgtcgccgcaactgaataatgctacttctcaggctacaccaccaacagtaacatcgccgcta

SEQ ID NO: 102066 - DNA, 287 bp, Arabidopsis thaliana columbia
agatagttctagatcgcgagcggccgtcctttttttttttttttttcaaaggtcttcaggctaaactttctgaacaggaaggtattaattcaaagcttgcggaagaactcaaggagaaggaacttctggaatccttatcaaaagaccaagaagagaagctgagaactgcaaatgagaagttggctgaagttttgaaagaaaaagaagcgcttgaagcaaatgtagcagaggtcacaagtaatgtagcaacagtaacagaggtctgcaatgaactagaagagaaactg

SEQ ID NO: 102067 - DNA, 231 bp, Arabidopsis thaliana columbia
  unsure (1)..(231): unsure at all n locations
aacatanaccctacacatcgtacaaaggtgaagagaaggcggcagctttaccagcttaacagtggctgaagaacacgagatcgtcgattccctgtcagcggaagtgaacccagaccagaaagtggacatggaagtcgaaaccgcgaccccgaaagccgagaccggcgatgagaaacgtgagagagaggacacagacgaacaagagaacggaggtgaatcgaacaagcagaa

SEQ ID NO: 102068 - DNA, 243 bp, Arabidopsis thaliana columbia
atgcttttcatgcagcaagccatcaaagggctagttgatgaattccgcattcctgaacgagaaaatcagaagctgaaggagttcataccttcctggaggtttgctaatgggatgtttgctctggttctctcctttggacttcatctgactggacttagaatcagaaatgccagatcatggcggtacggaactggctggctcagaagcttaatatctgactatggtgtaacactcatggtgctc

SEQ ID NO: 102069 - DNA, 400 bp, Arabidopsis thaliana columbia
  unsure (1)..(400): unsure at all n locations
cccacgcgtccgcccacgcgtccgcccacgcgtccggtttgacttgctaatggctcctcctccggcgaagatgcaagagatccaccaattcctctcctccgcactcacccagcgtggcccttccgctcttccatacgccgagaacaccaagtcgctaatccgtcaacacctcctcaacctaatctcttcctacacttccctcgaccccaaaacggcaacgtttacacacaacgatggccgatccgtgattctcctccaagccgacggtacaatcccgatgcctttccaaggcgtcagctacaacatccccgtcgtgatctggctcctcgaatcttaccctcagtatcctccttgcgtttacgtgaatcctacacgcgacatgatcatcanacgacctcac

SEQ ID NO: 102070 - DNA, 385 bp, Arabidopsis thaliana columbia
gagagaagagggaagtcaggtgaagatagagagagacactgagaggagggaaaatttgtagggttttcggagatctctgtgattcctctgaatttgtcgaattttttggaggaggcgttagaagtcgggcttcttaaaaatcagatcttctgctcaggctttaatcggcgacgtctggtattgggatctgtgacacaaaaagctgcgttggagactatggaagaagttcagcctccagtgaccccgcccattgaaccaaatgggaaaagaagcgaagcctctctcttggacatatgcgagaaagttctgtctcttgatgggagcacttgcgatgaagctttgaagttgtttacagaaaccaaacgaattttgtcagcaagcatgt

SEQ ID NO: 102071 - DNA, 424 bp, Arabidopsis thaliana columbia
tctctatctcacaataaagacaacttctctcttttaatgtctctctgtccctctctcttcttcttcatcttctaacaccaattcaagaaagaaggaagcttaagaagagtctatcatcaatcaatggagtttcatcttgaacatcctctctcacattcttcactccacaataacttcaacgacgacacagactatgaaactttaccacactctctcttcctcgtcgagtttcaacacatgccttcttctcattacttccatagcctcaagtcctctgcttttcttctctctaatcgaaaccaagccatttcttcaatcactcagtattcaagaaaattcgacgacccatctctgacgtatcttgctgtgaattatctagacaggttcttgtctagcgaagatatgccgcagtcaaagccctgga

SEQ ID NO: 102072 - DNA, 314 bp, Arabidopsis thaliana columbia
agctggtcctgctgaagtaactgaactaactgggccggatgtcatggaagataagtgtggttctgctgctatttgttttgtttctttcttacctgacattttggactcaaaagctgaaggaaggaacaagtatctagagatgttattatcagttgcagacaagtttaagaaagacccttacggctttgtgtgggtggctgctgggaagcaacctgatttggagaagcgtgttggtgttggaggatatggttatccagcaatggtagccttaaacgcaaagaaaggagcttatgctccacttaaaagcggttttg

SEQ ID NO: 102073 - DNA, 409 bp, Arabidopsis thaliana columbia
acggggtcgttattacaagcatttaatgcttggctacagaacataggcagtttcacacaggttttgttttcacaggaacgtcgatgaaatctcggtatcttgtgcacgtacacatgtcggactcaggttttaccgtgaagtagaaaacataaaggggcgttgtttttgttgccgtcaaggtctgacttttagtaaaatcacattaagaagagacgtcggagggaaaaacctccagctacagaacggtgtaatcgtgtaagtgggaatacattgccatgagaacgtctttctcttcagacgctgtatataaagcgcatgttgctgtgtttatgtcgatttttttcaagtaaaattataagtcaaagaattcaattattcactgtattgtctacctttccaagccgaaaag

SEQ ID NO: 102074 - DNA, 412 bp, Arabidopsis thaliana columbia
ccaaaagcaactatctctatctccttcatcgggcgacttcgtcttcttcttcgttcgctgtcagatttttttttaccaaattaacaatttttgagtctccgttgcctctctcagttgaagcgtcttccttctctctatcgaatgatggaggccaaaccaaaaaggaggattgttacagagaatggagatacaggtgaagatttagttcttgcaacattgattggaaacggtgatgatgtaggtcctctcgttaggcatgctttcgaaatggggaggcctgagcctctcgttcatcagctcaaaaatgtggcgaggaagaaggaagctgaaattgaggatctatgcaagactcactatgaagaatttattgttgcagttgatgagcttcgtggtgtgttagttgacgctgaag

SEQ ID NO: 102075 - DNA, 380 bp, Arabidopsis thaliana columbia
cccacgcgtccgctaatttctaatggtacttcttccttcgatgacgtcgcttcttctggtgttcctcttcctctacggcttttctccggttatctccgacggctccgatcaccgttacaaggtcggtgatgatgttcctctttacgctaacaaagtcggaccgtttcataatcccagtgaaacatatcgatactttgatcttccgttctgttcatcagctcctgttaaggagaagaaggaggctctaggggaagttcttaatggagatcgattagtcagtgcaccttacaaacttgagtttttgggtgagaagaactctgaagttgcatgtagaaagaggttgagtagagaagacgttgctaagtttcgtgatgtgattg

SEQ ID NO: 102076 - DNA, 368 bp, Arabidopsis thaliana columbia
gagaaaaggtagacggatttaaacaaggcgacgtcgttttgccagtgtttcatcctcaatgtgaagaatgcaaagagtgcatatctccaaagagcaactggtgcacaaaatatacaaacgattatttatcaaacacaagacgatatggaatgacttcaagattcaaggactctcgtggagaagatattcaccatttcatctttgtctcaagttttactgaatataccgttgtagatatcgcacatctcgtcaaaatatctcctgaaattcccgttgatatagcggccttgctcagctgcagtgttgccacaggacttggagctgcgtggaaagtggctgacgtagaggaaggttccactgtcgttatc

SEQ ID NO: 102077 - DNA, 302 bp, Arabidopsis thaliana columbia
cccacgcgtccggtgatcacaacggtaattatgtccgttaaaacgttgaggatgttgggagctgcgagaaccatcgacgcgggtaatctcattgcttacattcacgcgatgtatcaacggtcggagacggtcgacgttagagaactttcgagagtttatggttacgcagtgacgatgagaatgttgtgtggaatgagacatgtcacgatgcgaatacatgttttcggatgatgggagactaggagaagccgacaaacatcatcttgaggtgattttcaacactcgacactgtttgccatgtt

SEQ ID NO: 102078 - DNA, 372 bp, Arabidopsis thaliana columbia
ccctcgcaaggccttataaggaaaggctcgtcaccttattggagaagcggtccatgggcgggaacaaggttcactgggataccagaaatggatgcatcgtatgtgaatccattgggaatggtccaagatgaagtcaacggcacaggagttttcgctttttgtgttctgagaaatttcaatttgtcatacatcaagctaacgccagaaggatcattgaggattacacggaataatggaaccgactggatcaagcactttgagggtccgctaacctcgtgtgatctatatggtagatgtggaccttttggcttgtgtgtgagatccggtactccaatgtgccaatgcttaaaagggttcgaaccaaaatcagat

SEQ ID NO: 102079 - DNA, 383 bp, Arabidopsis thaliana columbia
aatcgattctctggtttagacaaaacagcaatcgagtctcttcctctgtttagattctctgctttgaaaggatcaaaacaaggtcttgattgttctgtctgtttgtctaaattcgaaagtgttgagattcttagattgttgcctaagtgtagacacgctttccacatcggatgtatcgatcagtggcttgagcaacacgcaacttgtcctctttgcagagatagagtctcaatggaagaagattcctctgttctcactaacggaaacagtttcaggttcttgaatcagtctgagattagagaagattcgagcttggagctttacatcgagagagaagaagaagaagaaagaatacacagagaagaacttagtgggtcgtcgag

SEQ ID NO: 102080 - DNA, 395 bp, Arabidopsis thaliana columbia
accacgcgtccgcggacgcgtggggccgctgttaacggagagttatggatctggtggatcttcttcgccgttgtcggagctgacgtttggtgatacggaggaggagattcagccgccgtggaacgagaacgcgttggagaagtatccgtcgtacgagatcgattgggattcgattcttcagtgttcgagtcttgtaaattagatgttgccataggggtattttagggactttagagctctctgcgatggagtttttggtcattgcagagattttattattattaagggggtttgttatgttaatatcaaataagtttatctactttgatgttaattagtgttaatctctgcgtcggtccaagctgtttttttttggcatgcttcgaccgtgtgag

SEQ ID NO: 102081 - DNA, 407 bp, Arabidopsis thaliana columbia
atcgtggagtaaaggaagagactttggtgttgccctcgatttctagtgatgaattcgatgagtttaggtcgattgttcgatgtcctaatgctcctttgaactattcttcatctgttgatttgcaattccgtggagatttggtgaagaagaagatgaagaaacagagccgtcgtgttcataattgggaaaaggttggttatgaggcggtgattgacggcgacacggtggttgtgtttgttaaaggattgactcgaagacctcacaaggaatcagatccttcttactataagtgtcaatttgagattgagaattcggaggagaaagaggtgactcaagctattgctgctgcgcaagaagttgtgaggtgtggtttgcctgagagtttgaagctaaatccagagatgatg

SEQ ID NO: 102082 - DNA, 403 bp, Arabidopsis thaliana columbia
  unsure (1)..(403): unsure at all n locations
caagactgtccaagaggtggttgcagccggtcaaggactaccggagagatatctccatgcaccaaccggcgaaggcgaaagtcaaccacttaacggtgcggtgccggagatggatattccggccatcgatctcagtcttctcttctcttcctctgtagacggtcaagaagagatgaagaaacttcactcagcactctctacatggggcgttgttcagcttttcttgacaagatttacaagctaaccaagcagttctttgcgcttccgaccgaagagaaacacaagtgtgctagagagacaggtaatatccaaggatatggtaacgatatgattctgtctgataatcaagttcttgattggatcgaccgtntgtttctcactacttaccctgaagataagcgtc

SEQ ID NO: 102083 - DNA, 416 bp, Arabidopsis thaliana columbia
cccacgcgtccgatccatatctctctccctatatctacttatatataacaaataaacacataagttgacatatatactatatacaagtatattaattatacatatatggctgaccctaacaatcctatcactgaacctaaagctataatccaatcttctacttcatcgtcagttactattgtgccagttcccacgtgcggtgacagcctctctgactctgccacgtgtgaaaacccttgtccacttgatactatcactactactactactactgtttgttttgcggctccttcttctactgcaagtggtaatgatattaatactttaatggccactgacaccgacatctctcgccggaaaaagaatccggtttatcggggaattcgttgtcggagtggaaaatgggtgtctgaaat

SEQ ID NO: 102084 - DNA, 121 bp, Arabidopsis thaliana columbia
cggacgcgtgggcggacacgtgggctttgggaagcatctaaaatacggtgttcattgatgcttccatcgagatcgacaaaagctaagatcgttgcgttttgaaacgatggcggaagaacat

SEQ ID NO: 102085 - DNA, 391 bp, Arabidopsis thaliana columbia
gttggtgactcagctcatacagttcacccgttggctggtcaaggagtaaatctaggatttgcagatgcgtgtgctctctccaaagctatagcagagggcattgctcttggtactgatataggcgaggcgaatctgctcaaacgttatgaagcagagagaaaacctgcaaatatagcaatgatggcggttttagacggaatccagaagatctactcgttggatttcggaccgctgaatgctctaagagcagctgcattccacggggctcactacatttcgccgcttaaaaagcgtatcatatcttatgcttcaggagagcaatctttgccgctattttcttgaagaatgcgaaggattgttcgctttgttctcaaaatactctgcatcatct

SEQ ID NO: 102086 - DNA, 225 bp, Arabidopsis thaliana columbia
cttcctcagcgtttcgttttcttacataaagtctttttctctatatacacaaatcttgttgttgttgttgtcacggcaccgccagttaatacggcagccgtcaaaaccaacgaaggtctcagactccgttacagacgagtgaggaagagatcatggggactttacacacccgatatcggagatcctttcaacaagtcacatatcaggctcggtactttcgacaca

SEQ ID NO: 102087 - DNA, 412 bp, Arabidopsis thaliana columbia
cacaaacatttttcttgaattcagagtttttctgatcaaaagctccctctctctctcaccatggatccgagactacaacatgctgctgaaaccggaagcatcaatgacttttatgctctgattgaggagaatccttacattcttgataacatcaatgccgtgccatttgttaacactccgctccatgtagctgcagcttctgacaacattccatttgccatggagatgctgaatcttaagccatcgtttgccagaaagctgaacacaagtggctacagtccattgcatcttgctgtggaaaaagatcatagagagtttataacatggctgctttggcgtgatcccggacttgttcgcgttaaagggagagaaggaatcacacctttccatctcttagcgattagaggagacg

SEQ ID NO: 102088 - DNA, 179 bp, Arabidopsis thaliana columbia
ctttctttgaattagtgggaccatgaataaccggacctgtgacacttaaaagcgctaaaggtggtagctcaattgatttggcttcacaataatggacttaacatgttggactcaaaggagaagacacacgtttgggaactgtatattcttctgaatgggtttcaaagtcacctttgcct

SEQ ID NO: 102089 - DNA, 358 bp, Arabidopsis thaliana columbia
ctttcttaagtaaacaaatctttagagagagtggaaaaaatgaattcgaagatcatcgaagctttcttcatcgttgctctcttcactacctcatgcctcgctcaagctccagctccttctccaaccaccaccgtcactcctcctcccgttgccactccaccacccgccgcaactcccgctccgaccaccactccaccacctgccgtctcccctgcccccacctcttctcctccgtcttcagctccttctccgtcgtctgatgcccctaccgcttctccacctgcaccggaaggtcccggagttagccccggcgaactagccccgacaccttccgatgcttccgctcctccacctaacg

SEQ ID NO: 102090 - DNA, 340 bp, Arabidopsis thaliana columbia
gttcttggagagcctcggaaattaagacgagccgcgataaggtttgtgagggaatggtggggtttcaagaacaggcctatactcgttgcacttgatcccaaaggtcaagttatgtcaaccaacgcctttcctatggtctggatctggcaaccctttgctcacccttttaccaccgcaagggaacgtgatctatggagcgaacaggagtggaatcttgagttcttgattgatggcactgatcctcattccttaaaccagcttgttgatggaaaatacatatgtctctacggaggagaagatatgcaatggatcaaaaacttcacgagtctctggcgtaatg

SEQ ID NO: 102091 - DNA, 353 bp, Arabidopsis thaliana columbia
attttaatgctttgtcctacaaatttattgctgtacttgttgcgagttttgcattagcacgtaacatgcaaagatcagagattgataggcgtatgcaagatgatatcatagcggcaaaccgtctatgcttgggaagccgtgcttggcgaaaactaattcgttacttggcagagatgcgatgcttttttgggccttttggagatggaatatgcagtcctgaacgcgttttctggaaacttgattctatggaaagcttttcgaggatgagacagtctataaggaggaattattctgggactgatcatcacggggcagcagcagattatgacgatcagacagaaacaaaaagtgat

SEQ ID NO: 102092 - DNA, 234 bp, Arabidopsis thaliana columbia
ggttttgctacacactggagcacgcaaaactggctatcgaaaaccacacccacatactcaacttcagggcattcaaggccaatcacaagaatagtcaggggatcaacgttaagaacatcggaagcagaagactatacaagtccaccgtgactaatgccaatgctacgacggagttacctcaacccttgttccatccatgtctattcaaacaaaaacgagtgcaatttgttctgt

SEQ ID NO: 102093 - DNA, 377 bp, Arabidopsis thaliana columbia
gatggctctaacttctcagatgtgcagaggtctgtttctggcagtggagttgcatcctcatattctaaggctaacaacaatgtacctgcgactaggaatcaaaactctagctccaattcgcattacacgagtatgtaccagcctgcatccatgacaggttatgcagctcagggttactacgacagagtgtctccaaacaagtcatatggtcagtatggtagcacggtgaggtctggtatgggttatggttcttctggatatggttcaagaacaaatgaaagaggatggctcaatacagacaacatatatagaagccggggaaggggtaacagttacttctatggaaatgagaacattgatggcttgaatgaactaaa

SEQ ID NO: 102094 - DNA, 391 bp, Arabidopsis thaliana columbia
cccacgcgtccgcagattctgaaaacaaagttatgtcctaacaagacgacgaatccgatgtggaacgaagatcttgtttttgtagctgcagagccatttgaagaacagttcttcttgacggtcgaaaacaaggtgacaccagctaaagatgaagtcatggggaggctgatctcacctttgagcgtatttgagaaaaggttagatcacagagctgttcattccaaatggtacaacctcgaaaagtttgggtttggggctctggaaggagacaagagacacgagctcaagttctccagccgaatccacctacgagtttgccttgaaggaggttaccatgtaatggacgagtcaactctgtacatcagtgacgtgaaacctacggcaaggcaac

SEQ ID NO: 102095 - DNA, 304 bp, Arabidopsis thaliana columbia
cacaaatcttctttatttgttattctcaatccttccttcatccccaggtttctttcgattcgttgagtcattcaatttttccatcactgggtttttctctctgaatccgatcggagaatccagtcgattactaatctagcgctctctttttttctactcgatgacttatcacgaagaagacgatacagtttctgaatttcgagttagagttgaagaagatggagttgataaattaggtcattatgttaaacttactgaagatttcgaagtacatcgacaagaaacagaacaagaatcttcatca

SEQ ID NO: 102096 - DNA, 298 bp, Arabidopsis thaliana columbia
ggaacttgaaaagagtgattgtgcagccttgcgtaacaatcttgtagtagcgatgacagacttttgtgttcactatacagccatgattgagtgttacataccgaagattacgaaacgtcttcgggatccttgtgaagttgttagaaggcaaaccttcatacttctctcaaggttactacagagagactacgtgaaatggagaggagttctcttccttcgattccttctatcgctagtggatgaatctgaaaagatacgtcgacttgcagactttttatttggcagcatccttaaagta

SEQ ID NO: 102097 - DNA, 376 bp, Arabidopsis thaliana columbia
aacaaaactcaaaacccaacaattaaagaaacaacatttcaatatacagatttacttccttttacagattttcctaaaaaaccgaaattgaaacaaacaaaaccaaaagacgttaccttttttccattgattcctcaattctctaaacaaatgagttaatcttccatggctgccatgttgatgcagccatggccaccgtttcttcctcatctaaccctagttttcttaaccctaatcctctttttccctaatcaatccttttctcaatccgattctcctcgaaacatcgaaacatttttcccaaatgacacaatcacccctccagttcaatctccggttctatcgccgccgcaaaacccatcatcttcgtcatcgg

SEQ ID NO: 102098 - DNA, 273 bp, Arabidopsis thaliana columbia
gattactcagcgatatgcgattaaaagcttcaaatttgcagaaacccatcttcttcagctcctactctgcccatgatattctcagagcgtctttcattgagaagtttctggtctccagaatcctttttgtgcacttaagattccttcttggtgtttggagaaagttaagtgaacatcccagtgcagtgacttcaacatgttctcaacttctcttatcacatttgattcgtcacgaactattagtttacctcctggtcttactattctatccac

SEQ ID NO: 102099 - DNA, 293 bp, Arabidopsis thaliana columbia
cctccttgagtcgaaatgctactgtgacgactctgtttgcttctcttccttttcttcctcggcaacaacaacacccttcctctcctcactccctatccgccaaaatctcttcttcttcctttttcttattttcctttcaatatctgatagctgcaaaacagaacccaccatgtctggtctgtataattataataacttctcaccttctagagccgcttctcctcagattagaaccccttcctccgatgttgacagtcaatacatatctcagttgttagcagagcatcaaaagc

SEQ ID NO: 102100 - DNA, 233 bp, Arabidopsis thaliana columbia
cccacgcgtccgagggaagtgagagattcacaggcgaaggcaagaggagttccgtacaagaaaagaaaaaccctaattccgccgccggcaaaagggtttctctccggcaatcctccgttctcctcctaacccgccagcgttaatccggtacgagtcacagaaacgatcagactgtgacacgttttgtcaatacctgcgtaagcaatagccaccggttcacatctcgcattgtg

SEQ ID NO: 102101 - DNA, 410 bp, Arabidopsis thaliana columbia
cccacgcgtccgctttccttcatctctcctcttctacccaaaaccttctccacctcggcaacttctctactcagtgaccatgaaaacgacgaatccgccgccaccataaccgccgccgtctctgtcccaatctcacctctgttaactccggaagacacacaaaccgtagaaaagttccattcaatcatcaaagaccactatcgcaaaaaccctacaagccccaacgacgccatcttaaaccctagcttaactctccatgctctctccctcgatttctcccaaattgaaacttcccaagtctctccctccgtcgtccgatgcgtgatagagaagtgcggcagtgtccgccacggaatccctcttcaccaatctctagctttcttcaattgggcaacttcacgagacgatta

SEQ ID NO: 102102 - DNA, 189 bp, Arabidopsis thaliana columbia
gccaaaaggaagtgtgtctatcttctgttcctctccctctgaaaacttattcctttcgtttcaacttcctagtcgtcttacttcacataacatctctctttgtttaggatctcttcttcccacgattacaaaatcatgtccggtgggttttccccgatcgtgggtcggatctgattcatcggaagcaac

SEQ ID NO: 102103 - DNA, 357 bp, Arabidopsis thaliana columbia
cccacgcgtccgcgcagacttcgcactcacacactcacttccattgctccaaaaaaacattgtatctacttcacttgctgtagagatatggtatcaagatcttattcaaacctcttggatcttgcttctggtaacttccattcgttttctcgagaaaagaagaggtttccaagagtagcaactgtcactggtgtcttatctgagctagatgatgataacaacagcaacagtgtctgctctgatgctccttcttccgtcacacaagatcgaatcatcatcgttggaaaccagcttcctattaaatcacatcggaactctgctggtaaattgagttttagttgggacaatgactcgctt

SEQ ID NO: 102104 - DNA, 359 bp, Arabidopsis thaliana columbia
attctcctctgaatcaacctctaagttgctgttgaatgagaaagctttgatgtgagcgagcctgagagtgtaacaaaggactgatgatgaagattattgcggcgtttctcttcctcttggtcacgacttttgtttcccgttgtttgtctgcagacatagaatcggacaagcaagcactgcttgagtttgcatctcctgttcctcacagtcgcaaactcaactggaactccactattccaatctgtgcctcttggactggtatcacctgcgccaagaacaacgcccgtgtaaccgcactccgtttgcctggatctggactttatggacctttaacagagaaaacatttgagaagcttgat

SEQ ID NO: 102105 - DNA, 362 bp, Arabidopsis thaliana columbia
  unsure (1)..(362): unsure at all n locations
aatcaaatcaccatggctttagcttggtgcgttgtacgcaggtcagcatctaagtttgcttccgtttatggtggccgagtccgatctatctccgccgttgcgaaccgcgcctctctagctcgcaacccatcttcaattcgtccattcgtctctcgcgccttaaattactcgacggctattgatcgaattagctccgagcaaacgcttatccgagttattgactccgaaatcaactctgctttgcaatccgataatatcgattcggatgaagagatgactccangaagctttccttttagaattgaagacaaacctggaaatcagaatgttacattgactagagactacaatggggaacatat

SEQ ID NO: 102106 - DNA, 323 bp, Arabidopsis thaliana columbia
ggtgggagaggttatgatatagtgatgaccactagtctatcatcagatgttcctgttggatatttttcgtgggcggagtatgatattatgtctccggtacagccaaaaactgagagagctattgcagctgcttttatttctaattgtggtgctcggaattttcgtctacaagcacttgaggcattgatgaaaactaacattaagattgattcttatggtggttgtcatcgaaaccgggatgggaaagttgacaaggttgaagctcttaagcgatacaaattcagtttggcttttgagaatactaacgaggaagattatgtcac

SEQ ID NO: 102107 - DNA, 358 bp, Arabidopsis thaliana columbia
gtcaatttgtagaagcaatctcactttttccctttctctgtacatcatcatccttcaagctcggagctctctcttcccgccggcgatctcctccgcttctctccgattttaagtcgatcgaatggggaaaatcaagaaagtgaatcaaaggggtcatattgctacaccgtatccatcaccatgttgtaagaaagaatgggctggctcaacctgtccagtatgcttggagtctccacacaatgcggttcttctcctgtgttcgtcttatcacaaaggatgccgtccttacatgtgtgctacaagcagccgttttgccaactgccttgatcaatacaggaaatcctacggtaacgaaaac

SEQ ID NO: 102108 - DNA, 321 bp, Arabidopsis thaliana columbia
tttttaattttcgattttggattgatcgattaagccacttagactagtcgctgcgaaagaatgagactgagaagttggacatctcgatacttttggaaaccccgatttgttgatgactcttgaatctatgggacggtgaatcccaaagaatggttccattttaagtttgttttgtattgttggtggaggctggatgattttgagagcacttgtacttgagctttgttctcatatcttgaattagacagtggaatagaaaagatgacaactttgtattagtaagatgatgaacacttgtagctcttcttgctagatatttga

SEQ ID NO: 102109 - DNA, 292 bp, Arabidopsis thaliana columbia
gaccacgcgtccatctagatcgcgagcggccgcccttttttttttttttttttttttttttttttttttttttttttttttttttttttttttttttttttttttttttttaacccatctaagaggtcgctcttgccatttcgctcatcttcaaaagcttattcattcatcaaatttggggcaagtctgaaccatcaatcatctttttaaccctttttaatttaatttcccttttcttatttccttggtgttaccgatttcaatgtccgtgtaatcgaaacttgctttcttt

SEQ ID NO: 102110 - DNA, 291 bp, Arabidopsis thaliana columbia
agtttcccatttgatgatcataattgcccgccaatccatttggtcacctcattctgccaaagtgcatattcatggttaaaggaggacattgagaacgttgtggttgttcactgtaaggctggcatggcaaggacagggcttatgatatgcagtcttctgttgtatctgaagttctttcccactgccgaagagtgtatggacttctacaaccagaaacgatgtgtggatggaaaaggacttgtgctacccagccaaattagatatgtgaaatactttgaaagaattttgacc

SEQ ID NO: 102111 - DNA, 391 bp, Arabidopsis thaliana columbia
cagctatccggcctgtttcagaggatgatacagtagtagaagagctatcaattgttcctagcggttcagatccgtctgcttctactaaagaatacatctgtgagtcgcaaacactcgttgaccggaaaagacactgtgagaacgaagctgtggaggaaccagagccaaaacgaagactgaaaaaagataactcacagagttcagattctgtctccaaacctggaaagaaaaacaaattcgtagtacacgcagctggtgatgttggtatctgtggtgatggatacaggtggcgtaaatacgggcagaaaatggtgaaaggaaatcctcatcccaaggaactactacgatgcacttcagcgggatgtccagttcgtaaacacattgagacagc

SEQ ID NO: 102112 - DNA, 371 bp, Arabidopsis thaliana columbia
gtttattgcttaatgctagtatttgattatcttgttaatataattttcgttacggttctttagacgttaatgcaacgatcccatgctccttcctgcaggttgaaaaatgacaccggagacggatgctctcaaagttcagatcctacctaagcaccagtcattgccctacacagtcacgaaggccaagtcgaaatcattgatcctgctagttgtcgtttccgtgactatcacgttagggttattattatatgttttcaactcaaattctgttatatcttccggaagtttgcttagtcggagatgtaagctccggtacagcgtccttatcgacgcagggagttcaaggacccgggttcatgtgttcgggtact

SEQ ID NO: 102113 - DNA, 415 bp, Arabidopsis thaliana columbia
cccacgcgtccgcacgcatcgacgttacgccaccatctaatctctttaaacctccgtcagctggtttatctcgccggtctcgtttacttcaaacaagggtttatggtttcatctaccactttctaccaatgcaaagcttgtaactttgaggtatacatggctgcttctgatcaacaccggtctcgccgtcacgacgagagctcttcaagacccaacaagaagaagaaggtaagcagaaacccagaaacaaatctcctcttcaatctcaattcatgctccaagtccaaggacctctcagctgcattagcactttatgatgcagccatcacttccagtgaagtacgtctcagccagcaacattttcaaacgcttctgtacctatgctcagcttccattactgacatatctcttcaat

SEQ ID NO: 102114 - DNA, 395 bp, Arabidopsis thaliana columbia
tcaattcgcgcatttgacacacgcacaccctaatagagagatccacgctcgtttcaaggggttcacagatgccacaaccaccgatgatgcggcagtcgtcagcttcttccactaacatcaatcccgactaccaccacccatctggccccttcgaccccaatgtagacagttttggggcgaaacgaatgagaaagcatacacagagaagagctgttgattacaccagcaccgttgttagatatattcaggctcgaacatggcagcgagactcaagggatatgaccactctgcaaccaaccccagctgcagcagttgatatgcttcgcacagttgcctattcggataatccttcaacaagctttgctgcaaagtttgttcacgcatctctaaacaag

SEQ ID NO: 102115 - DNA, 345 bp, Arabidopsis thaliana columbia
agctgaaagaatcaagtgctgcagaactcaagctatcttcagcaatcattatggccggagtgttatgtttcctagctgccttaatctcgagcgcatgtggaatcggcggtggaggtttattcattcctatcatgactatagttgcaggggttgacttgaaaaccgcgtcaagcttctctgcttttatggtaaccgggggatcaattgctaatgtaatcagcaatctctttggtggtaaagcattgcttgattacgacttagccttgcttcttgagccttgtatgcttttaggagtaagtattggtgttatctgcaacagagttttgcctgaatggctcatcactg

SEQ ID NO: 102116 - DNA, 151 bp, Arabidopsis thaliana columbia
gtaaaaaagtcactttggagatagaccagcatataaaaaagattctttaaatgatcttttatcaagacgagattctgagaagtcgtagagctctcaacatgaagaacacgtaagaagcttgtagccatgggtggtgatactttcaaagatg

SEQ ID NO: 102117 - DNA, 419 bp, Arabidopsis thaliana columbia
gctgactcttcttctaactttctatttcttccaagaataacaaacttttttctcataagaaacaaaacaagaattctacaaaacttctcattaaacctctgttttcttgtttctcttctgctctgtattttcgataattctctctgttttgtatcctttcttattttctgtgaatctgtttttttatggaaatttaattcaaaggcttattagaggaagaaagaaagaaaaagaaaaaaaaaacccactggagctatggctgttgaagataacaagaacagtgaaagcaataatcatcaagaggtagagcttcataggaacgacttaggcctcgaagattcatcatcgccaagaggtgttctcggaatggtttcagattccgacaacagcagcagtagttgcagctcttgttcctctga

SEQ ID NO: 102118 - DNA, 382 bp, Arabidopsis thaliana columbia
atttggccaacgaaattactactcaagcaaagcctgtgaatagaattggttttattggtcttggagcaatgggttttggcatggcagcacacctgttgaaatcaaatttttctgtctgtggttatgacgtatacaagccaacacttgtcagatttgagaatgccgggggattggcggcaaattctccagctgaagtgacgaaagatgtagatgttcttgtaattatggtaacaaacgaggttcaggctgaggatgtcttgtatggacatcttggagcggttgaagctataccatctggagcaactgttgtacttgcgtcaacagtatctcccgcgtttgttagccaacttgaaaggcgtctagaaaatgagggaaaagacct

SEQ ID NO: 102119 - DNA, 130 bp, Arabidopsis thaliana columbia
gtgaaaaggctggactttatatccaatccttgaagcagtactcagagttacctgatataaaacgtgtaattgtaaacacacatgctatcgagccacaagctcttgttgagttttttggcactctttctaa

SEQ ID NO: 102120 - DNA, 235 bp, Arabidopsis thaliana columbia
gaagctcttgaaatttccatctcttcttcgtatgcttgagctttatgttttgagagcatagaaaaaggacgatgcgtcaaataatcattcactgtagttgttaacttcaagagctttagtggcgaggttctgcctgcttgctacaatgggttacgcccagctagttattggtctagcaggcagtggaaagtcaacttattgctcgtctttgtatgaacattgtgaaactatcggt

SEQ ID NO: 102121 - DNA, 349 bp, Arabidopsis thaliana columbia
aaaaaaactgatttgtttactctgttaatcagagaactttctctgagaaaataacaggaattcagttagttcttagttcctatcaatcaccagctgaataaattcgtttttaaaagagaacgaagaaattcaaaaaacccaattctgctttttcccgataacttcgatcgtcttcgcttgggttttgtgtaatttgagtctgtgaattgaaccgagccccaccaaagtaaatgctccataacgttgaaaacattttcttctttatacaagaatttcaaattgtttcactttctccataggggtttttggggttctctgtttttctttgacgaattttgattttgcaaat

SEQ ID NO: 102122 - DNA, 204 bp, Arabidopsis thaliana columbia
acgcccacgcgtccggtctgtgtctttcggtagaaatctgaggaataaatatttgaatctaaagaggatagagaggaaagtaaaaaagcaaaatcgaagttttgtgcaatttgctgggatcatagagcaattttcatttcgttattcgttgaaagtgtgaagcattttagagtcagtgagaagtgttaatggcgggttacagag

SEQ ID NO: 102123 - DNA, 365 bp, Arabidopsis thaliana columbia
aacagcttcaatactatgccagtctccttcgaaaacccagctcggagtcctttacacggccataactctagcctctataggaacaggtgggacacggttcacattagcaactgctggtgcgaaccagtatgaaaaaactaaagaccaaggaagctttttcaactggtttttcttcacaacatatctagccggagctataagtgcaaccgccattgtctacaccgaagacaatatcagctggacccttgggtttggtctgtctgtagccgctaatttcttcagttttttggttttcgtctcggggaaaagattctacaagcatgacaagcctttgggaagtcccttcacaagtctactatgcgtca

SEQ ID NO: 102124 - DNA, 332 bp, Arabidopsis thaliana columbia
gcttcgttggcgggtcgtcgtaagagcatagctgagatgattcagcggactcattcggcaggaaatcgtccaagagcacaagagatccatgccagttcctctgatacatcgtcagaacacgcaggaagattaccggagtccgatatagattcggttaatctggtgagggagacagattctctctccagcgatgctattgctagtgaagatccctttagcactgatttggcctcacaaagttttactagtgcacagacagagagattgaacgctaagcaagcgagccatgaggacaacaatctatctgtttttggtgcttctcctccatcctc

SEQ ID NO: 102125 - DNA, 342 bp, Arabidopsis thaliana columbia
  unsure (1)..(342): unsure at all n locations
cactacacttcctaagcctggtggtggtgaattcggaaagttctataccttacctgctccttaacgatccacgagttgataaacttccttactctattangattctgcttgaatctgcgattcgtaattgtgataactttcaagttactaaggaagatgttgagaagattattgactgggaaaagacatctcctaaacaagtagagattccttttaaaccagctcgtgttcttcttcaggactttacgggagtcccagctgttgttgaccttgcttgtatgcgtgatgcgatgaataagctgggaagtgattccaacaaaatcaatcccttggttccggtgg

SEQ ID NO: 102126 - DNA, 297 bp, Arabidopsis thaliana columbia
aggaagaagacgatcttcgatccagagttgagcttctcttctgccatcgtcttcttcctcgatctcggtcaattacgcattctctgatctgatttgtgagatctctcgtcggatcaccgttttttacatcgtcgccgacaacacttaggagtaattggatccagcagaaatgtcgataaacatgaaaacatttactcaagctctagctagaacggctgctgtgattgagaagacggttcataccacagtacaggaagttacgggaccaaaggctcttcaggattacgagctacttga

SEQ ID NO: 102127 - DNA, 357 bp, Arabidopsis thaliana columbia
aactactcgtttcatatctccgtctccggctcgatccgccaagtagagtaagcagcacatcatctgcactgcagcaatgactaaaaagaagaatcctaatgttttcttggatgtatcaattggtggggatcccgttcaacggattgtcattgagctttttgctgatgttgtccccaagacagcggaaaacttccgtgccctctgcacaggtgaggcgggcgttggaaagtccactgggaagcctctacatttcaaaggatcatctttccatcgggttatcaaaggattcatggctcagggtggtgatttttccaatgggaatggcactggtggggagagcatctatggtgggaagtt

SEQ ID NO: 102128 - DNA, 230 bp, Arabidopsis thaliana columbia
acactcagcgagaaggagagctattcatagaaaaagcggaagtgaaaaagctagcgtcttttttaaagcaggcctcagaggatgctaagaaacttgtcgacgaggaaagagcgtttgcacgtgctgagattgaaagtgcaagagcagctgtacaaagagttgaagaagccctgcgagaacatgaacagatgtctcgtgcctctgggaaacaagacatggaagatctaatg

SEQ ID NO: 102129 - DNA, 385 bp, Arabidopsis thaliana columbia
acccacgcgaccgaccacgcgtccgcgatctttcacatcttgacaaatcgaagaatcgctctcatcaacaaagtacttcttgaaaagaggaagcaaattgcgagttctaagcctacaggtagtgaaggattgaaatgtgccattgatcacatccttgaagctgagcagaagggagaaatcaacgaggacaatgttctttacatcgtcgagaacatcaatgtcgccgcgattgagacaacattgtggtctatcgagtggggaattgcagagctagtgaaccatcctgaaatccagagtaagctaaggaacgaactcgacacagttcttggaccgggtgtgcaagtcaccgagcctgatcttcacaaacttccataccttcaagctg

SEQ ID NO: 102130 - DNA, 337 bp, Arabidopsis thaliana columbia
acgatcctctctgacgtaaccctaaagtcatctctctctcattcatcgtacaatcatcatctacatgtattaccaatgcagctccagttttgtcttacatgtaaatgacggtgtgtgtatccttcacttaatttctctaattcagatttttttcaccttaaattaatttaattgagttattgtacatctctcaagctaagattctggttttgtgagttgagtggatgagaagaggagagattaactaaattagggtttcaattgtttacattttgtttgctttttatctcaagtaatggatcatgtctctcgctcacttcctctaccttttcactca

SEQ ID NO: 102131 - DNA, 323 bp, Arabidopsis thaliana columbia
  unsure (1)..(323): unsure at all n locations
gaaaccggtatttggaaggtccggctccggttatgagcagtatcaagcttcagacatctccacatcaaacaagacacattcttgctgaaactccaacttcaagtcccacgaacaaacccaacaacagcactacatcaaaagctccaaagggagctccaaaaccagggaagttgaagaagaagaagaagaagagcaagaagaagaaagtagcggcatggatcttagggtttgtcgttggagccatangaggaacaatctctgggtttgtcttctcggtgttgttcaaattgattattcaagcaataagaggatcagaaaaacca

SEQ ID NO: 102132 - DNA, 282 bp, Arabidopsis thaliana columbia
acagcttcttttgcccgatattcaaatataaaaatgcttaaacagttaggctcacgagactgaaggaaggaagagaagagaagagaagagagggaatgagaggacagccaaattggttcaaaaagaaaaccaaataggctttgccttttaccttattagcttttgtttttctttcttaattctgtgtttttttttttttgccccttgtatggggtttatgtttgtgtacatagagccccaaagtgtaaatgctcttttctgttaaaataattattatgtcct

SEQ ID NO: 102133 - DNA, 414 bp, Arabidopsis thaliana columbia
atcatctccttcgtgttcgagatttgatatcgactaatcgaatcagaggataagagaatggctcacagaatactgagagatcatgaagccgatggatgggaacgctccgatttcccaatcatctgcgaatcttgtctcggtgacaacccctacgtgcgaatgaccaaagcgaattatgataaggaatgcaagatatgtacacgacctttcacggtgtttaagtggcgacctggccgggatgctagatacaagaaaaccgaaatttgtcagacttgctgcaagttgaaaaatgtttgtcaagtctgtcttctggatcttgagtatggtcttccagttcaagtaagagacacagcactcaacattagtactcatgactctatccctaaaagtgatgtcaacagagagtattttgct

SEQ ID NO: 102134 - DNA, 322 bp, Arabidopsis thaliana columbia
acgcgtccaagaaaatcagccacatcagcagcctgaaggactagcgagtggatccttggatcttttaactatgcttcttaaggcaagttatactagctagattttcgtagtacgcaattattttttatgctaaatggacagtatttgtgttttgctgactatttttctagtcatatatagggtgccccaagtgatatagtgaaaactgcatatgacttttgctttgctgctgtcattcgtatcgtactccacagtgaggatcatggtgaactacagaatgcctggcagcttttatatctagtggtagacaagagttgctcac

SEQ ID NO: 102135 - DNA, 221 bp, Arabidopsis thaliana columbia
  unsure (1)..(221): unsure at all n locations
tgtcaacgccgtctctttcgtatggtacgatgctttcaagcanaagcataaagctactcagcagaacattcatttggagaaagcagctgttctattcaatcttggtgctagctacagccagattggactcggtcatgaccgcaccaccgtcgatgggcgtcgtcaggcttcacatgcgttcatggctgcagcaagggcgttcgctcacttgagggataacg

SEQ ID NO: 102136 - DNA, 367 bp, Arabidopsis thaliana columbia
ggggcttttgtttagaagcaaaaaagaaatccaagtcagatggaaatggatcatctgaagaaggtatgtcgaaaaaggagattgctcttcagcaagcacttgatcagattaccagttcatttggcaaagggtccataatgtatctcggtcgtgctgtttctcctagaaatgtcccggttttctctaccggatcttttgcccttgatgtagctttgggagttggtggccttcctaaggggcgtgttgtggagatatatggtcctgaagcatcgggaaagacaacacttgctcttcatgttattgcagaagcacaaaaacaaggaggaacctgtgtctttgtagatgctgagcatgctcttgattcgtc

SEQ ID NO: 102137 - DNA, 323 bp, Arabidopsis thaliana columbia
cgtccgagatgaatatctcccacctctggatatgtctcgacagcctcccactcaagagttagttgcaaaggatttgcatgcaaatgagtggcgattcagacatatattccggggtcaaccacggaggcatttgctacagagtgggtggagtgtgtttgttagctccaaaaggctagttgcaggcgatgcgtttatatttctaaggggcgagaatggagaattaagagttggtgtaaggcgtgcgatgcgacaacaaggaaacgtgccgtcttctgttatatctagccatagcatgcatcttggagtactggccaccgcatggc

SEQ ID NO: 102138 - DNA, 415 bp, Arabidopsis thaliana columbia
  unsure (1)..(415): unsure at all n locations
atccgagacgtggtaggaggattggtcgggggatactacgacggaggaagcaacgtcaagtttcattttccgatggcattctcaatgacaatgctaagttggagtctcattgagtatagccacaaatacaaagccatcgatgagtatgatcacatgagagatgttctcaaatggggcactgattatcttcttctcactttcaacaattctgctactcgccttgatcatatctacactcaggttggtgggggactaagagactcagaatcaccagatgatatctactgttggcaaaaaccagaagacatgtcctacgaccgtcncgtcctctcttccacttcggccgctgaccttggcgcagaagtttctgcagccttagctgctgcttcaatcgtattcactgacaaaccggact

SEQ ID NO: 102139 - DNA, 299 bp, Arabidopsis thaliana columbia
cggacgcgtgggcggacgcgtgggactgcgtcagctcaagcaaatagctcaggaggttactcagactaatagtagtgttaatgggtggggacggcgtcctgctgccttaagagctctcagccagaggctaagcagaggcttcaatgaagctgtaaatggtttcactgatgaaggatggtcagtgataggagatagcatggatgatgtcacaatcactgtaaactcttctccagacaagctaatgggtctaaatcttacatttgccaatggctttgctcctgtaagcaatgttgttttat

SEQ ID NO: 102140 - DNA, 229 bp, Arabidopsis thaliana columbia
tcaatgaccccttggccacggcatcgacgatcgataaagatggttggcttcacactggagacgtcggatttatcgatgatgacgacgagcttttcattgtggatagattgaaagaactcatcaagtacaaaggatttcaagtggctccagctgagctagagtctctcctcagaggtcatcgagaaatcaatgatgttgctgtcgtcgccatgaaggaagaagatgctgg

SEQ ID NO: 102141 - DNA, 313 bp, Arabidopsis thaliana columbia
  unsure (1)..(313): unsure at all n locations
aaaaatccatgaagaaaggatcactggctgccgaatcaaaacatgtgaagtcagttgtgaaaattgaagattctactgatgatgataatgaagaattcggctatgtgagtagcagtgactcggatatggttacaccgctttcgcggatgcatatgaagggcaagaaaagagatttaattgttgacactgatgaagagaagacctcaaagaagaaagcaaagaagcacaagaagtctctcccgaattcagatatcaaatataagcaaacaagtgcactacttgatgaactggaaccatcanagccgtctgacag

SEQ ID NO: 102142 - DNA, 379 bp, Arabidopsis thaliana columbia
aaaaagagacctacgagccttgggtcgaactagcagagaggtttcctgaagctaagggtattttggttaattcatacacagctctcgagccaaacggttttaaatatttcgatcgttgtccggataactacccaaccatttacccaatcgggccgatattatgctccaacgaccgtccgaatttggactcatcggaacgagatcggatcataacttggctagatgaccaacccgagtcatcggtcgtgttcctctgtttcgggagcttgaagaatctcagcgctactcagatcaacgagatagctcaagccttagagatcgttgactgcaaattcatctggtcgtttcgaaccaacccgaatgagtacgcgagccctta

SEQ ID NO: 102143 - DNA, 148 bp, Arabidopsis thaliana columbia
ccagcatcctctctatatctctctcgaggtacgcttcgagctcgtttatactagttttagtcgcttttgaatccaagaccattgtaaaggagccgagtttttttccaactgtactctacaggattgtgagatttcaaaactttttgat

SEQ ID NO: 102144 - DNA, 379 bp, Arabidopsis thaliana columbia
accacgcgtccgacgagagagaagaagcaaagcaaaattcgatcgctctgggtttttgatcttttagggtttctggcaaatttggatggaaacctcaactttatccaaagataatcataaaggaagaagctttcgttgttgtttccattgttgcagctccttcaaaaactcttgtctctattgctttcacagctaagaattctcgattccatcgttgtcgttttcgattttgacgaaattgggttcttctagattttggttatggaccgtatagctcaatcagatctccctttaagattcggtagctcccacgctttacctctacctcatcctcctagaatcccaatcgctgatgactcaatcacgcttcagattgatt

SEQ ID NO: 102145 - DNA, 308 bp, Arabidopsis thaliana columbia
accacgcgtccggtttcattcgcctctcatctcttcgaccaacaatccactttcctctcttgcccacttagactccttccttcctcgtcttcttcttcttccaatagaaactctctcgtctgcatagtcaaatccttctcaagctccgccacagcagataccgatagaaactccgatcaatcagcctcttcctcagtcctctccgcttccaattctcttctccgtgatacctccgacgaagcttcagctgcaggaccaagcgattggaaaacagcataagcttattgtaaaagtggtgatacatttga

SEQ ID NO: 102146 - DNA, 422 bp, Arabidopsis thaliana columbia
cataccttcaataagtaactctacactgaatcaactcctctgatttctcgataaaaatctagaggcaagattccccacggaattaaggtttctttgttaacctctccattgaagatatgggggaactaaacggagtcatcattccgactatagacttggaagaggtttctgataagattctgaatcagaaaatccgtgaagccagtgagagatggggatgtttcagggtgataaaccatggagtttcattgtctttgatggctgagatgaagaagactgttattgatctctttcaacgtccatacgaggtgaaagtgcgtaacaccgatgtgctcctagggagtggttacagagctccaaacgaaatcaatccttactatgaagcattatgtctctatgacatggcttctcctcatgctgtc

SEQ ID NO: 102147 - DNA, 370 bp, Arabidopsis thaliana columbia
  unsure (1)..(370): unsure at all n locations
agcagtattggtctacgggtcggccaccgtattgattattagattgctattattatatatacatgatcaatggaatatatacatatatagctatgtatttgtatatatgtagctatttactaatagatcttacatatatataaagcaagctaacatggaatcattaaaaggaggtctacgaagtatgacgtgaagttgaagacggcgataatattgaagatcaacaattcagtagatggttttcaggttcttctttgttttttttgtttcctttgggttcgttttagtggtagatcnttttttttttttaatgtttgattatgtgaggttaatttaagttgttatttactttattgagatttctttgatg

SEQ ID NO: 102148 - DNA, 308 bp, Arabidopsis thaliana columbia
  unsure (1)..(308): unsure at all n locations
atggagctcatcaccagactcggctaatgctaatttaaatcgaggagggaagaaagggtgcatanagtggccaagaggggcacataagaacagcttgaagacaaagctcatagaagcacaaatcgagagccaaaaggttcagctgaagcatgtccttgagcataagatctaggccacaacatattccaaaactaccagtcctangccattctactaatctttgtggctgagcagcagaactggatttttgatcccgttctcctgctattgccattgtcgcatgatctagcgctggtcaaaccaatcaa

SEQ ID NO: 102149 - DNA, 302 bp, Arabidopsis thaliana columbia
tttgtcaacatgaaaacatccaaaaagaaatcgaaacaaaaaacagaagaaaattaggattggacaatggagctttcaaatttggcaaaagcaggattgttttaaattattttaatattgggttaacgtctttttttgtttgtttccctctattagctaagttttggtttagactttagatcgaattgtggagtttttagtttttgactttgtttacatcagcttttgtttatatataataaaaaactaaacttatacaaaaacaacaaaaacaaaaaaaaaaaaaaaagggcggccgctct

SEQ ID NO: 102150 - DNA, 339 bp, Arabidopsis thaliana columbia
atttaatttcgatggatgttgatgagccaactactaaagtgaagggtaaatcaaaagttggtgagccggagaaagcagaacttgggtctgaaaaatctgaagaattggccagggtaacttttattttgaagttgttgagtgatattgttctcatgtacctacatggtaccagtgtcatactgagacgggatacagaaatatctcaacttcgagggtccaatctacctgatgattcacctggaaatggagggttaatttaccatgtcattcatcgattgcttcctatatctctcgaaaagtttgttggacctgaagaatggaaggagaaactgtctgaaa

SEQ ID NO: 102151 - DNA, 391 bp, Arabidopsis thaliana columbia
aatacgaatcatcagaaaatggatttcgagcttagatcagcgaaagagaagcttgaaagagagcagagagagaggaagcaaagagcgaaactgaaactcgaacgcgagaagaaatcagaggaagctgcgattaagcaacgcgaagccattgaagctgctcaaagagctagaagacttgacgccatcgaagcccagattaaggctgatcaacatatgcaagagagtttagtatctggagatggaatagtgtttgaacgagtcttccaagctgtttcttttcaaggaaatggagataagattaaactaccaccatcatgttttactgagttgtctgatcaaggagctttcgataaaggtcctttgtattttgagctctctgttgttgaccatc

SEQ ID NO: 102152 - DNA, 242 bp, Arabidopsis thaliana columbia
cgcgtccgatcatctagtcgtcggtgtcgccgcctttctccgccgtctgaaatcgtccttgttcgattttccgaagacgaagcaggagaagatatgtctgggaggttgctgaagaaggttctccaggaacatgaagattcgaaacttcataaacatcacgaagaataagaagaagaggacgaataagaatcatgagcccgttcttcgattaatccattcgatctcttgaacgatggtgatga

SEQ ID NO: 102153 - DNA, 317 bp, Arabidopsis thaliana columbia
gggcaagaagatatgttgcagcagcagattttacagcagttgatccagcgtcaggaccccacggggaggaatccgcagatgcaagctttgcttcagcagcagagactgaggcaacatcagcagatgcttcaatccatgtcaccctctcagagactccaacttcagcaacagcagcagctgagacagcagttacagcaacaaggaacccaacagattcctcctaatgtacgtccttatgaagttggcgtctgtgctcggaaattgatgatgtacttgtatcatctgcagcaacggcctgctgaaaattgcattaccta

SEQ ID NO: 102154 - DNA, 321 bp, Arabidopsis thaliana columbia
ttgatgagtccaagagagcaagtctcggaaagtgttcaagaatgctcaagcgccatctcacggattctgaacttcgacaagtcatgaatgccgagatcacctgcaaggcgaatcaattgccttcacgacttatcattgtcaatgacaagcctttaagtgaagatgagctttacacgttgcagacatgtccaaatccacccaagaagctaaaacccggacactattggtatgataaggttgctggctactggggaaagataggagagaaacctagtcagattataagtcctaacaacagcataggaggatacatcagtgaga

SEQ ID NO: 102155 - DNA, 291 bp, Arabidopsis thaliana columbia
agatatttcaaactacaatcagctcgagacccaagacgaggctcaggaagaaaccggatggaagcttgtacatggagatgtctttaggacgcccatgaactctgggttactgtgtgtttatgtcggcacaggtgttcagattttcggtatgactcttgtgacaatgatctttgcattgctgggcttcttatctccatccaacagaggagggctcacgactgccatggttctcttatgggtattcatgggcatatttgctggttactcatcttctcgtcttcacaaaatgtt

SEQ ID NO: 102156 - DNA, 367 bp, Arabidopsis thaliana columbia
ccttaagccttgggaaacaaaacaaaaacttgcttgggctgctgcaaaacatggtggagtagtatacattctggaacttttattgcctttgcaaaaagaaattcccttgcagcaaagagctgcagcggcttctttgttggggaagctcgtcgcacaaccaatgcatgggcctagagttgctatcacacttgtgagattccttcctgacggtcttgtatctataattcgtgatggacctggggaggctgttgtccatgcacttgagcggaccactgagactccagaacttgtgtggacaccagcaatggcagcatctttatccgcacagattgcaaccatggcatcagatatttatcgtgaacaacag

SEQ ID NO: 102157 - DNA, 394 bp, Arabidopsis thaliana columbia
tttctgtacaacggtacagggacatgggttccgcagagaaaatgaacccctttgcagagcaagaagcttgggaggaccatcagattgaaaacgcagcattaaaatttggtgcaaagaataaggaggtctcagacaattacgagtttgtatttgaagaccaaatagacttcataaaggcatctgtgttggctggtgataattatgaagatgaaatgcatgctaaaccatctcaagattctgctgggaaatcggcttttcatatgcttcaggaggatagaaaagctctgccaatttatacatatcgtgatcaacttcttaatgctgtgaaagatcatcaggttcttatcattgtgggggaacgggttctggcaagactacacagataccccaatat

SEQ ID NO: 102158 - DNA, 388 bp, Arabidopsis thaliana columbia
agcatctccgttgaagctttccacaaatctcaaatttgtttggagactctcaaatgtatccttctctcgacgatgatttcgtctctgatttgttttgcttcgatcaaagactgatcaagaggatacctttccagattttgtgtcatatggtgtgaatttgcagcaggagccagatgaagtctttagtattggagcttctcaattggatttgtcctcgtataatggagttttgtcgctagagccagaacaggtggggcaacaagattgtgaagttgtgcaggaagaagaagtagagatcaattctggttcatctggtggagctgttaaggaagaacaggaacatttagatgacgattgctccagaaagcgggcaaagactggatcgtgt

SEQ ID NO: 102159 - DNA, 270 bp, Arabidopsis thaliana columbia
cactgattgtaatcacagtggctatgaactttcaagtggaaccaccggagaagaagaaggcgaagaactcgtctccagcacattcacctccgtcgtcgtcatctccgtcgctttctctacttccataagaaatcgtcgtgcactgcttagctcggatctcaagattgtactacccaacgctctcactcgtttcgaaaagcttccgctcaattctctcttccacggagctctacgcaaccagatctcacctcggaatcactgatcagtgtg

SEQ ID NO: 102160 - DNA, 307 bp, Arabidopsis thaliana columbia
aaaagatgggaaacatttgcacagaggaaacaagcctacgaccctctagcgattctatcacctggccaaagaatattccaaaagacaacaggaaaattatctcccatccaactcgcaaagtcaaatgcaacaggaagtcctcaaatgtaccattacgcatcaatactgcctaaacctagaactgtataaaagtttcctgtgtccgtccttgtaaccgctcaggctatgcagcattaaagtgaaaaattctttcttttttgtttcttttggtgaacaacaaattttacagtctgaaacagattgggac

SEQ ID NO: 102161 - DNA, 211 bp, Arabidopsis thaliana columbia
cttgttcgtttccagagcacagaacagacaagataagctacgaaaattctgtatctggaatctgtacacgttgtgttctacaaattgattcagagagcttctttttgcattgcttctcccaacatcaccaccgctttgcctctgtctgttccggtaccggttccggttgtttcttctgatgagattcctttcatgtcagaggaaattatct

SEQ ID NO: 102162 - DNA, 435 bp, Arabidopsis thaliana columbia
aaatcttcttggccatgggacttttggtcaggttgctaaatgctgggttcctgatacgagacagctttgttgctgtaaaagtaataaaaaaccagcttgcatactatcagcaggcattggttgaagtatctattttgacaacgctaaacaagaagtatgatcctgaggataagaaccatatcgttcgcatatacgactacttcttacatcaaagtcatttgtgcatatgctttgaacttctagacatgaatctgtatgagctcatgaagataaatcaattcagatgcctatcattaagcatagtcaagctcttctctaagcagatcttacgtgggttggctcttttgaaatatgctggcataatcgagtgtgatctgaagccagagaatattcgtctgtgcgcgagtgtgtagccgactgaaattaagatgattg

SEQ ID NO: 102163 - DNA, 407 bp, Arabidopsis thaliana columbia
cacgtcttcgtcttcttcttcttcaacgttcctctccaaaatcctcagaccaagaaatcagcatggccgtcgatctaatgcgtttccctaagatagatgatcaaacggctattcaggaagctgcatcgcaaggtttacaaagtatggaacatctgatccgtgtcctctctaaccgtcccgaacaacaacacaacgttgactgctccgagatcactgacttcaccgtttctaaattcaaaaccgtcatttctctccttaaccgtactggtcacgctcggttcagacgcggaccggttcactccacttcctctgccgcatctcagaaactacagagtcagatcgttaaaaatactcaacctgaggctccgatagtgagaacaactacgattcaccctcaaatcgttcct

SEQ ID NO: 102164 - DNA, 254 bp, Arabidopsis thaliana columbia
gggtccacccagtcgtccggaatcaatccatctctccggttccattcactatccaccaggcacccctgaaatgtgtcctagcctaatacactaagccaacaacagatgcatctacgttacttacacttatgttttttggaaaggccatgaaccttctcctgcacaatattattttagatacatgtatgatttggttaagttcatcaagttggtgcaccaagctagtctctatgttaatcacagaatttgccctt

SEQ ID NO: 102165 - DNA, 579 bp, Arabidopsis thaliana columbia
tttgggctgatttagtgcttgtaagggtagcccccctccgacaccttccctaatcccttcgagcacgcgatcttcgtggcaaagaaaactctaaaaagagaaaagacccatccgagcgccaacgtcggcatcggaatagaagcctctcgtaaaggacgtagctactaatcaaaggagaaaccgtggagcgtagggaagccgaggcccgtacacgaagtagacgccccgaagcggctgaatatcgatcccagtcccctccacatggttcttctaagcaacacagccggcggatccccttcctaactcgtgttcgcctatgacgccgactagagggatacacccctccctcactcccccttaggaaagtagtaaaaaatcaaggtacctaagtgggaggcagcacccgccgccgatacaagcaaaagcacgatcggaaaattctctgaggacgcaaaaaacgtgacactcatagtctcactcaagtccgacttcggagacctccctaacaccactatccctagtaacgacatcgtctcacccctgatactaacggagctagctatcctcgacgtcgccgaa

SEQ ID NO: 102166 - DNA, 376 bp, Arabidopsis thaliana columbia
ctcattccaaaaaaatggggtctcgctctcaaaacctctcctttctcgtcctcctcctccgtggcttcgttgccgtctcctatgcttgcgactgtacccctcctaaaccatcaccagcacctcacaaaccaccaaaacatccagtcaaaccgcctaaacctcctgccgtcaaaccacctaaaccaccggcagtaaaaccacctactccaaaacctcccaccgtgaaaccccatcctaaaccaccaaccgtcaaaccccatcctaaaccaccaaccgtcaaaccccaccctaagccacccacgaccaaacctcctccgtctactccgaaaccaccccatcacaagcctccgactacaccatgcccaccaccaacacc

SEQ ID NO: 102167 - DNA, 321 bp, Arabidopsis thaliana columbia
cacgacagcgatgacgaacataacgcaagtatagccgtatcttcgtgggacgtctgctagttgttcttacatgccgccggagaatttacgcacggagttaaattgggagtccggatagccagaccaacgaaagggtaaattggcgagaggcgaaaataaagaaatctgcagaagaaaacggtaaagtagagctcgtctcccttacgcgcgtacccatcccggtcctccaccgtactctccctccctatcacccactctccgcaaacgccgaacatacacacccgggacgcctccatacaccaaagatcacgcgacgcacgc

SEQ ID NO: 102168 - DNA, 486 bp, Arabidopsis thaliana columbia
tttgggctgcattatgtgcttgtgacttccactcgaatatcgacgtcggaatcacgctcttacccgaatatggcgaagcccgcgctccggatgacggcggcgaggcggactccgactccggaaatcatgaaaggccctcagacactaaaccaataagagataacaatactatcatcgggaaaacccactagtacgccaccgtcaaagagaggaaaggagaccacccgggaaagatcgcctaggccgccttctacgctatcgacgtaacctaagaccggactgagagagccgtggccaccttcgccgacggagaagaggacttcgtcgacgcccgtgccaccgaaccaggcggaataacaggcgacaccgaacttgtgttccccactgaggtgtccggctaacctctccattgcgcaggtttagggaaccctcgctcggcttacgctagttctgcgttcgcgtccaacgccgccggcgaatagaaaa

SEQ ID NO: 102169 - DNA, 443 bp, Arabidopsis thaliana columbia
agccaccggttgctggacctaacggaagggacagtcactagagtactctgattgctggcccctcgcctcaccttaggctctggtggtgacctttattgaaaattcttaagcgatggcccttctaagtcgttcgtgctgctcaccttggtggatagttgaaaaccagcagtgaacctcatccttccctacttaactctagttgccaatgctctcgtctaagtcctttctattgtcgacccctttgtttccctagaaatcacatcgaaagagggaagaaacaatggaaaagagaaagtagagaatactgcgcggtatgagagcctgacacgtagacgtgatagataataatcctcctaataaaagggccgcgctgcccggactatcggctctagcggcctagggaaaagtatcgccgtccgcgtatcaagcaaagtaccgcccga

SEQ ID NO: 102170 - DNA, 168 bp, Arabidopsis thaliana columbia
cgaagaacccccaggcgaagggaaaagtcctcatgagaaccccagctctacaggaacttgagctaattgagctgaattgggccctacccttcgtctccctaaggccttctcctgcccgatggatagagataagaacccactatacggcgtgaccgtcaactccgcgga

SEQ ID NO: 102171 - DNA, 428 bp, Arabidopsis thaliana columbia
cctaacggcctacgaccacgtcataataatcaacgggatgcttgagtgccgtctgctgccattaataataaatatagcggacgctctcctggcgctagactcccccgaacctacacgtctgggcttctctgcaaataagaccggcactatcttctaaagagccggttagctcaccgataaacggccatctcatggtctataatcccgcagatcgccctagtccaacgagtccaagtccataaccttctagaaagtcaggtcacattatcatcatacatttgcccccacccggcgtgaagactagaccgtcccgtacaaccttaagcccaaagacggagacgacgcattcttcccagcgaccggacccagtgtcttctaaggacgcggtaagatcatatccgcgcccgtatccgaccactcccctaaga

SEQ ID NO: 102172 - DNA, 482 bp, Arabidopsis thaliana columbia
gcttgtccaagtataagaactcacgttccgcttctcttcctgcagttacctccggtctcgcggtccctcctatagtttaaccaactcttgccaatattaataacaacgacgaccttccaccaatcatgagttagacccgttacggagtctatgattaagatctacgttaagtctctccgcttgaacctatgatgccgctgtctctaaagtctaattgttccgattcaccgtatgcgcccccgaagaatctggcgcggtggtccgagagtatgacgattacggcgagtgaggtcaggacttgtctgaatggcgccagagataaggtaggccccgtcgatcgtgaggagacgacggatgcactaaaggactggacgacgagcctgacggaggaatcctgtggaggaaatcacaactccgagctacatctaaatgcctacatccggtcgagtagcgcgtccataaatcatacgatacgcccagaa

SEQ ID NO: 102173 - DNA, 427 bp, Arabidopsis thaliana columbia
gtgcccgaagtctccattggaactaacggcgactcaactattagactacagctagttctgaagtaagtccatgtcaattgagtgtcactataaggaagaagtaggagtagctgcaactcctgtcccttaattactccctctagagaaagaccctcctgacttggataacaaactccttcccggagaaactaagccgaattgcgcctagcccttccgcacgaggaaaactggcaaaggcgacgcagtcatcgccaatgaagtcccttctaagaactccgaagtcactaccgacttaagaattctaccctaagtcctcgcggaaacggtcgcgaggagcagaaaatagacagcgcctataggataccttctaggaggcgtaatcgtaactccagtaatagcccggcacccggagaaacatcctacatgt

SEQ ID NO: 102174 - DNA, 581 bp, Arabidopsis thaliana columbia
ttgggctgatttatgtgcttgccttctcctctctagactatcggaagtctcagtctgaccctctataacttgttacgaatctataagtccgctcctcctcctagaaatagtccaaagactcccgcaagtacttcgcagacggacctctcgtcggcccagccgacgagaagaacacacctgaacggagtgcaatcaccaccggattcttcgacatctctcacgaaggaggaccccctcacgttaccacgctacctttataaaatcacttcaacagtttattcatggcgtggcccatcctagacacccggtacttcaatgcccactttgacggttgtgcccgcacactcacctcatacttcttcggcgacgacttaagcggacacgagtccgtaagcgagtgccggatgttcgcctatatagccgagagcactacgccgagcaccacactaacgtctctcggctttaatgatgaactcttagtaaatgccgaggtcgtcaaagaacggagagagaagagagacgagcctaagaagaaagcgagttgccgcgctagaaagctctaagaaacgccccgactaaag

SEQ ID NO: 102175 - DNA, 429 bp, Arabidopsis thaliana columbia
tttgggctgctttatgtgcttgtcgagcgaaaaagtccactgtggtgaccagcctttggtgaagaagaagaagagagacaggaaaacggtgatcaacggactcgtcagtctagtgtagtctctctagaaggaagtcgacgctaggacgacgcgcgttgtcgaggcctactccggaattaagaaccgtaaccattagacggagtgccatgctcctaagagatgtaatgacggcacccatactcctaattccggtaaaatacgggaaaagtcttagacggtcgtcagagccaccgccgttaccgagaatttataggatactactgcttagctagtcaggtttcacggatagagagtcgcgccgaagcccgtctagcatatcggagttaacgttaccgtcggaagatatatcttcggcattcctattaacta

SEQ ID NO: 102176 - DNA, 412 bp, Arabidopsis thaliana columbia
gcttgcgtcctccgaagagctttagagccctaaagctataagtacatagtctctcgtacttccgagaagaagattcacaatataagcccgaacagcaagactatcccaccatactcacggacttcgagatccacagggtagcggccacgggcaaggcctaagagcccgaaaaggccacggaggagaacgaaaccttcgcctccgactaggctatcccctaggggaacatgacctcgtactccgtagtcacccacggctacgattattcagcgtggtgcacttccgttcacgagtcaaatacctccagaaaccggaaatgcggtccaaaccgtaatcctgctttaagccctctctaccactagatctccccggcgagatgaaatcataagggagattccgtctcttacgcagt

SEQ ID NO: 102177 - DNA, 402 bp, Arabidopsis thaliana columbia
cgccggcgctgctcgagaaatcattatcggcgccaagaggtcccattagacgtagtaaaacggaatctccccgcctttcgttaccaatgccaatgatctcgctattaagagtaagcctgataatccgcacggccgttgctatctatctttcgacggctctacgagggttatcgacgctacgactgtcggaaaggccgtcgccactcgcggacacggcgacgccggaaagggccgcgtcgtcgttacgaagatcgtcggcgtcagagctaccgcgatcgagaccgactttactcgcgtttcctaagtcccgacggaaggatcctaggcctccatttccgaggacgccgctctagaagtcgacactcccgctattattattggcaataaagatactactacggc

SEQ ID NO: 102178 - DNA, 428 bp, Arabidopsis thaliana columbia
ctcgtgtagtagtaaattctaatgcgaagtagcacccgttttacgacgaaatctaaaaagagcggaaactatatcccggtaaaagacgggaaatacccgtatagaggaaataagttcatgatttctcagtgacctcagtattcggttaaagaacaccttaaaagataataggaaaaccactctttacttaatctgtaaagctaaaggtaataggaagcttctaaaggcattaccatgtactaacatcgttgaaattcagaatcgcacaaaagcccttcgcgcttgcttccgcaattgtctaggtcaggtagtaagaaagcgaaaaacctccctccccccgccctccccggcgaataataaaccccatagctcgaaatagaccgggataaccgcacaggactcttacaaaaacttcatgtagcgctacc

SEQ ID NO: 102179 - DNA, 447 bp, Arabidopsis thaliana columbia
aaaacaaccgcattgatctctctctctctctctcttgcaataaaaaggtattaacggtaaaatagcacgtctcccgcatcttctctaactcttcactctccactatcggagtctatggtggttattgtagttctatagattggagtccttaaaaaagttacaaatcctacttaactcctccgtaaaattattatacatttcgttccacgcgcttatctatctcttgctcatgtaaatgatacttaaataagtttcaaatgcccagtcgagattgtcacagttgcgatatcaagttgagtttaacttatgaagtctcctgctctgtgctcaatatgcacgaagggctccaagaagtgtgaggctgaagttactaaagaccgtgctgaggagacgaatgacattgccgattgcccgattaaactcgcctaagaatcgaagccgcgcggg

SEQ ID NO: 102180 - DNA, 405 bp, Arabidopsis thaliana columbia
gccctagagactggtcgacccctatacttataagcacggtgatctaaactacgaagaacagaaagcccgcagtggacggcgcacctcatgtcgaaccgaacgaggcctctataagagagtcagtacaggacggccatctcggcgccgaggccagggccatcttaacgaggatcgagaccactactagagtcatctgcatctacaacgcctccggcgagaaggggaggagaaccagggaaccgatactctccgcttagaagagacctaagccttagccgatagcgccgagtctcacgtcgagaaggccaataatagaggctctcgcgttaccgtctacgtcgagctctcatgccataagtcctctggcggctccgtcgcctgtagggttcgccacggcgccccgag

SEQ ID NO: 102181 - DNA, 325 bp, Arabidopsis thaliana columbia
gcggttgcggttgcgactgcggcttaagaggttgcggaagatgcggaggttgcgttctggaagaaatgaaacgggccttagcgattaaatcaggctgctcagcggtcgataacaaaacaatgaagtcagagtagactcactcctacctctctttagcaaaggagcattaaactacagactactccgccggcttcatgccgaaagatgaggccacgaagactacgttcgcctagaaataaattagagtcggctaaaggatcagacctaaggttcccgccgccgccggcgacggaaacggctacgccggcccgggcgctaagcgcct

SEQ ID NO: 102182 - DNA, 445 bp, Arabidopsis thaliana columbia
ctgctgctgctcccagcactcgcactgctaacaggccgtcgaagctccgtactgacgccggtctagatctgtatcctttcacttagaactctttccacggcgctcctaaattggaactgaatctaatcttctgcttcgttgctgtcactggtgacccggcctcggattctcttgtcactctcgaagtcgggtcccctgacggctcgacttccaaggatgtagaccgtccctcctagttcaacccgaacaagcctccggttacgggatggttcgtgcggaaggaagtgtgcctcatgtcgtaaagaactccgctactcaacgaattcactccgtgagataacgacgccccgaggagaaaactaccttactagacgagcaaagcggaaacgaccgccttcacggcgaccggggatcacattagatcctccgtactcacgtactatgt

SEQ ID NO: 102183 - DNA, 436 bp, Arabidopsis thaliana columbia
tatattaaaaaaaatatagattccaaaaaacaaaacggccgacacggaccggaagaggaagacggcactactagacccattaaatctattcaagtccctcctaaagtcctatgcaatcaccttactattgcctaaaactgctttcgccctactcttgactctacgcctagtattcgtctcccgtctcgtccatgagtcccattcctgctctttcgagtcaagaaagtctcggctactctgcgaccccttctaacggatactagagttgacctctaaattagtctcctaagtcccggagactagccctagaccagcccctgttgcccgcctcgacatcagattgcatactaattattgcgaacggaattggaggtcagacctctctactatgaagtagacttagtccgcagtagtgactcgtgaagacgaagaagaa

SEQ ID NO: 102184 - DNA, 483 bp, Arabidopsis thaliana columbia
aagcgcctcttaccgccggcagggacttctctactgaggcagtggccgtctcagagaaggtggtatcgctcgacgaacaccccgccaagagaaagtcgcatttaaacgccgaccctcatctcggaccaactcacagggtaacgggacctttattagaacctcctatagcttcgcctgtagctttgtgcacggtcggacatccgctatatcggtgcgagctgccagacgacttcgatatcaggactacgagattttaataggttcacatcggagcgcggacgaggtaccatgagttagcgagagaatgaatgccactaagcgacctggacaaggacaagcccggctaagcccttaccctgaacgtactaagaaagtgcccagtcggactactcgtttcccagctctaacttcaacatctattaacaaagaagaaaataccgggacattctcgggaaaataagagagctcctctaataatacgcg

SEQ ID NO: 102185 - DNA, 486 bp, Arabidopsis thaliana columbia
tttgggctggattatgtgcttgtgtagtcggcgaacatagtcttagggacattgtgctccggagccttggtgcatgaacgaaagctacaagtcccatatggtgcagttcatgttggcttaggaacttggcccaatggaatggccaaagtcgtcattagtcccttctaagctactccgattgtcgtcctacctgatcttcacgaacggccttgtaccgtctaagccacaggaaaggaagtaagaggagcgcataatgtacggtaagtgaacggaacgataccccgggtattaaataccaatacacccagagacttatggcggggaagaggttaagaaatctttggtgaggacttgacgacgattggaatccatgtggcggtccatgccagaggatcataaggcgatctccccgatggctggaaaatatctcttaactactcttaagttcttgtccgccgcaagtaccccatagtgcatgactccgac

SEQ ID NO: 102186 - DNA, 447 bp, Arabidopsis thaliana columbia
tctcacggtaagcacaaagtcaaggccccgccgctcgtgcccgacggaggcctacggataagaagacggacatcacgccgccgccggagggaccatcttcatcttctccggagaaggtaagagcatcattatcgcccggatcccgttaagttccaggtgtccattctgacaagaaggccgccatccgctcctgttaattgctataaggatttattcccggaactaaaggaggcgtagtcggcggcgggcacagctaggcgaccttcacggacgagcctaactcctactctatcggagacacctatgtgaccattgtccttaataattctccagtcgtcgtaactgatatctggaccccttacgagatgctctaacttgataaggtctcccccaacaggtcgcgtttcttgaacaaagaagggaagtgcagccctagcgataccacgc

SEQ ID NO: 102187 - DNA, 524 bp, Arabidopsis thaliana columbia
tgcttggaaagctccgcctgcccttagagtatagaatagataagagaagtcatgaaaacctctgagtcggaactcgcatatgccgcgcctgatgaaccgacctagagagtcctcccccgtaccgtcctctttaatagtattattgtcccgttctggctcgccttggcattggtgttggccgccctcctcgacgagaccttccctaagctaaaggaaaccactctgtgcgatgacatgcccgcgaagaaagtcaaactcctgccccacagcgacgggccgccagtcttcagcaagttttaggcctcggacctaatatcctactaggtcaagaatgccgtaggtaacgacggggagaagccgagctctacaaaatccgtcagcccgaccgaggcactcgttaagaaagtcatctaagagtcaaacccgtagtataggtcgacggactagtctgaacggtccttggacctctcaggtaagccactgagctccgctaggtcagactcgctcgagaaccgcactacggc

SEQ ID NO: 102188 - DNA, 542 bp, Arabidopsis thaliana columbia
ctgactcctcctcgattccttcttctcaaactgactgcactcttccttctttcttctgctgactgaaaattagggtttagggtttttgattttcgttctctattagtttctccccctcactctcatggcgatgaattttcaatttatgtgagattttattccacaatcggaataattttcctggcaatggcgacgaccaatgctccacctgagctagcttcaggaaacccttgctgcctcgcttggcaagggaagtacataggaatgaagaagaggcgagatgcttttaaagaaggagtaactcttctccagaaggctatagaaaatgttaatgctgaaaaatccaatctcgagagaaaatttggggagatggcgactgacggagatactaaggaaaatggttcaactgtgaaagcatctttggagaaagaaatatctcgtttgaagtttgagatagtgtctttgcaacaaaaactggagcggaaccttaaagaaaaaagtgaagaaacaaagcttcttcaggatcaagcttctggtcgaga

SEQ ID NO: 102189 - DNA, 411 bp, Arabidopsis thaliana columbia
gtccgctctcactcgttttataaatattctctcccgccggatctctccccctccctcctcctttccagctcaccccaatctagaaattctcgcccccccccgccagagagaaaggcaagaaacgggcgccgacccgaggtaagcagccgtcggcacctctattaccattacgcccgcgacgtccggatagacgtcctacagagaccatcccgacctctcctaggagaaagtctagggagacgtataagacaccgaacccgaaggactcaaagctctcgcgaaagacggctccgctggaattgccgaaggtagcaaaggatcccggacggaagacaatatcgactccatcttccgccggttaataccatcactcgacgatgtcgcactactgaaagggcacgccatacctct

SEQ ID NO: 102190 - DNA, 409 bp, Arabidopsis thaliana columbia
tcggcggaagtttgtagtgacatcgatgcgtaaactgcctgctcgaacggggcacaggggtgaaagatcaactgaattactcagcagtcggcctttcttgaagccctttctaggacagtcggagtctggatgtgagcctcactgggcaaagttaacgaccagaggtaccgggggtgtaatgtttctgattcacctctaaatcccaaacaggcaggatgcgctggtcgtcccgccgagttgctatatggaactgagagtcttaagcgggttacccccggcaagtagaatcggtgacgtgggacgaattggaagttgggccatggcgtttaatcgtgtgtcaattcagaatttataaagggcgccggctgaccaagatagtaggatggcggctacggaagctgaaacttgt

SEQ ID NO: 102191 - DNA, 397 bp, Arabidopsis thaliana columbia
aacggccgagctacaggccgcagccttcgagctgccgccgaaggagaggaagagagaggaggagcgggtcccggagaagaagtacaacgccgaagttgctccgaagaagaatgttccgaataggaagtccactcctacaagagttgagtaccatcctcaggaacacgttgcgaaggagaaggagccgactccgccgaaatgtgcagttccgtccaagggaggccctcacgccgatttcgaagtccagtctccgcctactacatgcacttgccgcactaacgttaccgatttcacgatcaagaagacctcttagtctccctgcccgagatagacccctaacggcgccccttccaaagctaataaggtcatgacgaatacgtcccgttgcgccgagttt

SEQ ID NO: 102192 - DNA, 465 bp, Arabidopsis thaliana columbia
ggcttggaaactttgggctgcattatgtgcttgagactcctccggttacgggatccccggctaggccgtcaaacgtcgggccttcgagataaatagtcccgccgtcgcaaaagcaacaaaaaattagtccgtacatcactagtaggtaccggccgaagcactcaccccgataatgtcaaataagaagcacgacttcgaggacaagaattacactgcctgtacacatgatcatcctccatactaaagctacccgcgtacacgtcccgaatcctcagatacgaactcgcacgagtctacaaagacaaactaacctagaggttcactaccaagtacagctaagtctcctctcaagtagactccatccggcccggtctccccgaaagacgtcggtacaacttaccgcgactcgaagttagagaacacctcctcgcgtgttagcgcgaagttaatcgaaaccaagacaac

SEQ ID NO: 102193 - DNA, 446 bp, Arabidopsis thaliana columbia
gtcctaagctccccgtgactccttcaccctcgatgtcaacctgaacttcgtatctcctaaaccgacctcggtatggactaaataaaccactcgagagcattgaccggcaagactcgagtcccatgtcacgaacactcctacacctgctcctatggaagattcacacttcttagaaattgaacttgaacttgacctatctgaaatatagtgaagagtacgaatacttagagtaagaatacttagagtaactcgaactcactgatgatcgcggacggagtcctggcggctcgacgaaaatctcagttattagacttgaacttgcgaccgaaattcattgatgagactctgaagaacccggtataggcccgaagaaagagactgaggcggtctaaggactgtccggcatggcgggatacgtgaccgacgagtccgggaatatggcgtca

SEQ ID NO: 102194 - DNA, 519 bp, Arabidopsis thaliana columbia
gcttgtttccctacaattccgcaaattaccaagaggtcccgtctaaccataagaagaagaaaaaacgtccgctgatgggaaatctgctcgtgctattggagttggtggtcataccgtcctccggactgccaagccatctccagagagaggtcatattgccagaggaattgcaaggaatttaatcgactttaagaataattactctagagagtcctaaggagttaaggaaagatctatctcctatagcgtagactcctctgatcatgaagtctctcgcgttataactgatggccgtgacggtgccccttatatcgttctcttgacgattgatgactttgagataacgccggagttggtggcgaatggagttaagcctgcgaccgatgtagtggtcaaagttaaggctaagtgtgcggcccctatgctactaaccggcgtagcccatacgaatttcaattgcgatatctaagttaccgccgatgaaaatcgtcggagcgactccgaccctcgtaaaaatat

SEQ ID NO: 102195 - DNA, 396 bp, Arabidopsis thaliana columbia
gagaaagtgatttcgtggatgacgaaaagccgatccgtagcttataaagtggatgatgagaaaagaaggaagaagaagacaaagacgaatagtggtttcttttttggtttggtaatgggcacaaagaagagacaataagatagtcagtcttgtagatttgttagattagattgttcttgattgtgtattttcttgattctttcattttagattgattgctacatatagatgactagatcagtttggtgggtacgtgcaagtgagagagattctttatacgtattcttgtgattgattccctaagcttgtagtttagtgtggtaacataaaatgtgataatccagatttaatatgcgttgaacatataattatatgcgctaaatcaagagatttgcg

SEQ ID NO: 102196 - DNA, 462 bp, Arabidopsis thaliana columbia
tgcgggccgatagtcaccaaggtagacttgctcagagccacggaccatactaataggtcggataatcccgacggattcgtagccggagaagctgtagccgaagtttaaccacacgaggaagtacccgtcactcctaagaagcctaatccaaacgcctaggtcgctaacgcaccgtcggacaacgctaggagtaccgagtgcgtagccgagcccgtaccttgggctgaagaagacctcgcccggagttaagctgtcaaggtgtaatctagggaaggatcagctagcgacgtaaccgagcttcccacttgcgtcgacgacgttatctaccctccggaggctacatgcgctctcgaagacatcgacgctcacgacgatccggctaaacattcctcgacggccagatagaaggcgaaggaatttaaggccgacagcgagtctactcacgtacacgtaaagaccgac

SEQ ID NO: 102197 - DNA, 463 bp, Arabidopsis thaliana columbia
ctctgccgctttattacccctattgtcctcttcttaactatctacactcatagaccttcgcaaaataataacggccggactcccggaactcgactaaatctccctaacggttattccaactgaaaaatctgatactccactcgatgatcctgacttaattgttgcagctattgaattgccattcttcttggcaatcaacggaactggagtcgacaaaggaggaggaggaggagaaagagagacggcctctggcaggaacacatatataatgctatctgtcgcaatggaattggaggccaatgacgaacctattggagacaaagaagtccacacggtcagcgcctccgtctgccattggaaaatcccggccgaatgaattaaaaattacccaggccacttccacaatccggaccctgatcacggcgtgtccggctagccataataccccctgaccaacaactcc

SEQ ID NO: 102198 - DNA, 523 bp, Arabidopsis thaliana columbia
tttgggctgctttatgtgcttgtctcctcctctcttggacttaaaaacgaactgctctcccctctctcctcttacagtctcgactgtcccttctcgttcttattactacgcctctgtcctccttctccttgatcctgaaggccctgacgtcgaagatgatgacgccctagaagaccttatcgagtcctattatctctcttgcttcttctcctcgatctagctcgagctaatggcctcggactcggatttactctttgacctcgacctcatcttcgtactcaaactcgacttctttatctagattgcgaagttcctgcttcttactcttcctgaccatcgggacgaagacgagcctgaaggaccgttggaggatgagaaactcatggagctcttggccccccttgacgatgttcttctcttcgttgacttatagatgttggactccgagctcgtcctagaaatcttagacatcgataccttgaagaagacgtaactgcatatcgcggagactgcccgtgctctc

SEQ ID NO: 102199 - DNA, 492 bp, Arabidopsis thaliana columbia
tttgggctgctttatgtgcttggtgagatctcttatgaaaaacggtccgcagatctccccgggtcctcagggccgtccgctactcaaggactcttgccgtctaatgagggcccctccttgcggccccgaaggacccgaaacacgtcgacctatacgaacgggcgaagaccgatgggaacaaagtaattcccggcacaatggactatgtgtaggattacccaggagacgcggctcacgcggagccattcgacgcaggatacctggcgctataagggaagagccccggagtagccgaaagcgcgaaagtaatcagtgacactaacctcttagctctgggcaaggcggccgaagctaacgaggagtcgattgagcttttcggaccggcgaatctcagtttgcacgaataaggacggactacaaaagccgagtcgagcgacgtaggtgaggtagagaagtcgacggacctagataagcatctcaagcctcgtgaag

SEQ ID NO: 102200 - DNA, 480 bp, Arabidopsis thaliana columbia
tgcttgaaaaatatatctaaatgacctatgggccctatccggaactgcccggcccctctacccttgaaacacaaaaagacggttaaagtgttattgctaactctctcctcttcttcttctcgtgttgttgcaccttctattacttttgttgcgactcttgttactggcgccaatcatggaatctctggaaattctttattattgatctaggcggtcaatcccactaagatataaatcctgaccgacagtgctaagactcctgacgcgaactttgacacttcatgcgttcctgtcggaatcggcactcttgctgccgctattgccttcaatggcgacaccttggtgccggtcaatggaagataagtctgctggcgggccctggccaataccccgttgccctacttctagatgaagaccaagcacactctagctggaaacgagacctcgtctattggagacaacaatacgactaacaactct

SEQ ID NO: 102201 - DNA, 374 bp, Arabidopsis thaliana columbia
tccagctgtctaaggcgatgggttgcatggaaaactctgagacgactttaatggtaaacctcttgatggttctactatcttggatccttctgtcaaacctacgaagaccttgtctgtgactgtgttggtgtcctaattgaatgctaacgctctatgcggagtcagccctgttgctgaaggcgtcatctcatctggagtcttggcggaactcacgatctcgaactaataagcgaaaaaacctaactaaacgaaagtagtaaaccggaatgacgaccctgcggtaaagctagcacccacgacacataccggcgtaaatgaccatccaaaccctattaagaataatttcattgtcgacgtactcgtctaataagtcc

SEQ ID NO: 102202 - DNA, 417 bp, Arabidopsis thaliana columbia
tacgctataattgtggccagaggaatcgcgggataccgtattcgagcactcgcttattggctagctactcgagaaaattgacgctcccgggcctggcacatccccgtcagagtctactataggaacgagagtctctgagcccggtaagctcgccagttagaaaggagtcacgtcagaacgggcgaggaagtcatataaggaaacgaaagcagaggagtcagcagattgagaatcggggataattcatgacagaacagaagccggagagacgtcataagcggtatcgtctcgtatctagccctccttagtctatagatttaaaacgctcgaagcagcctagacgtccgaaggagacggaccagtcgagagacgggtcgtcctatacgattacctataccctcattacgttaatacgct

SEQ ID NO: 102203 - DNA, 259 bp, Arabidopsis thaliana columbia
cgctccagaaaaagaaaattaaagtcaacggcccctccccgcattctctccctaaggaccaataaaataaactgacgaagtttgggccccagcattcaaatactctcccgctctgctcccgaaaatttttttaagcagacttaatactacctacactctctctctcactctcgtacaagtcatggagtgacgctggtgcgtactaacggtccacgtagagttgcgatcgctctctcctcctcctcctcctccctccctc

SEQ ID NO: 102204 - DNA, 330 bp, Arabidopsis thaliana columbia
aatgaaagagactttgatgggacttggagaagagaaaagagaagcgataaggcaattatgtgtttggatcgatcaccatagaagtcgttgtgaatatcttgaggaggttttgtctaagaccgttgtggctcgaggccaaagaagagtgtcgcagcgaacttaaggactcagtgccatggttttggactctggtcaatcaagaagctggtggagaggtatttttggttggggacttttggtgtacttgtgttcgattttgttgcacttttatatgtttgttaacttttgttgtattttgtaagtcaaaatttttggtttattgtgggcaaa

SEQ ID NO: 102205 - DNA, 319 bp, Arabidopsis thaliana columbia
agaccacgcgtccgcccacgcgtccgctcttaactttcgtttcttctcctaccttcttttaccaacctttcctttctcttacacacatatatatatacatatatagagagagagaagaggacaaagagttgaaagatgaagactctcatgtcttcatagaaacaagtgatatgtgcgctaagaaagaagaagaagaagaagaagaagaagacagttctgaagccatgaacaacatacaaaattaccaaaatgacctcttctttcaccaactcatctctcatcatcaccatcatcatcatgatccttctcaatctgaaac

SEQ ID NO: 102206 - DNA, 428 bp, Arabidopsis thaliana columbia
agatgaagtcaaatccctagattgacttgctcaacggcgatttcatctcgataattagccaatgtcttcaccggagaggaagaggaagagggtgacgtcgacgaagaatccagcggttaagaagaagaagaagatttcaccggtgccgacgccgataccgtcacttcctgatgatttgcttgtaagtatcttcgcacgagtctccagattgtattatccgattctctctcttgtctccaagagctttagatctctcctccgttcaccggagctttacgagacacggtcactattaggccgaaccgagagttgtctgtatttgtgtttacaggagggaaatcctgattcgaaccctctctggttcactctctgcatgaaacctgacagaaccctaaaaaatggcaagaagaagaagaagaagaagatgt

SEQ ID NO: 102207 - DNA, 271 bp, Arabidopsis thaliana columbia
agataaaattctggggcaagaagaaaaattcttctggagaaggttcactctgatttggaggccagtttattatctctcagacactgatgagattgtttgatactcttttaggagtaacagaaaaaaaaacgtttggtttggtatgatggatttattgatatttttcggaaacccaaccccccaagtacagtttttcggggtttgttggtcgagcaactttggattactggttttctttttggtctttttttttgtaatatgatcgactacc

SEQ ID NO: 102208 - DNA, 284 bp, Arabidopsis thaliana columbia
aacagcgtccggataaacatgccataggctgcagatgggtttataaagtgaagttaaacgcagatggaagtttagagcgttacaaggcacggttagttgccaagggttacacacagcaggagggtgttgactttgttgacactttttccccaatggcaaagatgactattgtcaaaacattgttggttgttgcagcagcaaagaaatggagtttgcatcagttggatatatcgaatgcctttttatatggcgaccttgaagaagaaatttatatgactcttcct

SEQ ID NO: 102209 - DNA, 372 bp, Arabidopsis thaliana columbia
gtatccgctcgcatggtcatggcagcaatggcggcggaagatgaagttgcaaaaattgcgtgagtttgtacgttcagaatatgatcactcctgtttacgctcctgtcgctcccgagctttatacgagggtctgaaggtcgctgcaacctccgatttgatgcttgcgtatctggatttcttccttggtggggatgaaaaaaggacagaccttccacctcgacttcaccaaaggtttccaatgcccatattgtttggtggtgatggcagttacatggctcctttctcacttcaaaatgacaacattcttaccagtctgatgagtcagcttggttcgcctactacttggtatagactggtggctggtgtaaatgc

SEQ ID NO: 102210 - DNA, 265 bp, Arabidopsis thaliana columbia
agataaaaccaaaaatgttatttctttcaaactttctctcatcttccttcttaatattttcatcgtagccaccatcgcagccgcagcggccgttaacgccggtaccaaaggttgggattctcggccgtccaaaaccaggcgtccctggcctttcaagaagctcaacaaaccggtggttttaatgatctcttgcgacggtttccggtttggttaccaatttaaaacggacacaccaaacatcgaccttctcatatccggaggaact

SEQ ID NO: 102211 - DNA, 322 bp, Arabidopsis thaliana columbia
  unsure (1)..(322): unsure at all n locations
aaagtctctgtcttcgtctccttctttcttcttctctctgtcatcattttgcttttttttcttctcctacatgccctagattttgggtttctgaaataaaaaatggctcacaggangactttcacttccagaaaccgtagcgtttctctctcaaacccatctttctccattgacggatttgacaactcaactgtgactttaggctacacgggtcctcttcgaacccagagaataagacctcctttagtgcaaatgagtggtcctattcactctactcgcagaacagaacctctcttctctccttctcctcaagaatctcctg

SEQ ID NO: 102212 - DNA, 327 bp, Arabidopsis thaliana columbia
agaagaagaagaagatggtgaagaagagagttaatgcaactgcaagaagatagtaactaatcagcaccgtccatttttgtcatctaattctttcttacttggccgcaacttccaaccacatcacacactctttctattcccttatatattcccatctcaaaagttcttggagacacataaacattaaaaaaagaaaaagaaaaaaactataaacataaacgccaatcgcaactttcttgtctttcaatgggagagaaaggtttgaagcggtctggtgttgcggtggtggttgcattactagccatggttcatgtctctgtttcagtt

SEQ ID NO: 102213 - DNA, 159 bp, Arabidopsis thaliana columbia
ataaatctcatcattatccttctttctctccatggcagaaactcctcaaccgtatctcatcttcgtcttcttcgtcttcactctaaccgttgctacacaaaccaccggttcggttaagtgcaaaacaagtttgcaccgttacccgtttggtttctccga

SEQ ID NO: 102214 - DNA, 274 bp, Arabidopsis thaliana columbia
aacaatcaaaactctcgtttcctcttttattcagagaccaagcaaagtcaacaccaatcagatttcccgtcataagagcttcatcatcttcgtcggcgtcaaatcataaacggtgagtgcgtaaaaccaccttcatcaacctcaccgcagccgcagctctgttctcaacaacgttttaattcgtcaacaaacgcaccgcgatgattccagttgctgtggtagagacgacactcgagaatcacctcgggacacaatcaaacgatgtgaatgcttt

SEQ ID NO: 102215 - DNA, 225 bp, Arabidopsis thaliana columbia
acgcgtccgatattgtttaagtaggtagattcaaggccatgacaacagaatatcaacctagctagtttgatatattctgatgaaattagtttgcctagctaggattattattttgtgttgtgagttttcagggtgtgcaaacgcaaaataaaataaaaattgtgaccatattctacaaaacagattatatcaaaaacatgaataatcatttaatatattattgag

SEQ ID NO: 102216 - DNA, 308 bp, Arabidopsis thaliana columbia
tatcggatcagtgacttctgcaaaccgtctagacccattttttgtttatctctggacacagagatcgcaaattcttttttcttaaatggaaggttccatgaacaagcgaggatacgaatgcagtcaagaggatactgacaagctgccagaatcaaagagacaaaaagtgcctgctttagcaagtgttattgtggaagctgtcaaagtagatagtctgcagaggctttgctcgtctttggagccgttgtttcgcagaattgttagcgaagaagtggaacgagccttatcaaggttgggaaacgcaaagt

SEQ ID NO: 102217 - DNA, 305 bp, Arabidopsis thaliana columbia
cagacgcgtgggattacataaacgataggttagacaagaggacatggacttatatatttggggcttgctgtgccacgaccgttttcataccatctttccacaattaccgtatttggtctttcctcggccttggcatgaccacctacaccgcttggtacctcaccatcgcctcttttctccatggtcaggcggagggtgtgacacattccggtccaaccaagcttgtgttgtactttaccggagccaccaacatcctctataccttcggtggacacgctgtgaccgtggaaataatgcatgcgatg

SEQ ID NO: 102218 - DNA, 369 bp, Arabidopsis thaliana columbia
accacgcgtccgagcgctttttcatcttcctttgttctgggtttctctccaaaaatcgccggagaaattcaaatcgtcatctctaattcgtcggagaatccaccgttaggtagataaacacggtttgtttctgaaattagggtacgaaaaaatgcccttgtttatgcctgacgaagagctggcgcggctatctagcgacgccgcgtcggtggttgcggagagagccgacgagtacatacgaaagatatacgccgagctggatagtgttcgagccaaagctgacgctgcttccatcacggcggagcagacgtgttcgcttctcgagcagaagtacctctcgctgtctcaggatttcccttcccttgaatc

SEQ ID NO: 102219 - DNA, 343 bp, Arabidopsis thaliana columbia
agcccacgcgtccgggcggatcatcggtttcgaggttagactcgttccggaggattttgacaagggaaagatcttcgaacaggcgggatcattctcgcgttgaccaagatcgtgaattggatattgaaagacagtgaattcagtatatagtatatacacacatacgccggttaaaaaaaaaaaagtataaacacacatgcatccataattaatccttaattcatgaaccataatacttcttcttccttttaactttttattcttgtactgaaatcttttgtatgtgtaaatatgaatggcacactttttgtatgttacagtaattacaaaaacattgttgctt

SEQ ID NO: 102220 - DNA, 296 bp, Arabidopsis thaliana columbia
cacacgagtccgcccacgggtccgcccacgcgtccgcgcgtttcttctcctagggttagggttcgacgaacgcagctgttccacgcgtttagtttcaattctccatcgaagaagccagaatccgattcctaaagagcttacatttgttactcaactttaaagttttgacgctagagattactatcctcttgctgggaactcaacgtgaccagactgtgtttgaaagatagcaatggctggagtattagctggggattgttcattcggtgagagtggtgtttcatcttactccagga

SEQ ID NO: 102221 - DNA, 317 bp, Arabidopsis thaliana columbia
cagacgcgtgggcaagttgcgaacatgtatctctggcctaagacccttgtagttccaatccttgaccctgcaaaggcgttcagaaggcctgttggaattgtccatgtgaaagttgtgagggctgtggggctgaggaaaaaagatctgatgggcggggcagatccattcgtgaaaatcaagctctctgaagataagattccttctaagaagacaacagttaaacacaagaatttgaatcctgaatggaatgaggagttcaaattctcggtcagagatccccagactcaggttctagagttcagtgtgtatgactggga

SEQ ID NO: 102222 - DNA, 353 bp, Arabidopsis thaliana columbia
accacgcgtccggtcatctcttttctcgtattgcaaattttaagtttgttcttgtttattctcttgagtgaattagaggtatgttttgagtgttctcatatggagtgtgttggagataggagcttcgatccaagcaaaggggaaaagtgttggcttcatgaggcttcgatgcagccttaaacgctaaaatccaggccaagcaagatggagatagagagagatgatgggcaaatcaggttcgcagcagctgctgatggatgagaagatatatgttgcagtggggagtgacttggggaacaagtccactcttgtttgggcgatacagaacactggaggcaaggagttctgtatcg

SEQ ID NO: 102223 - DNA, 367 bp, Arabidopsis thaliana columbia
caaaccctaaaattctcctccgtcactgtcgacgaccactgcgtttcacactactctctctctcgctctctccaccgttaaacttcaatacccatttgtcatttcccccaaatctctccgatttcttaaatctaatttggatttactttgcctgtaaaaccattcgcattgttacgcatccgattttgcagttcgaaactcgagttcaacttcaatttgaggtagatttcgagaaaaagctgaagaatttcggaacaactaagattttaacggtggaattggggagtcttgaagcttatttttcctcctggtctcttttttcttatgtggtggtgcttgagagggtttttgtatgatataaatgctc

SEQ ID NO: 102224 - DNA, 358 bp, Arabidopsis thaliana columbia
  unsure (1)..(358): unsure at all n locations
aaccggtgatcgtctttcctttacctcgccgaccttctccgtcttctcaattacgatctatcatcaccagaatccgttttctctcttttaactccgatacaaaacttccgataatccgaaataaacgttacgaatttcagactcttttttccagtttctgtttgaattcgatttcgaaggattagattctccgttctactgagacgttagaagaattgtggctgttgtcgactgcaaggagagcgcttactttaattgctgatttcatgagacgagatggctttctttaggaactactcaaacgatactgtgtcacataatgttcttgatgaaaatgaggagcggcanaatgctgcta

SEQ ID NO: 102225 - DNA, 344 bp, Arabidopsis thaliana columbia
cgcgtccgattttcacctttcctcagctcacggtgagtctctggaacggattgtactaatctcattattttcccggtttcagaacgatttctggaacattcattccacactctgagaagaaacatgagtcacccgagaaatgcagatgatatattttctgagttctttggggtctctagaccttctggtccttctggtcccagaaatgcggatgatatatattctgagttctttggggtctctagcccttctggtccaagaaataaggatgatatattttctgagttctttgaggtctctaacccttctggtccgagagataaggatgatatatctgctgagta

SEQ ID NO: 102226 - DNA, 207 bp, Arabidopsis thaliana columbia
ggcacctgcagtttactaagaagcatatcacgaactggatgacatatactcgttcggtatgtgtattttggagatggttacgtttgattacccgtacactgagtgtagtcatcctgcgcagatctacacgatagttatctcggggaagacaccggctgcattgtacaaagtgacagaccccgacgttaagtgtttcattgagaaatg

SEQ ID NO: 102227 - DNA, 342 bp, Arabidopsis thaliana columbia
caaacgcgtgggggctgttacgtgtgccaaaaatctcagcaagtttgagaatcggcaactaatgcttccaagttagcttttgaaaaatatgtcttctcgaaaacctccaagaccaatgctcgcacagaagctgagatcacactgttggagagtaatattgttgtctataagtttgcccaggacctgcatttctttgttactggaggtgaaaatgaaaacgagctcgtcttatcatctgttcttcaaggcttttttgatgctgttgcgttacttctgaggaacaatgttgaaaagatggaagcccttgaaaacttggatctcatctttttgtgccttgatgag

SEQ ID NO: 102228 - DNA, 302 bp, Arabidopsis thaliana columbia
cggtccagtgatcaatagtcgttttttgcaccatgtcacgtctctctcttctcttaattgccacattatgtgttgtctctgttgttgctaatacacatattattaaagaatcattaacacaagtacctacagaatggaaacaaggtgctcgtgctccatcctccgatcttcttcatatcaccattgctatccgtcaacgtaatattgaacaattataaactatatttcattccgtatcagatccaggatatattgcatatggacaacatttatcatataatcaagtcaatgatttaattgca

SEQ ID NO: 102229 - DNA, 406 bp, Arabidopsis thaliana columbia
  unsure (1)..(406): unsure at all n locations
cacgcgtccgcacacacgtccggtaacggatctgtacttaatggtcacttgagacttcncttaggctaccaaatggacgcttcttacttctatcttaagctaagatggaacataccctgtggaccaaacagtgtgattacattcccgggagctgtttggttaaagccatggtactggtggtcatggcctgttcttccactangtttctcatggcacgagcagcgtcgcgccactatagggtactcagccgaaatgcctttggttataatccaagcaatgttttaccttggaatcatagtggttacacgactagctcgtcctaacataaccaagctatgttatcgccgctctgaccgcaacttaacaacgattcaagctggttttaagttgatcgcgcttctctctg

SEQ ID NO: 102230 - DNA, 355 bp, Arabidopsis thaliana columbia
gcgtccgcaagaattgacagcaattgtggagcagttgcatgcaacaagagcaacagcgaaagagagggaggagaacctgcaaaaaagtattaacgaggaagcgcgtacaacgccccattctacaccacaaacggtggtgctccagtctccaacaacatctcttccctcaccatcggagaaagaggtccggttcttcttgaggattatcatttgatcgagaaggttgctaatttcaccagagagaggatccctgagagagtggttcatgctagaggaatcagtgctaagggtttctttgaagtcacccatgacatttcaaacctcacttgtgctgattttctcagagcccctggtg

SEQ ID NO: 102231 - DNA, 279 bp, Arabidopsis thaliana columbia
  unsure (1)..(279): unsure at all n locations
aggtagaagctcttcgaagtaagattcttggtcagatgtggtgtatttgttgatagcttggctaccaataatgttattaagattcaaagtagtagttgcaaatttcgtcttaggttatagatccgtttttttttatataattaatatcgagatatacagagggaattttgtcagatatagtcacatactcatatatagttctcctctaaagtacattattgtgtctcagacctttgttgtataatanactgttggtttaaattaatatattaaagtata

SEQ ID NO: 102232 - DNA, 390 bp, Arabidopsis thaliana columbia
cctctgactggaaaaagcttcctcagatcgtttcatcgtccaagcggaagaagcgtctccttcaatcaccgtggacacctccgagactgtctccgattgaatgggaattgaagacatgcattcaaaatctgacagtggtgggaacaaggttgattcagaggttcatggtacagtatcgtcgtcgataaatagtttaaacccttggcatcgtgctgctgctgcttgcaatgcaaattctagtgtggaagctggagataaatcttctaagtcaatagcattagcattggaatcaaacggttccaaatcaccatccaatagagataatactgttaacaaggaatcacaagtcacaacgtctccacaatcagctggagattatagtgataaaaa

SEQ ID NO: 102233 - DNA, 305 bp, Arabidopsis thaliana columbia
ccggacgatccggcgactaaatcctactgagagaataatccggtcgctcagagagagaaagggtttcgagttttctggtgtgtcgccgatcagttttcagttaccaactggcttatttgtgctttgatctgaggcgaatgtttgagttctaaggagtgtatcgtttaatcatcgagctctgttttccttcattcacgaggaagctctacggctttttcggtggatcaagacgcacggatggaggattatcacgtgtataagatctaacaggaatttgcggaattttgattatatcagtgagtaga

SEQ ID NO: 102234 - DNA, 383 bp, Arabidopsis thaliana columbia
gtctctgaaccgctttcttagcaccgggaacttccatttcctccagagattgaagataacgatcagctcctaaaccaatcaacttcgtcctcgccgcataacttccacctgataaaatcgccgtcacaaccatcaccggaagctctttattattcatcctctcattcctcggatccaacatttgcaccaatcgaatcacactcttctcatctctcatcaactccttccgatttgatctaacggtcaacaacgacttcgccgcctccgtcgccgcttcttgtaaccccgccggtttcggcgattccattaaccgaatcaacgagcttaaacaatcagcgacggctcgtttgttaccgtcgctgattgttaaattcgataaaaga

SEQ ID NO: 102235 - DNA, 330 bp, Arabidopsis thaliana columbia
gtccgatcggaatcactcagagaaacagagaagacgatagatagagaaaaaaaaaaaatggcgttggctcttcgtagactctcctcttccgttaagaaaccgatctcgcttctctcctctaatggcggttcactccgtttcatgtcgtctttatcaaccgcagctatggcggaatcggagaaatctcgttctagttggattaagcaattgaatgcatctctagatgaaatcgatcctgaagttgcggatattatcgaattacagaaggctatacaatggaagggatttgaacttataccgtcagagaatttcacttctctatctgtgatg

SEQ ID NO: 102236 - DNA, 410 bp, Arabidopsis thaliana columbia
actgaccttcttccactgtcatattctcttcaggcgacttctcattgacctctcctaacgactctctctgttctttggccatggtgttggtttataatcaagctctcttgctcgcattcttcgcattgcttggattccagtactttcctttactcaccgaagcaggttgtccattggactttacttcatctaacttcactctagtggcttccgtatgctcgaacaacaccgagagagctaaatgctgccgctacatgaatgctttcgttgcaatatctgtcgcccgctatgcaaactacacagctgatcttggagttacatcagatttgactgaaatctgtatcactactatctctagaacaatggagctttatggaatcccaagaaatgctaccatcttctgtggatta

SEQ ID NO: 102237 - DNA, 358 bp, Arabidopsis thaliana columbia
agtctctctctctctattgttgctctctctctcgctttttatgtgactttcagatccgccgagtcttctttttgtggaatcttttcaaggagctcagtattctatatacacctctctttgtttgatcgatttcacaaaccctagcttcggcgatcttaaatctgcaaaaaatctatggcgtcttctcctggtccttttcttcacaaccagtacgatcagcagcactacgctccgcctggtatctccgctcaaccatctccggtgactcagcagcaacaggatgtgtcttcctcttccgccgcgactaacttgcatcctcagagaacgctgtcttatcccacgccacctctcaatctac

SEQ ID NO: 102238 - DNA, 298 bp, Arabidopsis thaliana columbia
tgaaaatccccgaggttgagactcgtttcgttgatcgagttatttcagaaaacagagagaagcctctgcttttgccggttcggagcttgaattattctcgtgtttcggattcatccggcgataattccggtcgatgggagaaagtgagatgtaagacagaacttctgagtactcttggtgatgataatagtgatgtgcttccttctccgattccatggaggtcaaaatcatcgtcatcatcatcatcatcatcaaaggatgttgaatctctaccgtccgttaagaatctgactacagt

SEQ ID NO: 102239 - DNA, 373 bp, Arabidopsis thaliana columbia
aaaaaaaaaaaaacttttgtctttcccttaatttctctaattttccctcgatttctctggcatcaacagtctcattctcattgatctttcttttttgtagcgagaaagatcgatttttttcggttcgttctcttctgggttacgaatcaaagagctacacagacacagacacacactgtttcctgtttctccccggattgcaaacagaactagggtttgttttcacaaattttggatcttttttttgaagaaaagaacaaaatttggatgaaaggaaaccagaaagactcgtcggaaaaaccgatatgggatcggagctcatcaagtacatctatacccggaatgtggtctttaacccgacccggtccaaaac

SEQ ID NO: 102240 - DNA, 189 bp, Arabidopsis thaliana columbia
atcagttccggaggctgaacggattgctccttcaatttctggggttgtaccggcctctaatgatgatgactcattggtcatcatgggcattcatgggttagtgtctccactaaaagcctttggctacacagttgaagccttggcgatgttgctgcttccgattgctacagatggctctgaatcacttgg

SEQ ID NO: 102241 - DNA, 259 bp, Arabidopsis thaliana columbia
atcagtgtgtatttcccgagggtttatgatatcaaacacttgatgaagttctgtaataatcttcatggaggtctgaataaattggcagtgctgcttgatgttgagagagttgggatttgtcactaggccggatcggataccttgttaacgtcgtgtacattcatgaagctgtaggacaatttcttcagtggttcaatggagaagtagtctggtgttttgtatggtttaagtgttgagaatggtcagattgttcattgat

SEQ ID NO: 102242 - DNA, 241 bp, Arabidopsis thaliana columbia
atgctctcttttccactatcgccatgattgctcatacgtgcattgaatgatctgatccacactctaaaaaattgggctttcatcagtacccgaggtaatggcaccgtggtccggcacttgcatgagacgtcgagtgatattctctgtggtttcagcatcattagtgtgtggacctgctctttactggaaattgtatactggtttcgttggttctgctcgtaacacgatctctatttgtcct

SEQ ID NO: 102243 - DNA, 421 bp, Arabidopsis thaliana columbia
agtttcatcttgttgcttcggagcgagcgagaattatcgtcggagaatttatcgtctctctctctgaaaattctgatcggtgaagaatcgtcggatcgaaagttcgtttatcttctcgtttacgtttccgtgatttaaatcctttggggtttttttttcttgatttcagaagaagaagagaagaaacaatccgtaatctagacccttgaattgacctaataataggatacatatgatgactatgaagcagtctttgagtggcagggttcttaggggggtctttggtatctatctgtaggagggcttttaggtgctgtttcgggagattaaagccagattcaaggtgagtctgagagcttggttcttgtatcttcttgtttaccaatgggaatctaggtcactgagaaaccatccttcttgt

SEQ ID NO: 102244 - DNA, 254 bp, Arabidopsis thaliana columbia
tgcaaagaattggcagcgacaataacaatgtggaacaacggcctcagattatatatgaggacgatgaaggtgataaggttttgattacatcggatagcgatttggttggtgctgttactcttgctaggtctacaggacaaaaggttttgaggctgcatctggacttcactgagtcaacaaggagcttgagctcagaaaccacccaactcaagaaaggtgattctcgagacagaggaagcggatgggtttcatgg

SEQ ID NO: 102245 - DNA, 333 bp, Arabidopsis thaliana columbia
atccatttcttgttcctttgtgtcgccggagatatatatcttcgacatcggtgaagaatggggtaccgtcgttttaccgatggttggccgagaagtatcctcttttagtggcggatgttatcgaggaagagcctgttgaaatcgaaggcatcaagattcctgtggatactagtaaacctaaccctaacaacctcgaatacgataatctttatctcgacatgaacgggattatccatccttgctttcaccccgaagataggccatctccaactacctttgaggaggtgtttcagtgtatgtttgattacattgataggcttttcgtgatggtac

SEQ ID NO: 102246 - DNA, 276 bp, Arabidopsis thaliana columbia
  unsure (1)..(276): unsure at all n locations
agaggcccgccgaagcttggccttcatactttgtatgaggggtangggagcgttcccgtaacagtgaagcgcccgtggcaaacgttggcgtggagtggcgggaagtgaggatgccggaatgagtacgcgcaaatccaagtgaaaaccttggacaccgtaaacccaagggttcctgcgccatggcaatcagcgcagggtgaggcggagcctaaggtgaggccccagaggcgtagccgatggtaaacgggttgacattcccgtcncgtcttgcagtgt

SEQ ID NO: 102247 - DNA, 195 bp, Arabidopsis thaliana columbia
accacccacgcgtccgctccagcatatggttatggagattctactatgtagagcgttccaaaaggaatggctgttgtcactattgttttcgctgcacttggattcatgtcgcctgcctcaagaggaatgctactaaccgggatgattattctctaccttttcttgggtattgttgctgggtacgctggtgttcgg

SEQ ID NO: 102248 - DNA, 220 bp, Arabidopsis thaliana columbia
acggacgcgtgggatgaaagcaaacctgaaagacgtcccacaaaacacatgcccactccagctcaatggactaacgcattcaatcctgcattttcgtattatgtctactattgttatgctaacctctatgtgttaaataagcttcgagagtcaaagggcatgactactatcacgctacgaccacattctggagaggctggtgacattgaccacttggctg

SEQ ID NO: 102249 - DNA, 366 bp, Arabidopsis thaliana columbia
agtttctgaatgtgaagcttgaggagagttctatatccttttgaattgctgtaatttggatcttacatagacgagagcagtccttctggatctacgcggtttaggcgggaggaggttttggtattgggaatgcgtttttgagctgatcttatacgtctattcaggtttagctcagtctagaattggttggcttgggaaaggtcgatgaagaacgggatggctgagtgcagcgtatgtcgttcaaggttggtttctcccagtagcaaagctatttcaagggcttatgacaactacaactacaagattagagtatcctcaaaacaacgagctctcaatgtctttttggtagtcggtgactgcatgcta

SEQ ID NO: 102250 - DNA, 267 bp, Arabidopsis thaliana columbia
accacgcgtccgcggacgcgtgggcaaacttggatctcgcaccagtttctttgtttcagaatgtgattttgaggatcttgagaatttcaacttcattgtctgttagtctctcttgtgaatttctttggagatgaaaagattcgagaggccaagaacttcgattcactcgcagccaaggaccagtaccagttcaggtaagaaagatcagaagccgcgtagtagtagtagtaaaggatctggtgtgaaaccgttgaatgcggctcagct

SEQ ID NO: 102251 - DNA, 296 bp, Arabidopsis thaliana columbia
aaaaagaagaaagatagagaacaaaaatgggaggcaaaggtgtgatgatggtggcgatactttgcctttgggcactctctgcaacatctgaagcagtaacagaggctgagccaggtttgatgatgaacttctacaaggacacgtgtcctcaggccgaagacatcgtccgtgaacaagtcaaactcctctacaaacgccacaagaacaccgctttctcttggctccgtaacatcttccatgactgcgccgttgagtcatgtgatgcgtcgcttttgctggattcgacaagaagagag

SEQ ID NO: 102252 - DNA, 410 bp, Arabidopsis thaliana columbia
aaaaccttttttccctcttcatgcttagcctatcatgagcaacatccctagatctctcaccgactcagatctttctctatttactctcataatctcttctgctgttgatccttggcctttttctatcaccgttttttagcatcaacaaaactcaccggaaaatctctaacaaccaccaccgtttaacacttctcttcctcctcgtcgatcgtttttaaaccaatctttgtgtttcttgtttggtttttcggtgaaaaagattccttcttcttaatgggttttgaagaaaaccaaaaacagagtccaaaacagagtccgaatcatatcaagcatatggtgttcaagttccacttccatgttcctcatctccacatactccctcatcatcaccaccaccaccaccatgatgt

SEQ ID NO: 102253 - DNA, 392 bp, Arabidopsis thaliana columbia
accacccacgcgtccgcccacgcgtccgcccacgcgtccgcccacgcgtccgcccacgcgtccgctctttttcaattcctcccatcaatcttcttcatttgttcttctgttggtggtggtgatctagttttcaaagaatcgattttgccaagtgggttcttcttgataacctttcttcttctttgaaatgggttcttctgtggagcagaacattcttgttactggtggtgctggctttatcgggacgcatactgttgttcaacttctcaaagatggttttaaggtttcgatcatcgataattttgataactctgttatcgaagctgttgatagagttacggagcttgttggtcctgatctctccaagaagctcgacttcaatctgggtgatc

SEQ ID NO: 102254 - DNA, 382 bp, Arabidopsis thaliana columbia
agtgggaacaaatgacacaagtgtgtcctcgctgtgtaacggcatcatctcacattcagaagaccctgaatacgaaaaagaatcatcattgtcagcatccgtaccagtctctgaagaaggaaaggaagttgacgtaaaggttgatacagtagattctgaatcaaaccgttctattgacatggaacatgattctggaacagatcatcaagaagaagaagcaaatgggaaagaagatccaacggttgaaaatctggctgttgattcttcttgtttggacattactactccatctccatctgctgctacagagttcatacctcaagagaacgaacgttcaagacacgagtccaaacctctggagaaagaacattcagacaccgag

SEQ ID NO: 102255 - DNA, 295 bp, Arabidopsis thaliana columbia
aaagaagaaagatagagaaaaaaaatgggaggcaaaggtgtgatgatggtggcgatactttgcctttgggcactctctgcaacatctgaagcagtaacagaggctgagccaggtttgatgatgaacttctacaaggacacgtgtcctcaggccgaagacatcgtccgtgaacaagtcaaactcctctacaaacgccacaagaacaccgctttctcttggctccgtaacatcttccatgactgcgccgttgagtcatgtgatgcgtcgcttttgctggattcgacaagaagagagc

SEQ ID NO: 102256 - DNA, 388 bp, Arabidopsis thaliana columbia
cggacgcgtgggcggacgcgtgggcggacgcgtgggcggacgcgtgggcggacgcgtgggcgaggatttagtgaacgtgattgtcgacggaggtgctgttccagctcttatgacgcatctacaggcgccaccatacaacgacggggacttggctgagaagccgtacgaacacgaagttgagaagggaagcgcttttgcgcttggtcttcttgctattaagccagagtatcagaaactgatagtagacaaaggtgccttacctcatttagtgaatttgttgaagagaaacagagatggttctagctctcgagctgtgaatagtgttatcagaagagcggctgatgccatcaccaatcttgctcatgagaacagcagtatcaagacccgt

SEQ ID NO: 102257 - DNA, 256 bp, Arabidopsis thaliana columbia
  unsure (1)..(256): unsure at all n locations
ggtgaaactgaattcttcacngagtatggagaatctaacaggtatcagattcaagaggttgttggcaaaggaagttatggtgttgtggcttctgctgttgactcacacactggcgagagagttgcgatcaagaagatcaacgatgtgtttgagcatgtctccgatgctactaagattctcacagagatcaaattgcatcggttgcttcgtcatcctgatgttgtggagattaagcacatcatgttacctccttctc

SEQ ID NO: 102258 - DNA, 183 bp, Arabidopsis thaliana columbia
agcgagttcgtcgtcaatttggtaaaaccgtcgtactaatcgccgatgagcgggtttgcctcacaggttccatccatggcgcttcttgggtctggactcaccggcgaggtactcttccattagtttgactgacgtttccgattgtacggcttttgttccgatgcgtgatttggggattcgtga

SEQ ID NO: 102259 - DNA, 417 bp, Arabidopsis thaliana columbia
agcgactctctctctctctcacaaatttttgatctatttcactctccttgtcgtggctttgttttgaccggaacattattccggcagctacccaagacctcactcctcgactatttagtttcctcgctgtcactatctcaacgccggaggaaaaacttaaacaaagagtgataggtcgaagtgacaccggtgttgtaatcggtaaacccagaagaagccctaagagtaccgtcgatttttgtgctcttatcttcttctgctcaatctatttcgcgcacattgtacagtggaaagtaacagtagctttgcatgagcctgattttcagataaacaaagatgagtcacgatagaagtgttaacgtttcgcatgatgctgtgattgctaaacccgagcgtggcactatgcttcagagcttc

SEQ ID NO: 102260 - DNA, 328 bp, Arabidopsis thaliana columbia
aaatgaatgtcatactcagattactgtaacttaacaggaacaatataagaccgaaagagaatcagactattctgaaaataagaataagttgactatgaatatgatgaactgatttaatcgtatatggagaaacgttttaaaggcaaacctatttggaaaaacacttgactgctgtagcaactgatcgaacattgtaagcgattataccgttacttatatctcatttttacttatgatagaagaaaactataaagacttacaggctttgaagtctttaaggaacaacattgctacaatgtggaagagggatcacattttccttactcat

SEQ ID NO: 102261 - DNA, 312 bp, Arabidopsis thaliana columbia
  unsure (1)..(312): unsure at all n locations
aacacgcgtccgaaaagaagagggaatttaaaagggggaacaaattccctccaaatgattgggccataaaccagagacaaggctcaagccaactctgcttctatctatctctcactctactcataaaaatctccatatacgcttcttcttcgttctctgatttgctggtgcgcttctccgtcatcgttcgccgatcatagtcgatcccgccgcttccagatgcttattccttggcctgatgggacacaagtgatatcagtgttaccgttgatagagtggtgttttggttctgtnttggtgtgagcgtatgcc

SEQ ID NO: 102262 - DNA, 284 bp, Arabidopsis thaliana columbia
acagagctgcatcacaaacgaggaacatcaaaatatcggtagacaagacgagtattcaatcaagatccaaatcagcgaaacagagaacacaaggatacacatcaaaggatgaaagaacttgcaagaaatcttgtgactctcgtgtgttggttgatgtacttattacatagacaaaaaacgtgagaaactttatgagattattgattctttaaggataatctcaagtagctttcacttcaaggaagagcaaaggtacacacacagtagcgaataatcacaggatc

SEQ ID NO: 102263 - DNA, 283 bp, Arabidopsis thaliana columbia
acacatggagaaaggattttggtactgacaccattttcgaggattttgaatttgaagagtttgatgaagttctgaaatactaccctcatggttatcatggtgttgataaagaaggaaggcctgtttacattgaaagattaggactacttgatccggccaagctcatgcaagtcactacagtggaaagattcataaggtatcatgttcgagagtttgagaaaactgtcaacataaagcttccagcttgctgcattgctgctaagagacatattgactctagcac

SEQ ID NO: 102264 - DNA, 202 bp, Arabidopsis thaliana columbia
taaatatcaacgagttgctttgcataagattggtcggtggggagctcaaatggtgcaacttcatggaaacatgggttgtgacaagggagccgtacaatggaagggaatcggaagctgcgtccttaattgagcctcatgcatcacgaatgagtcccgaagcacctaatgttaagctcgatctcaacttgggaatctctctttc

SEQ ID NO: 102265 - DNA, 331 bp, Arabidopsis thaliana columbia
cacgcgtccggaaagatggagaagaatctggcaataacgaggatgagcataaaaaatagtgacatctgtataaacctctctggtgcatatatgaaagtgggatcaagatggtgttcttgatgcaggaatcaagtggggctctaacttgatgcacatatccatacctgagaaggcttacacttctccaattttggtgttcttgttccgtaatgatttaaggcgctaccacactgtaacgtatgtctccctcgactacaacagcttgtagtgaagattaatgcaaaaaaaattcttggaagattggttcatcatttgctctcaaaaagcctgc

SEQ ID NO: 102266 - DNA, 256 bp, Arabidopsis thaliana columbia
cagcctggattggttgacgaggctttgacagaaatgagtggaagccagttgagtttctctagtgtcgtagatggagtgtttggacttcagaaagtgacatctgctcttatgtcaattgatggacatggtttagttcccaaaaatctctctgctgttaccggccatggaaaagctccaatgttgactagctatcattcagattccttgtataatcgacagggtcccttacaatctagctcttataatatgttatcat

SEQ ID NO: 102267 - DNA, 217 bp, Arabidopsis thaliana columbia
ccacgcgtccgcataaatctacgaatgaaaagttcactcattattttttcccactcttactctgttctcgctacagaacctcctgggaaaacacctgagaaaacttgatccacccgatttccccaaatcttcacaatttccggaaactctcccgatcgtgaaccagataagtgaggttccaaatggggtctgtatcgggtcaaaccccagttacaac

SEQ ID NO: 102268 - DNA, 322 bp, Arabidopsis thaliana columbia
gtaaaacctccaaatcgtgaggaaatccagagttccatcagatctaactctcttagatctgattatcatggattactctttccttctaatcattctcttactcacaatctctacttcatgttgtgctgctccttcttcttatgtggaagaacaattgagagacagaatcagtaacttacctggacaacctagtaatgtcgattttagacagtactcaggctatgtcactgtgcatgaagaacgtggaagagctttgttctactggttggtcgagtctccgttggcccgtgacccaaagtctagacctttggttctgtggctc

SEQ ID NO: 102269 - DNA, 353 bp, Arabidopsis thaliana columbia
cactctgaagaatccgtcatggcgtcgtcaagcgatccttcaaaaccagtaatggagaggaagaagaaaggagctccgatcaaattcttagtacctctcatctacgcacctgcgcttcctttgattcggttgtctttaaggcataagccagttctaagagatcgtctcttcggtcttgtcctcgtcggtgcttttgctcatggcttctatcttgtaacggatatatatgatgcagagagcaaatgaaaaactgggagttgcagtcagtcaacaagatctcaatattttctcagattgtctttcagataaataatttttgccttttgggtttaaacctatttgacacatgaact

SEQ ID NO: 102270 - DNA, 364 bp, Arabidopsis thaliana columbia
tcaagatcgtttgcgtttgcgagacaataaagacgctactgatatactagaagtttcaccagcaaaggatcttgaagaaacaaacttaacttgtgaagcatcatcctttttgtctattgatatgaaatctgatgaagagaacgaaacagtgaactcaccaacgatctggagagacaatgaagacactactgatctactggaagttgtaccagcaaacgatctggagagacaatgaagacactactgatctactggaagttgtaccagcaaaggatcttgaagaaacaaacttaactagtgaatcatcatcatctctgtgtattggtatgaaatctgatgaagctttggaatcaacagcagatgc

SEQ ID NO: 102271 - DNA, 339 bp, Arabidopsis thaliana columbia
caaatcttcaccacagacgatgaagcatttgagtattacagtacattcgctagaaagagtggtttctcgattcgtaaagcacgatctacagagagtcagaatctacgtgtttatagaagagatttcgtttgttatcgttctggttttaatcaacctatgaagaaagctaatgtagagcatccaagagagcgtaagtctgttagatgtggttgtgatggtaagttgtatttgactaaagaagttgttgatggtgttagtcattggtatgtctcacagtttagtaatgttcataatcatgagcttttggaagatgatcaagttaggttgcttcctgcttat

SEQ ID NO: 102272 - DNA, 162 bp, Arabidopsis thaliana columbia
cacaagcgtcaggccagaggaagttgtgggaactgattttgcaaaaggaatacccaatcatgatgttcacatcgagtttggtgaccaaattcggagtggtgtcactgacgttcctggagaggatgcgtactatctcgaaccgagattgtttgggaagataat

SEQ ID NO: 102273 - DNA, 357 bp, Arabidopsis thaliana columbia
cacgcgtccggtattctcatcttcttctccaaattgatggctttttaaggtttccccactcgatctaatctaacctaacgctccttcattaactttcttcagacagattacaataacgtgtaatatacaagacacagaaacatcattgattccgatctcaagttttgtctttttgatttcatatacacagatacatagataacaaacacacatctttgatcaaatgtctggactttggagattgaggaatctaaagtctctagctttacatgctcgttcgatttcacctgtttccaatctttattctctggaattaggatcatgccctcgtcgtcgtattcaagaacgattcaaatc

SEQ ID NO: 102274 - DNA, 134 bp, Arabidopsis thaliana columbia
gaaatatggaagcccttgattttgcccactgcagtcatatcgctccaatccctctctataatccaatgtgcgaaatttcaccagttctaggttttgttgctgaccgatcagtcctttactcaatggcaatggct

SEQ ID NO: 102275 - DNA, 183 bp, Arabidopsis thaliana columbia
cacaattcacagttgtttcatcatcatcatctacttcactcatctcatattccaactttcatctcagtttcattccagtataataatatgtgtagtggctcatagagcaatctctgctcatctagacccttaacagcactcgaatcacagctcattgaaaaagaaacaatgcttctcctcgaa

SEQ ID NO: 102276 - DNA, 259 bp, Arabidopsis thaliana columbia
acttgagcttttgattgaattggctggtaccgagccacggttccttaaacggcaacttgttgacatagttggttcgatgcttcagattgcagaggctgattccctcgaggagagtacacgtcatcttgcgattgagtttttggttactctggctaaggcgcgtgagcgtgcccctggtatggtcaggaagcttcctcagtttattgacaggttgtttgctgttcttatgaagatgctcgaggatattgaggactatcct

SEQ ID NO: 102277 - DNA, 411 bp, Arabidopsis thaliana columbia
ccacgcgtccgcacacgcgtcagcggacgcgtggggattaaaagagttgaaaatctccttgcatgtgtctctcctctgctctgcaacaaatggttcccgaaacactcagctttagctttcggtcacttgttaagactgctaaaaaaaggaccagtggattaccaacgagtcatattacttatgctcaaggcattgctccaacacactcccatggatgcttcgcagagtccccacatgtacacaattgtttcacagctagtcgaaagcactctgtgttgggaggcattgagtgttctcgaagctcttcttcagagctgcagcccggtacaagggggcaccggtggatcccaccctcaggattcgagttactctgaaaacgggactgatgagaaaacgcttgtacctcagact

SEQ ID NO: 102278 - DNA, 379 bp, Arabidopsis thaliana columbia
agctgaattacatatgcttgcgtatacttggagtaggtcccgatggaggactagaaaacgcatgcaaacgggccaggcaatggattcttagccatggcggtgtgatttatattccttgttggggaaaagtttggctctcggtacttggaatctatgattggtctggagtcaacccgatgcctcccgagatttggttgctaccttatttcctaccaattcacctagggaaagcttttagctatacccggataacatatatgcccatctcttatctatatggcaaaaaattcgtgggtcaaattacacctcttattatgcaactacgtgaagaactacacttacaaccttatgaagaaatcaactggaacaaagcgcgaca

SEQ ID NO: 102279 - DNA, 135 bp, Arabidopsis thaliana columbia
acgcgtccgcaaagattaacttcgtaaatagaaggttacatttagatccttccttttgtcttttcccttgttgagatttttgatattgacaaatttgtacattggagtaataatgaaaatacaaattttggcctc

SEQ ID NO: 102280 - DNA, 353 bp, Arabidopsis thaliana columbia
cttccctctttcgttttctcgcgactctctagggttagggtttgttgattttcatgcgttattcttcatcttcttctgcaattcgcaactagagaagctaattccattgaagttaaggtggggataatttttggttttagaagatactaatggctggagtactaactggggaatgttcttacagtgagagtggcatttcatcagactcaaagaattcccatgaaaatgcaagaatgaggtttcccgctggtattttgggagataagagatagaagagaattcaccgtcaatgttggatggtactgacttattgaaggaaacatacctccgcaaatcctactgtacatttttgc

SEQ ID NO: 102281 - DNA, 331 bp, Arabidopsis thaliana columbia
catgaacactcctgttgaaaagccttatattactgctgctgcttctgttgttgttactcctaacaccactcttcctatggaatggctgcggattactctccctgactttatgaaagaagcgaggaatactcaagaagcgatatctggtgatgatatcgctgttgtctcgggtttgtttgttgagcagaatgtgtctaaagaagagagagagcctttgcttacttggaaccgtttggaaagtcttgttgataatgcacagagtttagttaatggagttgatgctattaaggaagctggcattgtttgggagagtcttgtgtctgctgttgaa

SEQ ID NO: 102282 - DNA, 400 bp, Arabidopsis thaliana columbia
gggtccacccaaacgtccggatctgtttctccctctctctaaatgatggcaaacaactgtaatttagtcagtgttctatgtgtaattttggtattgaccctctttcacaaccccatcactgtcgccggacagaatagtccggtggtcgccttgttcacctttggtgactccaacttcgacgccggaaacaaacagactctcaccaaaaccttagtcgctcaaggtttctggccgtacggaaaatctcgagatgatcccaacggcaaattctccgacggcctcatcactccggacttcctcgctaaattcatgaagattccgctcgcgatcgcgccggcgcttcaaccgaacgtcaatgtctcacgtggagctagtttcgccgtcgaaggtgctactctac

SEQ ID NO: 102283 - DNA, 221 bp, Arabidopsis thaliana columbia
gtccaggagaagaacaatatcacaactatccaaatatcgtcatagtagcagccatgacttcaaattcagtccgtgaaattcgtgagggagaaatcgatggtaacacatttctcatatacactttgttatctcaaaccgagaacccttcttcccgtgaagcaactgttgattccgatggaaggactgtggacgacctctctgttgatcctctgatcctctgt

SEQ ID NO: 102284 - DNA, 391 bp, Arabidopsis thaliana columbia
actaaacttcattcatagatctttgaaatgatgagctatcactacataaacaccttatgcattgtaatttctctcttgtcttgtctcttcatcacctcttcttttgcaggaccagttccaaaccaggaaaatggatctcagaaaattttccccactcagatatcatcacgtgatagtaaggtttctctatcgagcacggtgaagggtctgagagaacgtcctccatcgtcttactctctcaagatggagtctttcaacacactcatgaagtctgtttacactgagagatacgaatctcgtccttttagggtcggtagatacaactggacgcatgttgtgtatccgaagggaaacaagaacgataacggtacagggcacatttcgctatacg

SEQ ID NO: 102285 - DNA, 362 bp, Arabidopsis thaliana columbia
aaataatgactactacattcgaatttctgcaaccaagaatccacggatttgcaacttgttgtagtagtaatagtctattgtactcgaaagcttcgagatttttcaacgatcgttgtagggtttatcgccaaaatccgaatcggtttgtctccaattcaatcacgcttcctctgcagaagaaacaagttacagtgttgagaaatcacgaaaggtttaatctttgggatgggttttcaagaaagaagagtagattagttgtgaattgtcaagaagatgatcagaacgagagttctagtgaggaggaagaaagcagtcagagtactccggcgaagtcggagaggaaaagagagaagaaagaagat

SEQ ID NO: 102286 - DNA, 127 bp, Arabidopsis thaliana columbia
gtccgcacggtgactctatcacccttgctgtctcgtcgatataaacttgcacgtctccgctgattaaaagcacaaaacgcacacgccaacggcgatccaaattccgagacagacaaccaaattttcc

SEQ ID NO: 102287 - DNA, 298 bp, Arabidopsis thaliana columbia
catttgcaagacaacgtataattaagaattagaagtggtttaggagaggagagagaagagagagatggaggaatatagacttggagagctgagacacttgctgacaacggttttcctgtcgggattctccgagttcttggtgaagccagtgatgactgacgtcaccgtcgccgcggtttgctccggcctaaacgaaacatgttctctcgccgtctatctcaccggagtagaacaagtgacggtaggactggggacaatggtaatgatgccggtgatcgggaatctatccgatagatat

SEQ ID NO: 102288 - DNA, 317 bp, Arabidopsis thaliana columbia
cgaatttcttcattgctaaaaactctcactttctgcaatttcgtctgcttgtttcactcacaagaatttcacatttttttcaaaaataaacactgcttaatgcggattggttgttcacaaaaggaccaaaaaatcgtagaagtttggattgatttcactatggaggaagtagcagctaaggttgaggaagaaactgtggaaaccaatgtagatgcagtgaaagaggacaatgcaactatagctaatgaaagcagaagcccagagagtgtttctgcagtgtctgtggtgtcaaatcgagctgcttctactaaaaagaa

SEQ ID NO: 102289 - DNA, 335 bp, Arabidopsis thaliana columbia
tcgaccagtgaaagctcctatctcttcctgaggcattgtgatctcttgttaaaatggctagtactctgaggaacattcatggtaagagatctaatttgcaatctgagtttactggaaatggaggaagtaagagaagaaatcttcatgatgaaacagatcaaaatgttattgcttcagaagacactgtataccgctacttgtgtcccgtgaaaaagaccgggagcattatcgggaaaggcggcgagattgctaagcagataaggtctgagactaaatcaaacatgaggataaacgaggctttacctgggttgtgacgagcgtgttgttaccatgta

SEQ ID NO: 102290 - DNA, 312 bp, Arabidopsis thaliana columbia
caacttctctctctaatggccaatcgatcggaggaagcagagtacgagaacgattctcggcgaaatcatcaagacaagaagaaagaaggagttttagatctggtactgaaacgacctttacggtggctaagaatgctcatcgaagagcttcactggagcttcttcttcggtgtgattatcgtctatggagttagccaaggacttggtaaaggtctcagcaaagtcagcacacagtactacttcaaagacgagcagaagatacaaccctctcaagctcagatttacgttggtttgattcagattccttggatt

SEQ ID NO: 102291 - DNA, 428 bp, Arabidopsis thaliana columbia
gtgagtctgatgaagagagatttatcacagacgcagagagagatggttctggctccgttcttggctttcagctcactcctcctggtgatcaacaaacagttagcactagcacaggagaaattacacatcatgaagagaagaaagaggctattgatcaaattgtaatggctgactttggcgtacctggaaatagagctgttgaagaaggagctgcagaggttgggattccgagtggaaaagctgaagttgtagtgtttgatgacgcggtgcacagtttccggaacgtattccagaaccaagttgagataaagctcatctttttcggttgtagagaagaaacaatgtttcaaagacacaacatttggatggtcaagtagcctcattgtttgaagctcacgattcttgtacctccgatcttgtagaacttt

SEQ ID NO: 102292 - DNA, 417 bp, Arabidopsis thaliana columbia
gaaaaaagagactactaaaaatcataatgaggccgacaccaaaagtagaaatctggaagtcaccagtaccatatctctttggtggtctctttttgcttgttttgcttatagctttggcattactctcattggtctgcacacaccaaaaaccttcttcctctagcaataacaatcatatggatgaagaagacgatgtcggtgacaaggacgctaagcctattacaagagagtacttacctaagatcgtggtgattttggccggagacaataaacctacttgcttggctgttccggtcgtggttcctccacccacttccatttttcgttgtaactgtgacaatgttactgtcatctcaacctaaccattaacatctttttcttcttttgccgacagaaagattaagagatttcgacttt

SEQ ID NO: 102293 - DNA, 425 bp, Arabidopsis thaliana columbia
caaaactgaatcaaaccccatggcatttacttttcctccttcgtatcgcacgctagtcgggttatattatatatttacacttatgcacacggctgtctcaacaccacccgatgatcctgtcaaatgtgtgtcaggaaacacgaactgtacagtcactaactcatacggagccttcccagacaggtccacatgtcgagccgccaacgtggcatacccaaaaactgaagccgagcttgtctctgtcgtggctgcagccactcaagccggacggaaaatgcgtgtaacaactcgatattcccatagcattactaagctcgtgtgtaccgacggaaccgaaggtttgttcataagcacaaagtttctaaaccatacggtacaagccgatgcaacagccatgaccatgacggttgagagtggcatgacgc

SEQ ID NO: 102294 - DNA, 381 bp, Arabidopsis thaliana columbia
cagacgcgtgggtgcgacctcagaatcagtttctaaagtccatgtattttcctctgacaatacttttagcaaggctctagcaaatgctagagatgttgaatttgaccgctcagatgtggagggaaatgcccaccctgctggtccacatgttcggataccatttgcttcactatttgatactctcggcatgtttttagctgatgagggcgccgtcttgctcctctactcattgttgcaagggaattccgactttaaggagtatgtgttggtgcgaactgatttggatactttgttgatgcccatcctggagacgctgtataacgcttcaaagagaacatcatctaatcaaatatacatgatgctaattgtacttctcatact

SEQ ID NO: 102295 - DNA, 343 bp, Arabidopsis thaliana columbia
cccacgcgtccgtgcagagtacgtagtaattcttgatcaatgttcgtgtggtgaagccaatggacaactgctgctggtttgttaattgccgggtaccaatcgcctgttagaggatgtctattggcttcaccacacgaacattgatgcagagtacgtagtaattcttgatgctgacatgatccttcgtggacccatcacaccttgggagtttaaggcagctcgaggccgaccagtttcaactccttacgactatcttattggatgtgataatgaccttgcaagacttcacacgcgtaatcccgaggcttgtgataaagttggtggagtcattataatgcacata

SEQ ID NO: 102296 - DNA, 429 bp, Arabidopsis thaliana columbia
agagaacataaggaaaagctacaaaggcgtgactgtgcttaaagatgtgacatgggaagtgaagagaggtgagaaagtagggttagttggtgtgaacggagctgggaagacgactcagctcaggattatcactggtcaagaagagcctgattctggtaacgtaatcaaggccaaacccaatatgaaagtagctttcttgagccaggaatttgaggtttcgatgagtaagactgtgagggaagagttcatgactgctttcaaggaagagatggagattactgagaagcttgagaaagttcagaaggctattgagggatctgttgatgatttggatcttatgggaaggttattagatgaatttgatttgttgcagagacgagctcaggctgtgaatttagattccgttgatgctaagattagtaagttgat

SEQ ID NO: 102297 - DNA, 384 bp, Arabidopsis thaliana columbia
gaaagagaagaacttgaaactcaccaaaaacattgatcattatacacaatcgtgatggagagttcttcgaattccgaccaaaatgagggaactccgacgagctctgtttcttcgccgtaccggagaacatactcagatatccccggattatctcaccggttcgacgttcagagcttttataaccggccgtcaaacactaacgctgttgtcttgagtggccatgaagaagatgtctccgaagacgccgaggaaccaaaagatgatgtcgtcaacgacgtccacggagatggagacgaagaagacagcgacattgattctgcagaagatgcagagctagagatgatgagggaaagatttgcgaagctgttgcttggtgaagacatg

SEQ ID NO: 102298 - DNA, 359 bp, Arabidopsis thaliana columbia
acactctccaccaccacccaagaagcactacgtgtacaaatctccccctcctccagtcaagcactactctcccccaccggtttaccattccccaccaccaccaaagaaacattacgtatacaagtcccctcctcctccggttaagcactactctcccccaccggtttaccactcaccaccaccaccaaagaaacattacgtatacaagtctcctcctcctccggttaagcactactctccaccacaccatccttacctctacaaatctcctcctcctccataccactattagatatctctatcacggagaacacgatgtacacaagaagacaaagacaagacgaaaccagtactggtga

SEQ ID NO: 102299 - DNA, 397 bp, Arabidopsis thaliana columbia
ggtcgagcacgcgtccggattactttctcaagactttcaatagtactcagttccccatttgataagctccttaacatgagtgagctcaccagcagcttcgtatttagcactatattcaatggggaactgattactttctcaagactttcaatagtactgctgattccattgatgatcttgtgtcacaggttggatcagggaatactgatgatggaaatacagatcctaatgaccattactgttggatgcgacctgaggatatggactataaaaggcccgtgactacttgtaatggtggatgttcggatctcgctgcagagatggcagctgctctggcttcagcatctattgtattcaaggataacaaggaatattctaaaaagcttgtccatggtgc

SEQ ID NO: 102300 - DNA, 330 bp, Arabidopsis thaliana columbia
agcgactcactcagatctatacaccttcttcttcttcttcttcgtcctcttcctcttcgcttcgttcgtaaactcatctgatctgtgagtgccattatcgttgagagattatgttgacaaagttcgaaaccaaaagtaacagagttaagggactgagttttcaccctaaacgaccatggattctcgcgagtttgcacagtggcgtgatccagctctgggattatcgtatgggtactttgatcgatagattcgacgaacacgaaggacctgtacgtggtgttcatttccacaattctcagcctctcttcgtctccggaggggatgattaca

SEQ ID NO: 102301 - DNA, 359 bp, Arabidopsis thaliana columbia
  unsure (1)..(359): unsure at all n locations
agcaaagcgtttctatcatttccttaatattgaaatggtgacagacttcaaatccctactaccagttatcgacatcagtcctttactggccaaatgtgatgatttcgacatggctgaggatgcgggggttgtggaagtagtcggaaaactggacagggcatgtcgggacgtcggattcttctacgtgattggtcatggaatatcggatgatcttataaataaggtgaaagagatgacgcatcagttcttcgagcttccttacgaggagaaacttaagatcaagattactccaactgctggatacagaggataccagnaaattggagtacattttacgagtgggaaacaagatatgcacg

SEQ ID NO: 102302 - DNA, 351 bp, Arabidopsis thaliana columbia
atcaaattgttaaagcaactggagttgttacaaagactgcttgggctggagctgcttataatcttttgctatacatgctggctagtcatgtgcttggtgcagcctggtatatattatcggttgatagatatacatcgtgctggaaatcaagatgcaatggtgaagctggccaagttaattgtcagctatattacttagactgtgattcaatgtatgacaataatcagatgacttgggcaaatgtcacaaaagtgtttaaactctgtgatgcacggaatggcgagttcaagtatgggatctttgggaatgcaatcacgaaaaacgttgtgtcttcacagttcttcgagagat

SEQ ID NO: 102303 - DNA, 352 bp, Arabidopsis thaliana columbia
accacgcgtccgcggacgcgtgggttcatgtgcaaggaatcccgggtggggatccgtctctttttgatggattgtcgtcggttttctcccgggagctgtggaagtgtagtggttatgtgcctaagaagtttaaccttaagtatagagagtttccttgctgggatgagcaagagaaggatgaagacggtgcaggggttttgttttcgatgtcgaaggagaatgtgattgctgctcctgttagtactttggttggaatgaggaggagtcttgatggtaaaggaggaaccaatgacgtgaagcttggttgtgactctggtgaaacggatagaaaacattctcagggtgctattaa

SEQ ID NO: 102304 - DNA, 340 bp, Arabidopsis thaliana columbia
accaaaaccccaaaaccaactaaaactgaaaaaacaaacgttgactttttgactaaccaccatcctccgccgtaaatcatgatcgccgccgtttacactctcttcttcttcttcctcttaatctcctctgtttattccaaagccacgatttcaatctctccccaaaccttaaaccgatccggcgacatagtcgtgatcaaatggtccggcgtcgaatcaccgtccgatctcgactggttaggaatctactcgccaccggactctcctcacgatcacttcatcggctacaaattcctctccgattcacccacgtggcaatccgggtcgggttcgatttcac

SEQ ID NO: 102305 - DNA, 350 bp, Arabidopsis thaliana columbia
atcagcttcgtctcattctccttctcgatctctccttttactcaccattccaaattccctaaaccccgattttggggaggttttacaaaatctatcgacgtagttggatacagttcttcgattctgattcgattttaattttatgtcaagggaatttgcctagtattcgcagagtgtgatcatatgaaatctcgagcgaggcagtgtctgctggtttgtttgctctgtctttccttaacgaatctctcctatggagaaaataagttcagagagcgtaaagccaccgatgacgagctgggctaccccgatattgatgaagatgctttattgaatactcagtgcccgaaaaa

SEQ ID NO: 102306 - DNA, 342 bp, Arabidopsis thaliana columbia
caaagagtggctgcttatgcagcgaaacgcgttcttctatgttttcaagactgtccagatcgtcatcattgctgcaatcacgtctacactcttcctgagaaccgaaatgaacacaagaaacgagggtgatgctaatctctacataggagcattgctatttggaatgatcatcaacatgtttaatgggtttgcggagatggctatgatggtttcaagactccctgtgttctacaaacagagggatctcttgttttatccatcctggaccttctcacttcccactttcttgcttgggattccaagctcaatattagaatcgacggcttggatggtggtgactta

SEQ ID NO: 102307 - DNA, 348 bp, Arabidopsis thaliana columbia
accacgcgtccggatcatgcgaaggaatgctcctcaggcggaggatactatcgctctctgcgtcgtcgttcagaaactttacttccggtaacaacggcgacgctattccgttctctaccttcacgaaaccttcttcttcaatcgctcccggagatttcctcgtccgtgaatggaaagactggtttaagcatcgagatgtgaaacagagccaccaattaatcgatcgaatctttgacatccttcgagctccttctaacgatggagacgatagagctttttatctccacctctccaatctccgacttcgtctcactgagaaattcgtcctcgacgtgctttcacacactc

SEQ ID NO: 102308 - DNA, 221 bp, Arabidopsis thaliana columbia
cagacgcgtgggcggacgcgtgggagaaaagttgctggaaacattgagactaaccttaggatagtaggagccaccgcaattgaagacaaattgcagcgtggtgtccctgaagcaatagaatctttgaggattgcagggataaaagtctgggtcttgactggtgacaaccaagaaactgccatatccattggcttctcatcgaggcttctgacaagaaacat

SEQ ID NO: 102309 - DNA, 379 bp, Arabidopsis thaliana columbia
attcggtggccaatacgcatcgcttatgagagaaatcactgagaaatctgtaagcggtggatttttaagagttacggcagtggtggcggaggagtgcgccgtagagacgcgactagtgaaagaaaacctaactcaattcgcggcggagatgaaaattcgtttccagattgagtttgtgctgatgaagacttttgagatgttatctttcaaagcgattaggtttgttgaggaggagcttacatcggaactccctcaccgtttctcggcaaaaaaactcaaacctttctctctaacttcaccgattttgagttttaaaccaacggttaagctcaattccagttgtcgcgctcaattgatcgatacggttcacaatctcttc

SEQ ID NO: 102310 - DNA, 361 bp, Arabidopsis thaliana columbia
agagattctttcgccgatttcgcaaaaaccctatggagctcctccgatccaacttgtctagggttcagatccctgaacctactcatcgcatctacaagcatgagtgttgcatctccttcgatactccgagatccgaaggaggattgttcgttgatatgaatagttttcttgctttcgggaaggattatgtttcttggaactatgagaagactggaaaccctgtttatcttcatattaagcagactaggaagtctattcccgaggatcggcctctcaagaaaccgactctgctcgctataggtgttgatggaggctttgataacaatgagccagagtacgaggagtcttatagcatagtcat

SEQ ID NO: 102311 - DNA, 391 bp, Arabidopsis thaliana columbia
accacacagacacaaaaacaatggctaaacccacatcacgaaatgaccgatttgcccttttcttcataaccctaattttcctgatcctaaccgtttccaaaccggtcgcctctcaaaactgtggctgcgcctctgacttctgttgcagcaaatatggctactgtggtacgaccgatgagttctgcggcgagggctgccaggcacgaccttgccggagcagtggatgcggtggagatcctgctgtttcacgagaaggaacggtgacacctgacttctttaactctatactaaaccaaagaggtgattgtcctggcaaaggattctacactcacgacaccttcatggccgcagctaattcttaccctagcttcggtgcttccatctccaaacg

SEQ ID NO: 102312 - DNA, 393 bp, Arabidopsis thaliana columbia
acccacgcgaccacccacgcgtccgcggacgcgtgggtcggattctgtttgggaaaagaagcttccggagaattatcaggatctgcttgatttattgccgccggagaggtatcatagtctcgcgaagaaagatatcttcgctgtgctttctcgtccaattccttttgatgatgataataaggaagtatggattgatatagttacaggacgagtttgtatggcgatttctgctagaggaatgtctattactggaattgaagaccggagatattggaactggattccaacggaagaatctaggttccatgttgtagcctacttacagcagatttggtggtttgaagttgatggaacagtgagattccatctcgcacctggtgtatactctctatc

SEQ ID NO: 102313 - DNA, 434 bp, Arabidopsis thaliana columbia
accacccacacacaccttaaacctcgcatctttgagctcaacagcctttactttaaactaacactctcaagatgcgtgaaattgttcatatccaagctggtcaatgtggtaaccaaattggtgccaaattttgggaagtcatctgtgatgaacatggtgtagacccaactggtacatatcatggagattcagatcttcaattagaacgtattaacgtttattacaatgaagcaactggtggacgttatgttccccgtgctattttgatggatttggaacctggtactatggactcagtccgtgccggtccattcggtcaaatcttccgtcctgataactttgtctttggacaatctggggctggtaacaattgggctaaaggtcactacactgaaggtgctgaacttattgattcagtacttgatgttgtccgc

SEQ ID NO: 102314 - DNA, 365 bp, Arabidopsis thaliana columbia
ccgggctacacaagatgtttcaccatctccatctgcgccacttgcaaactctcccattccaagaaactctcattcttctgttcctttagttgttggctgcgtaggcggtgctttttttcttctccttgtagctaccggtctctactttttcacaagtaaggccgggaaaactgtgaatccttggcgtactggtcttagtggacaacttcagaaagtattcgttactgatctgagattgaagctgcatgtgaagattttagtaatgtcattggatcttgtcccattgggaagttgttcaaaggaacattatcaagtggagtggagattgctgttgcttcttttgctactactactgccaaagactg

SEQ ID NO: 102315 - DNA, 393 bp, Arabidopsis thaliana columbia
agtcaatcattaccaacctctgcgggcaaagatggaattcgagaagatcaaggtgatcaatcccgttgttgaaatggatggagacgaaatgactcgagttatctggaaattcatcaaagacaagcttattttccctttcctggagctggatatcaaatactttgatcttggactgcctaaccgcgatttcactgatgataaggtataatgtggctattaagtgtgcgacgattactccggatgaagctcgtgttagggagttcggcttaaagaaaatgtggaggagtcctaatggaactataaggaacattttaaacggcacagttttcagggaacctatcatttgcagaaacatccctcgtcttgttccaggatggacgaagccaatctgta

SEQ ID NO: 102316 - DNA, 352 bp, Arabidopsis thaliana columbia
cgtgggcggacgcgtgggcggacgcgtgggctcctgagaaccagcaccaaaggagtgataacattggtccacctccacctaatcgacaaagaaggaataatgcttctggaactctgccagataatcgccaaagagttgcatctaggacgcggcctgtgaatcaggggaaaagggtagcgaaggaggataatgttgtgttgacagacccaaacttgcctcaacttgttcaagagttacaggagaagcttgtcaagagttctattgagtgtatgatttgttatgacaaggttgggaggtctgccaatatctggtcatgctccagctgttattccatcttccatatcaactgtat

SEQ ID NO: 102317 - DNA, 410 bp, Arabidopsis thaliana columbia
atgttattgtggatacatatgaaagggattattctccgacttttggtcagcctgcttcttatctacgtgcaagaggagctcggtctgagcttggagaatttgtggagtatgatcttgacaatgaggatgaagactggctttatgagtttgataaggataagaaagaacttccacctgaaaagcttgagatcatcatttttaaactagaggtgttggatcacaagacgcgggaaagagcaggagttattacacctactctcggctctccagttcctgtgcttttgcagtttgatgctgcttctgatgtgctgcaagtactgtccattaattatggaaccttccaggcgatcttcaactactggaaagaaaagcgtaaaagatggcagaagcctatcttacggcgtttacag

SEQ ID NO: 102318 - DNA, 247 bp, Arabidopsis thaliana columbia
acccggtatgatccaagtcttcctcggccacagcggaggatttgatgtcgaagggcatgagcttcctcggcttgtgtacgtgtcccgtgagaagcgtcctggttttcaacaccacaagaaagctggcgccatgaatgccctgcaaggccgtgagggaagcaatgtgttttttgatggatcctcagattggaaagaaggtctgctatgttcagttccctcaaaggtttgatggcattgacacaaacga

SEQ ID NO: 102319 - DNA, 283 bp, Arabidopsis thaliana columbia
accacattttcacaaactgcaacaaattggatcaagttgcagaaagtaacatcatatctttcacttggaggaaaagccagatgatgtcagatgctctgaatcgctacaatgggggatttgttttggaatctttggtcagcacttgctttcctggatgtgaagtacctgcatcattcgatcaccaagcctatggagcattgttacagacgaaattacctcggcactggtgtgatagtaagcttactgggatagctttatgcgctgttatattgtttccggacta

SEQ ID NO: 102320 - DNA, 312 bp, Arabidopsis thaliana columbia
aaccagggtaagcgtctaaattcggatttttgctctaaacccgatcagactcggaatgtgagtttaaatgggtcatcgttgaaattggaggaatcttacgagattgtgagaatcgaagaagagtatgggaattgggttcctttgacttataaacctaaacaacctttgtggaagcatttgtctgaagaatcatttcgctctgatttagatcacagcattgtctcatcctagaagaaagctttgtcttctaagctattaagcaatcatagtaatactagaaaacctcatagatgcacaaagtcgctctcttgt

SEQ ID NO: 102321 - DNA, 376 bp, Arabidopsis thaliana columbia
atcaaggtatctttgaggtgaaggcaactgctggtgacacccatcttggtggggaagattttgacaacagaatggttaaccactttgtccaagagttcaagaggaagagtaagaaggatatcaccggtaacccaagagctcttaggaggttgagaacttcctgtgagagagcgaagaggactctttcttccactgctcagaccaccatcgagattgactctctatacgagggtatcgacttctactccaccatcacccgtgctagatttgaggagctcaacatggatctcttcaggaagtgtatggagccagttgagaagtgtcttcgtgatgctaagatggacaagagcactgttcatgatgttgtccttgttgg

SEQ ID NO: 102322 - DNA, 386 bp, Arabidopsis thaliana columbia
atccagccagggtaaggggaggaacagtcggaagagcaaagaagggaccagaacttaaacttggagacataaccatcgtcaaggatgcgattacgcctggaagttacttcggaaacgagattcctgatagcatagcgatcatcaaatgtcaccaggacgaagtgttggtgctgcccgaaactgctaaagtgcttgcgtattccaagaactacgaggtggagatgtattcgattgaggatcatttgttctgtatccaaggacatcctgagtataacaaagagattctcttcgagattgttgatcgtgttcttgctctaggctacgtcaaggttggttttatttctcttttctcttaaccttgatcaatttacagacaacaataacat

SEQ ID NO: 102323 - DNA, 424 bp, Arabidopsis thaliana columbia
accaggaagctggtgatgtacagcctaattcttttgttttcagtagactcttagctggttttcgcgatagaggtgaatggcagaagacatttcaagttcttaaagagatgaagagtatcggtgttaagcccgatagacagttttataacgtggtgatcgatacctttgggaagtttaattgtcttgatcatgccatgacgactttcgatagaatgttaagcgaaggtattgaaccagatagggtgacttggaatacgcttattgattgtcattgtaagcatggtcggcatatcgtagcggaagagatgttcgaggcgatggagaggcgagggtgtttgccttgtgctacaacttataacattatgatcaatagttatggtgatcaagaaagatgggatgatatgaaaagattgttgggaaagat

SEQ ID NO: 102324 - DNA, 331 bp, Arabidopsis thaliana columbia
atgatacgaagattaaaaagaagagaaagagagacgatgctgtggaagtcgacgagttagaaggagatgaaggaactaaggaagagcaaaaaccccagaagaagaaaaataagaagaataagaataagagaaaggtaaacaaaacgccaaagaaagctgaggaaggcaatgtagaagagaaagtgaaggtagaagagattgaagttaatacagacaataaagaagaagatggggttgttcctaacaagttatatgttgggggtattccttatcagagtacagaagatgagattcgtagctactttagaagctgtggagtcatcattaaagt

SEQ ID NO: 102325 - DNA, 356 bp, Arabidopsis thaliana columbia
cccacgcgtccgcggacgcgtgggcggacgcgtgggtgattgttcccaacacgaaacatctcgaggaagcagcctccaaagcaggtgtatcgaattcagatatcaaacagatgtgtgaagatcagaaacttgagaaagtggtgttacaagagctagaggctattgcagcaaccaacaaattacagaaatgggaaattcctgctgccgtcaagttgttcgcagagccatggacacctgacaatggaatgctcacagaagccatgaaattgaaacgtcatgagattggcaagaagtttgcaccagagattgaacgattgttgaagaacatacaatagagagacacgaggagaaggaca

SEQ ID NO: 102326 - DNA, 386 bp, Arabidopsis thaliana columbia
gaagtttaggagaggaagagagatggaggtatttagacttggagagctgagacacctactggtgacggttttcttgtcggggctcgccgaatacttgataaggccagtgatgactgacgtcaccgtagccgcggtttgctccggcctagacgattcatgttctttggccgtctatctcaccggagtacaacaagtggtaaccatatctacttatatatatacacatacatgcatataatattaaatctgttattgtttttacgctttaactaatctcttttcgttgggtgttgattactctttaaactttttatctttttatctgatggtgaaaatgatataaagaaaagacggtaggaatggggacaatggtaatgatgccagtg

SEQ ID NO: 102327 - DNA, 211 bp, Arabidopsis thaliana columbia
agagagaatgttagagagacagtctctgagagacactccaagagacaatcgctcgtcgtcggtattcacgcgtctgtgactccgttagtgcctaggctagcgaggacagtgagagagacagagagagagctttggagttgtcgtagctctagatctgtcgcaatttgaggtgcaattggtggttttatcgtttgattcaacggttgatcct

SEQ ID NO: 102328 - DNA, 365 bp, Arabidopsis thaliana columbia
aaaagaaagcaatttgtcttcaaaacatatttctctctctaaaacctctttttcataaaaggttgcgtcatctatacgaatccatacgtctctttgcttttctccgatcggtcttcttttctcatcgccggaacgctttggtttaatggggcacagacattttcttggttcaacccagttttttgatgatgaacatgatcaaggctggaatcatacacacccagaacatccatattcgagtcaagcaacatctgggaccagtgagaacagatcacatgtttatccatcagaaaacatgttgaatgaaggaatgccagtgtcttctcattggaactcttctccaggaccaaatgcttatactgact

SEQ ID NO: 102329 - DNA, 193 bp, Arabidopsis thaliana columbia
agttaaagtaaattaggatggcttagagtgactcttactcattggtatacccataaaggtcttgtgtctttgaacaagagttgtgaattacatagttttgtggtattcttttgttttgtttgtgattagaaacataatcagattaaaaattgttatcataccatgaaagctgaattgttatatatatttaccc

SEQ ID NO: 102330 - DNA, 406 bp, Arabidopsis thaliana columbia
aaaaaaaccttcgtgtgcgtctctcgtcctctaaattgtcgaaaatgctggctaggctcgctgcgaagcgtcttctcgagatccgtcaagttttccgtcaaccaacctctcaggtgactcgtagcttatcgacggccttaaactaccatctggattctcctgataacaaacccgatcttccatgggagttttcagaggctaaccaatctaagaatcggctattctggaactgatttaagggagagacttagagtgaacgacccaaatggccaacagatttgaatctgctagtgtggcagaaagactgtccagaaattagtaaaccggtttcattgtagtttaaatcctaatactttcttgtgcatttagttccagtttactgtatctttcatttctggctacagta

SEQ ID NO: 102331 - DNA, 403 bp, Arabidopsis thaliana columbia
agacactgttctctagttcccatcgacgttcttgatcctctctggttcgcacccgtgtttttaatcaattctggttcgcataggtgactccggtactgtttcttcgtcgatagccttttcctatggccacaacagaagatactccagcttctgctggtccaagatatgctccagaggacccaactcttccccaaccatggaagggacttattgatggaagcacaggaattctctattactggaatcctgaaaccaatgtcactcagtatgaaagaccttctgcgcctcctccccactctgccacaacaccgaagctagctcagattcctgtaccctcttcaggacaaggtcaccaagctcagcatgaacaagcaaaaccagttggtcatgtgtctcagcagca

SEQ ID NO: 102332 - DNA, 380 bp, Arabidopsis thaliana columbia
acgcgtccagatgtttattgttagtgggagaggtagagagtctctgagcaattggctatctccttgtgaaaatcttggaatagcagctgaacatggatacttcattagatggaagagcaaagatgagtgggagacttgttattcgcctacggatacagagtggaggtcaatggtggaaccggttatgagatcgtatatggaggcaacagatgggacgagtatagagtttaaagaaagtgctttggtgtggcaccatcaagacgcagatcctgactttggatcatgtcaagctaaggagatgcttgatcatctagagagtgttctcgccaatgagcctgtggttgtcaagagaggtcaacacatcgttgaagtcaaaccac

SEQ ID NO: 102333 - DNA, 312 bp, Arabidopsis thaliana columbia
ttagggattatgggcaggcagcaagtgatatggagagatatgttaatattctaaccaagcaaatggaagagaagacctctggaagccttgacagatctactagtatgtccaatgacataagacaagctcgtatacgactttctgaactggaagagaaatcaaggaaagaaaattcattggatatgtacctcgtcttgggtgttgtaccatcatgctcggcttcagatatcagaaaggcatataggaaggccgcactcaaacatcatcccgacaaggctggtcagtctttgacaagaaacgagactaaagatg

SEQ ID NO: 102334 - DNA, 376 bp, Arabidopsis thaliana columbia
aaaaaagtaaaacatcatatagatgatctataaaaatggaacgagacggatcatatgcaaaccataaaattaaactatctgccaaacacttaaaaaatcaactctagagatgggacttgagacaaaaccaaacctctcctttgtactcatcatcctactactcggcttctttgcagtctcttacgcttccgttcctcggaaactaaatccacatcaacgcatcggtttcttgaagcccttcccgaaagtcttcaccttcaagcccttaccaaaagtcttccccttcaagccctcaccgaaagccttcctccccaagccgatcccggttactccaaaaccagtcccagttaagcgaccacgaccaccaactcctgag

SEQ ID NO: 102335 - DNA, 341 bp, Arabidopsis thaliana columbia
gtttttggacggattagcgagaactgtatcgacgaagaaaggtaaaaaactatcggaagatgaagatggagggagagagatcgcaaaatcgatgattaaagattcgaagaagaactcgacgttgctcggtacttcaggctttgttagctccgaaagttctaagaggtttacctctatttgttctaatagaggtgagaaaggaatcaaccaagatcgtgcaattgtttgggagggatttgggtgccaagaagacataacattttgtgggatgtttgatggacatggaccatggggacatgtgatagccaaaagagtaaaaaaatcatttccatcttctctgc

SEQ ID NO: 102336 - DNA, 398 bp, Arabidopsis thaliana columbia
ggctgttacagtacttccttccgtctccggtctctctgccgtcgcatcttcatcgaacctacgacgtctgacctccgcctcgaaccatcgactcacggcgataaaatccgtaacatctacttcttctcctcctaccccttctagtggtgttcaacggagacggaagaataatgatgaaaacagagccacggtggcgaaggtggtggagaatccgtattcgaaagtggaggcggcgcgtccggatttgcaaaagaggttgtcagattttttggaagaagctagagagttcgtcggagatggaggaggtccacctcgttggttctctccattggagtgtggcgctcaagctacaaactctcctcttctcctatacttacctgggattgatggaactggac

SEQ ID NO: 102337 - DNA, 376 bp, Arabidopsis thaliana columbia
acagggaaatttacttccagctcgtcctgctcctccgcctccacctcctttatatagttccctcacttgattttttttttatagcctttcattttgcaaacatcttcagggaactgagctaatacttttttttttcctgatattttcttgaaaagcctttcttcatgctgcaattatgaatgattatcagaataccacaaagcatactttattaatacatcaaaacagaacttgagtagtgggaaatgagaaatagactaaatgcagtaaagccagtgaattcacaataacattttcatttccattactgaatacattttattcagtcatctgtgacgttaatgtacctgacatgaattatgttattttgaacatg

SEQ ID NO: 102338 - DNA, 388 bp, Arabidopsis thaliana columbia
aaacaaaagaagaaacacgagtggaagcttttaaacaaaattaaaaaagagagagagaaatggcgacgtcgggaacatacgtgacgcaggtgccgttaaaaggaacggtggagaaacacttcaagaggtacaggaacgagaactatctcttccctgacactatcggccaccacatccaaagtgttactgttcacgatggcgaatgggacactcaaggaggcatcaagatttggaactacacactcggaggtatacctttctttatatattagacaattatctaaactttgagtatggggcatgggttgatacccaacattaatttgcaaaaaaatatatatgtgatcataatatcatgcatattcatccttatgaggccatctccatc

SEQ ID NO: 102339 - DNA, 383 bp, Arabidopsis thaliana columbia
aaaaccatccgaagatattgaagacgatgacgacaaatctcagcctcactctggtggcggcgtcgatagtgctggaaagatatttgttggaggtttagccagggagacaacttcagctgaattcctcaagcattttgggaaatatggagagatcactgattctgtgattatgaaggataggaaaactggacagcctcggggatttgggtttgtcacatatgctgattcctctgtggtcgacaaagttatccaagacaatcacattataattggcaagcaggttgaaattaagcggacgataccaagaggatccatgagctctaacgatttcaaaaccaagaagatatttgttggtggaattccttcatctgtggatgatgatg

SEQ ID NO: 102340 - DNA, 103 bp, Arabidopsis thaliana columbia
acccacgcgtcaggaagattgttcttggagacacaaggagcacacatgatgacgacgtttgcttgtttgcacctctttaccatgttcttgtttaccttgctct

SEQ ID NO: 102341 - DNA, 322 bp, Arabidopsis thaliana columbia
acacccacgcgtccgcccacgcgtccgcccacgcgtccggaaagaggaagactttgactcgtcttcttcctctcttcttctctctctatcactgcatttgtttttcctcagagcgaaccttgagatttgattagatggggaattgttgtggcaatccgagttcggctacgaaccagagtaaacaagggaaacccaagaacaaaaacaatcctttttacagcaatgaatacgctacaacagatagatctggagctggttttaagctctctgtgctgaaagatcctacaggacatgatatatccttgcagtatgatcttggacg

SEQ ID NO: 102342 - DNA, 340 bp, Arabidopsis thaliana columbia
acccacgcgtccggtagtaataatggtaacgaagaagatgatcaacaagaggaagaagaaacggatcttctgaaacgatccggttcaagtgcaagtaccggttcagcgacggttcgattaccaaccggaagaggtagttacagtagatccaccagtagtatacgcgagatcgagctgattccgatcgaatcggtgattcatctgagctggattgctcggcgaatggtctccgccggttatctccgtgaatgtattcaagtctacggaagcgttcgcaaatccgccgtcgattcaagtttccgacggttagggatcgagaaactcagcatcggagatgttc

SEQ ID NO: 102343 - DNA, 387 bp, Arabidopsis thaliana columbia
  unsure (1)..(387): unsure at all n locations
actagagtcttcgtttgagaatgagacaagattaggttacggtttagcataggattccaaattcattttcaatcccaaaaatacgattattcaggatatgggcaatcttctggtaagccaagcgagcaagatacgtacgcagacatagaagcagcttacaattggctaagacagacctacggtacaaaagatgaacgtatcattttgtatggacaatccgttggaagtggaccgtcgcttgagcttgcttctcgtcttccacgtctccgagcacttgttctccatagtcctttcttgtctggtctacgtgttatgtaccctgtcaagcactccttcncgttcgacatttacaagaatattgacaaaattcatctcgtggagtgtcct

SEQ ID NO: 102344 - DNA, 366 bp, Arabidopsis thaliana columbia
acccacgcgtacaccaagatggggaaactgaaaaagcggattcgtccttgtgatattacaatcaacattggtaaagaggcgcctattccagaatgccctatccctggtgaaagatggagagaagttaagcatgacaatactgttacctggcttgctttttggagtgatcctatcaatccataagagttcaagtatgtattcttggcagctagcagttcgttgaaaggacatagcgacacagagaagtatgagaaagcgaggaagctacataaccatatagggagtattagagcagcatacaccatagattttaataacaaggatgtaacaaagcggcagatagcagtggcaacatatctcatcgat

SEQ ID NO: 102345 - DNA, 296 bp, Arabidopsis thaliana columbia
caattaacttttttccgggaagatctcaccggatgaaaagctagctagggtttctccaccgtgaagattctagaagcgagaatttggaatttgctaattaagaagatgtgttacgatctttcttaagtaaaaaagcattgaaattgacgaatttagggttgtgaaaaatatggatttggattcttcaatggtaccagagaatgatcaagatcctattgctacgtctgagaatcaatctcctatggaggagaaagaagaagcgtctgaacaacaaaccggatacgaatccgaatcgg

SEQ ID NO: 102346 - DNA, 399 bp, Arabidopsis thaliana columbia
atccacccacgcgtccggtcgatttatttattcctctccaaagcaaaagcttcttcgatcgtccttgtctcgttttcaattctaaatgttttgtgcagaaaaatcatgactttggcttctccacgagtttcaaattcaaagacgactgtgttgttgtttcctcgaaaagtttcttcaattgcatttgctattggtggattaacttctttcgtcatcttcgcttctctgcttcttttcacgtatcccattggttcctctgttactgactatttctacagaacagagaccactcaaaacgtccagtttcaccatagtatccatgatcctgatcgtaacccatctcctgtttctagctcagagtcaccaccagtattgacacaagatagtgatgataaagtg

SEQ ID NO: 102347 - DNA, 199 bp, Arabidopsis thaliana columbia
taaagcctgagatcaccgaattctgatcagcaactatgcattcaggtcatctccatctcgatgaaccgatcacgatgacttcactcctcgaaacttctaaatcatctggcgtcccggctttgactaatattgttgggactcaatgtccgcattctcgatccgtcgaggtgattactggctgtctcaaagctggaatctc

SEQ ID NO: 102348 - DNA, 183 bp, Arabidopsis thaliana columbia
ttcggtcgaatcccagtatagaccaacgaggaagaagacgaagaagcagtctctcaaacttcttctctagatccgaatctcactctcatttctccgatctctctatgtgcatgacctacaatttcgcatctcttttgatcttgatctctgtttctctccttctactgaatctcgtgttttgag

SEQ ID NO: 102349 - DNA, 294 bp, Arabidopsis thaliana columbia
taatgatcttcgtctccaatggcgatatcagtacaacacgtcgtcgttttactcctctccactctcctcatcgccatcaccttcttcctcttcacctccgataacgccagattccctttcccttctctctccaccaccgattactacacaccaatcccaaaatctccaattcctcaccgaatcgtcgacgtttcttcagatcaaactccacagaagatgaagctaaacacttccctcgaggtgggagagctgaaatgggatctatgtaaaggtgcagaatctgttgattacata

SEQ ID NO: 102350 - DNA, 261 bp, Arabidopsis thaliana columbia
gtagctaatgagcaacatgaagagaatcatcatcagcatgaatcttcgaggaggaagagattgatgaagaagttgaagaaatgggttgaaggaaatgagaaaggaaaatcaaaagcagaagaagcagaagaagcggaaggcactatttgacagtggaacctgaagaagaacgaacatttcattcaagaaggtcttgttctagtgtgtaatagcattgctttacaaaagaagcatgttcatgaattattcatcatttctcca

SEQ ID NO: 102351 - DNA, 317 bp, Arabidopsis thaliana columbia
gaaaagcatttggggaagagtaggttttgcgatctgtgattttctgaggagaaacgaaaatggcgtttagagggaaggagatgatgaagaagctggtaaagaaagttggagcggagaatatcacgccggagctcaaggagaagctcaaggcttgtgttcctgataccaaagtcgtcatgggcagagccaaacgcggtctctacgccggccgccacatccagtacggaaaccgtgtcagtgaagacggtggaaacaagtcaagaagatgttgggaaccgaatgtccatcacaagcgattgttcagctacatattcgac

SEQ ID NO: 102352 - DNA, 377 bp, Arabidopsis thaliana columbia
tgtggaatcagaaggagaaagagagtttgaacattgagaggtactcagattcgttgaagccgaagatgaagtctaataagaatggatctttctttgattttcttgttcttagacctgataacttccctaaagaacttcttggagatactcgaagagaacaacggcctgtgaagagagctaaatggagtcaagaagctgatttgcagaaattggatgtgtttgagaagcttgaagctaagtttaaggttgaaggcaaggaagagaaagaagaaggggaagatgatgaagaagttgtggaatcagaatgagaagaatctgataacggagattatgatcagaatcaagactttgatgatgatgacgacgattataataac

SEQ ID NO: 102353 - DNA, 313 bp, Arabidopsis thaliana columbia
gaagccacggtgctcatgtctctcctccagcctgctcctgagacttttgatttattcgatgatatcgtcttggtgtcggaaggtcagatcgtgtaccaaggaccgagagacaacattcttgagttctttgagagctttgggttcaagtgtcctgagagaaaaggaacagctgatttcctgcaagaggttacttccaagaaagatcaagaacagtactgggtgaacccgaacagaccttatcactacattccggtttcagagtttgccagtagatacaagagtttccatgttgggacgaagatgtctaacgaac

SEQ ID NO: 102354 - DNA, 313 bp, Arabidopsis thaliana columbia
gataagacagagggtcgttgtcctgcatgtcgtacccgttatgataaggaaaagattgtatggatgacagtcagctgtgaaaggttggttgctgaattttacattgaccggaaaaagtcacagaaggcgaagcctaaacctgcggagggaaggaaagatctaactggtgtgagagttattcagagaaacttggtttacgttatgagcttgccttttgacctgccagatgaagatatgtttcagcgaagagaatactttggtcaatatgggaaagtcgtcaaagtagcaatgtctcggactgcagctggggctg

SEQ ID NO: 102355 - DNA, 201 bp, Arabidopsis thaliana columbia
ataagatatttcgatgaagaatcgttctttagggttttgggcgatcggggttttgctcatcggaagcttgatcggagctacggaaggctcgattcatgagtacaacaacgaacagttcactgcaaaattcaatgctcgcttcttccatggtggtagcgaacgtctttacgcttccaaatctcaagatctaaactcttcttc

SEQ ID NO: 102356 - DNA, 340 bp, Arabidopsis thaliana columbia
atctcgattccctacagagtactttctcaatgctaccttcaggaaatcagcttcagcagccaaggccagcagcaagctcacagcctgcagtgtcctcacaaggtccatcctccggtttgccacctggaagtgcagttggatctggccattctactcctgctggaaataatcagcctccgtggccaaaaatgaaaccatccgatgttcagaaatacacaaaggtatttatggaagttgatagtgacaaggatggaaaaatcactggtgagcaggcgaggaatctatttttaagctggaggttacccagggaagtattgaagcatgtgtgggaattatctga

SEQ ID NO: 102357 - DNA, 330 bp, Arabidopsis thaliana columbia
cccacgcaaccagagaaaaggaaaacaatctctctttctgtgacctttcgcaacttgtcaaagcaccacgaccttctctctacggagttgagatcaatccccccaaatctcggtgtggttcctctagggtttttgatcggaatcggaatcgataatctaaccggcatgaggccaatcctattgccggatccacccagtctatctaccggcgtccctgatattttcgaacaaggcggttcccataacgtcgtcagacgcgccgtcgtcatcggaaacggtttccctggctccgagaatcagtgtatcggtctcgttcgtgcgctcggctta

SEQ ID NO: 102358 - DNA, 358 bp, Arabidopsis thaliana columbia
aaaacacatggtgatttcttgagactggaacatacggagggatacatgaagttatctgccaagacaaagacgtttttcgctaccgctgtttccttgtgggatgcagaattctacatcaaagttgacgatgacgttcatgtgaatcttgcctccctcaagaaggctttatccgcacaccaaaacaagcctcgggtttatgttggttgcatgaagtctggtcccgtcctagccagaaagtaagtaaaaaccctactaaggtgagcattttttaggtacttaaacagcgtaagagcatcaacctttccggactttctatacttctggcaaaaaaaaaaacaggagtgtgaagtaccatgag

SEQ ID NO: 102359 - DNA, 220 bp, Arabidopsis thaliana columbia
ggagttagcatgctacgaattccacaccagagaacattcacataatatagatactagaaaggctgtgcagacagtaataattcttgcacatgcacacgaaaccatcacgataacaggaaacattgatacagtcagtactcagtaatttgagggcacctacagtaacgcaagtaatactacacatggtagacgttccactgcgtaatgatgaaacatcatc

SEQ ID NO: 102360 - DNA, 384 bp, Arabidopsis thaliana columbia
  unsure (1)..(384): unsure at all n locations
agctgttgccattcaaggagacactaatggtgctcttactttgaatcttaatggtgaaagtgatggcctttttcctgccaagaagaccaaatccggagccgtttgtcaggtcgaaaactgtgaagctgatcttagtaaagttaaggattatcatagacgccataaggtctgtgagatgcattccaaggctactagtgccactgtcggaggtatcttgcagcgcttttgtcagcaatgtagtaggttccatcttcttcaggagtttgatgaaggaaagagaagttgtcgtagacgtttggctggccataataaacgtcggaggaaaacaaatcncgaacctggcgctaacgggaatcctagtgatgatcactcaagcaactatct

SEQ ID NO: 102361 - DNA, 341 bp, Arabidopsis thaliana columbia
acggacgcgtggggttctagatcgcgagcggccgccctttttttttttttttttgggatccatacaacaacaactttaatatacatttcacattaattgtcaaacagataagaaaagatcatacgaaaatagagcagctgattttagcaatcaaatttagaacaatcaatctgcagaacattagacaacaaacaaacaaacaaactttaaacttgttctttcactctaaaacctgttcttctccttgcagttgcttctcaccatttttcttgtttttctcattcaccaaagttagtcaaaacgaaactacaactacgcgaagcttcactcctccacaacac

SEQ ID NO: 102362 - DNA, 351 bp, Arabidopsis thaliana columbia
agacagcgaagatgattttgttgccatacgtcctgagtggaccactgttgatcggattcttgcctgcagagaggaagatggggagctggaatatcttgtcaaatataaagagctatcctatgatgaatgttattgggagtcagaatcagacatctcaaccttccagaatgaaattcaaaggttcaaggatgtaaattctagaactcgcagaagtaaagatgttgaccataaaagaaatcccagagactttcaacagtttgatcatactcctgaattcctcaaaggcttgttacatccataccagcttgagggacttaattttttgcggttctcgtggtcaaaacagacgca

SEQ ID NO: 102363 - DNA, 367 bp, Arabidopsis thaliana columbia
acaaagttgcgatgatacttaaagatccgggtatgcggagtgtcttctcaagaaacggacaggttttgaaaaccggtgagacttgctataacccggagctagctcagagtcttgagactatttctgagcaaggcccgggagcgttctacaacgggacagtaggcgagaagcttgttaaagatgtgaagaaggcgggagggatcataacgatggatgatctaagaagttataaggtccgagttaccgatgcaatgtctgtggatgttatgggttatacggttcatggaatgccgcctccttcgggcggtacagtcggtttttcgatggttatgaatatcttggatagttactcgaatctttacactgc

SEQ ID NO: 102364 - DNA, 226 bp, Arabidopsis thaliana columbia
tgtctcccattccaaaaccactcttcttcttcttcttcctcaactatgtgtctctctcaacctcactctctcttcacctcccactcacatctctcgctatctccactaccacagactctcatcgcttcaccacctccctcctctcccggcaaaacccatctccgtcgtctccaccatacaacttccgatcaagattcagctactcagtggctcaaatcacctcagt

SEQ ID NO: 102365 - DNA, 286 bp, Arabidopsis thaliana columbia
gttatatcatctccctcttacatatacataaaacatcataccaaaaaaaaacaagagttcaaaggcaaatcacaaaatacgatacgaaaattatgggattttgtttttgtttatcctcaggaggatcaacagataaaagtcagatttatcagataactgattatggacaacaaaatgcagttttaaactctgaccaccatgttgttcctcaaaacttgggctctgtctcttcgttaaccggaggcaacggcttgaaccaagatgctgccattctccacctgggata

SEQ ID NO: 102366 - DNA, 381 bp, Arabidopsis thaliana columbia
aaaagcttcaatcagtgagctgcgttttttattctctgcttcatccagatctacatttctctgtttcagcctctattgctctgtttaacaagttctcaacggccggaatcgtcgccgggattctcgccaccggagttattgtgaaacggtgaaaatgggtttttgattttactggttacttcattgttcagtgcaaagtttggattgatttcactatggaggaagtagcagctaaggttgaggaagaaactgtggaaaccaatgtagatgcagtgaaagaggacaatgcaactatagctaatgaaagcagaagcccagagagtgtttctgcagtgtctgtggtgtcaaatcgagctgcttctactaaaaagaaaccagtta

SEQ ID NO: 102367 - DNA, 444 bp, Arabidopsis thaliana columbia
acaaaagtcgctttgttcaaacactcgtttacgcgtagccgacataaattttccaaaaacccatatccgaaaaagtcgatatatttattgaatttttggaaccaaggagacgaagaatttacacggtttttgaagaagaagaagaagatgaagtataagcgtaagctaagtctctctgttgtcttcctctttgtcttctatctcgctgcggtgacttcagatctagagtctgaccggagagctttacgcgctgttcgtaacagtgtccgtggccgtcctttgctatggaacatgagtgcttcgtctccttgtaattggcaccgagtccactgcgatgcgggtcgggtcacggctctccgattacccggatctggtttattcggttcattaccaatcggtggtattggtaatctaatccagcttaagactctttctctccggttc

SEQ ID NO: 102368 - DNA, 292 bp, Arabidopsis thaliana columbia
cagacttatatttatacagtagtttgataagaatgaattaatgagagtataccataagaccaatactcaaattcttcaaatacaccaaaccaaaaaagctttgaaactaaacgataatggctgatccaatatcagaaccattgttgtctcatctcaccgatgagtctggagtcaacgacaacaccagattataagcattgactttcgacaagatcgtcgaacaaagtctatcagatttcggattctggcaatttttccatatttccctcattggactagctttgctcttcga

SEQ ID NO: 102369 - DNA, 264 bp, Arabidopsis thaliana columbia
cggacgcgtgggtgatccgtcagcaatgcttgatctttaaatttactgatatctgaagatcgacttagggttctgatctacatgatatttatttgtttgggcttttattcagcagctcgatcttgggctgaagctatggctcatagtacttgggaagctgacaagatgcttgatgtttacatatatgattagttggtgaagaagatccttcacaataccgctaagtcctttatgactgaagggatggtttcccctgattcactt

SEQ ID NO: 102370 - DNA, 218 bp, Arabidopsis thaliana columbia
cttcctcagcgtttctttatcttacacaaacactttttcttacatcaacacatcttgttgtttgttgttgtcatggcaccgaaagttcacacggcggccgtcaaaaccaaccaatgaaatcgattccgttacagctgagtgacgaacataccatagggacgtaacgcaaccgacatcagagatcctttcaagaagtcacctgtctggctcagtacttt

SEQ ID NO: 102371 - DNA, 407 bp, Arabidopsis thaliana columbia
cgtaagtgaagtcttagcgataagctttgtttcttcttcttcttcttctttacccatggatttttaacgaacaagagaagagaagaaccaagttttcttcgaaaggattgaactttgtttctttctcttcagctacaacaaccaaaaaatgatcaagctttgcttcatgacttctcatggttattcaatccctggccttggtcttcctcaagacctctgcaacaccgaaatcatcaagaatagccggtctcatctggtgaatcccggagcaagacaagagatcatacctgcaagctccttcaatctgaatacagaactcttggaaccatggaaaccggtttcttcatttagccaattcgtggagattgattcagccatgatgaaacctctgctcatggatgttcatg

SEQ ID NO: 102372 - DNA, 285 bp, Arabidopsis thaliana columbia
ctttgatgggattcagcttgttttctcaaatgttagttttttcttcatttgttatgcagcaagtattaaaaagcggcttggatgctaactgcaaactaatgggggatcttgtcaagagacagttttgattgttgatgtacatcaaagcaatcatgaacagacacaggcttctctcagcggcaacagatgaatgcaataaaaaacttggtcaagcttgctcttcttctttatctccagtccataactttctgaatgtccagccagaacaccggaaaactcctttca

SEQ ID NO: 102373 - DNA, 373 bp, Arabidopsis thaliana columbia
gagtaatagtgttagggatgaatcaaacatgtatgggggatctgaatgggaccaaaacaggcggatgaatggccggggctgggaatctggtgcagatgaatggaaaagtcgacatggagatgcgagcatggaagtctcatcaatgtctgttaaagatgataactcagctcatgttgctgatgatgagtctcttggcggccaaacaagccactctgataataacagggcacaaagcgttgaatctgggtcgaatctaacatctccagcaaaagaactgcatgcaagttctcctaaaacgatggatgaagttgcagctgacgatcctgtttcagaaacaattgagagcactgaacgttactgccggcattatctc

SEQ ID NO: 102374 - DNA, 123 bp, Arabidopsis thaliana columbia
gcttgctttcactttccttctccgatttcgttctcacgccttcgcattcctttttttaatttcgtttcgaaacgcgtttcaaggttacgtcgatctcaaagtaacatcgccttcagagagaaa

SEQ ID NO: 102375 - DNA, 309 bp, Arabidopsis thaliana columbia
gatgtatttgattactctgacgaggatgaccgtgttgaagaggagtcgaagaaactccttcgcaaattcgattccccagttactaaaaaacaccactgcgccatcgataagtatgaattccttcgatgctttgcgaaggatacccaaagcgagagtaaagtattgcaacacattgttattgatgttgaagtcccagtaaaagaagaaccgtcaagatgtgaactcagcggagatggaaatagtgacctgattgatgttatctccaatggctctcatagaacgattggaatcgattcattaacgtcatca

SEQ ID NO: 102376 - DNA, 206 bp, Arabidopsis thaliana columbia
acagcccacgcgtccgcccacgcgtccgcccacgcgtccgagttccctcaacgttttgacggtattgatttgcacgatcgatatgccaacaggaatatggtctttttcgatattaacatgacggggttggatggtatccagggtccagtatatgtgggtactggttgttgttttagtaagcacgctctatatgggtaggatcctgt

SEQ ID NO: 102377 - DNA, 306 bp, Arabidopsis thaliana columbia
gaccagtcttcgtgtgctcgtaattggcgattctcaaattcgatctccgtacaaacaatggccgaaacctcgaagcaagtcaacggcgacgatgcccaggatcttcactcgcttctttcttctccggcgagggatttcctcgttcgtaatgacggcgaacaggtgaaagttgacagcttgttagggaagaagattggattgtatttttcagctgcttggtgtggaccgtgtcagcggtttactccacagctggtggaagtctacaacgagctctcttcgaaagttggttttgagattgtgtttgtg

SEQ ID NO: 102378 - DNA, 309 bp, Arabidopsis thaliana columbia
tctcgattggctcatcactctattctcaatcgctactctccctaacactctcgttatgggcatacctttgcttcaggccatgtatggagattacactcaaaccctcatggtccaactcgttgttcttcaatgcatcatttggtatactctgctactattcctctttgaactccgagcagcgaggttgcttatccgagcagagtttccgggtcaagcagccggatcaatcgccaagatccaagtcgacgatgacgtcatttccttagacggcatggatccgctccgtacagaaactgaaaccgatgttaa

SEQ ID NO: 102379 - DNA, 353 bp, Arabidopsis thaliana columbia
cgttacttgggagtaaagaaacggcgtcaggaggtcaaatatgcggaaacatgacgtctggaggaacagaaagtatagtgttggctgtgaagtcatctcgtgactatatgaagtacaagaagggaatcacacggccagaaatgattatacctgagtcgggtcattcggcttatgataaggcggcccagtattttaaaatcaagttgtggcgagttccagttgacaaagacttccgagctgatgtgaaggcaacaaggcggcatattaacagaaacaccatcatgattgttggatcagcaccaggattccctcatggcatcattgatcctatcgaggagcttggtcaactggct

SEQ ID NO: 102380 - DNA, 374 bp, Arabidopsis thaliana columbia
gtctcccctcttctctccactcactcagctcttttgattcccctccaattttctccgacggtacggtcgaaaaatccaaccggagatcaaatggcactgccgtcgatctcatcaatcggcgcgacgttctcactcctaatctatttatctcttccttattcaatcacagctggtgaaaacaacctcctccaccaatctccaaccgctagatcacgacgtcccatggtgttcccattgttcctctctcaaccaaattcttcttcgagatccatatcaatcccacatcgaaaactccacaaatccgactcaaaatcacttcctcactctcgcatgagactctacgacgatcttcttattaatgggtattacactac

SEQ ID NO: 102381 - DNA, 255 bp, Arabidopsis thaliana columbia
agaagacgctcaaagagcaatcaacaaattgaatggttatggttatgataacctcatcctcagggttgaatgggcaactccaagaccaacctagaaagaaatgtctgatgttgagaccttaaaactcttctcattctcgtctttcttgttatggatttttgtttatcgaccagtttgtttgttggtttggtttctgtatgaatagatgagaatttgttcaatttctctttaatacataaggcatgctttttaaaa

SEQ ID NO: 102382 - DNA, 354 bp, Arabidopsis thaliana columbia
gtttccgagaatttgcaagagttccaagactggaatgagtattattcctgtgatgcaaaatatcgcaactggctcaaattccagttagagaatgctgaagtcactgaactgtcagaagaggaaaatcagaaagctgttgtagcagccaaagagactctggattcttctttgtcattgcttctcagacaagacaacccctggatgacatttctcgaagaccatgtattcgaatcagaagaatatttattccttgaattgcatgcaactgcgatgctctgtttgccttctggtgaatgtctgcgcccagatgccactgtttgtgctgcactaatgagtgcactttactcttctgtc

SEQ ID NO: 102383 - DNA, 313 bp, Arabidopsis thaliana columbia
caaaaaagctgctagaggaagaagacgattcacttctttcccgccactttcactatcttctccggtggtgagcaaagatgttgtgggtcgacaagtacaggccgaaatcactcgacaaggtcatagttcatgaagatatcgcccaaaaactcaagaaattggtttccgagcaagattgtccacatttgctcttttatgggccgtcaggttctggtaagaaaaccctaattatggctcttctcaagcagatatatggggccagtgcagagaaggtgaaagtggagaacagggcatggaaagttgatgctgggag

SEQ ID NO: 102384 - DNA, 359 bp, Arabidopsis thaliana columbia
  unsure (1)..(359): unsure at all n locations
cacgtgtacgcaggctgctgaaaagcttagaattacctccaaggagctggtcaagcttaatgtagctgatggaatcattcctgtaactgatcctacctctaatctatctgtttcctcttacacttcttttctcactttggatcactgagtaactctcacatgttgtacaggaaccgcttggaggggcccatgccgatccttcatggacgtcgcagcaaataaagattgctatcaatgaaaacatgaatgtaggcatagttgttcttctcaacgctggatgtggatctaaaagagttctaacttttttttgggaacttgtangaattcggaaaaatgagtggggaggagctcctgaaaca

SEQ ID NO: 102385 - DNA, 296 bp, Arabidopsis thaliana columbia
gaggttgctactgacgccggagaagagagatggcgagatcgtgctctatctggacacctgttttgatctcactttcaccagtgaccggagaatcacctaaaatttcacggtgccgggtgattttagccacaagtataggatctcctcagcctttacttgacgcacagatcaaggaacctcagaagcttcaagtccttgattccaaagatgtttccagaagaaacactatgctgtatctagctgctggatttcttggagggatcaactttctcaatggtgaagccgcagaagctcga

SEQ ID NO: 102386 - DNA, 363 bp, Arabidopsis thaliana columbia
cttcatcttctcctctttagcctttcgacaaaacacaacccacgagttaacttccatggccacgcagacaccaaccagcgtcgacagacatagacagtaaccgagctttgcgtacgaccttccttcccttaaaacctcaaacccttggaacacattcaccacgcccatcaccacacacgcgtacccgacaaaatgatggtaagacttccagtacctccggaacttattggtcgtctttggtctgaacagcaaagccagtgtttgcagcgccgctgctgtgaaagtagctatcccgaggctccgatgtaacccataggtcactccaggggaattatggccgagcacgattccaatggagaagcc

SEQ ID NO: 102387 - DNA, 320 bp, Arabidopsis thaliana columbia
gttaggtagtagggaaaccaaacttacttttgatgaatcattacttctgtaaatgaaaatgccagcttttgatcagatgtttcagacatttggtccatttgggaaagtacttctttctctcgaacctactaaatataaagataagacctcacatgtttttgattttctaaaatagggggaaaaagtacaagacttttcaagctatgtccttgattaagtctagtgatatcttcaataagaaatgttttgagaacaccattgggatctaaatttgatctctgatgatttactttaatgttccaattatatatgtttttgac

SEQ ID NO: 102388 - DNA, 317 bp, Arabidopsis thaliana columbia
cccacgcgtccgcttagggctggacaaatggcagacttggatactagaagaactgaaatcttgggaagatcggcgagcattatccaaagaaaagtgcgatcatatcttgcgcagaaaacttttatccaactgcgtatttctgctacacaaatccaagcagtttgtagaggttatcttgctagaagtatatacgaaggcatgcgcagggaagctgctgctttgaaaatccagagagacttgcgtaagtttctggccaggaaagcttacactgagctattttctgctactattttaattcaagcgggtatgcgtggtat

SEQ ID NO: 102389 - DNA, 378 bp, Arabidopsis thaliana columbia
ggaaaaaattggattaaggtgaaaatcgctttctctgaaaatcaaagacgaacgagtaagagagaagtagtagacgagaagacaacaacaaaaatttgagagagagagagagagatcttttgattcaagtcaaacactactcagaagttttctcatcggtatcgagagagatccatcggattctatcatcggatgttatatctgttcgtcggtggttatcggaggatatgctccgtggttggttcgggggtgttagtggccggtgaggcagatggtgatgatggtggcggttgatgatcgacaaaattagaaagcgtgttttcttatttgtttcgttttgagtttgtctcttaggtgttttggtagtagaagatgatg

SEQ ID NO: 102390 - DNA, 317 bp, Arabidopsis thaliana columbia
cgtgatccaagttattgtgtattgtcactgaatttttcagcttggtctggtgatcgatttgacaaacacaactcgttactattctacgacagacttgaagaaagaaggcattaagcatgtgaagattgcatgcaagggtcgtgatgcagtgccagataatgtgtctgtcaacgcatttgtcaatgaggttaatcagtttgtcctaaatctaaaacactcgaaaaagtatattctcgtccattgtacacatggacataatcggacagggttcatgatagttcattatctcatgcgatctgggccaatgaatgttacac

SEQ ID NO: 102391 - DNA, 432 bp, Arabidopsis thaliana columbia
cttcttcttgatccatcatctctctctctttctctcttctctctgttcctagtccatcgatttaacctctttcagattctccttcttctttgactttttttgacaccgtagtctctttccccttccatcgatttagggtttccgattttcaaaatctcctttttatttgtttcctctccttgtgcaattcccgtctcgaatccatcttgacctgggggtctgatccgatctccctctaatcatatcgtgaagcgagattatgtttttgtgctgcgcttctgctttgatcgcttaggattatcaatcgtgttatgatggtgggtactcaaaatttaggtggttcgttgccgccgctgaattctcctaaaagctatggaattacgaagccgctctctcttgctgggccttcttcggcggatattaagcgtaatg

SEQ ID NO: 102392 - DNA, 383 bp, Arabidopsis thaliana columbia
cccacgcgtccgcaactctattgattccacgcgatgacgacgttttcaacgagctttcttttccttttgttggttttctgcttgatcggttcactagctgccgatgatctccaacataaatccggtcgggacgtctgctccggtggttctgatcttagaacccccgatattcgtcttaaccggccgacagactctgtcgtcggaaactgcccgacggaggcgagtcctttagttatggctgacgacgagaagtacggtaacaaaatggttatcagtctcactcctcgcctttatgactatgtcctcaacaacgttcgtgagcatgagattttgaagcaacttcgagaagaaactgccattagtcaaattcaggtgtcacctga

SEQ ID NO: 102393 - DNA, 298 bp, Arabidopsis thaliana columbia
aaactctgtaagcacttcgcgatgtctctctcattatgattctcctgtcttgcaagtaaattggaagtccctctgttgtggaagataacaggcaagtgaggataaaggcgaagaaaccggttcacaatactttcgcttcattcatttgatttccaaagttcaactaaatcgaccccagtataataccggcagtggaagcttgtaaggctctggttgtgaacaattgcttggttctgaagatgtacttgcaagatcattgcccgagtagctgcacttcatcgaacactgagttgctgtg

SEQ ID NO: 102394 - DNA, 148 bp, Arabidopsis thaliana columbia
cacgatctgatacgactctacattttcatttctctcagacgctactccagaatcagattaacgtctgatgtcctcattcacgtcactttactctcgattcttagagattcaattctgtgtcgtctcaattctaactgggctttccgaa

SEQ ID NO: 102395 - DNA, 156 bp, Arabidopsis thaliana columbia
aggacgcttggacggactcatatgtttacaaacacgcatcggatgttatttcatctcaatggatatgatatctcttgcaccagtccgtaaccttcgctccagattacaatgatctgttcattcttctgacacgaacatcttcttcgactaattcgt

SEQ ID NO: 102396 - DNA, 111 bp, Arabidopsis thaliana columbia
ataaaaatggggttgacaatctatgctcccttattcgcttcttcaatgagacccgtcgcgacatcggcgcataagggaataccattcgatacagtcaatgtcgatcgcatg

SEQ ID NO: 102397 - DNA, 369 bp, Arabidopsis thaliana columbia
caccaatcacacttctcaaaaaagatcagagatttctagatccttcttcttctcctgcaaattcatctacctgaatcttccaactttataaatcgatcatgatctccgtcgtaatcatcgctgagttactagtagagtacacgacggctctcgcgaaactaaccgccgggattcttccatcgagacggcgaggcgatagtaacgttgtacggattggtggtttctctctgccttgtccttctccgtcgagtagtagaggttgcaaaggaggagaagaagaagaataagaagaagagaaagcatgatgaagaagaaacaacggagacaccagccaagaagaaggataagaaagagaagatcaagaagagt

SEQ ID NO: 102398 - DNA, 263 bp, Arabidopsis thaliana columbia
aatttcgaaccgtctgttcttagcaatatattttttctccataaataattctcagtttgattttcttcttccagctcttaagtatatttctttgttgttatttatcttttgatcctttaatcacatctttgtttatctttaatcaatacccacaatttatatgggttcttgaaaatctagaataaataaaggattcataacataaatatacagatagagaagctaatggtcttaaatatggagtctaccggagaagctgttag

SEQ ID NO: 102399 - DNA, 334 bp, Arabidopsis thaliana columbia
aaacgacacatgaccctgagatattgtctccagaataacatttttattagctgacaatgggtttgaagtgcaagacttatgttcctgtatggagacgtgggatctaccaaggacatgattccgaccatgcatcttcactggaacatgcatcatccgctacaggttgtgatcaaaacgtttacacctgatgacgtgaacgacattgctgttgagttaccgaggttgaccggaaggattgtgcgtgatgtacatgaaggtaacacgattattatgtacatacggaagaactacgtgcaacctcctactgatctcatgtcaccgaggattactcttc

SEQ ID NO: 102400 - DNA, 244 bp, Arabidopsis thaliana columbia
gcgtcttcatattgccgacatgttttttttttttttgctaatttctgtaggcagtttagtaatgagactgtagactcttaacattctgtttttgacaatattcactcaggtaattctgcaccatcggatggataaaagaagttgaatcacttcaccagggcaataggaatggaccagatttgcttgaaaacaaagggctgtaaagtactggaatttcagatgctgcatcacaacagatttctga

SEQ ID NO: 102401 - DNA, 343 bp, Arabidopsis thaliana columbia
ggaaaaattacatctccgcccaccgccgtcggaataatccatgttatctgatcggcggggtcttccattgtcgcgtcggaaattattctctgtaattactgtcacgtttcgtctctcattgagggaatatttgcagatcgatctatcgtcgatttagatctggcgttcctagggttcatcgacgctggagattcatggtctctggtgattgcattttcgaatttttgctgaaattggggaaaattttaggtgctgtgtatatggatacaggtgggatgagatctggtgaatctccagtggtattgattaagaagagaagttcatctggttgcttaattgtgaa

SEQ ID NO: 102402 - DNA, 424 bp, Arabidopsis thaliana columbia
cccacgcgtccgcggcgacgaagctctctctcgactcctacttctgtggatcacatcttttgttttctggagaaaaaaggctcgtcgaagcaagtaagtgaacagtcatgaactcggcaagcgtttccggtgaatcctctctctccgatatgattcagacagttcatttttcctctggaaaccctagaatcggcgagactcgcggtgtcatgcatctaatttccgacaatgctgtttcgtcatcttcttcttcctcctcctcgaatctccctattggaaggaaccctctcgtttgcgttcttggggtgcccaaccacatgacatatgcagatttttgccagttctgcggctccttcattcagcacatactggatatgcgaaccgtcaggaatgatgacattgaaaatagatacagcattttgat

SEQ ID NO: 102403 - DNA, 331 bp, Arabidopsis thaliana columbia
cggacgcgtgggttctactgcaacagtggggagcaattcaagttctggccaagttacaggattcatgccagatgctaaaggaatggatccagtccctgtattccagtctgaagttgaaaatttggcttatcctgataaacatgaagaaagtattgcctttggtatggtaaatttatcaaatgagagtagtagacatgagagtcatgagagttctttcagtgatcagcttggtgatatggatcaagattatactgttgaatgcgagtctagcgcgaatgatgaggtcagtcaccaggtttttgatgttgaaaacagttcgactcatggtagt

SEQ ID NO: 102404 - DNA, 362 bp, Arabidopsis thaliana columbia
  unsure (1)..(362): unsure at all n locations
cagataagaactgggtggagttgaagggtaaatttgtaatccatggttcgccatcgagagtaatactataccttgaaggtccacctccacgagctgacattcttctcaacagtttagttgttcaacatgctaaaaggaatcgtccatcgcctcctcctttctacgagaatcctggtttcggagtcaatatagtcgaaaacagtgaagttttagatgggggaactaaaccatggttcactctagggaactgcaagttgagtgttggacaaggcgctccgcgcactctgcctccaatggcgagagacacgctaggtcctcacanacctctaggtggaaactacatcgttgtgactaacagaacg

SEQ ID NO: 102405 - DNA, 323 bp, Arabidopsis thaliana columbia
gaagattgagctcgtgttcataccttcgccgggaatcggccatctccgggcaaccgtgaagcgagcaaagcaactcatcggcagcgaataacattttttcaatcaccgtaatcatcatcccttctagaaacgacgccggtgatgcaaccgcctatatcgcatccctcgttgcagagtctcaagatcgcctccgctacgagcccatctccgtcgaaatgcaatcaccaaccgcaaatcttgagccgtctcaagtctacatcgagaaacaaattccacaagtgagagacatcgtctccagaatcatcaatccaacaagaaaactc

SEQ ID NO: 102406 - DNA, 291 bp, Arabidopsis thaliana columbia
caaaagttttctgttttaacttttcctctgtttttgatttttctctctgaatctctccttcatttccccgggaaatagtaccagaaaggttatcatcgatcaaactcttcttggtggattcttcagagatgggtttagtcaacgggagagcttcgttgacctttctcctcgcggcgttgaccatcatcgctatggtcgtcgaggctaggtttgtggtggagaaagaaagcataagcgtgctgaatccagaggagatgaggtcgaagcacgacggctcgatagccaatttcg

SEQ ID NO: 102407 - DNA, 397 bp, Arabidopsis thaliana columbia
aatcttcttcttctctctctctccctcttcctctgtcacacagatattgacaaaaacaaaaagaatgagtcaatcaaatcgtgtcagagacgaagttacattacctttactccaaaaaacctctcatctgaaaaatcactcctctgttctctctgttttcctaaatgaagcaatctcaatctgcaaaatctcttacccattggtcctcactggtctcttcctctacgttcgctccttcgtctctctgtctttcctcggtggtctcggtgacgccactctcgccggtggctccctcgccgccgcatttgcaaacatcaccggatactctcttttctccggtttaaccatgggcgttgagtctatctgttcacaagcctttggagccagacgctataac

SEQ ID NO: 102408 - DNA, 368 bp, Arabidopsis thaliana columbia
agcaccaacacttggtgctcctttgcttagaatgttcttccacgactgcttcgttcggggatgtgacggatcagttttgttagataaaccaaacaatcaaggtgagaagagtgcagttcctaacctaagtcttcgagggtttggcatcatagacgattccaaggcggctctagaaaaagtgtgtccgggaattgtttcttgctctgatatcttggcacttgtcgctagagacgcaatggttgcacttgaaggaccatcatgggaagttgaaaggtccaatggctactccaattgggaaaggtcaccgttctttgaacctgactcttaggaaagagcttaatctatatgccaatgttagaccttgttac

SEQ ID NO: 102409 - DNA, 368 bp, Arabidopsis thaliana columbia
ttcttctccggctaaatcatgtttcgtcgtttaactctccggcaagcaaccgccgtcgccgcggaatcgaagattgcttgtcagcatactgttcatggattcgaacagcgaagaggattacacagtaggaatgagaaggcaatggagtatgtagccaaaggatggagcgcgattaaagaagtagagagagttatcgattactgtgaactcaatgatcgtcgtcttattcctctcctcaggggagctaaagagaactttgaacttgctctggaagctgataatttgaacactcatgctatgtattggctttccaagttgcacctgaagtaccatgttcctggagcttgtaaagctgtgggagctgcttt

SEQ ID NO: 102410 - DNA, 360 bp, Arabidopsis thaliana columbia
atcacccaattttttacgagaatcagagaaaagtcgaaacctttttccaataaaaagaaaaatcgaaactttccttggggtttatcactttcctccttcgattccattttctgatcctttttctcgctgttgctggagatggcggaagagaggagcttgaacggcgaagcgactggtcaggatgatgagagtttcttcgattctgatcagcaaggcgacgacggcaagtccacggaactcaatcagaagatcggagacctcgagtctcagaatcaaggaactggccagagataacgatgctatcaatcgtaaaattgagagcttgacggcggagattgaggagttgagaggagccgaatc

SEQ ID NO: 102411 - DNA, 358 bp, Arabidopsis thaliana columbia
gatttcatattactggtcatgcatataacttaaataccttgacagaggttcaaaacaataccctcaatgaccttgcagacttgggattagtcaagcttcaacagggaaggaaagacagttggtttattcctactaaactggctacaaatttatcagtcagtctggcagattcatcagcgcgaaaagagggatttgtcgtgatggaaacaaacttcacaatgtatgcgtactccacatctaagttacagtgtgaaattttacgactatttgcgaggatagagtaccaacttccaaaccttattgcttgtgccattacaaaggaaagtttgtacaatgcatttgacaatggcatcacatc

SEQ ID NO: 102412 - DNA, 386 bp, Arabidopsis thaliana columbia
cacttctccaattcgtcaactatctcctcctggctcctacggtcacggacttttcgttccagccaaggatatggatactaattccttgatgctcattgataacaatggctcttttgagatcgatgaccaatcccatgtccatgtcgatgcctcacatacccttgaacctgtcaccctaaccaccaagcgcaggaggaagaagtctgacgtctggaaccacttcactgttgaaactgttagccctggatctgccaaagcttgctgcaaccactggccgcaaatccttcgcctacattaatggccaaaagttggcaggaactagccatcttaaacgtcacattcaactgggtatttgtcccatgaaccgagacgacagcagcaccctc

SEQ ID NO: 102413 - DNA, 379 bp, Arabidopsis thaliana columbia
caggttccaaggaaaatggttctgaggtttttgttaagacggagaagaaagatgagacagagcatcatcatcatcatagctatgctcctcctcccaacagattaactggtaagaaaagccattggcgcgacgaagatgaagatttcgttgaagaaagaagtaacaagcaatcagctgtttatgttgaggaaagcgagctttctgaaatgtttgataagatcttggtatgtggccctgggaaacctgtatgcattcttaaccagaactttcctacagaatccgctaaagtcgtgaccgcacagtcaaatggagcaaagattcgtgggaagaaatcaacttctactagtcatagtaacgattctaagaaagaaactgctga

SEQ ID NO: 102414 - DNA, 344 bp, Arabidopsis thaliana columbia
cttgttgctcaacatcgaaatctcgacaacatcactcaaatcttcagcttcaactacaaatctcttactccttacgctggactaaacgatacggcgatgttatggggagtgaagttctacaacgccagcgcagtgagtgactcgtcatcatgggatggcgtcatcaaggatttggatccgtaaagagcaatcatccttcacatttcagaaaggttgggcttttccacgatcgatttacgttaatggggacaattgcttcatgcctcctccagactcgtacccttttcttcccaacggtggttcccggtcacaattctcattcgtcgccgccgtgctcctccctc

SEQ ID NO: 102415 - DNA, 358 bp, Arabidopsis thaliana columbia
atcgtaggcagataacaacatgggaagcggtgggaacgaacaaagaatcaccgaaaaatatcaaggcaaagagtttcaaatttcgtgaattagcaaccgctacaaatagtttcaggcaagagttcttgatcggagaaggagggtttgggagggtttacaaaggaaagatggagaagacaggacaggtaaaaataaagtggtagctgtgaagcaacttgaccgtaatggattacaagggaatagagagtttctggtagagatcttcaggttaagtcttcttcatcatcccaaccttgccaatctcattggatattgccttgatggagaccagagacttcttgttcacgagttcatgcct

SEQ ID NO: 102416 - DNA, 108 bp, Arabidopsis thaliana columbia
cacacacacacaagtattagaagaacttaaaccctcttatgttctcttcctaagcttgagtttaattcaagcaagaaacagatttcgagagaagagtaagcacagaga

SEQ ID NO: 102417 - DNA, 381 bp, Arabidopsis thaliana columbia
cctatctctttttgcccctttcctctctctgttcacaagtcatcttcttccttcctctgaatcttgttccgttttgctctctctacttgagtcacccactctgtttctcgattagtacgttgaaaactcactttggttttgtgttgaatcctctttagtctgtttttcgatgtcgagtctcttacccattggtcctcactggtctcttcctctacgttcgctccttcgtctctctgtctttcctcggtggtctcggtgaggccactctcgccggtggctccctcgccgccgcatttgcaaacatcaccggatactctcttttctccggtttaaccatgggcgttgagtctatctgttcacaagcctttggagccagacgct

SEQ ID NO: 102418 - DNA, 264 bp, Arabidopsis thaliana columbia
tttttgtttttctgggtttttattggctttcttctgcaaaaaccataactttattttttcagggtttttcttcgtacagaagcttcgcaaaacccaattttttgtagaagctcaattagtagcaaacaatgaataacacactcttaaactcactttcacaaagtctctgagtcttgtgacaatttgttgaatgcagaacctagggtgttttagataaaaaagatggggaagcaaggtccgtgctatcactgtggagttacaagt

SEQ ID NO: 102419 - DNA, 216 bp, Arabidopsis thaliana columbia
aagacgcgtgggcgaacgggagagagatcttgggacgttgatttcgaaacgtccattagcagcaccagcggatgtaccggttcatattagttggcgatgatgatgaacggtgaagatttatcggaagataaacgtttttgtgaaagcccgtttcagtttgttctccaaacgatgccatcaaacggaggtttcagaacgccgaatttcgcatcgcct

SEQ ID NO: 102420 - DNA, 394 bp, Arabidopsis thaliana columbia
agcttttgttggtgggattttttgaggatggtgattgctgcagctgtcatcgtgcctttgggccttctcttcttcatatctggtctcgctgtcaatctctttcaggcagtttgctatgtactcattcgaccactgtctaagaacacatacagaaaaattaaccgtcgtcttcagcgattccgatctcaagcaacactcagttaaaaacttcgtcgtcgtcgtcttgccacagccgtttctgcaaagagaatcccggaacaatcgccggagtagtaaccgccggagctttcttcttagcactattcgccggagctttattctgggtttactccaaaaagttcaaacgtgtcgagagatctgattcattcgcatctgagatcatcaaagctccgaa

SEQ ID NO: 102421 - DNA, 208 bp, Arabidopsis thaliana columbia
gctgcttgtgatgatggttgtgtgagactgtaccgtatctctaatttagaaaagttaacttactatagatcattgcctagggtcagtggacgtgctttaagtgtaacatggagtccagatgcaaaaaggatcttttcggggagcagtgatgggctgataagatgctgggacgctacctcgtgtcatgaggtatacagaattacagctg

SEQ ID NO: 102422 - DNA, 309 bp, Arabidopsis thaliana columbia
ctcttggagctactatacactcttgagtcttgacaagtgtgtttttgtgtattgtctctctatcatctcccaaagtagaaaagctagaaaacaataaaaaggaaaaaaagatctcttccacttatatatctccccttctataatcttctataagcatcaaataaacttcacttctctctctctctttgcctcaccatttcggctcacaagtgtttgtaagatttgatctgaaaaagatgaatctataccttttatagtatcaatctcatcatcacaaccagctaagtttctctctctttctcacttttt

SEQ ID NO: 102423 - DNA, 191 bp, Arabidopsis thaliana columbia
aaagaaagagactgaatcaatcaacggaccttgaagtcaataagctcagcagttttcttgaagaagtaggcagatgtgttgactacaggagtagtgatagcatccgtcactataccacggcctaatctttcacctgtgtaaaacctaatttatcaatctccaacaacaagatcagatatgaaatgactgaa

SEQ ID NO: 102424 - DNA, 259 bp, Arabidopsis thaliana columbia
aaatccaagacgccaactcgctaagctcttcgatgtgtcgcttaagttaacggttcctgatgaacctaatgttgagcccttgatcgagcctggcaaatttggagattaccaatgtgacaatgcaatgggactatggtctctaattaaaggaaagggtacgcagttccgtggtcctcccgctgttggacaggctcttattcagagtctccctacttctgagatggtggaatcatgctctatagctggtcctggatttgtt

SEQ ID NO: 102425 - DNA, 168 bp, Arabidopsis thaliana columbia
aatctgtggttttgagatctaaagatcttcaatttcatcaccatttcctcgatcttcggttgattgttgttgcttaagaggagattcatgaatttataggtgtacttatttgggttcgtctctgttaggttcgtgagggaggggttgatctagttgttgttgttagga

SEQ ID NO: 102426 - DNA, 383 bp, Arabidopsis thaliana columbia
cggacgcgtgggctaatacgaagaagcatgtctcagcgaagggtaaagaagcttcgttagaagttcactcttctagtccaggcaaatcaaactcgtcatcttctggttccgaggcgaagaaaccaattactgaaacgccggcgacttctgacgtgaaggaggaatcgccggcgtcggtttcgcctatcatggcttcatctttgggtttgaatagaatcaagacgaggtctggcccgttgccgcaggaaagttttttcagttttgagaatgattatgcaattccggtcttaccgtgttacaagttgtcgaagttggatactggcaagaaggaagctggaagcagcaaggtagatattggaccgctaagaagcagcaatcccgcg

SEQ ID NO: 102427 - DNA, 210 bp, Arabidopsis thaliana columbia
atttcttttgcctcagtaagctcctctttcactatctccgtcgttgctccgcttcctactggttcaaagtttgaaagacacaagaagaatgagggttgatttttctgagccagagtacaggaactgttaccattgtcgcgattcaggcatacttaatactcaagaatctgaaccgaacaatgtgattggctcatccatcacttcagttcc

SEQ ID NO: 102428 - DNA, 402 bp, Arabidopsis thaliana columbia
cggacgcgtggggacccacgcgtccgcccacgcgtccgcggacgcgtgggctacagtaaacaaaaaatggcaatgaatggtttgtccaagatggctgtagccgccgcaactgctcttctcctagttctgaccattgtcccgggcgcagtagctgtgacttacactattgaatggaccactggtgtggactactcaggttgggctaccggaaagactttcagggttggtgacattctagagttcaagtatggttcttcccacacggtggatgtggttgacaaagccggatatgatggctgcgacgcctcctcctcgactgagaaccattccgatggagacaccaaaatcgatcttaagactgtaggaataaactatttcatctgttctacacctggtcactgc

SEQ ID NO: 102429 - DNA, 333 bp, Arabidopsis thaliana columbia
aaaatcttctctctaatctctccactctttcataaatattttcctaattcttctaccttggtgtctgattctagcaccaaaccattttctcctaccaaaatctgggtttcgatcaattttaggtcttttgattcctacttgtctaatcgtaatccaatttctgggtcaactttcgatcaaaatcaactgggcttgaatcaattttaggtttttcgattcctacttgtctaatcagttgaatcaaagttcgtctcttttaagcttgcaatttcaaagatgacagttgttggagatgttgctccaattcgaaggaggaacagttctacttgctct

SEQ ID NO: 102430 - DNA, 200 bp, Arabidopsis thaliana columbia
atttctctttctttttcctctttctccattgcttgttgattgatgatcttgaagcaaggattatgaaggtccttcacagatttctgttggaggatatgcccaaagaaaccttttccgactccccccggaaaaataattgcatccaagagttgaaaactctaggatactgttcatcctaatgtcctgacgaatgtccttcc

SEQ ID NO: 102431 - DNA, 225 bp, Arabidopsis thaliana columbia
acttcatgttttgcttacagtaaatgtagccaagttcaatggtttcgattagaaaatgtgacggttttagttaggagctctgaatttgggtttagagtttagtttcaaatggaatttgggtttgtaagataaaggagcttgagtttacactctctgcctttatgtgggattaagtcttctagtttcagagggaccttcaaagtcaaatctcaaaggacaggagat

SEQ ID NO: 102432 - DNA, 394 bp, Arabidopsis thaliana columbia
gttggaagtcaatgatttctcatcattcaataacaacagacgtggtattgcagaggctgttagccactcgacttctaagtttagttcatcaatctcaattctggattcaaatcatctagcttctcgttcgttccagaaccgggaaacttcttgtgggatggattcaaaaactggatcctcctttgaaataggtagtgatagattgcatcttccaaatggattttctgagaaagctatgtccaatatggagcattcattatttgctaatgaaggcagaagcaacattcagaatacagaggatgatatcatttcaaacattttagactttgatccctgggatgaatcgttgacttcgcaacacaattttgcaaaattacttggtcagagtgatcat

SEQ ID NO: 102433 - DNA, 369 bp, Arabidopsis thaliana columbia
gacgaaacgcgggaaaatgaatcaagtttcgtccttaaagctatcaattttctatgggaatctgatcaaataggttatcgtcatgtttggcctgaatttgagtttaattggcaaattgtattgggaacacttgttggattctttggagctgcgtttggtagtgtaggtggtgttggtggtggtgggattttcgtacctatgcttagtttgattattgggtttgatcctaaatcagctacagctatttcaaaatgtatgattatgggtgcttctgtgtccactgtgtattacaatcttagattgaggcatccaacacttgacatgcctatcattgattatgatctcgctttactgatccagcctatgctt

SEQ ID NO: 102434 - DNA, 372 bp, Arabidopsis thaliana columbia
catgtgagcgaaaatggtgaaagcaactaaggtaattaagaagatcgcagatctcaaaccggacggtgtcacagtcgtgactcgtgaagtctgggcggagaatctcgaatcagaatttgaactaatcagcgaattcatcgacgattatcgatttatctcaatggacacacaatttcacggggaaaattacaaatccgatccctggtttaaggattcactctatcaatatcggcaacactgcaatcctgaatctgcttccactccttcacggaaacgttggattgatctttaccaaaggtgacctcaacgaagtgagcgatgaggttgctaagtacaaggttggtgcccctgctcatgtgggtttggtggctc

SEQ ID NO: 102435 - DNA, 170 bp, Arabidopsis thaliana columbia
aatttcttttgtttttgttaaccggatagttttccggtgagtcaccttcccgtttacttcgggctttcgtccgacatcttctagctacgttagtggagatggttggcgttttgtatggcatcgttggctaacttatcgacgttggccagcttccgtaaggcagcgttggg

SEQ ID NO: 102436 - DNA, 315 bp, Arabidopsis thaliana columbia
gtctccctccatcatgctatggatcgtcagccggagagggagaatgatgaactaccatctccggcgataatttccgaccgagttctggtaaatggtgttgtcaccccgttaacgttgaccgccgagggaaagctacgatcgacggaatctggacggcggaaatcgacgttggcaaaagaaatcctgagtttcgtcgtggaaggtaacaaggttagagtaaagaccttggttgagaaaggaggaggaatttgctgtaaaggaagtgctggagattatgcaaggaacgatttcgttttcgagcctctctctgatgaa

SEQ ID NO: 102437 - DNA, 402 bp, Arabidopsis thaliana columbia
aatatttcgtaaaaaaaaattctccgtttagacattattgttcgttggtcactttcatctctcttatccctttgcttttccattgattcagctcaaaaaaaaacaaaaaagtctcatcgttttctctggatctgaccgaaagatcattcctttctaagatactaaagtaggtttgagtgatcagaatcaattagagtgtgtataagaggaagagaaagagaaaacagcatgtgtattgccgtataccgtaaagttttgagcttgaatctgtattgccgtgtgatactgtagattgtttcacctttgaagcaacaccttcaagagtcaaatccttttctttcttattcatcttcccttctttttcggtatattataaacacttttgaaaatgggatcacaaca

SEQ ID NO: 102438 - DNA, 387 bp, Arabidopsis thaliana columbia
gataagccggcgagttcatggaacaagttttattactattccaaaactctcaggtttctctattgtatctcccaaacaagttgaggtagagtatgcagatggaaccaagttcaatttttcatcagagtttctgagaattcatagtccagctgctgatggaaaagtcagatcaatcggtggtgaaaaggtgatatctggaaggcggtatgtaggaatcatgtctgcagaaccggttggaaactacggggtaaggtacttacaaatactgcaaggtcattatgagttagccatcatgaagattcagatacctaagtttattgttttgcttataacttaatgcggttgggggctaaatcttttttgaggattcaggttagtgtttgatga

SEQ ID NO: 102439 - DNA, 124 bp, Arabidopsis thaliana columbia
tctctcttgagttgaagaaatgaagcacaacaatgttatccccaatggtcacttcaaaaagcactggcagaattatgtcaagacatggttcaaccagcctgccaggaaaaccagaagaagaatt

SEQ ID NO: 102440 - DNA, 113 bp, Arabidopsis thaliana columbia
gtctttccaaagctttctggtgctcgtatagtacgcatagcagtccaccccaacgctatgaagatgggatatgggtctgctgcggttgaactcttgaccagatactttgaggg

SEQ ID NO: 102441 - DNA, 381 bp, Arabidopsis thaliana columbia
gtgaaacagcagcggttgttgagggcggagatgggcagcagcaacgacaagctggtgggtttgggcagacaattaccggaatcataagaatcgccgtcttctgttactttgcttctaagttcttttctcccaaacaaaaacctgcggatccttccaagcctactcatctcatgtccaatctatttcagaggggcgagcccatagtaatcttctggttaattgtgttgattacttgcttattcgttaatatatgcaatttcattcgtttctctcttcttccaaaacaaaaaaaaaaacgtttctttttggttcgaaacttcgaatcagagtttttcaacttctgggtggtttagggtttttccgttttgtgtttttgtttgt

SEQ ID NO: 102442 - DNA, 274 bp, Arabidopsis thaliana columbia
aacagacccagaaaccttaaagattcagacaaagggacgaccttttttccgatcttatcgatttttgaatgagattagaagagcctatcttctaagtttttctttgatatctttttctctttgatcgatggatgagtcggtcgctaatctacaatcaagccagttgcttggttcagttccggctgtgatcagcgacgacaagagaaggacatgtgtaccaatagcaagcgtcaatgaaagtccgtctgcaatcatgcagataatttcaccgaat

SEQ ID NO: 102443 - DNA, 380 bp, Arabidopsis thaliana columbia
ttccagtcgtctttgttcccttattgatagaataatcaaaaatccgagtcggagacgacgaagacccgagttccagctattaactatgcagataccatcaagagagcatagtttcattctatttctcttcatatctgcttttgtaattggtgctgcgtctgtacctgtacctgattctaattgctacgctctcgacaattcaagtcgtcttgtcgattttagcagctggatcggtcatccatttgaatatgatggcaaggaatttgatttggtggttagattttgcaaggatgtggaaacaagagggcaggcgggatatgttgattttggacgatttgacccgttaagctactttgtttctagttctgaaaatttcgatt

SEQ ID NO: 102444 - DNA, 383 bp, Arabidopsis thaliana columbia
cgctcgatccttctcactaaagcgatcgtaccgatcttaatatctttagcgagcgagagagagagagatagaaatcctgagaggaaagagaggatggagatcgaaaaaagcaataacggtggttcgaacccatctgcaggagaagaatttaaggatatgattaagggagtgactaagttcttgatgatggtgattttccttggaaccatcatgctttggatcatgatgccaacactaacctatcgaaccaagtggttgccacatctgcgtatcaagtttggaacatccacttattttggtgccacagggacgacgcttttcatgtatatgttcccaatgatggtcgtagcttgtttgggatgtgtctatcttcacttcaagaa

SEQ ID NO: 102445 - DNA, 319 bp, Arabidopsis thaliana columbia
gaacgatcgtcgaatcgtctatagcacttggctcagtaatacagtcagatagagacaggagatcaatactcaacagtcaagttgcaagggcgtttagtaattctactgctgttgacgaggcatcaatatctcacattccagtgctctcagggtttactgtccccaaattagttctacaagtggtgtctgttgattcagttttccggataacaagtccaagctttaatgagcttgtcattctcaaggatactgctttttctgtatacaataaagctatgagaatttcacgaggaatgcctaatgatgcatttttctcatc

SEQ ID NO: 102446 - DNA, 173 bp, Arabidopsis thaliana columbia
ctcagagacaagcaaccgcataactaaggttgctagccaagcacaacatggataatcggatagtcattgggaactctggagcaatcgtcttattggtggaactactttacgcaactgactcagctacacatgaaaacgctgttaccgcacttctcaacttatctatcagtgac

SEQ ID NO: 102447 - DNA, 379 bp, Arabidopsis thaliana columbia
cccgtgtctagggttttctttcgtagctgattgggggctgcaagagtttcgccgaggacgattgagaattttgattttcgaaaaatggattctgtggaggaagaaggtgttgttagggttgaagaagagaacggacgcggtggtctccgtaggcatcggagggtttctacgaagctggcgaattacgtagatcctccgactgacgacgaagaagatggaggacccaagcgaaagggcaaaaggggtggaaatagggctccgaaaaagacaccgaagaaagacgaggagatgcaaaagaacgaaattgatgaagcaaaccgagtcactggtctggtgaaggaaaaaagagccgcgactaagattctgaatcgcaaagact

SEQ ID NO: 102448 - DNA, 321 bp, Arabidopsis thaliana columbia
agctttctttggagccggtagttgttaactccaaagctaaagtacctctggtggttaaagatatgattcagtctgcttctgatggacttaatagtgggaattctccggtcaggtcaagctaatgtacgggaggatcttatttcatgcagggtccatctggcaacaaatttgtgggtgtgtttaagctaatacatgaggaatcactggctgagaacaatcctcacggtttaccactttcgccagacggtgaaggtcttgataaaggaacaaaggttggagaaggtgcattaagggaagtcgctgcatacattttggatcatc

SEQ ID NO: 102449 - DNA, 418 bp, Arabidopsis thaliana columbia
gtaaaaagaagaatcgccattgagattgtcccaaaacctccaaaggaaacacacgtttgtctttgctctgaggtatcttcgacgggacgttgaagcgagcaagatacgacacgaaatcgatctcccccttgcgttttccatctccgtcgtctgctgaaaccatttgatcgatctctcagataaggttctcaggatttaggttgcttctatgagaaggacacgttgcagttggtgcttcatgtctaggtaatgaaggctttatgtgatagatttgttcctcaacaatgttcttcatcaagcaagagtgatacgcatgataaatcccctttagtttcagattctggacctagtgataataagtccaagtttaccttatggtcaaacgtgtttacgtcttcttcctcagtttctcaaccgt

SEQ ID NO: 102450 - DNA, 250 bp, Arabidopsis thaliana columbia
ataaattcagcgtctgagagacgagagactacatcaatctgcataaaattgcagacgacgaaagacggagactgataagaagcgatgcatctgtacaatgaatgggtaccgccgcctgtatcggtcgagacgatcaatgagaaagagtccttcgcgcgtgtcgtgagatgcgtcaacgagttgcaccgacccgatgatccagagtctgtttacgccactcttaaatggatctccgttatcgaactctttg

SEQ ID NO: 102451 - DNA, 265 bp, Arabidopsis thaliana columbia
aaagactgtccgtgcttgccaaacgagctgtacaagctgcacaagctgctgttttgcaccataagaaaccaatttcaagtgtacaggctggtataacaggtggatcaacactgagctcacaggctgtgcagaagcaagaagtatcaactgcaaccactaaaagttacatcttcaaagcaggtgatccagtaacgtttttaagcccttcaacttcatctctggcttctctccgagcaccacctaggggaccggcaacacgttttca

SEQ ID NO: 102452 - DNA, 168 bp, Arabidopsis thaliana columbia
aaaagaagcttgctatcttcacagcacttgccttttcccagaagctctcaggactatctccggaaacggtcttccagccattgctcaaggataatcttgttgccaacgggatagtgctctccttcgtaacacacttcttctaggagtatctggtttacaacagtcttg

SEQ ID NO: 102453 - DNA, 419 bp, Arabidopsis thaliana columbia
tctcaagttagttcaattcagaatctttgagtttgaacttttttttgttgggagaaagagagaaatgtcaatagagaaaccattcttcggtgatgacagcaacagaggagtaagtatcaatggtggtcgttatgtgcagtataatgtctatggaaatctctttgaagtttctaaaaagtatgttcctcctcttcgtcctatcggcagaggcgcttctggcatcgtctgtgctgcatggaattcggagacgggtgaggaagtagcgatcaagaagattggtaatgcatttggcaacattatcgacgctaagagaactttgagagagattaagcttcttaagcatatggatcatgacaatgtcattgccattatagacataataagaccacctcagccagacaacttcaatgatgttcaca

SEQ ID NO: 102454 - DNA, 403 bp, Arabidopsis thaliana columbia
atctttctaacacacaaactcacatagaattcaagaaagagagaacgagggagagatgggtgaggatatgcgaggagtgaaagtagtctcaaaatggccaccgatgatagttatggtgacatcacaagtagcgatgggttcggtgaatgcacttgtgaagaaagctcttgatgttggtgtgaaccatatgatcattggaaaataataccgaaaataacgtttaggctaatggtcgatcatttcatcagtggtttgctcggggcgagtttgatgcaatttttctatttgcttggtctgtcctacacgtcagcaactgttgcgtgtgctttggtaagcttgatgcctgcaatcacctttgctttcgctcttattttgagaactgagaagataacagatctaaaga

SEQ ID NO: 102455 - DNA, 379 bp, Arabidopsis thaliana columbia
accacgcgtccgcccacgcgtccgtgtcacttacattctctaaggctgtatttcttggaaacggtctggtggctatcctttcgggattgtttggcaatcttcttgttgacactttttcctttggtcctgttgctccctttgacgccgctgcgtgctttcttgcaattggaatggcgatcatattgggaacatggtctgagaattttggagatccatctgacagcaaagacttgctgactcagttcaaagttgctgccatagcaattgcttcagatgaaaagattgcattgctgggcgctattcagtctctattcgaagcctcgatgtacacctttgttttcctctggacaccagctcttagcccaaacgatgaagaaat

SEQ ID NO: 102456 - DNA, 417 bp, Arabidopsis thaliana columbia
  unsure (1)..(417): unsure at all n locations
gtttacctctgtctggagtctggccattgggattaaactaacttctcattctcattccaccttcttcttctttgttcttgtgtgctactaaaaatcaagaaagcacaaggagacaaataaacctatccatttcattaccaaacaagccgtacattctctagttatggcttcttcttcttcttcttcttcaactacttcaaccatcacatccaaatttattgggcttatgcttcttctctctcttcaactagacttattactcggatcagctattcatcttaaaaaccaaacttcattcagacccaacagggagattcagaagcttagaagagtggaagcatatctcagcanaatcaacagaccttccatcaaaacaatccacagcccagacggagatgtaatagaatgtgtaccgtc

SEQ ID NO: 102457 - DNA, 393 bp, Arabidopsis thaliana columbia
ttattctctcattctttcttcttcattattcatttctctcgttattcgtttcgtattttgtttgtgtttatgattttacctccttagttgctgtgagatcaagaagtggtgaaagaaaagttactaaatctggatgttatttgattgtcgtcgttggtcttgagctatgaggagcgttaataatagtagtgtcgacaccgtgaacgccgccgcttccgccatcgtctccgctgagtctagaacacaaccgtcgtcggttcagaaaaaaaggggaagctggtggagcttgtactggtgttttggatccaagaagaacaataaaaggataggccacgcggtgcttgtacccgaaccagctgcatcaggagctgcggtggctccagtccaaaactc

SEQ ID NO: 102458 - DNA, 349 bp, Arabidopsis thaliana columbia
aaagaatgggagcaacattgctaaagctatcacatccattgtatccaacttatttcacgtagctgttaagcataatggtcatatacaagccaatggtcatgtacaagccaatggtcatgtacaagccaaagtggatactgctactcatgagaagaaagagaaaccttggcgcaaggaatagattgacatgctgagaaaaggaacaaccaagttcccaataggaacatctcagagatgggaagtcatatcatagtacattggtacaggaagatctgtggaagaaattctcaaggctactaaaacagtacttctccagaaacccgactcagctaaagcttttgactctttt

SEQ ID NO: 102459 - DNA, 325 bp, Arabidopsis thaliana columbia
aggcaatcttctgatgcttcagtccaatcaaacacacaatggccggaacagtctgaggagctattgggactgattgtgaattcacttaagacccttgatgcggctgttccacaaggttgtccagagcctagacgacgaccacactctgctcaaaagattgctcttgttttagacagagcacccaaacatttgcaaccagatttagttagtctggttcccaaactggttgagcattcagagcacccactggcagctttagcacttatagaaccgcttcaaaagcctgaagctgaaccagcgttgcctgaaccagtatacaatgctc

SEQ ID NO: 102460 - DNA, 360 bp, Arabidopsis thaliana columbia
attctccactctctgcttatgttaacgtagagagagacggcgacgtagaaggagtaggaggaggaggcttcgtcgacaatgcgagaatggctcagtatagacaatcaggaacagagaggtttttgggaggtcgaagcggttacaatccttatgtcaacggtggagcttcgtcagatcacgtagcgatcgggatccgtaacggcggtggtagtaatttcggagttgtaactcagcacgggaaagctagtcgatggcggcgatctactcgattagataggaatcgtcgttgtggtgttggctctttggtgtttgttctttgtgttgtgctcgttgtttgtgtctcagcttactattatttct

SEQ ID NO: 102461 - DNA, 127 bp, Arabidopsis thaliana columbia
aagataaacataaaatacacttaaccatttatttttctctcatgaagaacaatacgcaacctcaatcatctttcaagaaactttgccgggaactatcaccaaggagggaagattcagccggagagat

SEQ ID NO: 102462 - DNA, 321 bp, Arabidopsis thaliana columbia
cacaaaccaaaaacatatagacagaaagccaacccaaaagactttaccatggaatcacacaacgtgtgcaacagcatgaacctatacatggagatggatcaagaaaaggcgttcgactactccaaaagagctcaatggcgaagagccgccgtgcttggtgccaacgacggtcttgtctcgacggcttcacttatgatgggtgtcggtgcggtaaagcaagacgtcaaagtcatgatcttaactggtttcgccggtttggtcgccggagcttgtagcatcgccatcggagagtttgtctccgtttactctcagtacgacatc

SEQ ID NO: 102463 - DNA, 386 bp, Arabidopsis thaliana columbia
atctgtaaaccttttcttcttcttcttcttcaatgcctccctaaaaccctagactcagaattctcaaaggcgacacctttaacctcctccactctgtttctttctccaacaaaaaatgtcaaattcccatttgggtactctctgtttcatcatctctttactgggtttggccaatttctcactttctcaaaccggtctcgatgattcgactatgcaatctctcaaatcaagtctgaatcttacatcagacgtcgattggtctaaccctaacccttgtaaatggcaatctgttcaatgcgatggaagtaatcgtgttactaagattcagcttaaacaaaaagggattcgtggaactcttcctactaatcttcagagtctctctgaat

SEQ ID NO: 102464 - DNA, 386 bp, Arabidopsis thaliana columbia
ttcaacgatagcgttgtgctctggagaagtgtttgatcgcagaaaagcttcgttctttgtagtctacaggcgtggaaggaatggcaaaaagctcgttctctcctcctactacaagtcctgtcgctcacacaacaaggcgagatggccttatctgcaatcggtttcgaaggttacgagaaacggctcgaggtgactttctttgagccaagcatctttcaagactccaagggactgggactccgtgctctgaccaagtcccagcttgatgaaattcttacacctgctgcatgcacgatcgtttcatctctctccaacgatcaattggactcttacgtactctctgagtccagcttctttgtctacccctacaaagtcatcatcaagac

SEQ ID NO: 102465 - DNA, 376 bp, Arabidopsis thaliana columbia
caaaattccttcaagctggggagattagcttcacttactacggccatgggggtttctcttcgtcacttgtctccttcctctttctgggtttcgcgtcgtcctcgtgtttcttcttcaattctttcttttcttgtccctcgccgtcgaatcctttgcaccaggaaagtagcaatcataaagggaaatgcgggatattcgactgctactgattgtggtggttctcatgggtttcatcattcaggtcatcaaaggtcatcctctgttgagtttagtggagagtggaaacttaatttgggatctaagacggcgagaatggttccgccaactgtgaaacaagctggagctgtaagtgcttggagggaggaagtcaataata

SEQ ID NO: 102466 - DNA, 382 bp, Arabidopsis thaliana columbia
ctttttgactttccaactactccttcttctacttcgtgtttcatcggaatctccatggatcgtcgccggagatgtgtctcgaatcccgatcaatttcctcgaattagcaaagagcccggaggttttcgattcaatggtgagaatcagaaggaaaatccacgagaatcctgagctgggatacgaggaattcgaaactagtaagttcattaggtcggagcttgaccttatcggagttaagtataggtttccggtagctatcaccggtattatcggatatatcggtaccggagaaccaccattcgtcgctctaagagcagatatggatgctttgcctattcaggtctagtaccaattcacagaactctcatcgattagttacatt

SEQ ID NO: 102467 - DNA, 383 bp, Arabidopsis thaliana columbia
cccacgcgtccgcttaagtagaaagagtgaaacatggctaatcacaaaaatctcttctttctatgtttcttaataggtttagggttatgttctgctagacgagcactactctcctcctctgaatccgaggctgaagtcgctgcctatggcgtgaatagtggtttaagtgctggtcttggtgttggtaggtggtggccctggaggaggctacggaggtggaagcggtgaaggtggtggagctggatacggaggcggagaagctggtgggcatggcggaggtggaggaggcggagcaagcggcggtggaggtggtggtggtggtgcacatggtggaggatacggtggtggacaaggtgctggtgctggaggaggatatggaggtg

SEQ ID NO: 102468 - DNA, 233 bp, Arabidopsis thaliana columbia
caaaaatttgtttataagatagaaatggaggtttgaatctgagaaagctgtctgtaaatattaacttttgattgcaatttatagtttagcatcatgtgttggaacacattttatatccatccacaagtccccccaacacatgatgctaaactataaattgcaatcaaaagttaatatttacagtttagcatcatgtgttggggggacttgtggatggatataaaatgtgttcc

SEQ ID NO: 102469 - DNA, 401 bp, Arabidopsis thaliana columbia
cttctctgcaaaatcgactaaagttttgagtttcttcaccgtacgattaaccggagatggagtcttctcccgatccaggagagttgattaagtcgtctcagccgagtttctttgagtttcagaagcaggcgtctctaatgacgagctgcaatcttctatggaaagagctctctgagcatttcacttccatggagcaaaacctgatgaagaaatctgaagctctgagacagatgattgaaaccctagataatcaaacgcagagctcgattgagttactcaagcatcgtgaggtgactatagaccacagcgtcgagatcgcggaggggaaagttgaggaacgcgttagagcggcgttggattcgctggagaaagctagagactgtggtgatgaagataccgga

SEQ ID NO: 102470 - DNA, 368 bp, Arabidopsis thaliana columbia
gggagattatgcgcagttttggtcttactgacagtgagattgcaaatttccgagagccttctgaatggttgtattactttccccctttggctgttgaagatctaagggcatatggattgggttgtgattggagacgctcgtttgtgaccactgatgttaatccctttttcgatgcctttgtgaggtggcagatgaggaagttgaaatctatgggaaagattgttaaagaccgcaggtacactatattctcacctttagatggccagccttgtgctgatcacgaccgtgctactggggaaggtgttcagcctcaagagtatacactcataaagatggaagtagtcaagccattccctctgaaactgggt

SEQ ID NO: 102471 - DNA, 346 bp, Arabidopsis thaliana columbia
gaagaagcaaagaagcactgataaatctctgcaactcaacaaatttctgagattagctatggaaggttcttcatcttcgtcttcgttaatttccaaatcggacgctgagttggaggaaatgctcgatcggatgctgacgagactcgctctttgcgacgactccaagctcgaatccctagtctctaacctccttcctcttaccatatcttctctttcttctcaatctcccgttgttcgcaacaaggttcttgagatattgagtcatgttaacaagagagtgaagcatcagcatgaaattggtttgcctttattggctttatggaaattgtacacagatcctgctgct

SEQ ID NO: 102472 - DNA, 272 bp, Arabidopsis thaliana columbia
gttaaaagtttctaagttcatcaatggagaaatcaatggagaaaagcgtgagctctgctgcttctggtaattcaataaactcgaagctgaggtatcctctcagatcggctcttagattcaatgaagggaagcctcctgttcctgatttctctgcttcttctatgcccataagggcacgagttgtatctgctgttagtcagagtacaacagttcttgaattgtctgggaagaagagtgttgatcgaaccaagctaccaccaataagactttcg

SEQ ID NO: 102473 - DNA, 417 bp, Arabidopsis thaliana columbia
aaaaaaaaaaaacttctttttatgttttgtttgtttctattccgatcttatcctacgccgtcactctcctcccggtgcgcacattagcaacactactcccgacgaatggagacgacgacgccgcagtcaaaatcaagtgtgtcccaccgaccgccgttgggaagagaagactggtggagtgaggaagcgacggcgacgctggtagaagcctggggcaatcgttacgtcaagctgaaccacggaaatctccggcagaatgactggaaagacgtcgccgacgccgttaactctagacacggtgataacagccgtaagaagaccgacttacagtgtaagaaccgggtcgatactttgaagaagaagtacagaacagagaaagctaaactctcgccgtcgacttggcgtttctataaccgc

SEQ ID NO: 102474 - DNA, 337 bp, Arabidopsis thaliana columbia
aggacgcgtgggggacatttcataatctctcactttgtgcgagtgtttttttttccgagatccaaaatcttctaacggatccaaagctttgttactccgtggatctcctaccttgagcacctgaaaagatggacaaatctagtaccatgcttgttcactatgacaaagggactccagcagttgctaatgagattaaagaagctctcgaaggaaatgatgttgaagctaaagttgatgccatgaagaaggcaattatgcttttgctgaatggtgaaaccattcctcagcttttcattaccattataagatatgtgctgccttctgaagaccacaccat

SEQ ID NO: 102475 - DNA, 326 bp, Arabidopsis thaliana columbia
cgcgtttctccatcaagaagaagacacagagaacacagttctccatcaacccttttgatccgagacctatgagagccgttaactcaagcggcgttgtaacggccatcagcgaggatttggttaaaacgctgcgtattagcactgtcggtagaaaacaagagaaggaggaagaagaggagaagtcggtgaagtttaaggtgagagcagttgcgacggtgaggaacaataacaaagaggattttaaagaaactttggttaagcatttggatgcttttactgataaaattggtagaaacgttgtcttggcgcttatgagtacccaagtt

SEQ ID NO: 102476 - DNA, 393 bp, Arabidopsis thaliana columbia
caaaaattcgagacctcctctccacttcgaaatttcatttttttttttctcaacagagtaaatttggctcttatgcacctgtcgtgtgaatcctgatctcgctttagattgtggaagccttcgacacatttcccattttgaatttgtcttcttcttcttcttcctttagtttttggggatatttcaccatcctcgttgaaatcagtgtgattcttcttcgtatacaatgacgaaattgagatcgaaatggttaggtttaagatctgtaaccatcttcttaatcaatttctctctagcttttgctttcgtttccgctgagagaagaggaaaatctctgaggttaagtacagacgaaacgcgggaaaatgaatcaagtttcttccttaaagctat

SEQ ID NO: 102477 - DNA, 338 bp, Arabidopsis thaliana columbia
cagcattctgaccctagacacagagtcctccggtcttctgataaacccccatgtggaaggccaagacatgcttccgtcagatttacttgaccgtactaatacggcggtactcgagagtcgctccgccgccgtcttcggtgatccgcgtgacaaacaacgtagcacacctgggaccaccgaagcaaggaccactgccacgtcagctgatatccctgccgccatttcccggtcatccattacctggcaaaaacgccggagctgacggcgacgatggagatagcggcggccacgtcacagctataagctgggtcaagtactattttgaagaaatctatgat

SEQ ID NO: 102478 - DNA, 342 bp, Arabidopsis thaliana columbia
gcaatcctctttctctctctctctctctttcccaatcattaacacaaaaaattatggagcacaacaaggttgatacagaacctcaagattcatatgatgatcaacaaaaatgggttctcgattcttcgaccgatagtagaggagagattccgcttcgggctcaaaccggagcttggagagctgcactcttcatcattggtatcgaattcagcgagaggctaagttactttgggatctccacgaacttagtggtctacttgactaccattcttcaccaagatctcaagatggctgtaaaaaatacgaactactggtctggtgtcactactttgatgcctcttc

SEQ ID NO: 102479 - DNA, 382 bp, Arabidopsis thaliana columbia
ctttttctttcctttatcatatccatcatcccaaacctagctaaacccacaaatcatatcttaggattactacaatacacaacataccaaatgaaattgtatttctgttgaactttatgcatccatagttatatatatttaccagaaatcaagcaagttgaggaaatcatccaaggcttttgttttgatggaggaaaacccgcatcgagtttcacgtagaaaccatggcgggacccactgtcaaaacgacgccgtggacgaagagaaccgtcgacgacggcataaccaccacactcacggcgacgaagtcaaatgctccagtaagagatgccgatcgtgggcggctgcggcgattgctgactgtgtagcgctttgttgctgt

SEQ ID NO: 102480 - DNA, 336 bp, Arabidopsis thaliana columbia
caatgattgtgatctagaggccccaaacttgtttgagcgcatggtaacaactttgtctaaaattgctcaagggtctcagagtgctgatccaaatcctgccatggcttcgcagacagcttcggttaaaggttcatcccttcagtgcctggtcaacgttcttaaatcactagttgattgggagaaaataacgagagaggcagaatataatacaagaaatgcacacgaggactctgcttctactggagagccaattgaaaccataagcagggaatatgtcccaagcaactttgagaacgctaaagctcataaatccacaatggaagctgccatctccga

SEQ ID NO: 102481 - DNA, 362 bp, Arabidopsis thaliana columbia
cgaggatctcgctacgaaacagaagtatctccgaaatgcaatcgaatctgctagaaaagctgtggagctgtctcctaactcgattgagtttgggcatttttatgccaacttgctttatgaggctgctaacgaagggaagagagagtacgaggaggttgtgcaagagtgccaccgtgctctctccatcgaatatccgattgatcctgctagagagagtcttcaggatgagactcagctgaagatattgacacctgaggctcgtattgctcatttccaggatgagctcaggtcactgatacagaagtctaacatttattcattgtccacttggatgcagaccttgggaaatggtgaagagaaat

SEQ ID NO: 102482 - DNA, 314 bp, Arabidopsis thaliana columbia
gttttgagacacaccattttcactctgactctacaggtttcacgaaacggataatagacgtcaatggccggatcatctcagggacgatcacatctccgagttcaaggtagctttcagcttattccacaacgatggcgatggctgcattaccaccacggacctgggtactgtcatgcgttcccttggacacaacccaaccgaatcagagcatcaagacatgatcaacgaagtggatgctgatggtaacggtagcattgatttcccagacttcttgaaccttatggctcgtaagattaacgacaccgactctgagg

SEQ ID NO: 102483 - DNA, 274 bp, Arabidopsis thaliana columbia
cacgacctttgccgacttccttctgttaatcatggcggctccggacgatgaatcttccgctcagtctcaatcatcacctgccacggcggctcctacgcctcctccttcctcttccccttcctctgctggggatcactacctatctaagtgcatcctccgccccatcgtcgttctccagtttgcctatggccacttccgctccccttcctcgcgcgacatagttttcggcaaggatacctgcatagaattggtggttattggtgaaaacgggatt

SEQ ID NO: 102484 - DNA, 242 bp, Arabidopsis thaliana columbia
gagagacaagtcttgggaagttttctctgtttcacactttggagacgaaaccttaaaggcttaaaactgagaaaaacaaagccgttggcttttgtaagccgctcgttcttcgagacagaacacactagactctttctcgctcactcactcttcatctcttttcttctttctctctctcctaaaaatccgacgaaattatgagtcactttaccttttaatcaggaatatccctgtttcaccct

SEQ ID NO: 102485 - DNA, 280 bp, Arabidopsis thaliana columbia
gggaaacatggttgaatgatattgatgatgctaaggagaagagtatcatgtttatgcatgataatcgaagtgattacagacctccaaactcattaactggtgtcttcagtgatgatgttagcagtgatgataatgattctgatttgctaactccaaaaacaaactctattcaaacttcgagcacttgtgatagttttggtagctcaaatcatcgcatagaccagatcaaagacctgcaagaatctcctacctcaacaatcaacttagtgtcactaactca

SEQ ID NO: 102486 - DNA, 290 bp, Arabidopsis thaliana columbia
cgctcttcgatagaggtgcccaagaagcttctcttctctctctctctctctcttcaatgccctcctctgctactagcacatatctcctctctttaaaacaagtctctctcacagcttcttcaccactccttctccagctcaaagaccgtttctttcaccagccaaagctccttaacatgggattctcaactgggaaaagaaaatcacgagatgaagaagaagatagagtgagcttcttcgcttctgaattccccatggatgacctcaacgatgacgttctcgagagagtc

SEQ ID NO: 102487 - DNA, 342 bp, Arabidopsis thaliana columbia
ctgtctgcgactcggtcgttcctggtgtggtttcgtgtcgtagtcattaaaatctcatctctctcactctcagttccaataataccccttcctatcagagccaacacgcatccagcatccttcatcagcctttgcgtatgaaaatgatgaaacttgaatagagatcattcgtatttcatcgacgtttctaattcgcaatcacaattgttttcttcaaggaattggtttgcttgctttgatcctcagttttgtcaaaggtctttttttttttttcctggacttgctaaaatctcttgtggcttttgctctgatacttgttagtttgggtttcgtgagtctcgc

SEQ ID NO: 102488 - DNA, 125 bp, Arabidopsis thaliana columbia
ctgattcttgtggctatatgtctaatgcttactctaaacaatgctgctgagactaagctaggttcacatagtgtatctaggtgagaaacaacacgatgatcctgactcagtcaccgagtctcatc

SEQ ID NO: 102489 - DNA, 404 bp, Arabidopsis thaliana columbia
aagatggcggcgtttttgcaaactaacatccgtctggagatcataccgggaagatacagttctctcaccgatcataagtttcgtgcgccgtatcgaattaggtgcgccgccgcttcaccggtgaaaaaacggtataacatcactctgcttcccggcgatggtatcggtccagaagttatatctgttgctaagaatgtgcttcagaaagctggatttctccaaggactagagtttgatttccaggagatgcctttcggcggagcagctttggatttggtcggagttccattgccggaggaaacttccactgctgctaaacagtctgatgccattcttcttggagctatcggagggtacaaatgggacaagaatgagaaacatctgagacctgagatgggtctgct

SEQ ID NO: 102490 - DNA, 382 bp, Arabidopsis thaliana columbia
gagggattcagatctatacgacgaaactgaatctcaccgtcttcttcttcttcttcttcttctagacgatccttgtgtttctcttgctctcgcatccacgcttctctggtaatgctactgatcgtcaccgtgaagctgagcttgatcgcttccccttgtgaactgatctgatctgagagttgtttctgtttcgtaatctgtgaatatgctgaccaagttcgagaccaagagtaaccgagttaagggtctgagtttccaccctaaacgaccatggattctcgcgagtttacacagtggtgtgatccagctctgggattatcgtatgggtactttgatcgacagatttgatgagcacgaaggacctgttcgtggtgttcatttc

SEQ ID NO: 102491 - DNA, 375 bp, Arabidopsis thaliana columbia
ctgagatcggaaacgacaaacctaattttcccgaagaatcgagaccattatgtggaggagaatcgtttcatcgcatcttaaatccatctccgccgtcgggtcatgcgcggctccgtcgtgcatgcacgccttcacagactcgatgcaactttcactatctactactaaactggtgatcgtttcatattcctccatattctctcgtttaatcggctccgctgcagcggatactgctgtgaagaagcgtgttgaagatgtgatgcctattgcaaccggtcacgagaaagaggaactacaagccgaattggaggggatgaagctggacgatatatactttcctgaagggccttttggaacaaaggaagctcctgctgt

SEQ ID NO: 102492 - DNA, 439 bp, Arabidopsis thaliana columbia
attcccgggacgttgtatgcacaggttaaatggggtaatgttttagtcagactgatcaacaagtttcgtaagaagctgtctttgaaagttcagtggaggcccttgtatgataccttgattcatgctcatttcagcatgagcccgggtcctgaaggttggaggttaagacaacgacactttatggctgttacctccctcattcgttcctgtatgagattttttccacaaggggccgcatctgagatatggtctgaattcatgtctcttttggagaatccttggcataattcctcgtttgagggctctggctttgtgagattgttccttcctacgaaccccgaaaatcatgatttcatctccgaaaagtggataataaacgttctagagctctgggattcaataccaaattgtcaattttggcatactcaatggacatctg

SEQ ID NO: 102493 - DNA, 238 bp, Arabidopsis thaliana columbia
gaagaacctctgtttcttcctcttcttcttcagggtcggtgttaggtgatgaagctccgttttttcgttttcgtcttcttcttcttcaaagtctcttcgttttgtgcttgaagtaagaaaatttgggagaacaatgtcggcttcttcttcctcctttgaacaacctcaagtcataacctgcaacgcggcggtggcatggcgtgctggtgagccattggttatggaggaagttgaagtg

SEQ ID NO: 102494 - DNA, 270 bp, Arabidopsis thaliana columbia
gaaagcttaatctatttagcccgcaaatgcagaataccgttggtgtaccaccaggcggatgggttgtcctcagatttatcgctaataatcctggtgtatggctgttccattgtcatatggatgcagatttaccatacgggattatgagtgctttcatagttcaaaacgggccaactccggaaacgagcttgccatctccaccgtcgaatcttccgcaatgcactcgggatcctacgatctatgagtctcggacgactaacattgatttgt

SEQ ID NO: 102495 - DNA, 135 bp, Arabidopsis thaliana columbia
cacagtttcattgtgattgtatgggccttattgttcccaccaatatctctgtctcacaacaaaactcacatctatcaagataacctgcaggaccacgatctcacatcaggggttttacgtccagcttcacttttg

SEQ ID NO: 102496 - DNA, 386 bp, Arabidopsis thaliana columbia
gaattaagcaactctttatttctcggctcacacactccgattaagcccgacgctctctctcctctttgtcgtcgtcatcatcgtctccggagtaggttgcagaaattcagatctgaactctcagacgaagctccgatcttactgagacatttttgctcgatttgactttcgcctttaaagcttctcagagattattgtactgaattaatggcgaattctcgtcaatattatccatctcaagatgaatcaatgtccccgacttctgtgagatcaagggaatgggaaggtccttccagatggactgagtacttgggacctgaaatggctgcatcagtgtcttctactaggagctctaagcaaattgatggacatgttggtggttccac

SEQ ID NO: 102497 - DNA, 287 bp, Arabidopsis thaliana columbia
gagagaaagaggaattggttttaagtgttaagagagaaaagcctttgcgcaatctcactgtgtgttggtatatattacggcgccaaggtttctttgatcgatttcttcttcttcttctggaaaattatctcgttttccgtttttagttctttgagtttgggatcgttcaatggagcccaacgtagtggagatcgctactcctcctgccgcttcttgctcgagaattcgaacgccaacaaaggctgaaactccagaagtgattgatgtggaggaatatgatttgcaaa

SEQ ID NO: 102498 - DNA, 232 bp, Arabidopsis thaliana columbia
aaaaggcgtcttcaggtcttatattcatgtcatgtgaagagttggaccacgactcagtgagtcaggcacgtgaagatttcaaaattcctatctttgggattggaccatctcacagccactttccagctacctctagtagcttgtccacacccgacgagacttgcattccatggttagacagacaagaagacaaatccgtgatttacgtcagttacgggagcatcgtgaccat

SEQ ID NO: 102499 - DNA, 314 bp, Arabidopsis thaliana columbia
accacgcgtccgcccacgcgtccgcccacgcgtccggtaagtccttaaacaagctatctatataatgaaaacacacaccaaagtgatgggaggacatgtcttgcttactgttttcactctttgtatgctttgttcaggggttagggcacagctaagccctgacatttatgctaaatcgtgccccaatctagttcagattgtccgtacacaagttgccatcgccctgaaggccgagatacggatggctgcttctctcattcgtcttcatttccacgactgctttgttaatgggtgtgatgcgtcgttattgttgg

SEQ ID NO: 102500 - DNA, 377 bp, Arabidopsis thaliana columbia
agaaaaaggaaaagaatagtcccctcttctgcaaaatcaaaaacatatttgcatcatcttcacaccgtcatcatcatcgtcttcaatttacttccaccaaatcaaataatctctcaaaaaccctaatttctctttttcttctctgatcaaaattggtttcgaaaagggaggagagtgaaagatatacatacatacacacgaaaggggtttaagatgtctcttccgctactggagtgtaagtacgtgacggaggagtttgttcgtgaaggtaagaatggcaactatggaaccaagctgcccagctctgtgccgatgcttcgtttcctctacgagctctcttggattttggttcgtggcgaattgccaattcagagctg

SEQ ID NO: 102501 - DNA, 413 bp, Arabidopsis thaliana columbia
caaaaatgttttagggtttttctttactcgattaagctcactagttcttcgcaacgtagttagagatcgacactggcgcggtggatttagggtttttttcctccgcgactacgctcggcgtttcgatttggaaccctaagctatgtggaacaacaacgatggtatgcccttagctcctcctggtactggcgggtccatgatgccgccacctcccgctgctcatccttcttacacggcgcttccgccgccttctaatccgactcctccggtcgagcctactcctgaggaagcggaggctaagcttgaggagaaggcccgaaaatggatgcagctaaattccaaacggtacggcgacaagaggaagtttggattcgttgaaactcagaaagaggacatgccacctgagcacgtca

SEQ ID NO: 102502 - DNA, 285 bp, Arabidopsis thaliana columbia
atacgtcgtcgtttccgaccgtcactctcctccaagtcgcatgccgactcagtcacgccacggatgtctccgatgtcttcctcattgatttgagttcgattcatcttccatcggtttgggagctgttgaatgatatgttcgtgtcgccggatgttctgaaactagggtttcggtttaaacaggatttggtttacttgtcttcgacatttactcaacatggatgtgaaggtggattccaagaggtgaaacaatacttggatattacaagcatatacaattatctgc

SEQ ID NO: 102503 - DNA, 368 bp, Arabidopsis thaliana columbia
cacacgcgtccgcccacgcgtccggtacgggaaaaaaaaactttgaactgctctctctctctcgaagctctcaacaaaaaaaatcgaagaagaagaagaagaagacgtaacaatggagcctccttttgaaagatcgaaacgtctccacaacttctctttgcctcaactccgttggggtcaacaaagattcctcagatgcgtcaatctaccatctcctcctccttcggtcttcctctcccgatcacgcagccaccaatagatccgtctccatagctggagtttcgcgtacaagaggaggaggaggaggagcgaagaacggggaggtagttgcggcgggtaagccatggaatttgaggatgagaagagct

SEQ ID NO: 102504 - DNA, 414 bp, Arabidopsis thaliana columbia
cagaaaaaaactaaactttcgatgtttcaatggcggctgtgaactcgaaagctcttaactttatgtaggaattggcaaattaaaggttttgattgacgaaattggtgattaattgcttaagctgctggtgcttagaggaagatacgtgttgctgatttcaatttgcttccacaatgttgcttcaactacaagttgttaaagcttgattctttttgggacatgagcatgtgacttatgaaagttttagtctttatttgtgatttgagctggctagagaagactcttgtctctgtttgatagtagtcatggtgatcattctcctattggtcttctttgttggttcttctgtgagccaaccatgtcatcccaacgacttatctgcgctccgggaattggcaggagcgttgaagaaca

SEQ ID NO: 102505 - DNA, 156 bp, Arabidopsis thaliana columbia
aaactagcgacgacgattcttccttcaatcaatttaattctcgttaaacccttctctcaatccaccaccattcccaaaaaacaggatcgagttcgtgaccatggctacgacaattacatggaagtggagaaaaaaatccgcaaagtcgtcaaattt

SEQ ID NO: 102506 - DNA, 356 bp, Arabidopsis thaliana columbia
cgtcgagctggaaagtttttcagctatgttcaagaatacgacgagaaggaccctcaaatccattccatcatgtgtttttgggtccttctcgtcgtattcttgaacatagctgaaaaggacccaaaatcacatgatggaatggatttgaggagagttacaactaaggatttgattgcgaaattcggtcttaaagaatatactaatgactttattggtcatgcagtggcacttcactgtaatgacaatcatctccatcaacctgcctatgatactgtaatgagaatgaagctctacgcagagtcccttgcacgttttcaacgaggttcaccatatatctatcctctctatgggttggg

SEQ ID NO: 102507 - DNA, 392 bp, Arabidopsis thaliana columbia
caaaaatgctgggtttttgaacgaacgaggatgacgatgctcagagtccgaagcagagatggattggagagagtgagtgtagatggacctcatatcacagtctcccaactcaaaaccctaatccaagatcagcttcagatccctatccacaaccaaaccttatccaccaatagaaaccttctcctcgctaagagcccttctgatttcctagcgttcaccgacatggccgatcctaacctccgaatctcgtctctcaatctagctcacggctctatggtctaccttgcttacgaaggtgagcgtacgattcgtggtggtcctgctgtaacgcctgctggttccttcgggaggaagatgaccgtcgaagatctaatcgctcgacagatgcgcgt

SEQ ID NO: 102508 - DNA, 261 bp, Arabidopsis thaliana columbia
gaaacagtcattatcctcaacatccccgctggtatgaattatgtgatttgttcggcatgtacatgatcgatgaagccaatatagagacacatggttttgatctctctgggcatctgaagcaccctgcaaaagagccaagctgggcagctgctatgctggatcgagtagttgggatggttgaaagagacaaaaaccatacatgcataatttcttggtcacttggaaatgaggctggctatgggcccaatcattctgccatgg

SEQ ID NO: 102509 - DNA, 396 bp, Arabidopsis thaliana columbia
gtggcaaagatgatgaatcatttgcttttggctcttttccttgttggaaccatcgccttaccagatagaggaactcaacaattgaccaacgatggcctcaccggcgcgaggcgagagatactctctttcttagaccaaagacttgcagtggtgtacccagtgatccagagattcaagtcactcatcactctcgacccttataacgtgaccaagacatggattggttcagacatctgcagttatagaggcttccactgtgacaatcctcctcacaacaaaaccgcagttactgttgcttccatcgatttcaatggctttcagctctctgctccatccatcgaaggatttatcgatcaattcgctgacctagctctgtttcatgttaactcaaacaat

SEQ ID NO: 102510 - DNA, 388 bp, Arabidopsis thaliana columbia
cccacgcgtccgcgaggaggaatttagaggatcttgttgtgcctaactatcaagagacatcagattcgtacccttctcctgatatgtggggtactggatggagcatgaactcttcagaagctgctgagaaatgttttgattatgatgtgattcacaatggtttcagtggaggattatacagtcagatggagatggatatgggaactagtgaacaagtagaagaagaaactaagaagttaaaggctagtggttgttttgaccgttcgcttcatgattttgatgaaatccaacacatggatgacatgttcttaagttccattttggaggatgttccagggaatgagaattttctttctttcaaggagtcggataataacaacagctccag

SEQ ID NO: 102511 - DNA, 263 bp, Arabidopsis thaliana columbia
acgcgtccgcccacgcgtccgctcttatagtcggttttgtcgttgtcagtaatttgcgatttttgaaggttaacgagaaaaatgtcagactctgataatctacagcttccaccatcatcgacaggggcaacagttgcagctactgatgttggttggtacattcttggtgaaaatcagcagaacctgggcccttatactttctctgagctatgtaaccatttcaggaatggttacctactagaaactactctagtctgggctga

SEQ ID NO: 102512 - DNA, 369 bp, Arabidopsis thaliana columbia
cacacgcgtccggtggaatcgaattcagatgatccaaatatgcatagtatacttaaccgtataataatgcctgagtccattgaaaagcatggagtcaactggaaaggcgttgactttcttgttttcaacacttacatttggtggatgaacacattcgctatgaaagtcctacgaggatcgttcgataaaggagacaccgagtatgaggagatcgaacggccagtagcgtataggagagtgatgacgacttggggagattgggtggaacgaaatattgatcctctacgtaccactgtcttctttgctagcatgtctcctcttcacatcaagagcttggattgggagaatccagatgggatcaagtgtgca

SEQ ID NO: 102513 - DNA, 310 bp, Arabidopsis thaliana columbia
gtgagattgctcgacagtaactccaccaatacgacggttcgttcctttagcacttctttcatcttcataatcccttcaagctcaacaagcaacggaggtttcggcttcacattcacactctctccaaccccaaaccgtacagatgcggatcccgagcagtacatggggcttctcagcgaaagaaacgacgggaattcgagcaatcacgttttcgctgtggagttcgatacggtacaaggattcaaagacggaacacatcgaataggcaaccacatcggtctaaatttcaacagtctctcttcagatgtcc

SEQ ID NO: 102514 - DNA, 333 bp, Arabidopsis thaliana columbia
gcggagattaggaaacctcttattggtatccgtggaagaaccccaaccagaacaaccgcatggttcaaaacgacggtcgcagtcaccgttctattgtcgttttgctccgtcgtgctctgcgttttggccttcactggcaagcgacggactcagagaccatggaacctcatagacccgctcttttggcttattcacgccgttacacacctagtcatcgccgttctcgtcctccaccagaagagattcgctgctctaaatcatcccttatctctacgaatctactggatttccagtttcgtcctcacgtctctcttccccgtcactgggattttc

SEQ ID NO: 102515 - DNA, 303 bp, Arabidopsis thaliana columbia
ctctgcatgaaagaataaaaaaaaaacatcacaatctctttccatttctgagagctaaaaaacctctctctctttctctttgattcaagtttccaaaaatggaaggtttgtgtttaaactctttcactcgtgttttacttttattgttcgttttcttggtttttttctcataaatggcaacgagtcaacgcggtcgaaccggttttggagctggtaaaaggctttgaagctaaaccggactcgtccatcgactcgttccagcctctcctcactgactcaaacggtaacttttcattcgggttc

SEQ ID NO: 102516 - DNA, 259 bp, Arabidopsis thaliana columbia
cttgcggaaattcgacggcgacttttgcgatggcggtgagattctttactggaccagcggtaatggccgtggcagcaatggctattggattacgtggagacctattgcgtgtggccattgttcaggctgcattgcctcaagggatcgtgccgtttgtgtttgcaaaagagtataatgttcatcccgcaatcttgagtacaggggtaatatttgggatgcttatcgcactaccgattacacgtgtttactacattttact

SEQ ID NO: 102517 - DNA, 146 bp, Arabidopsis thaliana columbia
atatccattgtgtatccacaatcgatgatacttgctatgttggtgatcctacagtccgtgaattccacgaggcttgctctgagcaccatctcttgaaaggtcaaggagttgttggagaaacctttttgacgaatggcccttgcttt

SEQ ID NO: 102518 - DNA, 100 bp, Arabidopsis thaliana columbia
atccaaagataacttggcttcaagaacagaggagtatcttgagagcatcgtatgcaagaatcttgagatgtgtgttcaagtcttgaaacaatccgagatt

SEQ ID NO: 102519 - DNA, 292 bp, Arabidopsis thaliana columbia
tggtaaaaccttctgaagctgagaagaatcttgttcagtcaacaactgctgctgctggagcaggggggatgttgggcccctactccgggggagctaggcgtctttatgttggtaacctccacattaacatgtcagaagatgatttgcgaaaggtatttgaatcatttgggagtgtggagctggtgcaagtacctcgtgatgaaactggtctctgcaaaggatttggttttgttcagtttgcccggctggatgattctagaaacgcactgaatctaaatgggcagttggaaat

SEQ ID NO: 102520 - DNA, 312 bp, Arabidopsis thaliana columbia
aatacctgaatctcaccgtgaggatgaagttacgagttttgctgtggtcaatccaagtgggagggatctagagaatggtgtgaacagtgaaagtcaagcttatactagtgcaactggtcaagctgatggctctttaaaactttggagaagtagttttcaggaaagttcaacaccttccggtctgtgggagctagttggcatgcttacggttggccaaaatcctgtcagtgctatatctctgactgattcgggacacaagatagcagccctctgtacagagagtcattcaaaagctgcccgcgcagttagtag

SEQ ID NO: 102521 - DNA, 106 bp, Arabidopsis thaliana columbia
aacaaacatcagaacctcaggaaaaaagcaaagttctcttctggaattcgagaaaatgggaatgtcgaactcgaaaggcaacacacacaacatcttccttctctgc

SEQ ID NO: 102522 - DNA, 290 bp, Arabidopsis thaliana columbia
gcgatttggacggagatttctccgattacattgattgggactttagtgaatcttcacagaagcaacttcacggagaacggcgagaagaatgtggaattgagagcgtcgttagaggatggagaagcgtcggccgtttcactggagagatctagtgttgttcgttgatgaaggggttctaatttcgatacctaacggaattgatcattgataaggtcgcattccggtggcaatcgtcgtcgccggaaacaatgtgcacagatacgaccttgaggggatgattcacgtgagag

SEQ ID NO: 102523 - DNA, 194 bp, Arabidopsis thaliana columbia
attctctcagtagaagagcatgatgcttgaggatattcctggggcatcagtggagtcaggattaatgtcacttatcgaaaaaccatcctataggggtctgccacaatattatctaagatctggttctggccttttggatcttctccaggctataccacctacacttccaatttcttcgcaggaactttttacca

SEQ ID NO: 102524 - DNA, 166 bp, Arabidopsis thaliana columbia
ttttacgatcgaaatgagaattcaacagaagtgcctccaagccctgcatcagtctgcagtagtacaccagaagagttctggagaaatgtcgattatctcagccaggtttcaacacctgacgtgactgtatcggatgagaacggtatgcctcaagttttcagagaca

SEQ ID NO: 102525 - DNA, 331 bp, Arabidopsis thaliana columbia
ctaaaaatcttactcttcttcactctaaatcccttctctgaacctcttcgtttgctgtatgtgttgatttcacttctctctgagcaagaagctttcgcgtgagagaatgacgaaggtctatggaactggcacgtacgacttcaagcgccacagagtggcggagtatccattggagttacctagccatcctgctgagaagcctctagagtcaaagcctggatctaatttgccgagctccatcactttatcggagattcagcaagataggttaacgaaaatcgctgaggagagctggattaagactggaggtaagctccctgagaaaccgttc

SEQ ID NO: 102526 - DNA, 164 bp, Arabidopsis thaliana columbia
tctctccgcctctgtctccgtcgagactctgaagtctatatctctctatcactcatcttctccgacgcctctcgttcatccaaaaagctttcctatctgtagatttttcaatccctttttttagcgattcagatcgttagattagttttttcccgatcgatttc

SEQ ID NO: 102527 - DNA, 321 bp, Arabidopsis thaliana columbia
cagaggtctgtttcaatctgacggctggattttgtcacagaccgccgccaagtctgaagagggaagagaagtggagaagatggtgttgagtgctgtgttttggaagaaggttcagtatgttttgaaatcggttgatccggtgatgcaggtgattcacatgatcaatgatggtggcgatagactatctatgccatatgcttacggttacatgtgctgtgcgaaaatggcgatcaagtctattcatagcgatgatgcaaggaaatacggaccgttttggcgggtgatagaataccgttggaacccattgtttcatcatcctct

SEQ ID NO: 102528 - DNA, 164 bp, Arabidopsis thaliana columbia
gttcgtggattttgaaggatttgattggtttccatggtattagatctctgtgatggttgttgatctatcttaaaacttgatttatcttcagttctctcgatttcaaacttgtacttgtcgtacttcaagtgatcgaatcggaaacttattgttgctatgtttac

SEQ ID NO: 102529 - DNA, 316 bp, Arabidopsis thaliana columbia
cacatcctctgattaactaaaacgcacacaaacaagaaaaaaagctatgaaaacaggaaaaaaaataggaaatatcagtcttgtctaaaacgacgaagaagaagaggaagaatcgagacaaacatttcacattcccagagattgtggtgtcgttgggtacttacttcttagggtgattcaggacttgctaattataggcaaaaaatggttttgggtttaagctcaaagaacagaagatgctcatcggtacaagtttttacctgatccacattcatgacatcaagccttggcctccttctcagtcccttcgatctct

SEQ ID NO: 102530 - DNA, 341 bp, Arabidopsis thaliana columbia
agacgggatcttgggagttggaggttcggatcagagtcgagcaacagccgtcgtggtcgctagtagacgaagatggctaaagaggcgagaaacatggctggtggttctcggtgttgctcttcacgccgtctacatgctaagcatcttcgacatttacttcaaaacgcccatagtccacgggatggatcctgtgcctccgagattctctgagccgccggctaagcgacttgttcttctcatctcggatggtttacgtgctgacaaattctttgagccggacgatgaaggcagatacagagcacccttcttgaggaatatcataaagaatcaggggcgttggg

SEQ ID NO: 102531 - DNA, 294 bp, Arabidopsis thaliana columbia
gccatgaacgcaacatccgcaagctaattcgaaaaccgtggtttcaaaaagataagaaacaggggaagtgactctaatcacaaaccagcaaggagaaaagagctccaagaaaaggccataaagcattcttttgttgttaattttgtattgatttattcttaagttatactatggaggtacactttttgagagcctattcacatatttgattcagaggtaataatgtatacagctcagttcctagaatatttatctgtatgcatatatttcgacagctttatgctttctttcgag

SEQ ID NO: 102532 - DNA, 325 bp, Arabidopsis thaliana columbia
aataatcaaaattatgctgttgacccgttggtcttgaaaatttcactgattgttggaagaacccctgaagacttgattatccattgcattaaccgggcaagcataaccagagccaagatattattctaccttgtggagtccagtcccttgcatctgttagtctttggacactttttctttagtatgctaagtaagaaacaggatgactctgctcttacagatgatcagtttatcatgcttctgcctgctgtgctatcgtatctgacatcagttattgcaaaactcgagaagccttgtaatagatgtttggatataacttcagttt

SEQ ID NO: 102533 - DNA, 364 bp, Arabidopsis thaliana columbia
cccaaacgatccagtctctttagattcactttctcctagatcagaccacaagcatttggccacttctgtcctaatttattctctcatcaaaacctctattttgcttctccctttccttacaagctgttcactatatcccctgcgatttgtgtttcccacaaaccctaattttgcaagaagaggggtttcttctaaattatataagtctcggttctttttgccatttcgttttctctgatcatggattctgaagaatacatgctcgatacgcacgatatggactctggagatgatgagttctacagcggtggaactgatgatctgtaatgatactgatgatggttaacctgattatgggtttgtt

SEQ ID NO: 102534 - DNA, 276 bp, Arabidopsis thaliana columbia
accaccgtccggtttacgagcaacgtatcggaggacacggattacggacgaccgataccgcagaactcgaatcacaaagtgactttgacgcaattgagacagcagcatcggcaacgtgtgccgatatctatgggcaccgcctacgaatacccttctgccgttcacatcgatacagctggaatcaatgtttgtctcgtcggacattcacctgccatggatgtccatggctatgacaccactcttcctatctccctaaaggagatgcttgttcactgt

SEQ ID NO: 102535 - DNA, 384 bp, Arabidopsis thaliana columbia
cacacgcgtccgcccacgcgtccgcccacgcgtccgctgaatcgaaaaagatggatgctaatttcgagatgcctccagtcggtggaatgaacgacgacgacgacatggatttcggtgacggcgcctcgtttcttaaagtcggtgaagagaaagagatccaacaaggtttgaagaagaagcttcttaaagaaggtgaaggatatgaaactcctgagaatggcgatgaagttgaagtgcattacactggaactttgcttgatgggacgaagtttgattcgagtcgtgatagagcaacgcctttcaaattcactcttggacaaggtcaagttattaaaggatgggatattggtattaagacgatgaagaaaggtgaaaacgctgttt

SEQ ID NO: 102536 - DNA, 364 bp, Arabidopsis thaliana columbia
cactgacgtcaccatccgacgtgtcagctttaaaagctttcaaagccaccgtgaaacccaactcaatcccaccgtggtcttgtctcgctagctgggactttactgtctccgacccatgtgcttcaccacgtcgaacacatttcacttgcggcatcacttgctcgtctgactccacacgtgtgacccaactcactctcgacccagccgggtacacgggtcgtctcacgcctctcatctccggcctcacagagcttctcacgctcgatctcgccgagaacaacttctacggcctaatcccatcctccatctcctccctcaccagcctcaagaccttgatcctccgatccaactcgttttccgggtc

SEQ ID NO: 102537 - DNA, 360 bp, Arabidopsis thaliana columbia
gttactttatacccatcaatcaagtcttgtcctttttctccttctctctctcatacgagcttctttcctgctgatgaggcttgagctttaaattttcaatcttgattgagattctgcatgtttctcgatctttaaactcagatgaagaatcttggggggttgttcaaaattcttctgcttttcttctgtctctttctatcgacccacataatttccgtttcttgtttaaactcagatgggctaactctactctctcttctgaagcatttggatagagtaccaccacaagttacttcgacatggaaaataaacgcatctgaagcaactccatgtaactggttcggtatcacttgtgacgat

SEQ ID NO: 102538 - DNA, 203 bp, Arabidopsis thaliana columbia
ctttcactcacacaaagagttttttcgtttaatacagaaactctttcaaggttttaaatctgtggtaaaattctctaaacctaagagtgatcaatgaagattcggaacagccctagttttcatgggggtaatggttacagtgtccttatagctcgtaacttaacattcaagaaagttgtgaagacagtgatgagagaccagtc

SEQ ID NO: 102539 - DNA, 296 bp, Arabidopsis thaliana columbia
cgaaacagcggattgctttcatcactaatgcgcttttcatgaacatgcctcatgcccctcaggttgagaaaatgatggagttcagtgttctgactccatattacagtgaggaagttgtatacagcaaagagcagctccgaaatgagactgaggatgggatttccaccctatactacctgcagacaatttatgctgatgaatgcgaaaaatttcacggaagggatgcatagggaaggaatcaagacagatagtgagttgtggacaagcaagctgagagacctcaggctttgggcttc

SEQ ID NO: 102540 - DNA, 405 bp, Arabidopsis thaliana columbia
atttgttttgctttgtcagtcaacggttgacccattgactcgcccaccatccatgacttcttcagcttaagttatgcactcatcttttatctccttcttaaaaaaatctgatgaactgtaacgttttgtttcttctctctgttctcgtctctgttacggctggagttacggcggcgtaccatcctaccgatgtctttctcttcaactgcggcgatacttccaacaacgtcgacaacagtggccggaactggacggtggaaagtcgtcaaattctgtcgtcgaatttagtcaacgcttcattcacttcagaagcgtcataccaaaaagcaggggtctctcggattccgtacatgaaagctcgaatattccgatctgagttcacctacagtttcccagtcactcccg

SEQ ID NO: 102541 - DNA, 167 bp, Arabidopsis thaliana columbia
catcgaacctctggatcaacccattttcaccttctaacgttcttcgtcgatcttattgatctgtgaaaatgtattcgggtcagcacatgatccacacggataagggtgttgcaccaagacagtttgaacagcaagttactcaggctttgtctgacttggagaacacc

SEQ ID NO: 102542 - DNA, 357 bp, Arabidopsis thaliana columbia
accacgcgtccgcttcactccaagtttatgaggagatctagagagataatcatatagagaaagagagatctccagagaaaatccattgaagggaaaaaaacagtctgtctttcataattgctctttctataaatcttctctcttgtgttcttacctttcttctaaaaccattctctctctctttaacacttcatcactctttacggaaaatttcttattttcaccacctgagccatctctattttcgtcaaaacttctcaacttttgtgccaaaacgtcatttcttctgagggaataaacacaaaagaacaattttcccggaaaatcatggagatttccactgctctaatgattctt

SEQ ID NO: 102543 - DNA, 418 bp, Arabidopsis thaliana columbia
caaaaaaaaagcaaaatcgcaagagagaccttaaacgacatcgttttcagatgaggagacaccaccaccgatgccaaatcggctccgatagcgaaaccggatccgaatccgattccgataccgacacgccgatgcgatgcatctcttgtcgagaagagtacctccctcgcaacgccgggacctgcaaggaatgctacgtcgaagccggcgaaactgaagaagaactcaaacgcgagatcgatgacctcaaagctaaagttgctttccttcgcttatcttcttctcttgatcatggaactagttcaacctctagatccttcactgatgttgttctcatcgcctctgaagataacgccggatctcctcctattcccgctcataaatccgttctggtgagtcgttctccagttttcaaagc

SEQ ID NO: 102544 - DNA, 256 bp, Arabidopsis thaliana columbia
cgacgatcttctgggtgactcaaagtgagacgttaagctcaaggtctctggattgcttttgaatttgcatgctgttggaggatgatagaccatcggtatgtgcttgagttttctcgaggaaggatgaaccgatacgagccgtcatattgattaagtatatatatgtagtggagtgcctgaaggagatatatatatatatactagcagttggatatgatggttttcatttgttaggtgtgagtttcttttgttgttg

SEQ ID NO: 102545 - DNA, 372 bp, Arabidopsis thaliana columbia
aactcgctttcctaacttctctctctgtcactctaactctttgtcggtaccaaattcttcttcactcgaagaactgtttaggtcaagtatgacttaattctgccaaatttctggtgtttattcaaagttcaaagtcaattgaacaaaactttttatcagataaactgaagcaatgtataccgagggagcctctgattttgtcattgaccagagcatgtattatcccgcttattactcttcaggttatgattcatctgtgggtcttcagggtgggcaaaatgaaaatgctccctatatctgctatacaccaagttatggatatgcacagtctccctacaatccctacaatccttacataccaggagcttcaat

SEQ ID NO: 102546 - DNA, 442 bp, Arabidopsis thaliana columbia
aaaaaaaaagagagaagaaaaatggtgttgacaatctatgctcctttattcgcttcttcaaagagagctgttgtgacattggtggagaagggagtatcattcgaaactgtcaatgtcgatctcatgaaaggagaacagagacagcctgagtatctcgcgattcagcctttcggtaaaatcccagtcctcgtcgacggagactacaaaatcttcgagtcgcgtgcgatcatgaggtatatagcagagaagtatagatcacaaggacctgatcttttggggaagactattgaagagagaggacaagtagagcaatggttagacgttgaggctacaagttaccatcaccacttccggtgatcggaaacctccttcagcttcagaagcttaacccacaacgcttcttcgctggatgggccaaaaaatacggtccaatcttgtcata

SEQ ID NO: 102547 - DNA, 377 bp, Arabidopsis thaliana columbia
ggagaagaagaagaagaaaagagaagaagctcttgttatcccggcgttcttaaaacaacgacggcgacggtgacggctaagcggaagagcttttgttgccaatgacggactcttacggcgccgtctccgtcgacgttggaacaatctatcttggtggcaaggagcatcgtgttaaaactgctagtggtgttgtgtctgtcattgtctatggagacagagaaaagccagcattgattacttatcctgatttagccctaaaccgtaaggctaaagaatctctataggcactaatgtaatggctaaatttattaatgtttttgttgtttcttcttcagatatgtcatgcttccaagggttattcttctgtcctgaagcag

SEQ ID NO: 102548 - DNA, 402 bp, Arabidopsis thaliana columbia
gttcttcttataagggtttttgtttataatttggtaatcgaaaaagagagatttgataaaatcctttgtgttgaaggaaaaaaaaatcatataggtaacgtttgatacaagtaaaaaaaaaaaatttccatcactttcttgggtaaaaaaaacatgggttagaggaaaaactggggaaaagattttagattaagtgcgtaaagaattctgattccttcgtctccgatctctcatttttctggagaaattgtcaaaaatttcagatatctatattgtcttggaactgaagattcatcgaaagattggtgagttttattcgctgcttatcgcttgtggcaatcacatcatctgtgttatgcatccaagtaatggtgtcacataaagtcttagaatttggagatg

SEQ ID NO: 102549 - DNA, 168 bp, Arabidopsis thaliana columbia
ctcaaatatcgccgaatatatataaatgactcttcgattcagtttcttcttcgtggtcatcgccggcttagggttttctcaataagcagatcgtatcttctccttttcctccgttgtttctggtcatcttttgcttttagattaacgttgctgcctgcgatcgatctg

SEQ ID NO: 102550 - DNA, 391 bp, Arabidopsis thaliana columbia
  unsure (1)..(391): unsure at all n locations
tttttaaaaaatcaactataccatttttagctattctttggtcttcgtttcgtgtaagcattcaatgttttttttcttttatctctttgggaaacgggagtgtggtcttcgtgtgtgtgtcnctgtttcattaaccaataattatgcttgggagtggaaagcaagaaaaattctaaactttatataaaattcccagaatcaattgatccaaaaagagtattgtcaaaaaagataatcaagaagaagaaactctgtttttttgttctgttcttggaaaaaaatgaggagtatgatgatggagagagagggaaggaatgagatagaaagagaagtaatagatgacttggaagagacgcaaaacgaaggagatgatttcaagtcaatacctcca

SEQ ID NO: 102551 - DNA, 409 bp, Arabidopsis thaliana columbia
atcagtctccgtcaggttacggcgaaggaagtgtattcaatgatagccaaatacaaggtaactcatttctgtgcagctcctgtggtcctcaacgctattgtcaatgctcctaaagaagacactatccttcctcttccccatacagtccatgtcatgacagcaggagctgctcctccaccttctgttctcttctccatgaaccagaagggcttccgagtcgctcacacctatgggctttccgagacttatggtccttccaccgtatgcgcttggaaacccgagtgggattccctccctcctgagacgcaggcccctcaatgctcgccaaggtgtccgctatactggcatggagcagcttgatgtcattgacactcagaccggaaaacctgttcctgcagatggaaaaacc

SEQ ID NO: 102552 - DNA, 358 bp, Arabidopsis thaliana columbia
acttggacgaaatgggtctatattgttggttttagatgatgtttgggctgaggaagagtccttgctacaaaagtttctgattcagctacctgattacaagattttggtgacttctcggtttgagttcacaagttttggtcccacttttcatttgaaacccttgatagatgacgaggtcgaatgcagagatgagatagaagaaaatgaaaagcttccagaggtgaatcctcctcttagcatgtgtggtggttgcaactctgcggttaaacatgaagaatctgtgaatattttgggtgttctttggcatcctggatgcttctgctgtcgttcttgtgacaaaccaattgctattcatgag

SEQ ID NO: 102553 - DNA, 203 bp, Arabidopsis thaliana columbia
cgcgtccgaccacgagtccgcttctctcgacttatctctctctctttttctcatcggcctttgccatggcagatataatcggcggcgaagttgtgacggagctcgtgaggcagctctatgcggtttctcaaaaaaccctcagatgcagaggcatcaccaaaaatctcgccaccatgatccatggtcgtcaaccaacgatcaag

SEQ ID NO: 102554 - DNA, 362 bp, Arabidopsis thaliana columbia
attgctctatggccctcctggttctgggaagacacttattgcccgtgctgttgctaatgagactggtgcatttttcttctgtatcaatggtcccgagatcatgtcgaagctagctggtgagagtgaaagtaacctcaggaaagcgtttgaggaagctgagaagaatgccccttcgatcatattcattgatgagatcgattcgattgctccaaaaagagagaagactcacggagaagttgaaagacggattgtatcccagctcttgacacttatggatggtcttaaatccagagcccatgtgattgttatgggagctaccaaccgtcccaacagcattgaccctgctttgagaagatttggac

SEQ ID NO: 102555 - DNA, 266 bp, Arabidopsis thaliana columbia
tgaggacattcaacatggagcttgtttaggtcttggcttgtcagctctcgggacagctgatgaagagatatatgatgatgtcaaaagcgtgctttatactgacagtgcagttgctggtgaagctgctggcatcagcatgggtttattattggttggaactgctactgaaaaggcaagtgagatgctcgcttatgctcatgagacacagcatgagaagataataaggggattggctctaggaatagctcttacagtatatggtagag

SEQ ID NO: 102556 - DNA, 350 bp, Arabidopsis thaliana columbia
gttttgagaatcaagttcaagaatcatttgaaattcccgcattttcgttactgtttccgacaaaagggtcaaaatcaacatccgactccttctccttcagtttcatctgttgctaagtcttttcttcctactaaacgaagattgaagcttgatccttctgagaaactctattttccttatgagcctgggaagcaagttaggagtgctattaagattaaaaatacaagcaaatcacatgtagccttcaagtttcaaacaactgcgccgaagagttgctttatgcgtccacctggtgctattcttgctcctggagagactattattgctactgtgtttaaatttgttgagcc

SEQ ID NO: 102557 - DNA, 168 bp, Arabidopsis thaliana columbia
tgcagataagacatgtctgtcttggttgccagaacggctcgttgattggttatctgaatacgatatactcctttctagctcacatccaacaatctactcaaagctccaggatttccagaaggaacttgttggcctgcaggccatcgaggatgatctaagatactggga

SEQ ID NO: 102558 - DNA, 198 bp, Arabidopsis thaliana columbia
gtttacttttgctcactgtaaccctaatatacataaaacactattcgactagagataattaatcactgatctgagcatttcttgtcgaatagtgttttatgtatattagggtttacttttgctcactgtaacctgttttttctttgtttcttggtctaagaaatgattcttgaacaaatcctaatcgtaactttatgc

SEQ ID NO: 102559 - DNA, 315 bp, Arabidopsis thaliana columbia
atgaaacttcctattcagagaaccttagcttttgccttagctcgcgggaaaggcgaagctgaaagtttcagcagattggaagccacctttggtgataatacctccacagaatgtacctggagttttgactttccagattctaaagatgctatgtctcatctcaagtcagaagcagacctctctggaagcaatggggccaataatgtggctagtgttatcgaaaaactgaatgctcttcggtcacatctcttagcagcagagaaatggaatgcttctcaactacacttatgtgacagtaagtatctggaatgtgca

SEQ ID NO: 102560 - DNA, 355 bp, Arabidopsis thaliana columbia
acgcgtccgtctttctctcacaatctaatcttcttcgtcttcaaactcaatctagggttctcttctcctctctgtaggtaggattttgaacacccaaatctctcatcgaatttttcttgctcaacgtatcatcgcacaattcgtctctcgttttccgtcacgtggataatcgaaatctcataatcccaaaggtaaaacaatcaattctgggattggaattttggatccataggatcgtcaattgaaacaatcccgatggcgttatctatgaagccattcagagccgatgattccggtttccagtcaaacaatctttgggtcggtagcctaacgccggagacgacagagtcagatc

SEQ ID NO: 102561 - DNA, 286 bp, Arabidopsis thaliana columbia
gaaatttagaacctatcaaagaggcaggaattttggagggtcgcaatggtataaaggagacttgccttcagcatgcagccaggtatctcgcgaatcaagagtgggtaaaaactgactccctgaagacagttgaaaacacagctataccaattatcatgcttgttgtggaagtcccttgtgatctgatatgcagtatacagtcaccaaaagatggtccagactgtatcaccgttgaccaggatagcaatggtaacactgaaatggttggatttgaagactctgcagc

SEQ ID NO: 102562 - DNA, 294 bp, Arabidopsis thaliana columbia
acgagcctcgtcatgctcttatcactggcatagattcatggccaggcaagcagattcacagccacaattaccgtgttcctgaccaattcaaagatcaggtggtgatagtgatcggaagctctgcgagtggagttgatatatgcagagatatagcgcaggtcgcgaaagaagtccacgtatcatctagatcaacttcaccggatacttacgagaagcttaccggttacgagaatctatggcttcactcaacgattcaaattgcccgcgaagacggttcggtggttttcgagaatg

SEQ ID NO: 102563 - DNA, 273 bp, Arabidopsis thaliana columbia
aacagagaataatgatggaaactcgacaacaaaagtagagtgtacagtctcggccttcttaacagatgagatctacgctttgccgaaggcgaccaaaacagaacacttacttgctaagagatatgctacggttagtctaggatgggtaatccagacgagtaatagatctttcctggactccttggccttggcctgcaaagacagagaagattaccgcaatactactaacttggaaagaaagtgtacatgcggcagaatcactatatctgagac

SEQ ID NO: 102564 - DNA, 206 bp, Arabidopsis thaliana columbia
atttctcactctctcttctgtttttgacagccagtgtgtctctcttggacagtgattgaactgcttcaagagatttaattttttacccacgagagaagtcatgttgttgatgaataaagatttgttcctttgtcttgtttctttcactttttcattcacaaagatctcatcgacaagagtttctttttttctgttggggttgcttc

SEQ ID NO: 102565 - DNA, 205 bp, Arabidopsis thaliana columbia
gggtcgagcacgcgtccgaggtgtatcttttgccccatcaacaagatgactaatggggctcaccgtgaagatgaaagtggtaatggaagttaaaggatgtggcaaattcggatcttactcttctgtgaagcctaagagatgcgttgttgagtcaaatgagattgcattcgagtacgaatcctcctctggagtggtcacctttgag

SEQ ID NO: 102566 - DNA, 346 bp, Arabidopsis thaliana columbia
aagatttcacaattttcttgtgattttctctcagtttcttatttcgtttcataacatggatgccatgagtagcgtagacgagagctctacaactacagattccattccggcgagaaagtcatcgtctccggcgagtttactatatagaatgggaagcggaacaagcgtggtacttgattcagagaacggtgtcgaagtcgaagtcgaagccgaatcaagaaagcttccttcttcaagattcaaaggtgttgttcctcaaccaaatggaagatggggagctcagatttacgagaaacatcaacgcgtgtggcttggtactttcaacgaggaagacgaagcagctcgt

SEQ ID NO: 102567 - DNA, 294 bp, Arabidopsis thaliana columbia
gagaagccggtttcagatttgatcaattcgaagaattgtggctttcgttcgttgggtgaatccttgcttcgtcctttttgatagattgctactgtgttttcgaggaagttgtgtggagatagttagagagatttatgagatttcaagaggggttattataacgcacgcatggtgttcgacggaaagccgcagagaagttttgttgctatccgatttgactgagactcaaagtttgaaaattgttacttgggtattgagaaagctaaccttgggcaagttcgtatatgagttggg

SEQ ID NO: 102568 - DNA, 172 bp, Arabidopsis thaliana columbia
caaaaatatggcctcttgaataatggttgagacaatactaatcacaagtggttggtattgtctcaaccattattcaagaggccataccaaccacttgtgattagtttgtgtgttttttctggtatgatcagtgtgtcactgtcatgtgttttttgctttgtttaaggattat

SEQ ID NO: 102569 - DNA, 140 bp, Arabidopsis thaliana columbia
cccctttccctctctctctctctctctcctagggttttcgtctctctcgttcactgttaatagtcttaactgagaggtttcattagcctccgggaagattctactgcgaactttggacaaatctctcactgccatggcgg

SEQ ID NO: 102570 - DNA, 339 bp, Arabidopsis thaliana columbia
aggacgcgtggggctgaaacagcgtcgttggaggaggaggaagaggatacgaaggagattgtgatttacgctgatagtgtgaagaagaagaggaagaagaagatgaacaagcacaagtataggaaactcaggaaacagcttggtcgcaagtcatagattttttttactattccggtgagaagtttgctcctttcatgtcttctgaattactgggattcaaaggatgaaccttttttattgaatcagaacaaaaaatttctaaattccattgcattgtcattagtctgtgttcatcgtttgtcttgacaacacatttctaataaaacgtttgctcaattc

SEQ ID NO: 102571 - DNA, 233 bp, Arabidopsis thaliana columbia
gccttatatcgatcaagctttgagtgatcagacggaggctgttaatgtcaatgcattggagtgcttatccacattatgcaagagtagtttcttgcggaagagagctctcctccaaatgatagagtgtgtttatcctttgttgtgctatccatcgcaatgggtaaggagggtagttgtcactttcattgccgcaagtagtgaatgcttaagtgcagtcgactcttatgcgttta

SEQ ID NO: 102572 - DNA, 151 bp, Arabidopsis thaliana columbia
aaccgtggaaacaaaagagactctgtctgaagaaagctaaagacttgtgatgattcttgacagaagaaactgtgtctttggagaactctgaagtaagagagacagagaaggacgcagagagagacatggtgggctcaggagttggaggagg

SEQ ID NO: 102573 - DNA, 337 bp, Arabidopsis thaliana columbia
cacgcgtccgcccacgcgtccgcccacgcgtccgcccacgcgtccgcggacgcgtgggtgcgaatctgaaggatctttacgaattccataatcttcagatcgaaaggtttctatcgattcgttggtcaagaggagattgtgcgtgtgattcgtgagcatgggctgttcgttttcaggattgaacgcactttacgacgccgtcaacggtggaggtgacgtatggatcaatgagaatcgattcaggatcgtgaggcagctcggcgaaggaggtttcgcattcgtctttttggtcaaggaaattgtcgccgacgcttcctccgccgcatccggtggtggt

SEQ ID NO: 102574 - DNA, 413 bp, Arabidopsis thaliana columbia
gcaacaaacaacatcctcgttgtgcttccatctaaggaatctgtcactgaattgcaaccaagaatggatgatatattgaaatgcccctgtgatggcataattgtgacagctgctggttctacaggatcgtcctatgatttttacagtcggtactttgctcctaagttcggagttgatgaggaccctgtttgtggaagtgcacattgtgcattggcacattactggagcatcaagatgaataagtttgatgctccagtaatgtggaagtgcacattgtgcattggcacattactggagcatcaagatgaataagtttgatttcttagcctaccaggcttcgagtaggagtggaacgataaggattcatctagacaaggagaagcagagggttctcctgagaggcaaagccgtta

SEQ ID NO: 102575 - DNA, 270 bp, Arabidopsis thaliana columbia
gttctagatcggcgagcggccacccttttttttttttttttttttttttttattttaatatattgaacataaaaactatacctcgacgaaatacaatcctaattgagaaccaaaaaagccaacgacctctcaaatccaagaacggggcttttgtcttcaaaatgaaaagtttgcagagaaaaagggggagagggagagagtctcagacaataccatattaacaccaaagaacgagtttttggaagcaaaagagaccaaccacacttacta

SEQ ID NO: 102576 - DNA, 418 bp, Arabidopsis thaliana columbia
gaactcaatacaccccagaaagtctttactaattagctttgttgagcttatcaaagtggcaaattataagacattgcatgatttggatatcagcttcatgttgtggctgaagacgaagggggttaataacttatgtctattgccacatcatctttctctttttctacaattacagttaccttccagagagaaaaatattagatggaatttcctttgtcgtaccggcaggaaaaagtgtggcaatcgttggtactagcgggagcggcaagtcaacaattcttaggatgctattcagattcttcgacacagattccggaaatataaggattgacgggcaagatataaaggaagtgagactagatagcctccgaagctccataggagttgtgccgcaagatactgttctcttcaatgacac

SEQ ID NO: 102577 - DNA, 205 bp, Arabidopsis thaliana columbia
cccacgcgtccgttttgtagcaaatccattggttcttgatgatgatgttaagacagctctcgaggttgctagagatgatggttacagtaatgtcgtacgcgcaatcgagagtcatatctgcttgttctctggttgtatgcgtgagtattctggctctagcttgcttaatttatttgctcctcagcttctttcatcaaaagtatgg

SEQ ID NO: 102578 - DNA, 373 bp, Arabidopsis thaliana columbia
cccacgcgtccgcccacgcgtccgcccacgcgtccgcccacgcgtccgcttgtgctatctttcaagcaagtttcgttgcagggttgatgatgttatctttatctactggtgcgttattgcttgaaccaagtggttgtggagttgaagattcgccgtgtaagcctcattcgacgtttaagacggttctgttttatctgtcggtgtatctaatcgcgttagggtatggtggttatcagccgaacatagctacttttggagctgatcagtttgatgcggaggattccgttgaaggacactcgaaaatcgcgtttttcagttacttttacttggctctgaatcttggatcgctcttctcaaatactgtcttgggtta

SEQ ID NO: 102579 - DNA, 329 bp, Arabidopsis thaliana columbia
agcaaattccgccggaaatgttcgatctttctaagcttgtgtgtgggacttatatagacagtaggttacttgtacttaggtgtgtaaatggttcagcattgttgttcacaaggtccagcttggaccataagtctatgtagccatttggctcaggttcttatgtatataacaaatgaatcattctttttgggactaaaccgttgtagtctctgtgtatgttgtggtaatgtatgcttttggcttttaggttgtaataagagctttttagtaaaagctttatactatggtattcttttcatgattataatagaaacacaatgatttgcaat

SEQ ID NO: 102580 - DNA, 150 bp, Arabidopsis thaliana columbia
accacgcgtccgtagaatctttcggttaaatttcttttgtttctttttctttcgttcattctttttcaatatgtaaaatttccattactaatgtgggggtttgactggtgtagctcttttcttcttcgaatgtaatataaatgcgtttta

SEQ ID NO: 102581 - DNA, 354 bp, Arabidopsis thaliana columbia
tgagagagaagagatctaaaaaaatccacaattttgttcaaatcttggagttaaatgctgaattttaggccttgttgcttagatttatggcttaaagtttcaaacttttcattggatatgtgagaagaaaatgtcaggatctgagacgggtttaatggcggcgaccagagaatcaatgcaatttacaatggctctccaccagcagcagcaacacagtcaagctcaacctcagcagtctcagaacaggccattgtcattcggtggagacgacggaactgctctttacaagcagccgatgagattagtatcaccaccgcagcagtaccaacccaactcagctggtgagaattctgt

SEQ ID NO: 102582 - DNA, 405 bp, Arabidopsis thaliana columbia
ggcaagagcagtgaaagtgtaactcgaaagaagcttaaaactgatgatgttgttggcatgaatgtgtctcaaaagacaacgttgatcgtttgtccaccttctgtgatttcagcatggataacacagttagaggagcatactgtaccgggaatcttgaaggtgtatatgtatcatggtggcgaaaggacagacgatgttaatgagcttatgaagtatgacatagtgttgactacttacggcactttagctgttgaggaatcgtgggaagattctcctgtaaagaaaatggagtggctgagaataattcttgatgaggcacacaccattaagaatgcaaatgctcaacagagccgagtagtttgtaagttgaaggcttcccgcagatgggctgtcacaggaactcct

SEQ ID NO: 102583 - DNA, 347 bp, Arabidopsis thaliana columbia
attcagcttcacctggtgtttcaattagagggagagtaagaaagatggcaaagtggaaaccagatagtgataatgaaagtgatttggagtctgaagctgactctgctgacgattctaatgattctgatgatgagttcgagatatgtcagatatgcagtggggaagatgaaaggaagaagttgctccattgttctgaatgtgacaagctttttcatccggactgtgtggttcctccagttatagacttaccatctgaagcgtggatttgcttttcttgtaaggaaaagacagaggagtagattcaagcaagacgtctttacattgccgaattgcagaagatgtatgaa

SEQ ID NO: 102584 - DNA, 343 bp, Arabidopsis thaliana columbia
cggacgcgtgggttttaattttcctctctcttacacacacacatgataaaaagtgtttagagacagctcttctcttcttgttctcagtttgagagaaacaaaaccttccaatacaaccagagagtcgacgaagaagaaagaaaccatgtcccaacatcttcttcttctcattctcctctcgctacttcttcttcataaacccatttccgccactacaattattcaaaaattcaaagaagccccacagttttacaattctgcagattgccccttaatcgatgactccgagtccgacgatgacgtggtcgccaaaccaatcttctgctcacgtcgagctgtccac

SEQ ID NO: 102585 - DNA, 394 bp, Arabidopsis thaliana columbia
caagctctgatttttttcaattccgatggaggcgggagagcggcgcaatggcgattcgatgagtcacaatcaccgcgcaccgaagaagccacgtctcgctgggttattaaccgagtcagatatcgactctgagttcgctcaccaccagaccggtgttgccagaatcaacaacggtagcttcgggtgctgtcctggctccgttctcgaggcgcaacgcgagtggcagcttcgttatctccgtcagcctgatgagttctacttcaacggtctccgtcgtggacttctcgcttctcgaactgtgatcagtgacctaatcaacgccgatgatgttgatgaggtctctctcgttgataacgccaccactgctgctgctattgttcttcagaaagttgga

SEQ ID NO: 102586 - DNA, 346 bp, Arabidopsis thaliana columbia
tgaaaggcttctttttcctaatctcattgttgattgggttctcaagctcttacaggaaaaggagatctttgaaattttgcagctgctactccccattgtgtatggtgttttagagagtattgttctctctcagacatatgtacagagtcttgtagctattgctgtccgtttcattcaggaacctgctcctggtggatctgatcttgttgataactctcgaagagcttatactctatctgctctaattgagatggttcgctacttggtacttgctgcacccgacacatttgttgcttcagatttctttcctcttcctccttccgtagcagcatgtggacctaatgat

SEQ ID NO: 102587 - DNA, 310 bp, Arabidopsis thaliana columbia
cgaagaggcagcgtgctgcgcagagtttgatgaagaaagctattcaggagacgaggtataaggagagtgtgcgtgctgcgatttatcagaagagagcagctgcagagagtaagcggatggggattttggaagcggaaaggagaagagcgaatgcgagattgactcgggtgtttggtgctgctagttctgtgcggagtcaaaaggaagctgagagaaggaaaatgaatgaccgtttagaagagcggcttcaaagggcaaagaagctgaaagcgcaatatatgaggcgaaggagaggtatggatagttgttc

SEQ ID NO: 102588 - DNA, 414 bp, Arabidopsis thaliana columbia
catgacctccacaccggcattgatgtttgtgtaaagatcataaagaacaacaaagacttttttgatcaaagccttgatgagatcaaacttctcaagtatgtcaaccagcatgatcctgctgacaaatatcatctccttcgactgtatgactacttctacttccgggagcacctgttaatagtatgtgaacttctcaaggcaaacttgtatgagttccaaaagtttaatagggaatcagggggagaggtttatttcactatgccaagattgcagtcaattactatccagtgcttggaagcattgaactttctgcatggtctcggccttatacactgcgacttaaaacctgaaaacatactaatcaaaagctacagcagatgcgaaatcaaagttattgatctgggaagtagctgt

SEQ ID NO: 102589 - DNA, 221 bp, Arabidopsis thaliana columbia
tgtatgttctaaatatgtattgtagtgcatataaacaacacagaggatacaaaaaaagaaagagactttgttgtttgagagatggttttatcctctgtgttgtttatatgcactataagctttgtatgttctaaatatgtattgtagtgtcataacgaaatttttttgaatatttttatttattgtcttatagatgatgacgaatcggaatcatgtaatat

SEQ ID NO: 102590 - DNA, 339 bp, Arabidopsis thaliana columbia
tttaattttgtcttctcctattgactttttgagtttctcagaaaatccctagtatggggaagcaagaagatgcagagctcgtcatcatacctttccctttctccggacacattctcgcaacaatcgaactcgccaaacgtctcataagtcaagacaatcctcggatccacaccatcaccatcctctattggggattaccttttattcctcaagctgacacaatcgctttcctccgatccctagtcaaaaatgagcctcgtatccgtctcgttacgttgcccgaagtccaagaccctccaccaatggaactctttgtggaatttgccgaatcttacattc

SEQ ID NO: 102591 - DNA, 360 bp, Arabidopsis thaliana columbia
gtctctctgagcaccagaatctagggtttcttcacagtgaatctttttttttttttttgcttcctcctcaataatcgccttctcgtacttgtgtgaaagctcccttctttgtggagaaatggcaactgagaatcctattaggatatctggaagcaatgaaagatggtctaattctaggaaggtttctgttcctaatcgaagtggcagtgcgccaccgaacatggaggggtcttttctagctgtggataatctattgtcacgacagggcggctcagtttacaataacttgatgctaccgcgttacgggtttgaggagcccgtgaccactcatccttcttctaaacatagccttaaccgcat

SEQ ID NO: 102592 - DNA, 361 bp, Arabidopsis thaliana columbia
acgctgcacgaatcctgaatcggattagatgatctgaccaaaccttcgataattgattctctgatgttttgttataggtcttccctaatgttgattatatttttgtgtgattatataagagaggcctatgcagcccccacgtaagctcaataattattgagaggatattttatatacatgctaatctagtacacatatacaatctagtaacaataatactcaattcaattttacattcatactcaattacatacatacatacatacatacttactaacatcatcctttcataaatttaaaacaaaaaataaaaaatcttttggatattctttcgattaaaccactacagataatatatttg

SEQ ID NO: 102593 - DNA, 321 bp, Arabidopsis thaliana columbia
cacgtgaatgccttgatgtcgccagaatctaattatcttgctccattgcagccttcataagctctgctggctgtgaaacatcctgttgatgaattggaggaaggtcagttggaggaagaacaagtgatgcaggaagatgtaaaggaaggtctgttggtggaagaacaattgatgcaaggaccatgtatcaacacatctaagtgggggacaggtttgacttccccaaaggatgagttaatagctgtgaacgtttccaagactaatagatggaacaagagcagtttgacaccggagtgcgaggaagtaatggtgtctgaagaa

SEQ ID NO: 102594 - DNA, 400 bp, Arabidopsis thaliana columbia
agctgttccaattccaattccttctgaaatattcatcgcaattcgtatcggtaatttttccttttgatcgcattttttttttatctttgatcttccgtattaaacgtgctcgatctatatactcaatgatcttatatgtgtatgatcatgtaatttggaagttgaaatgtaaatcatctattccttggtaaattattcttcgattttttttctgatataggttaatggtaattcctgtgatttttactgatgtaatctggtgttgattgttgtgaattcttgatctatgagattatgtcttagatttgccaaatgttaagtttgtttgatctttgacaaaatattgtaggtttaaagtataacagcaatgggaggtggtaaagacaagcatcatgatgag

SEQ ID NO: 102595 - DNA, 307 bp, Arabidopsis thaliana columbia
acattttcccaaagtcttgagattttgaatctctctctttcacaagattctagttcgacccagattcattcatcaaatggactctcttcctgatgcgatccttcaatacattctttcctacctgacttctgcaagggatgtggctgcttgcaactgtgtctccaagcgatggaaagagtctacagactctgttaagagcgttgttttccacaggaattcattcgaaagcatcatggagactgatgattctgactccatcgttcggaagatgatctcttcttctcgtcgtcttgaggagcttgtggtg

SEQ ID NO: 102596 - DNA, 311 bp, Arabidopsis thaliana columbia
tggccacggcggagaaatcaccactagagctacttcaacaaaccaaagcctccgtcgaagcaatcatagcaaagatgctctccatcaagcaacaaggaacccctaaatccgagaatcgagaactcctcactcagatgtttctcaacttcatcaatcttcgtcaagcgaatcgctcgattcttatagaagaagagaaagtgagaacagaaacggaaatagcaaaatctccggtggatttcacgacgttggagcttcacaatctcatgtatgagaagagtcattacctcaaagctaataaagctagtagagat

SEQ ID NO: 102597 - DNA, 375 bp, Arabidopsis thaliana columbia
agaagctctctctcctcagaaatcaaaaaccctaaaaaccctttttgtagcgatgatggtagaaccgaatcagctcgttcaacatctcgaaacttttgttgacactaatcgttcctcttctcaacaggatgatagtcttaaagcaattgcttcttctttggagaatgattctttatctattacccaattggttagagagatggagatgtatttgacaacaaccgataacctcgttcgagcacgaggtattctcctgcttgcggagattctcgattgtttgaaagcaaagccgttgaacgatacaatagttcatacgctcgttggattcttttccgaaaagctggcagattggagagcgatgtgcggggcgcttgt

SEQ ID NO: 102598 - DNA, 367 bp, Arabidopsis thaliana columbia
atcagatgtggtatcagatcttccatcttttgaagttgcagagaccaataccgttgatagaagtggtggtatgttagagactcaaaatgtaggacctgaagagatctcagatgatgaaattgagcttcctgaaggaaaatcaacagattctcagaatgttgcacctgttcaagatcattcattatctgatgcagagagaatccaacgagagattgcagcaacgtctgtgcaggctgcgtttagaggttacttggctcggcgtgctttttgggcactcaaaggcataataaggctacaagcgcttatccgtggtcaccttgttaggagacaagctgttgcaactcttttctctgtcatgggaattgtc

SEQ ID NO: 102599 - DNA, 372 bp, Arabidopsis thaliana columbia
gttctgataagctttacactggaagtaaagatgagaccttgcgtgtttgggattgtgcttctggacagtgtacaggagtactcaaacttggtggggaaattggctgtgtgcttagtgaaggcccgtggctattagttggcatgccaaaccttgtcaaggcgtggaatattgaaaccaatgctgaccagagtctaagtggacctgttggccaagtctattctcttgttgtgggtactgatctgctctttgctggaacacaggatggctctattttggcatggagatataatgctgccactaactgttttgaaccatcagcgtcactgacgggccatacacttgcagttgttaccttatatgttggggcgaaca

SEQ ID NO: 102600 - DNA, 351 bp, Arabidopsis thaliana columbia
ggtgaacgcaatcccaaagcctatcaaggacatttgggacgaatggagcattcgaagtaccttaatcttcagtctcagccttcaaacatttctcattttctttgcacctcaaagaaaacgctcatccagaaaagttttactctctttcatttggtcagcttaccttcttgctgattggtctgccaatttcgccgccggacaaatctcagatagtcaaggagatgatccagaacccggagaaccgaaaaagagcgccgagttgtttgctttctgggttcctttcttgctcttgcatctcggtggtccagatacaatcactgcccttgcccttgaagataacgagctctggct

SEQ ID NO: 102601 - DNA, 378 bp, Arabidopsis thaliana columbia
cccacgcgtccgaaaaaaataaaaacttgtatttttgttttctgtgatctctctaatggagcaacagcaacaacaacaactaccttctactactactagacccaagcccaagctactaaaccggctcaatacctacgtcggttcgagccgggttggcaaacggttcaaactcgccgaacgtaattcaactttcacgacggagctccgtgctggtaccgccactttcttaaccatggcttatatcctcgccgtcaacgcttcaatcctttctgattccggtggtacttgctctgtttccgattgtatccctctatgctcaaacccagcgatcgaaccttcgcagtgtaccggaccgggtctccgattaatccaacccga

SEQ ID NO: 102602 - DNA, 384 bp, Arabidopsis thaliana columbia
gctctctgagcaagctgagcgttatgaagaaatggtggaatcaatgaaaagtgttgcgaaattgaatgttgatctgacggtggaagagaggaacttactctccttgaaccaatcacgttcttgtaacccacagagagtaagttcctctcttcgattgaacaaaaggaagcagtgaaagggaatgatgttaatgtaaagaggatcaaagagtatatggagaaggttgagttagagctttctaacatatgcattgatattatgtctgtcttagatgagcatctcattccttcggcttccgagggtgaatctactgtcttcttcaacaagatgaaaggtgactattaccgctatcttgctgagttcaaatcagggaacgagaggaaa

SEQ ID NO: 102603 - DNA, 374 bp, Arabidopsis thaliana columbia
gaaacgttttgtattcttctgcactttgtgtcttgctccttgctacagcgacacaatcttgcttgggcacttgaatggaaaccttcacaaggagagattggcatgtgctaggatcacacttcttggaacgaatccttggcctttcagtgatggtgtacttttctttgatagttcaactggagaagaagaagagaaatctccagtttctggtggtgaaggggttcctgatacgttggagcattgtagtgatgatgaaagatttgctattgtcaagtatgataacaacaaaacaaatggagataatgtgcctgctgcagttactgatgatgaacctagtcacgctgcagatgatctgctaatttctggtgtgctga

SEQ ID NO: 102604 - DNA, 137 bp, Arabidopsis thaliana columbia
atgcacaccaccacgagactcaggagacatggccaacgaaattcctatcaaagggattctcaagatcgacgctctaaaacagtacatcatggacacgtcagcgtatccaagagagcatgaacttgctcaaggaactt

SEQ ID NO: 102605 - DNA, 371 bp, Arabidopsis thaliana columbia
ccagtttgttgaggatctagctcctttggcggagttgaagcttgtgtctcttgatctgtatgagtgtcctgtgactaggcttaaggattatcgatctagggtttttgggttgattaaaactttgaagtatttagataagactgatgctgaagggaatgagaggcctgagtctgatgatgaagatgatgaggaagatgaagaggatgaagaagaagaagaggaaggtgatgaggaggatcctggaagtggggagattgatggagatgaaagagcagaggctcctcggatgagtaatggccatagtgaaagggtagatggtgttgttgatgttgatgaggatgaagagagtgatgctgaagatgatgagtcag

SEQ ID NO: 102606 - DNA, 208 bp, Arabidopsis thaliana columbia
cttgaacaattcatcatcatttattgtaggtattgagggtttctatatgtggtacaataaaactatttcaagaatttaaaataatatgtggaaaagctaagcggttagacaaaatattcatctgattgatgctatacattcaaatgtaatcgctcctatcctatgtacgtagtgattaacctcaaaaataatcagcttaagttgctgt

SEQ ID NO: 102607 - DNA, 374 bp, Arabidopsis thaliana columbia
cacacagaaaaggagtcggagagggtttttcgcctagggttttagaattcgatcttactcattcaaatttctcccttcagatttattcatctgttgagtaaaaccacaagggtttctctctaatgttgcccagattagctcgagtcgtcactcaaacctcaaagcttcgatctttgaccactaatggatcgatgaaaaatctctcctttttctcccgatatgggtacgcgactgttgcgccggcggcagctgatcctccgtcgcagaaggatttccccagtaaatctccgataaacttggataagatgttttggtcaaagccatgttcattggctctgcctaaagactctcctctcagaattgatgaaccagac

SEQ ID NO: 102608 - DNA, 342 bp, Arabidopsis thaliana columbia
gttcaacatattttctgctgacgcttctttaatgaagtagcacgaagaagtaaacaggacgacttttggccaccggaaaatttctctgttataaaaacgaaagtctgtgtcctcttaaacatttttgggatcatcaatcggtttttggtcaaccatgaatatgaatcaagttgcagagtatgtggaaactgatccaactggtcgctatggacgttttgcagaaattcttggaaggggagcgatgaagacagtgtacaaagcaatcgacgagaagctgggaatagaagtagcatggagccaggtgaagcttaaggaggttctgcgttcctctgttgatctaca

SEQ ID NO: 102609 - DNA, 229 bp, Arabidopsis thaliana columbia
gtccggctgcatcgatttaccggcctgttcttcagtttacagatagaatcacgtcaatgttgcgcaatgtgcattcccagcttgtgaatgatggaatgcgtacattcactgaaaactttgtgaatgagcatctgttaccgacaatgtttgtggactataagaaaggcgtacagcatgctatatcaaccgctgctgcaattcggccgcgtgcacatacaactacttacac

SEQ ID NO: 102610 - DNA, 410 bp, Arabidopsis thaliana columbia
cccaagtatcagggacaggataagcttccagttacagtttggatgatggctcaggcctcccaaggtgatatatcagtaggcttgtactcgtgggctcacaacttgttaccggtggtcagtagcaagagttgcaatcctcagtcaagggatctcattcttcagttggttgagaggatcttgtccaacccgaaggcccggaccatacttgtaaatggggctgttaggaagggagagcgattgattccacctccttcgtttgagatcttggttcgacttacattctctgcatcttccgcaagagtgaaggctacagagaggtttgaggcaatatatcccttgctgaaggaggtgtctcttgctggtgctcctgggagtaaggcaatgaagcaagtcacacagcaaatattcac

SEQ ID NO: 102611 - DNA, 268 bp, Arabidopsis thaliana columbia
actatcttctctgtaaagtcgtttctctctccaatttttttgttttcctgcgaaaatcaaagagactaacacagagagcttattcaattttctttcgatctgtgaaatcgcagattttgatttggaaagttgtggagatttcagctgttcttctttgttgttgggtctatttctgggtttcttcgagctgatttatagagtttggttctccgatgatagagctaatctgcttgagatagctactgtattgagagttcttctgaggatc

SEQ ID NO: 102612 - DNA, 363 bp, Arabidopsis thaliana columbia
agaaactctctctgttgtttgtttgttgacaaatctctcaaaaccatttgttttgcaatcgcagatccgtttttcttcgggtctcatcacaatgaatggcttctctgatcttaatccttctgagaggtacgctttgtctgatcatcaatgatgcttataataatctcatttatacatgatcttgcctctatatatttgttcatcttagtaatcttcggtctcagcttccattttcgtctcccactatgtttctaggattttgtgttacttttgttagaaaactgcgatttttgtgctagtgtttgtttctccaagatcaatggaactcgttgcctaaaattcctgattatagttacataaaca

SEQ ID NO: 102613 - DNA, 404 bp, Arabidopsis thaliana columbia
acccacgcgtccgttcgctcttcaatttatattttaccaaatcatcttctctctttctctatctctcaaaacaaaaagtaaccatgatcaagacaaagacgacgtcccttctctgtttccttctcacagccgttatactaatgaacccatcttcctcctcccccactgacaattacatatacgccgtttgttctccggctaaattctcccctagctccggctacgagacaaatcttaactccctcctctcttccttcgtcacctcaaccgcccaaacccgctacgccaacttcacagttcccaccgggaaaccggaaccaaccgttaccgtatacggtatttaccagtgccgcggcgacctagacccaaccgcctgctcgacgtgcgtatcaagcgccgtcgca

SEQ ID NO: 102614 - DNA, 407 bp, Arabidopsis thaliana columbia
atcaatgatgaagcaaatcgaagagaagcatcatgacactgcagcatcagtgttctgttgtctgtacagaaaggctccacctccacggtctctgtttctgtcacagaaaggaatgtttggcgttgtagcgcttctaggttcagttgcctccacgtcgctaagcagggttttgtctgaatatttggggaaagacacaatgctttctttggtgtgcaaatcatcacagtttggacccaaaagcgatgagtatcgcaagtttcaatctgaagcagctagcctcggacgatctatcaccaatcggtttcttgttatttgtcttgatgcaactagaccttggaggaacggacttgtgaggaatgatcctcagaagagattagccatggataacccttacctgccgaatggag

SEQ ID NO: 102615 - DNA, 407 bp, Arabidopsis thaliana columbia
ggaagatgaagttttctcatttcacactcaaattcaattccctttgttcgtgaggttgaatttcggttgcaaacatttgggtttgttgtaaattaaggttccgtttgtaaaagagattcctttttatttggggaaatcgaggagttcgtgtacggagctgagtttttgcctttttgatggttgcagataaggtctaaaatcttgaaggattcaaaaatttccgatgaatacacgttattccaatcagccggagttatcttctagtaatatcacgatcactatttcatcgtctgctttgttaagctcctcaccgcgaggcgataacagtcatgttgctgctgctaatggtcaagagaggtctccatcttcgttttatataaggctggctatgaaggtatctagagcta

SEQ ID NO: 102616 - DNA, 349 bp, Arabidopsis thaliana columbia
cctccaatctgaagtttctcggcaaccatatcagaaaaggctttgtcttcttcttcagttgtcagtttctccgccacataatctctacccgacacacttttatcttcccctcgttgctcctctactccacttccacctccggagataggtaacttcgtcgtcaacgtcgagaccccgataacgttggaggaagagtcggctgtttcagactatcttagtggtgtatctaattatcagtccaaagttactgatcccaccaaagaagaaactggaggagtaccggagattgctgagtcttttggtaatatggaagtgactgatgagtctcctgatcagaagccaggacaat

SEQ ID NO: 102617 - DNA, 312 bp, Arabidopsis thaliana columbia
acataactctcgtttttcgctttatcgattcttctttcgctcagtgcccaattcaacaggtttaaaccaatccgatgactagaggacgttgtggtggtggccctggtagaggcggtcgtggttttggtggccgcggaggaagtcctggttttggtccatgaggtcctggttttggcccaggacgtcctggttttggtccacgacgtcctggttttggtccacgaggtcctgattttggtggccggggcccgagaggtcctggttttggcacaagaggccctggtccttggagtggcccaagaagtcctcgtc

SEQ ID NO: 102618 - DNA, 328 bp, Arabidopsis thaliana columbia
  unsure (1)..(328): unsure at all n locations
cacaaacatctcaacanaagtagcagcttcctcaacaccatccctaattgttctctgcttccagacctaaacatgagctctgtatatctcaaaggaactcctccctgatttctcacagatgaaatctttaagagtcatcgacatgtcttggaaccacttcaccggtagcttcnctctctctatcttcaatctcactgacttagagtatctcaatttcaatgagaatccagagcttgatctatggactctaccggattctgtctctaagctgacaaagctcacacacatgctcttgatgacgtgtatgctccatggtaatatcccaaga

SEQ ID NO: 102619 - DNA, 416 bp, Arabidopsis thaliana columbia
ggcagccgaagatcccgagggccctttgcgatgtctcaaagcggcggtgacttcaacctctccgacgagattctcgccgtgattcccaccgacccttatgatcaactcgacctcgccaggaagatcacttccatggctatcgcttcaagggtttcgaatctggaatctcaagtctccggcttgagacagaagcttcttgagaaggatcggcttgttcatgaacttgaagacagagtctcttcctttgaaagactttaccatgaagctgactcgagtttgaagaatgttgtcgatgaaaatatgaaactgactcaagaacgagattcactggcaatcactgcgaagaaactcggtcgtgattatgcaaagttggaagcattcaagagacaattgatgcagtcattgaatgatgataa

SEQ ID NO: 102620 - DNA, 351 bp, Arabidopsis thaliana columbia
atgatgcaacagttgacgtggaacttgatgcagtggagaaatttgttcctcaatgcatggcgttttatcagaaggagcttgccttgtgtacagcttccaaagttagtactgagtttttatgctttgatattgatggtgacatagacccaatgttcaaggagtactggtgcaaaagattacacccaataaatgtatgtgaaaaggtttacagacaacctcccctacgtgaatcacttaagaagggtaaactgaaaaagcaagatcttgcaataaccaaacagaaggcgaatattcttcgttttgctgatttactacgcaagaggatccaatatgattgtcctggattcttac

SEQ ID NO: 102621 - DNA, 372 bp, Arabidopsis thaliana columbia
ctctcttctctctctctgtctgtgtgtgaagtgagaggatctttgtttggttctgcaatcataatttcgtgatatactaaaaaaaatgcaatttcctcttctctcttataagcagagaccctactactctttgatcgaattttccttgctctcttctctttgttctctcatgtttttttctccctaaatttatgggctttgctctctctctaagccacactcacactctaaagcactcgtctttcttcttctttttcttcagaaacagttattttgacttgaaaaaccagagctttaatcctggattcatggcaaaaagagcattacttttcttttcctctctcactttcttgtttcatttggcttaaaaat

SEQ ID NO: 102622 - DNA, 378 bp, Arabidopsis thaliana columbia
cagaccgagaagattaagcgtaagattctcaacgaatgttggagaaggaatctgatttgactgcaacggagaaaccaaataacaagcacgcggctgattcgttttccagcgaggatttggtctcacgcggagaaaccaaataacaagcacgcggagatcaattatttttattttcgtagaatctgattgaaatattaagaaaaaagagaaaaaagagaggaaaagagcaaagtaagtaggatagatggctagtgtccagcaaaatgggcaacggtttggcgtttcagaacctatctctatgggaggaccaacggagtttgatgtgatcaagacaagagagctcgagaagcacttgcaagatgttggattgtacgagag

SEQ ID NO: 102623 - DNA, 367 bp, Arabidopsis thaliana columbia
atatcactccatctgatatacagagcctcatagaagtaaatgtacttgttcaagatttcaacaaatggctactgcaaccagaggtagcagcggaccagtcacgctgtttgttgaaatcttgaacacgtacatttacttctttgagaaagggaatccacatatcactccatctgatatacagagcctcatagaattgatcaacaatgagatgcaaagcgacaacggtaacacgacaatccactcagatcccttctttacaagtacattgcgttacattaagttcataaaacagaaaggtggtttgatgggtgagaaatatgaccctatcaagctgtgacttaaatccgagacacaagcctcatcaaat

SEQ ID NO: 102624 - DNA, 373 bp, Arabidopsis thaliana columbia
taaatccataggaggaggaggatttttctgtaagtctgttctattcgctctttttctcctcgccttgccgttgttcccttctcaagctcctgatttcgtcggtgagactgtgctcactaagttctgggaactgattcatctcctattcgtcggcattgctgttgcttatggtttgtttagccgtaggaatgttgaatccgctgttgatttaaggatgactcgtgtagatgagtcttctttgtcttatgtatctagaatcttccaggtttcttctgtttttgacgaagagtttgatgataattcttgtgagtttgttgatgtgaggagtgatgagagtgtgagtgctcgagcttctgtggttgggaaatctgag

SEQ ID NO: 102625 - DNA, 352 bp, Arabidopsis thaliana columbia
  unsure (1)..(352): unsure at all n locations
ggaaagtctaaaggctttggatttgtcaattttgagaattctgatgatgcagccagagctgttgacgctctaaatggaaagacctttgacgacaangagtggtttgttgggaaggcccaaaagaagtccgagagggaaactgaactcaaacaaaagtttgagcaaagtttgaaggaggctgcagacaagtctcaagggtcgaacttatatgttaagaacttggatgagagcgtcacagatgataagctcagagaacattttgctccctttggaactattacatcatgcaaggtgatgcgtgaccccagtggagtgagtagaggatctggatttgtcgcattttcaactcctg

SEQ ID NO: 102626 - DNA, 408 bp, Arabidopsis thaliana columbia
ctctttggctccatctcttacagtaactgtctcttggaaccatttcctcttcactagtatcttctaacaatgtctgctactaggtcacagagatcatccacgatctcgccggctcgtcctcgtagatcgccggcgactattccgatgaaacgtccggaaactccttcttcctctcacttttctgcttctccggttacttcttctagtccattactacgttctagtcctagtccgtctacttcctccgccgccgcctctagtacggctgttgcttccacgaaactgaaggagaatattacagtcacgattcggtttcgtcctctcagtccacgagaggtcaataatggagatgagattgcgtggtatgcagatggagactatactattaggaatgagtataatccatct

SEQ ID NO: 102627 - DNA, 359 bp, Arabidopsis thaliana columbia
  unsure (1)..(359): unsure at all n locations
gttttgggtaaagtagacagaacaaaaattgctgaagtgtcagaagaaacagacacaaggattgaagatgaggatcaggagaaagatgatgagatgactgatgttgcggaagatgtgaaaacgcatggagactcctcagtagctgatattgaagagggaagggaaagtcaagaagagatgacagagacacaggaggacagtgttatggctgatgaagagcctgaggaagttgaggaagaaaataagagtgctggaggaaagangaaacgggggagaaatacaaagacagtcaaagggacaggaaagaagaaagaggaagatgtttgttttatgtgctttgatgggggtgatcttgtcct

SEQ ID NO: 102628 - DNA, 262 bp, Arabidopsis thaliana columbia
tattcccctcgatatacgatttgattttgtatgattttgatccctgcatcagagatttcgacatagtttgtggaatttggtttaatcgacgacaagcaataatgggacttgggttttcacgatagtgatggatgatccatcgaagaagactggaactttccaaaggattgatttagacactcatgtggctttccttcatacgacccagagatcgattctccttatccgaactcaggtatttgactgaccagctgagacagat

SEQ ID NO: 102629 - DNA, 355 bp, Arabidopsis thaliana columbia
accaggtccagacatagtaaggattgacagactgagagctcttccttgtcttcgctaaaaccaccccagcaagggaatcaaggtatctctgcaaataatcaagatccactcaactctttcggtgtaccaaaacagagccaaggaatgccatctttcaccagtgcttcataaactcgccgccatcatcgatattcacggggtccaagatcgaagctgaggatggttctccgcttgtgatcgagctcgtggacgccaccacaaacactctagttagtacgggaccgttctcgtcttctcgggtcgagctcgtgccgctgaacgctgatttcacggaagaaagctggaccgttgaggg

SEQ ID NO: 102630 - DNA, 351 bp, Arabidopsis thaliana columbia
actttatcatcgtatattcaacgttatggtagagttgaagaagatatcgccaagagatttatgaagcaaattggagctggtttggaaattattcatgataatcacattatccatagagacttgaaacctgagaatattttaattgacggatctggtgatgatttggtgttgaagattgccgattttagtcttgcaagaaaactacatccgggcaagtatcttgaaacagtgtgtggttctccgttttacatggctcctgaagttcttcagtttcagagatacaatgagaaggctgatatgtggagtgtacgagcaatccttttcgagctacttcacgggtatccaccattc

SEQ ID NO: 102631 - DNA, 255 bp, Arabidopsis thaliana columbia
acaaaagcatgagacttgtccaggacatcatggggggattagatcgcccaacagattatgtactgattaccgcagcattctagttgaacgcagttcctttacatcaccagtaaaggatcgtccgttggccttaggcaacgttaaatccaggatgctgccacctccgttgcagtctgcatttgtcagcccaacacggtccaacccatgaggtggaggagaaacttgtgcagaaactgggatcaatattttcttcac

SEQ ID NO: 102632 - DNA, 147 bp, Arabidopsis thaliana columbia
aatgggcctgaagtgctgagcaagtttgttggtgagacagaaaagaatgtaagagacttatttgctgatgctgagcaagaccagaggacccttggtgatgctagtgagttgcatgtcattatttttgatgagattgatgctatttgc

SEQ ID NO: 102633 - DNA, 300 bp, Arabidopsis thaliana columbia
cacgcgtcaaggacaatgcaagagaagagaacacacaaggaatagtgaacatggttctccgttgctgtgcaaacgccttacttggtgcccttgactatctcaacaagttcaccatcaactttgctgcaataacaggggaagcgtattgcacctctgcgaaaatgacttacgagctgttaatacgcaacctactgtcagctgtatttgtcgaaacggtttccaccagaatcctaaccgggaatagtctttgtcctgtcagccgcatatgcagtcgcgacatgggctgttctgagaggagtg

SEQ ID NO: 102634 - DNA, 351 bp, Arabidopsis thaliana columbia
acccacgagtccgcttcattgcctcttaagccccaattatgacaacaaacctcacgcgtactgtcttcttcgtcttgttcttcttcatctaccatgaaagctcttctctttcttcttacccttttcctcatcctcccaaacccaatctcagccattgatttcatcttcaacggcttcaatgactcatcatctaatgtctccctcttcgggatcgcaacaatcgaatcaaaaatcctaactttaacaaaccaaacatcgtttgcaactggtcgtgctctatacaacagaaccatccgtacaaaagatccaatcacatcctctgttttacctttctctacttctttcatcttc

SEQ ID NO: 102635 - DNA, 365 bp, Arabidopsis thaliana columbia
agccgacgccaaaattctgcttccggtatcagatattttcgtcgtcgagaagaagcatgagtttagaaaaatggcgacggaggcagctccgatggacgaaaaggcgaagagaatgagacatctaatgtcgagcttctacgcaccggatccttcaatctcgactagtggttcctccatcaacgcctctttcgagtaacatcaacagcacttcctttgatgctgatcagtacatggatctcatgatcaaaaagtcgaatttggaggtgcttctgcaaagacatgttcaaatggctgctgagattaacaatctcgacagagacttgcaaatgctagtctatgaaaattacaacaagtttatcagtgca

SEQ ID NO: 102636 - DNA, 263 bp, Arabidopsis thaliana columbia
agcggacgcgtgggcggacgcgtgggctgacgcgtgggcggacgcgtgggccatgcttggagctcttatgaaaagtatgcatgggggaaagatgagcttcagcctcggacaaaagatggcactgatagctttggtggccttggagcaactatggtagattctttagatacactctatatcatgggtctagatgagcagtttcaaaaagccagagagtgggttgcaagctcattggatttcgacaacgattatgacgccagtat

SEQ ID NO: 102637 - DNA, 411 bp, Arabidopsis thaliana columbia
agcccacgcgtccgcccacgcgtccgcccacgcgtccgtcttagcctaccctttttccttcctcctctccgattcttcctccgtcagtaaaagaaaatcaaaatggcttcacacattgttggatatccacgtatgggccctaagagagagctcaagtttgcattggcatctttctgggatggtaagagcactgctgaggatcttcagaaggtgtctgctgatctcaggtcatccatctggaaacagatgtctgccgctgggactaagttcatccctagcaacacctttgctcactacgaccaggttcttgacaccaccgccatgctcggtgctgttccacctaggtatggatacactggtggtgagatcggccttgatgtttacttctccatggctacaggaaatgcctct

SEQ ID NO: 102638 - DNA, 322 bp, Arabidopsis thaliana columbia
gagagaagaaagatagagaaaaaaaatgggaggcaaaggtgtgatgatggtggcgatactttgcctttgggcactctctgcaacatctgaagcagtaacagaggctgagccaggtttgatgatgaacttctacaaggacacgtgtcctcaggccgaagacatcgtccgtgaacaagtcaaactcctctacaaacgccacatgaacaccgctttctcttggctccgtaacatcttccatgactgcgccgttgagtcatgtgatgcgtcgcttttgctggattcgacaagaagagagctaggagagaaagaacacgacaggagc

SEQ ID NO: 102639 - DNA, 297 bp, Arabidopsis thaliana columbia
ctgtgaacctaaatcatggcgtagatacgaatgcacgggatcagaaagtttgcgactttcaaggaggaggttgatcggcttcccccggaaagcatcaccgccgtcaaggatagatcaccgccagctctatccacccctgcatgtgaccaacccatatcaaatgtttcgcctttatctcaactgatattccactttatgtctttgcaattacatgatccgctcttacgaaaaccttagtgaccaatctttgacgacttttgactgtcataacttaatgctacactttctgatcagatt

SEQ ID NO: 102640 - DNA, 403 bp, Arabidopsis thaliana columbia
acggacgcgtggggctgcacttgagagaggcttgtggtctacagcaactataaatattgaagttttgagaaccttaaatgtgattttctccaattttcctaagctccgtgcctcagaagctgctactttctgcatccctcatttggtaggggcgctcaaatctggtgttgaagacgtccagggattagtattggatattctttacttgctaagacactcctggacgaatatgtctatagatgttgcaaagtctcaagccatgattgcagctgaagcaattcccgtcctgcaaatgctgatgaaaacatgccctcctaggtttcacgacaaggcagatagcttattgcactgcttaccaggttgcttaacagtgaacgtcatgcgtgccaataacttaaagcag

SEQ ID NO: 102641 - DNA, 240 bp, Arabidopsis thaliana columbia
ctcatcgtctccgtcactcttatacagctctctgaatttcggtatcggttttgatcggcaagttggaatgttcataagctttggatcgacgtcggagactcttagcaaagcttcacctgggttgcttcggatcggcactgacactcatctttatgactgatacggaagacgtcaacattgctccacttctcgatagcaagttcgagtctgacaaatgtgaagctcttaagcgtctccttg

SEQ ID NO: 102642 - DNA, 375 bp, Arabidopsis thaliana columbia
acacacttctaaactttagcctcacaatattcttctctctgtctctctctaagtcatctctttgaacatcagggattaattactgtaattgaagctcacatcatggaccatcatcagtatcatcatcatgatcaataccaacatcagatgatgactagtactaacaataattcctataacaccatcgtcacaacacaaccaccatcaacaacaacaacaatggattcaacaacagcaataactatgataatggatgacgataagaagttgatgacgacaatgagcactaggccgcatgaaccaagagactgtccaagatgcaactcaagcaacaccaagttttgttattacaagaactacagcttagcacagcct

SEQ ID NO: 102643 - DNA, 396 bp, Arabidopsis thaliana columbia
ggataatggagggagcgtgttgtcgctctctgctccacacttcccttactccgccaccattctccgacgtcactctccggtggcttccatatctttctcccttaagcaaccaccaccgcaaccaccagaacctcctgagagtcctcctgacctccgccgcccggagaaatctattggttcttcttcatcttcttcctctccttcccctatcccttctcctaaaacccctcttaagattaatccactcaagggtttaaccaatcgctcttctgtgtctcctcttgttcaatcagaggtttcgagtaaagtttcttcctttggctcctctctagcatccaagctacgtttgtccagcaagctctctcctcctcctcctcctccacctccgcctcctgt

SEQ ID NO: 102644 - DNA, 378 bp, Arabidopsis thaliana columbia
ccttaataggactagtatatataaaacataacgaaatgggtatgagcacacttcttggttgtcgtgtcctcatagtctctatggtcgcacaggcctcatccgccagtcttacggtgaattggtcccttgggatcgactacactccgctcaccactggagataccttctctgtccgagatagcatagtgttcaattatggtgcgggtcacacggtggctgatgtgagcgagaacgactacaatagttgcactctagggaactccattacgtccgacagcagcggtaccacgaccatagctctcacgatcactggtcctcgcgacttcatctgtggcatccccggtcattgcgctgccggtatgaagctcgcagtcaccg

SEQ ID NO: 102645 - DNA, 394 bp, Arabidopsis thaliana columbia
agctacgatgaaggaaaacgtacggcatagacgttgaccatggactatcaccgaggtgccaatgttgaggtcagaattgctaggatcttcaacacctatggtccaagaatgtgtatagatgatgggcgtgttgttagtaacttcgttgcacaggcactaacgaaagagccattgactgtttacggtgatgggaagcacacaaggagtttccaatttgtttctgatctggttgaaggtttgatgagactgatggattctcgaacaccgcttcaaccaagaattccgtggccctcctaggcgtcaactcattaccatcttctggatagtttcgcagttcttaacactagagcccgagtttaccttttaaaccttattttccttctcctcttcactg

SEQ ID NO: 102646 - DNA, 352 bp, Arabidopsis thaliana columbia
agttccttctctctgcgctttcactggagaatacctatgcaagtcccaattacagagaagcactctcaaagtcattactctttttccaaggtcagcggtctggtcgcctccctagtgaccaacaactctcatggaggtctagctctggcctctctgatggctcatctgctcacgtggacttgaccggaggctactatgatgctggggacaatgtgaagttcaatttcccgatggcgttcaccacaaccatgctttcctggagctctttggagtacggtaagaagatgggacccgagctccagaactcccgtgtggccatccgttgggccacggattatctactgaaatgtgc

SEQ ID NO: 102647 - DNA, 213 bp, Arabidopsis thaliana columbia
ccgagagagggagagagaggggaagatgaacgctacatttaccgcatcggcgttccaactcgcagacgaactcagcgagacagatacctagatccacacatggtttcgcattgaattctgttcgacactcctttcttgtcctttcttttgttctttcgtttcacgagaactttcgttggttccctccgatttggccatgctggtgaagatatg

SEQ ID NO: 102648 - DNA, 371 bp, Arabidopsis thaliana columbia
ctcatccagataagaagaaggatgtgccaaagcctgtggttgaagaagttgtggttaaggatgatcaagaacatgaagaggcggcatctgacgattctgatcagtctaataaggaagatggagaagaaggaactgagtcagatggcaatgaaggagaatctgatggaaatggagatggaagtgtggatgattcaagtgcatcagttgatgaagaagtggaagaaaagaatgaggaagtaactgtaaacgagataagtaagaagaggaagatgaaaggtccggtgtttgatcctaaagctgagtatagctggagattgtgtaacactaggagcaagcacaattacatgccatgtattgataatgatgggtta

SEQ ID NO: 102649 - DNA, 372 bp, Arabidopsis thaliana columbia
  unsure (1)..(372): unsure at all n locations
aaagacaaagcctttttctctatatatatatatatatctctctatctttcgccattttggtttttgcttctctctgtgtgtgagtgattatgatgatgggattatctttctaaagctttttgttttcctgaaaaattaaaaaagaaaacttttatggttcttcatctcttctgtgttggagttgagagaccaataaatgctgttagtaatggttagttgagatgagaggtaaaaagatcccgtagtccgaggagtgtttggtttcttgcaaaaggatagtgaggcaaaacatgggtttggtttctcttgtctcctttcattcatcccttttccattaatggtctctcnctcttccaacaccaacctcttctt

SEQ ID NO: 102650 - DNA, 392 bp, Arabidopsis thaliana columbia
aacttctctctcttatctcgtctacttgatctctctactctctttcctctctagctacttctctcccttacgtctccaaggagatagattgacaaattctgttcacaaaggaaaaaagttcctctgcatacgtctctctctctatgttcttcatttatatgacttgaataacaagtaaaggatgaggcagaatctgaaaaaagtagcacagatcaaagtagacgaatctaagaagctatttccttatgtcttccgggttaaaacttcttgtgggaattgcgctaagagatcgaagcctaagcttatctatcttcttatcttctctcttatctcaagttgctttgtctttgctcctcagctcctctgtttcccttacccctctgctctgtttc

SEQ ID NO: 102651 - DNA, 387 bp, Arabidopsis thaliana columbia
accacgagtccgaattgatgaacgcaaagataatgctgatatgacaagtgatcttacgggaacaattgaatctgctgattcagcaatcccaaatagtcccactgaagatgctgctccaggtgaagttgaaccgttggatcataatgctctttttgatccaacttctgatattaccaactttattgatttcagtggtgtatcatcttggtcaggaaatatacaagaccttaaaaccgaaaccgggaatgtatctttgaaagaggataagaaagttactgacatggcagaggacgttgtcacagcagatatagaaactgaatcgaatgaagcccgtgttggtgttggggcagaatctccagctgctgcaactgattgttcaaaagagac

SEQ ID NO: 102652 - DNA, 249 bp, Arabidopsis thaliana columbia
atccagaagtacttggactttttgagcctacagtaaaaccatttggctcgtctttttcatatcagctcacactcttccgggttcttagaatcacggactgtgatctcctgaaaagcattgaataccttaacgctcttacaatgctaaatactcttcaagtttctggtgctagctccctgagcacaatatctgaaaaattcattgagtcatttcctgaactccgaagtcttcaactctctgggcttaaga

SEQ ID NO: 102653 - DNA, 378 bp, Arabidopsis thaliana columbia
aaaactgctgggggaaaagctagcgccaacagctctactgccaaaaatcaaaagaaggatcaatccatcaccaagaagggtcaaggaagagggaagggaaaagcttcttcaaagaaaagtttttcatcgtatatgatggttgactccaacattctatggtctgacattcaggaatttgccaaagcgaaatatgagtttgagttgcccgagctatcaagaactaccgctaaaaaagtatctgttcttcgtaatctttgccaaaaggttcgtgtcagtattgctgctcgcaaatacgacttcagtgcaaacacgccttttgagacgtcagatattttggatcttcggcccgtaattaagcactccgtccctgtatgctct

SEQ ID NO: 102654 - DNA, 360 bp, Arabidopsis thaliana columbia
  unsure (1)..(360): unsure at all n locations
atctccatggatgatctaccaacccatgtaacagcaccaactatactaaggtcagtatctacacgaataggtcttttcatgataatcctatccactgaagcagtcaccaaaatcatcgatctcgcactgctgtcaccaccacaatgctgtttcagtaaaagcacacataacaaagttatattcaaatactcaggatgcaaacaaataagaaggcaagagccaaaaacaagaaccttgaaggagatggttccagcaagagcgtcaagatcttcaaccaatttaccagtacgaatctcattccaaggattcctatattgttctcgaagaacanaatcagaagaaaacttatagagaattgac

SEQ ID NO: 102655 - DNA, 346 bp, Arabidopsis thaliana columbia
aaattattttccaggacctgcagagaacaaactctgttgctgttaccgtgaacaatcttctccagatgtgatgatagtttgtgtaaaatatactaagcacttccatttcaaccttaggtatagattaatgattggggacatatccttatccgtaagttttacacaccacccaacattccaagcttcacccgctgtagatataaggcactgtgtatcactttttgctatatagaagaagaggctctagtgtatagcttctgttcattgctctcttgcgaaaataagttcggatatttacataaggtgatgatgccctgctggtctggagatatcttgttgcagtctg

SEQ ID NO: 102656 - DNA, 318 bp, Arabidopsis thaliana columbia
  unsure (1)..(318): unsure at all n locations
atgaaaaagcaaagatcaaatgtcacatttgtggcaatctttgaatcacagtcatcattgtcatcatcaagctcaggggaggtatattcagatggcacctcttcgtggacttctaattataacagcgcggaggaggagcatgacaacgacttggactctgtataaattcaaaggcccccataattgtctatgggtaccagagcggacgcgtgggatattcctcaagtttgtgaatgattgtcggcaaattgggattagttgtcncattgttcctggaattatgcctattaataactacagaggctttttgcgtatgac

SEQ ID NO: 102657 - DNA, 269 bp, Arabidopsis thaliana columbia
taagccggcctgattttccagaagacgagtttcggcgagagttccgtatgagcaaatcgacgtttaacctaatatgcgaggagctagatacgacggtgacgaagaaaaacacgatgttaagagacgcgattccagctccaaaacgcgtaggcgtttgcgtttggcgtttggcgacaggagctccgcttcgccacgtgtcggagcgtttcggtctgggaatctcaacttgccacaaactagtcatcgaagtctgccgcgcgatctacgac

SEQ ID NO: 102658 - DNA, 400 bp, Arabidopsis thaliana columbia
cggacgcgtgggctaaatctctctctgttgttaccttcccatgggatggtcactaagaactctcataagagcaatctgggcatgacaaagtccatgaatttctttcagaacatcattaaacctttcaaacgcagctccaatcgaggtcttgaagatgatattgagcgaattgctgctatggagcaaaaagttttcccatttcaagttttagtttccgctaccaaagattttcacccgacccataaactcggtgaaggtggtttcggtcccgtcttcaagggaagattacctgacgggagagacatagcagtgaagaagctatctcaggtttcaaggcaaggcaaaaacgagtttgtgaacgaggctaagttgttggctaaagttcagcatcgcaatgttg

SEQ ID NO: 102659 - DNA, 386 bp, Arabidopsis thaliana columbia
caattcaggaagttttgtgggacaatcctcccataccagagaaccaagcaacatgcgctttattttactctatttcttcaactcagcctggcttagctgggataaacctcggaaaatttctgatcaaacgagtgattacgttggtgaaaaaagacatgccacatgtttctacatttgcaacacttagccccattcctggattcatgcaatggctcctctcgaagttatcatctcagtcaagatttgctgaagatgagcgtggtacacagagcaattcgccttcatctacgtttagtgagaaagtattactaccagaagaggaacatgccctcatgactctatcagatgaatcttcatccggtagcaacggtatggaagttctgttg

SEQ ID NO: 102660 - DNA, 354 bp, Arabidopsis thaliana columbia
cccacgcgtccgaaaaacctcttcttcttcttctctctctctatccattttcactaattagcgattaaaaaggattctttttgtgtgtattaattatcgcttaaatcttaaataattctcctaatcgtctctgcacgttggtgatggtgtttagttgtcaattctacatctcgaggaaatccagaaacagctcactgatctatcgaaacagttttttttctttttacagagtcaatagaacaaaaccagataacagagatagtgacaaaccatccgtgacctcctctgtttttatcctaatctctctgctttctctttcacgtgattgaattctttttctttgttagacattgc

SEQ ID NO: 102661 - DNA, 263 bp, Arabidopsis thaliana columbia
aaaggtcataacgctcagacgaattttctcactcctcctcctagtccgacgactgaggtgttaccggaaactccggtgattgaccttgaaactgtctctggttgtgattcggcgagggaatcgcaaatcagtctgtgttctccgacttctgttctccggtttagtcacaacgacgaaacagagtacagaacatagccaacggaagaacaaaatccgtttttcttgcctggatttgtttcgctccggagattatttttgggatt

SEQ ID NO: 102662 - DNA, 215 bp, Arabidopsis thaliana columbia
atcgaaccttccaataaaaccctatggatttctcttacacgcatgtatttgtctccatcacacctacttgattgatctgatcatcagatacttgcagcccccaataattcactatctctctctcttactcttttgttacaattctgttaacaaactttgacgtcaccatttgaattcttatccaattcccatttcctaagagaatttttcctctt

SEQ ID NO: 102663 - DNA, 428 bp, Arabidopsis thaliana columbia
tctaaatctctaatcttttgaaaccctaaatcaaagttttgtttttttttatcaactggggaagaagaaaggtgtaacctttatataaccatggattccggtgacgcgacatctttgcttttgacgaaaattcgaagcttggagccagattatgctcctaagattattgggtatttgcttttacatgattttggtgatagagacttgatgcatctggctcgtggacctgaatcgattttgcagtcgactatttcgaaagtgaagagtctcttggggattttctccaacaactcgccttcttctactccgacgtctccttctccgttgaatcctatctgtcgtcctcctcttaacggaagaggaagctctcactccaatgggtttatggatttccgtagaaactctccgtcttctccttcttctacctc

SEQ ID NO: 102664 - DNA, 338 bp, Arabidopsis thaliana columbia
cagcaactcagtagtcagcgggggaataaataaagtcaaagatggttctaatgggacatgctcgaagaaaagcacaccaggtggtctgatatatcctaatcagatcagcatgtctgctcacgcgagtgcaaataaggtcggcagacctgggaagaaaagcaaagtttttatggaagctgctgctaatggatttgttgagaaccctctgagatctgtttcagtatcaaagacagcgaatacagatgccaaaatggatcaggattacaaacttcatatccaaagttcaactagacgttggtctgctgcatcagtattggatacacggaagcccttaattc

SEQ ID NO: 102665 - DNA, 301 bp, Arabidopsis thaliana columbia
agtactgagagaagaacgatagagaaaaaaaatgggaggcaaaggtgtgatgatggtggcgatactttgcctttgggcactctctgcaacatctgaagcagtaacagaggctgagccaggtttgatgatgaacttctacaaggacacgtgtcctcaggccgaagacatcgtccgtgaacaagtcaaactcctctacaaacgccacaagaacaccgctttctcttggctccgtaacatcttccatgactgcgccgttgagtcatgtgatgcgtcgcttttgctggattcgacaagaagagag

SEQ ID NO: 102666 - DNA, 210 bp, Arabidopsis thaliana columbia
ccttctctgtctctcctctgcatctcctctgttcctcacgtttctctgctcatggctgcttatggtcaaatctcctcgggaatgactgtagatactcatgttctctcttcctccagaaacattggagtttccctatcacctctccggagaacactaatcggcgccggagttatgtctactagtatctctctccgtcaatgttctctctcc

SEQ ID NO: 102667 - DNA, 347 bp, Arabidopsis thaliana columbia
agtcaactccaagaacaaaaagcacctctgctctgttttgagatccaaccacagttcaaactaatcaaaagtcccaatttctaacttcagtctaggctttttctctccatggatccttgattctgagatcaaccaatcgaaagaaaccaaaatgggcttcaacgttgttgtgttcttgagttgtctgcttctacttcctcctgttacttttggtagcaacatggaacgaaccaccttggttatagacggctcacgtcgaatcgctgagaccgatgagaactttatctgcgcaacgcttgattggtggccacctgaaaaatgcaactatgatcaatgtccttggggtt

SEQ ID NO: 102668 - DNA, 333 bp, Arabidopsis thaliana columbia
tctatgcagatgccgatgtgcgtctagcgagaaggataaaacgcgatactgttgagaagggcagagatattgccactgttcttgaccagtactcaaagtttgtgaagccagcatttgaggatttcatactcccaacaaagaaatacgcagatataataattccccgaggtggtgataaccatgttgctattgatttgattgtgcaacacatccatacgaagctcggtcaacatgatctctgtaaaatttatccaaatctttatgttattcaatcaacttttcagatacgtggtatgcacactctaatccgcgactctaaaacaacaaagcatg

SEQ ID NO: 102669 - DNA, 362 bp, Arabidopsis thaliana columbia
acccacgcgtccggaaagacagagataatgaacgagagttggccagaaagattccccggcaaaagaaaaacctccgccggcaactaaaaaacgatttttgactccgggaaaattcgtgacaatcttgtgtaccattaacttgataaattacgttgatcgaggagtgatcgcgagtaatggtgttaatggaagctcaaaagtatgtgatgccaaaggggtttgctctgcaggaactggaattcagggagagtttaacttaactaactttgaagatggtcttttgtcatctgcgtttatggctggacttcttgtggcttctccaatattcgctggattgtcaaaaagattcaacccttttaaac

SEQ ID NO: 102670 - DNA, 362 bp, Arabidopsis thaliana columbia
atctaagacgcccaatgctcctgccaaaaccaaaaccggtgcaggcatgccatgttctctctgtcctcatcccacatgccaacactctgtcagaaaccaaggagtctgcgcttgtccagagtgtgaaggcacgctcgtcttggacccggttagcttccccaagtggaaactcaactgcaacttgtgtagttgtatcgttttgcttccggaaggtgctcatcgcatcaccaccactagtaaccgctgtcccgagtgtgattcagccatcatagagatcgatttcaacaagaaaactactcctctggagaacggagccactctgcatcaaggatgtgttctatgtgacgagttgcttctctcac

SEQ ID NO: 102671 - DNA, 345 bp, Arabidopsis thaliana columbia
cccacgcgtccgcggacgcgtgggggagtctcttatgttgggtgaagaacgcagacgcggaaactacaccagagacgtagacgcggacgcagatgaaggtgttaactctccctcttcttttccaaactcccctgatgattcggaccgtcgcagttcttcttcttcttcaaggagaggattgtcgaaacattacaaaggtaaatcacaatcgttcacaacgttggcagaagcgctaactgtggaagatctcgcgaagcctgagaatccattcaacgcaaagctgaagcagcgacgagagagccctcactgtcgtagattatcaggatgcggcggcgcatccgagcg

SEQ ID NO: 102672 - DNA, 193 bp, Arabidopsis thaliana columbia
gtttctctcgacttcactaaaccttgcgctactcacacgcatcactctctcttctcagattcctctaaccatggccaccactgtcaacaaaccagttcgtgtcgcagctgcgcagatgacatcggtcaatgatgtaatgaccaacttcgccacttgctctcgtctcgttcacgaagcagcattggctggtgca

SEQ ID NO: 102673 - DNA, 362 bp, Arabidopsis thaliana columbia
ctctcagtgaacaaatttggctatggctttttctgcaccatcactttccaaattctctcttttggttgccatttcagcatcagctctcctctgttgtgcttttgcccgtgatttctccattgttggatacacgccggagcatttgacaaacactgacaagcttctagagctcttcgagtcatggatgtcagaacacagcaaggcttacaaaagcgtggaggagaaggtgcacaggtttgaggttttcagagagaatctgatgcatatagaccagaggaacaatgagatcaacagttactggctcggtttgaacgagtttgcggatttgacccatgaagagttcaaaggaagatatctaggac

SEQ ID NO: 102674 - DNA, 267 bp, Arabidopsis thaliana columbia
gaagatcatgagcactactgcacacaagcaatcgcaacctagaacggagttcaccacgatggatcgattaactacggtggatactcagaccatatcgtcgtctatgaacgttacgctgtcaaaattccacacacattgcctctgagtttcggccgcaactttgctttgtgcaggcatctcgatgtacagtcccatgaagtacttcggattgaccggaccggataaacatgtcggaatcgtggggctacgtggtcttggacacattgg

SEQ ID NO: 102675 - DNA, 387 bp, Arabidopsis thaliana columbia
gatgttctgtgcagtgataaaacaggtactctcacgctcaacaagctttctgtggataagaatctgatcgaggtttttaagaggggcatcgacagagatatggcggtgcttatggctgcaagagctgcacgtttagagaaccaagatgctattgatactgcaattgtttcgatgttgtcagacccgaaagaggcacgtgccgggattaaagaactccattttcttccattcagtccagctaatagaagaactgcactaacgtacctagacggagaaggcaaaatgcaccgagtgagcaaaggcgcgcctgaagagattttggatatggcccacaacaaattagaaatcaaggagaaagtacatgctacaatcgacaaatttgcagaa

SEQ ID NO: 102676 - DNA, 387 bp, Arabidopsis thaliana columbia
cggacgcgtgggatttagttttcatattacttgacaaacctgatgagctactcgacaagcaagtctcagagcatattatgtcgcttcattctgcaagtggagaaacatcacctgcactaaagaagtttaaaccaacatcacagaatgctgggtatgcaaacatgcatgcagaagggaattctctactttcaagactgcggttggactctgagaaagatgacgacttttctccggttcctggccaattgcttaggaaatatatttcctatgcacggaattttgtcaatcctaagatgtcaaaggatgctggagagatcatacagaagttttacttgaagctgagagaccataacacatctgctgattccacaccaataacagcaagac

SEQ ID NO: 102677 - DNA, 314 bp, Arabidopsis thaliana columbia
gcatttacacctatagagtttcctttccctgctcaagtggctcaagtctcagccacacagaaccattctgctttcgtattgcaatctggacaggttctcacttgtggggataattcatcgcattgctgtggtcatttacatactagccgtccaatatttaggcctaagcttgttgaggctttgaaggggactccttgtaagcaggtggctgctgggcttcactttactgtgtttctatcaagggaagggcatgcatatacttgtggatcaaatacacatgggcagcttggtcatggagataccttggacagacc

SEQ ID NO: 102678 - DNA, 109 bp, Arabidopsis thaliana columbia
tcaagtttctcgagccgattccagacgattttctttcggcttttcacgcgttgtcggctcgaaagtgcgattggctgaagcatttttctcgggaaggggttgagtgtgc

SEQ ID NO: 102679 - DNA, 261 bp, Arabidopsis thaliana columbia
gctttcagaatcttcattacgtatagcggcatgaggagcacaccattgcacactcaatacagacttcgtacaagaaatccaagttatatctgtggcctgggccatccacgacgggaatgattgctcggagagttgtcaatacagtcttgctcctaacaaggttcaacactaccagatcaaaggtgattggttcaaggaagtcatacagcaccgttaaggcagtgttgaaggccttgaatgcggtccatacaccaaacgatg

SEQ ID NO: 102680 - DNA, 380 bp, Arabidopsis thaliana columbia
gatcgcgccaagattgaagctggaaagctggagttggcatcagtaccatttgatatccgttcaatattggatgatgtcctttctctattctctgaggagtcaaggaacaaaagcattgagctcgcggttttcgtttcagacaaagtaccagagatagtcaaaggagattcagggagatttagacagataatcataaaccttgttggaaattcggttaaattcacagagaaaggacatatctttgttaaagtccatcttgcggaacaatcaaaagatgaatctgaaccgaaaaatgcattgaatggtggagtgtctgaagaaatgatcgttgtttccaaacagtcaagttacaacacattgagcggttacgaagctgctga

SEQ ID NO: 102681 - DNA, 259 bp, Arabidopsis thaliana columbia
acatggcatagctaaaggagaaactcatcattccttctcattcgaaaccaacttctcagtcagaaggtatcgcagaacaggcctaaacgtcgagtctgggacaggctatctttgcaagtggaaccccaattgcgccattagagtatcaaggaaagacgtttgtgcctggacaggcgaacaacgcatacatcgtccctgggtttggactcgggctaacaatgtcaaggacgatccgtgtccatgatgacaagcttctggc

SEQ ID NO: 102682 - DNA, 203 bp, Arabidopsis thaliana columbia
cccacgcgtccggtctcatctcaccatctctctcttcttcttttttttggttacccagaagagattcacttctatctccaacaatttcgtattctctcataatattcagttttaaatcgaataaaactcgcgtcaatttcgcctctttctttctgggtatatattcttttctgcttttctttttttgtttcttgggttcgagc

SEQ ID NO: 102683 - DNA, 162 bp, Arabidopsis thaliana columbia
agtttcttttctcactcggttctaaagttcctagttttcaatggattacgtgagaacccaagtcgaagctgtttttgatgattctgaccaagatggatcaaccatctctgaatctggaagctgcgattcttcttctgatcgatcttttgctgacgagcttgg

SEQ ID NO: 102684 - DNA, 273 bp, Arabidopsis thaliana columbia
cccacgcgtccggcaactgtggctcggtcgactttagatcggtctcttcttgcaatgactacaataaacaaaaaggtttcgacacgaagagcttgaagagctctaatcttgttgtgcccttgacggattcgcactctgctgttgtttcttctcagccaagaaaccgtggaggtagagtaatgtcttggttattccctaagttaaagaagaaacataagagtaattcgatctttaattcacctagtataactgagaagtcagaggaagtttctg

SEQ ID NO: 102685 - DNA, 327 bp, Arabidopsis thaliana columbia
cttcgtctttgattttgggaatactgagggaagaagaaatgcatatcgagctatcgtgcaagcaaggcctcctcacttaaacaatatttacctagcaactcagaggccggaacagcttttgagaagaactcagttaatggagcgctgggctagatgggagatcagcaattttgaatacttaatgcagcttaacacgttggctggccgtagttacaatgacattactcagtatcctgttttcccgtggattatttctgacaacagttcagaaagtctggacctttcaaatccatctaccttcagagatctttccaagccaattggtgc

SEQ ID NO: 102686 - DNA, 332 bp, Arabidopsis thaliana columbia
tgcatctgttaaaaaagtttgaattatttgatcataaaatgttatgttcataactttgattatattttctaatgtatttttgctaaaagagtttaaagttaatcacttggagatgaaagttagtaactttagtggatcaatctcttttttcttctttgcaggggatattacagatgtagtagctcaaaaggatgtccggcgaggaagcaggtggagagaagccgtgtggacccttctaagcttatgattacttacgcctgcgaccacaatcaccctttcccttcctcctccgctaacaccaaatcgcaccaccgctcctccgtcgtcctcaa

SEQ ID NO: 102687 - DNA, 214 bp, Arabidopsis thaliana columbia
atttgtatggcaggaagaacaaaacaaatgacatggcagtactgccagcaacagtgttacatcattgggattttaatcgttatccagtttctcaattggcaaaatcatatctaaactccatacacgagcagcctaggctttgtgtcagtggggtcaacccttttttgtcctcaaaagtccctgcagtcaaccatattatgagcatccggaaaag

SEQ ID NO: 102688 - DNA, 229 bp, Arabidopsis thaliana columbia
tctagatcgcgagcggccgccctttttttttttttttaatgctaacaaatgttttttcgctctcaaaatagattgaggagatacaatccaacccaaacaaaaaaagttacgtatcacgcatatgtaattgaaaacacatacattaattggcaagacaaccgaaagataaccattatccatacttgtgaaaagtgatggatcaaacttggtaattgggatctcccttttg

SEQ ID NO: 102689 - DNA, 174 bp, Arabidopsis thaliana columbia
gtatatccgacgaagcagcaaatgggttacaaacagcgattcgatagtctctgggtttttcttcatgtttctcgattcggaatatgcacggccgatgcttctacttctagcgatttggtcacgattttcacactcccttcacgtcgatctacacacaggtcacacagagtgtat

SEQ ID NO: 102690 - DNA, 356 bp, Arabidopsis thaliana columbia
gtgactcaccgctccctgaacctggcttgctctccacgagccagcaacatcgagttcttattgatcattctttggaggcaagtcacaatagcaagcgttcaagaaaatcaaggagattgggcggttctgatttgaggattggtgtgagccttggatcgtctcataggaatatagaggctgagcaggcggctgctggttggccagcttggctttgttctgctgcggctgaggctgtccatggttgggttcctctaaaggcagaggcgttccagaagttggagaagattggacaaggaacatatagtagcgtgtttcgagcacgtgaagtagaaacgggaaagatggtggcattgaag

SEQ ID NO: 102691 - DNA, 332 bp, Arabidopsis thaliana columbia
agttctagatcgcgagcggccgccctttttttttttttttttttttttttttttttttttttttttttttttttaatggagacatactataaaccccaaactcaacacgataccataaaaatacaaaaacaaaaacaaaaaacaaaagatgggacattgtcgctgtttaaaaccagaaacttatttttcctacaactatgacagaatcaaacacaaaactgtacttctctctctctctctctctctctctttcgcttcttcttctcctactcttggtctcagcatattaataaaactggctatgactttggcttttaccctttccctttttc

SEQ ID NO: 102692 - DNA, 295 bp, Arabidopsis thaliana columbia
cccactcgtccgcggacgcgtggggtcgcatctcacggtgagatgagttcttcgtagctccaatggtggtggtggcttcacaatgtcgacttcttcttctttccctcgaaccatcgtctcctacactgtgacaacttcgctcttcatcgttatcttcctatgcagcgtcgtcttcttcactagacgcactctcgaaccttctctctctccttagcacaccgccgacatccctctcgccgccgtcgatctaccacctcctacgcctctcctccctcaaatcgagcctcacgatggt

SEQ ID NO: 102693 - DNA, 356 bp, Arabidopsis thaliana columbia
tatatagtactagtgtgatttgcccaacttgtcatcattatctctatctaataaatggcgttacaaaggcaactcctgaagagagctacttccgatatctatcaccgccgtgcgatctctctcctccgtactgatttctctacttctccttcgattgctgatgctccgccgcacattccgccgttcgttcaccagccacggccgtataaaggtccttccgccgatgaggttttacagaaacggaagaagtttctcggaccttctcttttccactactaccagaagcctcttaacatcgttgaagggaagatgcagtacttgtatgatgagagtggtaggcgatatctggatgcctt

SEQ ID NO: 102694 - DNA, 303 bp, Arabidopsis thaliana columbia
ctttgcccatctctcatctccactcgtcgcattccgtaagtaacatcacatgacagagacattaatggcttcccacattgttggatatccacgtatgggacctaagagagagctcaagtttgcattggagtctttctgggatggcaagagcagtgccgatgatttgcagaaggtgtctgctgatctcaggtctgatatctggaaacatatgtctgctgctgggattaagtatatcccaagcagcaccttttctcattatgaccaggtgcttgacaccaccgccatgcttggtgctgttccatc

SEQ ID NO: 102695 - DNA, 213 bp, Arabidopsis thaliana columbia
cccaagcgtccgctcaatctctccaactacaataatcatcaaattcttatttagcatttacacaatatggcttcaaagaatatgacaacaatcatggctctcttcctcaccttcaacctcgtcttcttgggtttcacctcagcccaacctgtgtgtcctcttaaccggtctgacttggggatttgcgtcaacgtacttggtctcatctccctc

SEQ ID NO: 102696 - DNA, 255 bp, Arabidopsis thaliana columbia
tcttgatataacaatattaggctccaatgacttttactcatatcggaaccaggttttctatctttttctttgctgaaactgtctaaagtgcacttgcatttgttgatatttcctttgagtattcaaatccttttgagatgtttgtacaaaatgttgatgttcttgtatattctaatagatagaatcggctgggcttccattgacaccagaatcgctgggtacccttgcaccgtttgcatcagtcacattcaatgc

SEQ ID NO: 102697 - DNA, 394 bp, Arabidopsis thaliana columbia
taatttcaagaaaaacaagaaacttgttttgctatccgacgccgtaaccatgcacctatcatcggtcaaatcatcgatgatcaaccaccgtcaaccaaactaacgaaaaacgaactctatccccgtcgccttacggattgctgacatgcacacggacctacaaacatcagctgcatcatcggcgtcggcggcgacgacgactccggcaacgttgacgaagcccgttggagttaatgtgggtaaaggaaaatgggcaccagagagttggaggacgaagaaagctttacagcaaccggactatccagatttagctgcgcttgaagctgtgctagagacgatcgaagcttttcctccgatcgtgttcgccggagaagctagattgcttgaggaacga

SEQ ID NO: 102698 - DNA, 284 bp, Arabidopsis thaliana columbia
gtttccttggtttattgtttgattgaagtaataaagcagtaatggtctgtttcaatttcaatgagatgaagactaggaacactctcattggacttggcttatgacagatcatctcgcttcgctctactttaattgcctctactgcctctgagatcgccacagaagggattagtgctccaacatctcagacgtttctgggttatgtgtcacttgcaatcgtcgatagaggtatcatgctgtatcgaagatccgcaattaaagtgaagtggtatcactattttctc

SEQ ID NO: 102699 - DNA, 367 bp, Arabidopsis thaliana columbia
cggacgcgtgggcggacgcgtgggttaggtttttattaaaggttttgcggcagtggaagacgacggcacgagcttcaccgaagagcgaaaatggtgaacattccgaaaactaagaacacttactgcaagaacaaggagtgcaagaagcataccttgcacaaggtgacgcagtataagaaaggtaaagatagccttgctgcccaaggaaagcgtcgttatgatcgtaaacaatctggttatggaggtcagaccaagcccgtcttccacaagaaggctaagacaactaagaagattgtgctgaggcttcaatgccaaagctgcaagcatttctcgcaacgcccgattaagaggtgcaagcactttgaga

SEQ ID NO: 102700 - DNA, 360 bp, Arabidopsis thaliana columbia
  unsure (1)..(360): unsure at all n locations
cccacgcgtccggttctggtgttggccagattactctctaccctatacttatgaagaagggctcaacaaccgtggctctctatggtttaggaaacatcagggatgaacgtctcaatagaatgtttcagaccccacatgctgtccaatggatgaggcctgaagttcaagaaggatgtgatgtttctgactggttcaacattctggtgcttcatcaaaatagggtgaaatcaaaccccaaaaatgcaataagtgagcactttcttccacgtttcctcgacttcattgtgtggggccatgagcatgaatgcctaatcganccccaggaggtatctggaatgggcttccacatcacacaaccag

SEQ ID NO: 102701 - DNA, 273 bp, Arabidopsis thaliana columbia
gttgaagtctttttgtggtgattggcaattggcaccattttatgtgcatcctactggtctgcatggattgcccgataaacagctattgtccatgatacgctactgaaggatgctatcgatgaaatcactaacacacatgatgggggtaatggtgttgtagatatcaattctatttcagctatttttttcatagttcttgcttccggattcctgatgattctttacaaacttatgtcttattggtttgtcgtgcttcttgtggccgttttctgc

SEQ ID NO: 102702 - DNA, 246 bp, Arabidopsis thaliana columbia
aagaagagaatcgttgagatggagagtgaagatgcttatagaatggcgttgaagactatggttaaatgggtgaagaagaatatggatccattgaagacgagggttttctttgctaccatctctcctactcattacaagggcgatgattggggaggcgaacaatgaaaaaattgttacaatcaaacgacaccgatccaagacatgaaccattggccatcagactgcagcaaaaccttaatgaaagtg

SEQ ID NO: 102703 - DNA, 421 bp, Arabidopsis thaliana columbia
tgaaaatatcgtaattatcctatcgaaaagtgagaaagagtaagcagagaaataagcgattgatctctccttctgcaagttctctatttcttccctcacttcttcttcttcttctcccctttcattgttctctctgttcggcgctctcttctacttctctcgatccgaccgtgaatcactatcggagcaatgactatgatgactccgccgccgctagatcagcaggaagacgaggagatgcttgttccgaatccggatttggtcgagggacctcagcctatggaagttgcccaaactgatcctgctgctaccgctgtggagaatccaccacccgaggatcctccaagtctgaaattcacgtggaccatcccaatgttcactaggctcaataccaggaagcattactctgacgtatttgttg

SEQ ID NO: 102704 - DNA, 346 bp, Arabidopsis thaliana columbia
atgataatgatgattcgtgtgctcaaaagaagcaacgtgttgtttggactgttgagctgcataagaaatttgttgcagctgttaaccaattgggatatgagaaggctatgcctaaaaagattttggatctgatgaatgttgagaagctcactagagaaaatgtggccagtcatcttcagaaattccgcctttacttgaagaggatcagtggtgtggctaatcagcaagctattatggcaaactctgagttacattttatgcaaatgaatggacttgatggtttccatcaccgcccaatccctgttggatctggtcagtaccatggtggggctcctgcaatgagatc

SEQ ID NO: 102705 - DNA, 396 bp, Arabidopsis thaliana columbia
aaaaattatcttctttttcttgtgaatttttttttggggatattgcatgtaattttttggggatttttgaggtttaatctccattgaaagaagctctggcatttctctgctacagtgttggttttcagctgcagaattggtgaaaaaagtttggtgaatttcaggagcagagtatttaagtaattttggggaattagtgagaaaatggaggagaaaggtgaaataagtccaagtggggtcgtcacagttaagggagatgaagctttggttccaagaacagagtttcaacaaaaccctagttttctccaattcgtgagtcccacaacggtagtgactcctctcgctcctccaccagctccgtcttcggctccggtaccaaccaccgtgactcctggc

SEQ ID NO: 102706 - DNA, 229 bp, Arabidopsis thaliana columbia
gcccaaataagacaacaaaataaaaacaaagaacacaaaggagaatgaaccctcacctgcctcttaagaggcaagagtaaggcagaagaagaactcacggttcaactaacactcacaacaacagaaaggaggatcgtagtggaacaaaatcatggcagacaagacggatataatttcatcatcttccgataaagcttctccaccaacaccatctgctttcagaaactac

SEQ ID NO: 102707 - DNA, 316 bp, Arabidopsis thaliana columbia
caggaatatccacctggtgttatgattgtgccgatgcatagcaaaacattgaaacctttcaggacaacaaatttggttgtgtttgctccagaaaatggtttgggggaccatcaaggggctgattttgtagctcatggggatgcgttgatagtggatcctggatgtctctctaaactccacgttgagctcaagaaaatcgttgatgctttacctagaaagctaattgtctttgttacacatcaccatcgtgatcacattgatggtctttctgctatacaagagagcaatcctgatgctattctagtggcacatgcta

SEQ ID NO: 102708 - DNA, 327 bp, Arabidopsis thaliana columbia
gtggaagtgtgataggatcaatggtcattatcgtgggactttatatacttttatggggaaaaagcaaggataagtctgcatcagtgaccaaacaagaaccattagatcttgatattgaaggttgtgggacagcaccaaaggaactcaatagtactgcccatcaagtgtctgcaaaataataacttcaagatatatctaactgtttcccatatcgtcaatgaatgatttctaacttgaacttttattaagttcaagcccacgcgtccgcggacgcgtgggtcggagaattgtagtgatcggagaaaatgagtggcgtggttgggtttg

SEQ ID NO: 102709 - DNA, 279 bp, Arabidopsis thaliana columbia
cgatgaattgatacaatctcttctatctgctgagttttttgttttctggtaaacaattttatctgtggagttttctggagttgctagtggaagaatctgtctcacagaaccagaaatagtgtttgtgggagttacatgttttgcaatagagatgacatatcggggtaatgtgcatgattttagtggtgattaaagagtctgaagttgggaggaatgtcggacttgtacattcatgagctatgcgattatctttcggatgaatttcatgggaacgatgat

SEQ ID NO: 102710 - DNA, 296 bp, Arabidopsis thaliana columbia
gcaaaagtttaatttgtctctttctctatttatctccggcgtcaatttcacggcggctacactacggttatcgaggtcattgactgtctaggagtactttgattaagaatccttcattagaccttctggttggaggtgtacagagtgtaactcttggagatgaggaagcgaccagaagaggtggccagaagactgtccttgaaagaaaaggtccttcaacatttaactgtggtgcagaaatagtttcaaagactgaagttcgagttcatcgtagtcctgaagcaactgttgatgct

SEQ ID NO: 102711 - DNA, 105 bp, Arabidopsis thaliana columbia
attttgaattcattatcctttgctctcttcaaagactcactctgagctcttgtcttcagattcttggttttgtcctccaaacgagtagatattaactgcggagtg

SEQ ID NO: 102712 - DNA, 346 bp, Arabidopsis thaliana columbia
aaacaaacgtgaagtttgattcctcggtggtgaaaacgttctttgtatcatctcctagtgggagtatagcttcagttggtggtaacaacaatggcggcggtggaaacgtcaagccggtgttaagcggaactgacggtgatggatccgatggatcagaacagttcagaacaatcatacccgaaggagtttctcaattgtcatcatcgaatttcgggtcagagccgtcagtatcgggacaagatgaacatagattgtggaattcgatggtggaggaagcagaacgaatgcagtattcaaatattgacgattcgttggatcaggagacgaggaagcggttcgtgtctca

SEQ ID NO: 102713 - DNA, 372 bp, Arabidopsis thaliana columbia
aattaaaaaaactgattgagacagagagaagaaagattgcttgaagaagacgaagacaaaaggaggaaactttcttctcatttcaattaaaaaatccatttttttctctgggtttttctttctcatgtgattgtgtaattgattcttatcgttttctcgcaatcattacggcttcttctgaaatcaacacgctcaatttccttccttggaaaattttggggttttggttttgttcctgtttcattcgtgtgagatttgattacttaagcgctcagatgaaatcatgataattaagaagcacaagagagaggaaattagagtcctttggtcaatttattggggaacttgattgggatttagtcagcttcaaag

SEQ ID NO: 102714 - DNA, 377 bp, Arabidopsis thaliana columbia
actggaacactctttgtcggatctgatggccatggcaaccacccagagaaggatagtgaaaattgtaaagagaaaaatgttgtaccacctgttaatgaatcgccacatgctaaagatactgatgatggcttgatagagattacagtccctgagctggagatcacccgtgcagaagcagaagcagaagcagaagcgcatgtttgtgagagtgatgaggacttacccaattattctgacattgaggctatgatacttgacatggacttggaacctgatgatcaagataattttgatctcgaagtctccaagtatcagagccaagacatgaaaagaacaatcataagacttgagcaggctgctcattcatatatgcaaag

SEQ ID NO: 102715 - DNA, 370 bp, Arabidopsis thaliana columbia
gcaaatttcccccggcgacgacatggacgtatgtgaatgaatctcgctatcaaaccctaattcaaccatcgccatgaaggtgctcggagaagcttcttcatatccttacagatcctgtatcatcgtcgtatttctctccgtttctctcttctggctccgtcccagcacttaccatccccagcaacaaaatctcaatccagagaacgtaactcgtttggagtctgagaatgaaacgaagactaactatataatccgatttaagcagtataagccggcgaaagatcatcgaatttacctcgaatcgaaggtccgatccggtggttggggttggatcgagaggattaacccggcgacgaagtatccgactgac

SEQ ID NO: 102716 - DNA, 344 bp, Arabidopsis thaliana columbia
cccacgcgtccgagacagaccaatcaacgaacaaaacccattttctctgatcgattaggccacgacgtttcctgaggtgcagggcacgagtcgctcaatctctctcttcttcttcttcttttcacgaattttctccgaaacttggtttttattcctcaaacccataaattagggttcagtttttaagcctccgtcttcttcttcttccgtcgtcgtagtcgaaaggtggttttagctatatggatatcttctactgcaaatactcttcaaaacggatgctttgaagccttgatactaatttcatgcgttctatatatgtgcatcgtaaggaagtaatgggagag

SEQ ID NO: 102717 - DNA, 166 bp, Arabidopsis thaliana columbia
cccacgcgtccgtttacaataagtgtttcttagttaaaataacatacgtcgacaaatatagatcagttgtcgaatcaaaatgctaaggctgctcgtgaatagggcagtcagatcttggggttaaaaggtgcatgataatgcctacaaagtcggttatgtctttatc

SEQ ID NO: 102718 - DNA, 347 bp, Arabidopsis thaliana columbia
cggacgcgtgggcggacgcgtgggctaagtcgtcgagttattatgttgcagtaggcaacgtatacctgaatgaagtgaaggcgacgattgacattcaagttgagggggtattgtatgatactacaaatgcttattacaattgctctttccctaacgacaagtgcactctaagtgttccattatttggaactaatgctgctgtactaacctcaccaggtccaaagctgaacaattctaagaatgagttctgcgcaaaactctcatatgaaccaaggtggattgcatacatagtttgcatgggtgtagtgacagcactcttgttaattgtctcgagtctcttcaataaa

SEQ ID NO: 102719 - DNA, 252 bp, Arabidopsis thaliana columbia
aggcaggcaagtgcagcacacattcaggttttactctcaccaatggaggacttgggctgcttgtttcagagctttcacggtcctcgtggaagacgggagatttacacctgattttggatccaatgcccatgtcagaagctcttccccgcagaattctccttctttcaggagactgcggttgaagaaaccgctcctgcctccatctgttgtcacactctcgaggcgaccacgtattaggaagagtatctcgtt

SEQ ID NO: 102720 - DNA, 370 bp, Arabidopsis thaliana columbia
aactcgacaaatatttccatagtaatgataatcctatcattgctggagcactgctgggagttgggattgtaaattgtggcattaagaacgattgtgatcctgcattggcacttcttggagactatatagacaaagaggattcatctgtcagaatcggtgctatcatgggtcttggaatttcatacgcaggttcccaaaatgaccagattcgaaacaaattgtccccgatactgaatgatgcaaaagcgcctcttgatgtgattgcatttgcttcactttctttgggaatgatatatgttggttcctgtaacgaagaagtagcccagtctattatatttgctttgatggatcgaagtgaggcagaactggg

SEQ ID NO: 102721 - DNA, 358 bp, Arabidopsis thaliana columbia
tgatagcagaactaacaggattcttacggaaggctaatcgggttctaaggcaagcaacactgattactatgaataccttggtaacagcctatggtgataaaattggttcagaagcttatgaagttattcttgtggagctttcatctctgataagtgtttcagacctgcacatgacagctcttgcactcgaactctgctgcactctgatgactggaaagagttgtagtgaaaatatcagtttggcggtccgcaacagagttcttccgcaggcactaactttagttaaaagcccattgctccagggtcaagcacttttggatctgcaaaaattctttgaagctctggtgtatcatgcaaa

SEQ ID NO: 102722 - DNA, 195 bp, Arabidopsis thaliana columbia
agattttcagctctcagggacttaagagttatcgatagagacgatggccattaaggaaatcaaacatgtagataggggtgaaatattgaatattgtaaaagatcctgggaaaccatttttgactcatgaagatgagggtttcaatactgagaatagtgaatcatatttgatggttctctgcaatagttttgttgc

SEQ ID NO: 102723 - DNA, 144 bp, Arabidopsis thaliana columbia
aaccacgcgtccgttttgagggaatggagtcacactctctcgctttcgttgaagagagtttacggctttatactatatgtttctcttgttgcaatgttatatgtatctttgttttctctaatgaaatatatgcttctttgatct

SEQ ID NO: 102724 - DNA, 287 bp, Arabidopsis thaliana columbia
gaaaaacctagaaagctctagagagaaagagagagagagatggaacgtaaagaagaagatgttagagtcggagctaacaagtttccggagaggcaaccgatcggaacttcggctcagagtgacaaggactacaaagagccaccacctgcgccgttgttcgagcccggcgagctagcttcatggtccttctggagagctgggattgctgagtttatagctacgtttttgttcctgtacatcactgttttgactgttatgggtgtgaagaggtcaccgaacatgtgtgc

SEQ ID NO: 102725 - DNA, 191 bp, Arabidopsis thaliana columbia
gaacagaaaagttacaagtcagaacctcatagcaatggaaaactaatgtcggctgagtactatgaaaatcacctctggttaggtcctagaggaggaagctctggttcaaacaacctttaccctggtgacctaatcccttttacacggaaaccacttttcttgatcattgatagcgacactagccgtgcatt

SEQ ID NO: 102726 - DNA, 417 bp, Arabidopsis thaliana columbia
ttctctcccttaacaagaaccatgagctcctccgatggcggctcctctagggtttcgattccttaccatctccgcaaaacccttcagaaaatcagagagtataccggaaagcagcactcggatgaggatatctttgccgtctataaggattccttcaatgatcctcatgagaccgctcagaagctcctcttcttagatacatttcatgaggtgagaagtaaaagggagaaaaagaaggagcctatagtgccagttacacaaccaagtggcagaggtggtcggaggaactttgcttcaagtaactcttatcaaggtagtggaagaaatgcttcttttaaaagggaaaatggagctaatcatgtaacaagaggttctagaactgctcagcctgccactaacaaagcaagcaacatcaca

SEQ ID NO: 102727 - DNA, 384 bp, Arabidopsis thaliana columbia
attatttaccatctaagtttttggtcattaactgcaggcttaaagatgaaggtacctaggtacaataaggtgagtcacagcttgatataatcttctctgcttcatcactttgtatcataaatgtcgaacgaaaacagaggaacctgttcttaactcctcgatatatattcttatttggctgcagtctgcctatagtgggagaggtgacagagccgattcatcaacatggcctgaagttgaaggacctctatcggttattctctttgagggatggatgcttggttttaagcctcttccatctgacgttgttaaagcagttgacccacagctggaggttgtgaataagaaccttgaagcgtattacgacccatgggacaagtacat

SEQ ID NO: 102728 - DNA, 265 bp, Arabidopsis thaliana columbia
tacacacgacgtccgttttgagggaatggagtcacactctctcgctttcgttgaagagagtttacggctttatactatatgtttctcttgttgcaatgttatatgtatctttgttttctctaatgaaatatatgcttctttgatctaaaaaaaaaaaaaaaaaaaaaaaaaaaaaaaaaaaaaaaaaaaaaaaaaaaaaaaaaaaaaaaaaaaaaaaaaaaaaaaaaaaaaaaaaaaaaaaaaaaaaaaaaaaaaaagggggggc

SEQ ID NO: 102729 - DNA, 120 bp, Arabidopsis thaliana columbia
aaatagggttcatgtagacttgtagaaacttgctatgagaatgtctttgtcaaaagtctctctatctgtcttttatgcatcctaaaccatgggagagataatcaaagccttttatattag

SEQ ID NO: 102730 - DNA, 374 bp, Arabidopsis thaliana columbia
attatgatttacttttctatccttatataattatgatgatcatttcgtgtaaaaaaaaaaaaaaaaaaaaaaaaaaaaaaaaaaaaaaataaaaaaaaaaacgaagaggaagaggaaagatggattcgcaaaaaaagatagctcatgagatcggaggtatgaaaaacaatgcccttcgctttggtcttcacggcgttaagagcgatatccttagatctcatcctctcgaaacggcttacgaatctgggaagcaatcacaagaagaaatgaagaggacattgatcacccatacttatggagctgctcttcctttgaagatggatcttgatagaaaaatcctttctcggtttcaaagacctcctgaacaaattcct

SEQ ID NO: 102731 - DNA, 265 bp, Arabidopsis thaliana columbia
cttcgatgataaagaaggctacgcaggaggaggctgtggctgtgacatcggtcttttgggacatcagtatgtgtctggttctcccttgctttgatcctcgtcgggtccgtccgtgtattaaacgggttttggagaattctcttgtcctctcaacatcactgccgttggcgtactaaaagacgtccagaatgacatcctgagatgagtctattccagtggaatcgctcttactaacgtcgcctaaggttctatggacattttggat

SEQ ID NO: 102732 - DNA, 414 bp, Arabidopsis thaliana columbia
caggaactctttcatcaagtattggaaatttaacaaatcttcaaactgtgttattgcagaacaattacataacaggaaacatccctcatgagattgggaaattgatgaaactcaaaacacttgatctctctaccaataacttcactggtcaaatcccattcactctttcttactccaaaaatcttcagtacttgagggttaataataacagcctgacaggaacaattcctagctcattggcaaacatgacccaactcacttttttggatttgtcgtataataacttgagtggaccagttccaagatcacttgccaaaacattcaatgttatgggcaattctcagatttgtccaacaggaactgagaaagactgtaatgggactcagcctaagccaatgtcaatcaccttgaaca

SEQ ID NO: 102733 - DNA, 351 bp, Arabidopsis thaliana columbia
tcgaccacgcgtccgcattatcatgtctcttcctaccaaacgctctactttctccgccgcttctgcctccgacgactcttcttactcttctcctccgatgaaaaaggccaaaaacgacctccaccattcccctcaacaccctaataccgccgacaaggttgttggctttcatatggaggaagatccaactcccgccgccgctaatctctctcggaagaaagctacacttccgcaacctactaagaagtttgtaatcaagctcaataaagccaaaccaactctaccaacaaactttgaggagaatacatgggagaaattgcagtcagctatcagagctatattcctcaaaaa

SEQ ID NO: 102734 - DNA, 99 bp, Arabidopsis thaliana columbia
gcacgattacaaatttctcaccttcacccagatttcggtggaagcttccagaacgcgaacccctctcgcgatccaggttgctatcgaacacgtgggacg

SEQ ID NO: 102735 - DNA, 222 bp, Arabidopsis thaliana columbia
attaaggtcgatgggataaagtgtcatctaagagagaatttctgattagtcatggtgatgataataatgaggtgcgtccgtctccgattcaagggtggtcacgatcatcttcatcatcatcatcggcagcagatgaggttgattctctatagtctgttaatgaatctgactatcagttgactcacagccgttgatcaagaatctgataacagcttcttcttt

SEQ ID NO: 102736 - DNA, 232 bp, Arabidopsis thaliana columbia
ttttgttgcaaagattactcagagtctcagatacttgttcaaccttaaaactatatacgactataagacatcttacagagtcaatggaaacaaaccagtggcggtcgaggaaaaagatagaagcagctgcagaaacactccaagtttcttctagaagaggcagaggacaggcacgtatggttcctcctgtaagtggagttagatccgagagagctcgaaaaagtcgaagtga

SEQ ID NO: 102737 - DNA, 387 bp, Arabidopsis thaliana columbia
aggacgcgtccgcccacgcgtccggcgatcgacaagcttccacttcttctctttctctccatactcctctgcctcaatcgccctgttcttagcgacaccgatgaagaggacattcttctcacaggaatcaagagctacagaacaacacagaatctaacaatcttaagcaagaacgaaaacgcagaatgcctagctgacgaaatcgcagaccaattcaagaacaaaccttgtaccaacgacactggctcagccacagtacctggaactgagccacagttcgcaaactaccctcagattctagcagaatgccacttgaacgtctcagacacgagagacggctcgattatgcctgcatgtgttcctcgtttagaatcaaacctcgtcctc

SEQ ID NO: 102738 - DNA, 409 bp, Arabidopsis thaliana columbia
cccttttccgttctcattccctctcttctccgcatctctcactctctctgtgtatgtgtgatgtcatcgattgtgaatcgagctagttcagcttctcttcctaatttcctcgcatggcgtgctctggggtttcgcaccatctgctccggccgccttggtttcgctccgtctgttccagactcgccggtctccgcaggaaccaaaattttggaatcatttaaggaggaattcgaagtcggatcccgcgtggtctcgtttgagactggaaaaatcgctcgctttgctaatggttcagttgttctcggcatggacgagaccaaagttctctctactgttacttgtgctaagaccgactcgcctcgggacttcttacctctcactgttgactatcaagagaagcaatacgctc

SEQ ID NO: 102739 - DNA, 224 bp, Arabidopsis thaliana columbia
agtttgataatggagacaatctaatagacgtagtcatcaccggtgaaaatgggacatttgacggtcaaggtgcggcatggtgggagtggcttgagtccgggtccttgaactatagccgacctcatatcagcgaattcgtctcctctaaacacatcctcatatcgaatctaaccttcttaaacgcgcccgcaatcaacattcaccctgtttattgcagtcagatt

SEQ ID NO: 102740 - DNA, 305 bp, Arabidopsis thaliana columbia
aaaaataataatatattattgattttgttatttgttattttgcaaaagtagttattctttttgttataaattcaaagaatattcattattccttttcacatatatttgtttttccataatctgggagaaaatgttgaaatcatattcaaaatttccaaattaactaacagtgattgatttgattcattcaaatccagagaattttatcatatgatcttgtgatgattttaattccagattaattactacttagttcgtttgttttgtttccatatggtgttgcgcaatggtaaatttgggatttt

SEQ ID NO: 102741 - DNA, 359 bp, Arabidopsis thaliana columbia
aaagaggccaaggtcatagccaagaaaccgggagtggtttcagtttttcctgacccacacttccagcttcatacaactcattcatgggactttctcaagtaccaaacatcagtaaaggtcgattccggtccaccttcatcagcctcagatggatcatatgatagcattgtcggaattcttgacacagggatatggccagagtcagagagtttcaatgacaaagacatgggtccaattccgtctcggtggaaaggtacatgcatggaagcaaaggacttcaagtcttccaactgtaacagaaagatcattggagcaagatactacaaaaatcctgatgatgattcagaatactataccac

SEQ ID NO: 102742 - DNA, 284 bp, Arabidopsis thaliana columbia
agaaaatcgtgtgaaagacaagacagatagacagacacgaatattcaaaaaaaaaaatttcttttctctttctaacaccagagatttcgcaatcgtgttttgatctgattcttccacgattctcccggtggcggatagaagaaacaaaggaaacccagaatgcatttttctcaatggcgtcgactacacgagaaaagtttgtatctttcatacacaacagatggctcgtcttcattgctgccatgtggatagagtcttgtgcgggtatcggtcatttgttcgga

SEQ ID NO: 102743 - DNA, 190 bp, Arabidopsis thaliana columbia
aagagatgttcaactctctgaatgcagtctcataaaatggcagcctgctgacgatgccaccctgtgttaacccgtggctgctcctgtcaatggctgtctcaattggactccactttgcgatattgtacatcccattcttggtgcatgtgtttggaaatgtgctactgaacttgaacgattggctgctatc

SEQ ID NO: 102744 - DNA, 398 bp, Arabidopsis thaliana columbia
aatcatcttcgtttatcgatgttataaaccctgctacacaagaggttgtatctaaagttccattgactactaatgaagagtttaaagctgcggtatccgctgcgaagcaagcgtttccgttgtggagaaacacgccgattactacccggcagcgtgttatgctaaagtttcaagagcttatacgcaagaatatggataaacttgctatgaacatcacaaccgagcaagggaagactttaaaggattcacatggtgatatcttccgtgggttagaggttgtggagcatgcgtgtggaatggcaaccttacagatgggtgaatatctccccaatgtgtcgaacggagttgatacatatactattagagagccattaggtgtttgtgctggcatttgtcct

SEQ ID NO: 102745 - DNA, 338 bp, Arabidopsis thaliana columbia
gcacttacatacttacaccaacgcaactcgactcgaagaaccacatccatggctccttctgagcatacctcttccgtgtaagtgtttcggatgaaaaatatgccaatgtccactgggaagagttgggattcaagtttgttcgtatcggattaaatgtgtgttgcgaagtgcactcatggatagagttttcaagacgggaagattcttccttttgctgatttgcaccttaaaccttgcgctgctgttcatcagtacggccatggtttatatcaacgactgaaagcttacaggagaaaatatggtcagagtctgctaatccgatcagaccatcacggtct

SEQ ID NO: 102746 - DNA, 333 bp, Arabidopsis thaliana columbia
ctccgcccaagcgtccgctcgtttggatctttggaaattttagagtttttttcgttttgaaatggcgaggaagaagatcagagagtatgactcaaagaggttggtgaaggaacatttcaaaaggctttctggcaaagagcttcctatcagatccgttcagattaatgaaacaactgatctaaatgagctagttgaaaagaggtagagatgagtggatgcaaaggacccataacaacattcatagttgaaccatttgttccacacaatgaggagtattatctcaatgttgtctcggatcggcttggttgcagcataagcttttctgagtgtgga

SEQ ID NO: 102747 - DNA, 371 bp, Arabidopsis thaliana columbia
acagatgcgattttcttctccttcttcattgtgctcttcaacacttatgaacaagagcaccaccaccacgacaacgacgactacaaagaccaaagctttcgttttgtgtttctgattttgattcgattttgatgctcatcgaagagaacccttgattttgttgctgtagttcatagagattttacacattttgtggaatttagtggatttatgatgatgggtaggttagtttttgtaatctggctctataattgtctctgtttgctgctactctcgagcttgggtgacgcggatcaggccaacatagattgcttaaggacctttaaatctcaagtagaggatccaaatagatatttatcgacttgggtttt

SEQ ID NO: 102748 - DNA, 318 bp, Arabidopsis thaliana columbia
ctccgcccaagcgtcagaagtaaatggttgaagggtaatttgggtaaaaacctcggaacggcaaattggaaataatcaacggctcagatagcttcacgcgatataaacgctaagggttttctcttttctcgaaagtcttgcggttttctgaatcatctctatctggtttgagggtttcgtttgatatctggagaaaggggtttctggaaacaaggagttcataattcgcgatcttgatctatcgatcttcatttatatataaaagcgtgaatgagattatgatggagtcgaaaggtggtaaaaagaagtccagcagta

SEQ ID NO: 102749 - DNA, 310 bp, Arabidopsis thaliana columbia
agggccgccctttttttttttttttttataatttcattaaaactacccaatgggcttgggccgaaacttacaaacaattcggtccagttacaaaattagggttttctgacacatcgccaggaaaaagaaaaaaagctcgccgcctgttgaccgtcgctagcaaagcgaccaaaacctagatccggcggactcacgtcccaaagctttgtggccgcctccgagaatcgtcaaccaccgacgaaagattccggttttcgtcggtagagactcagctccagcgcaccaacccaccacaggactcccggaaagc

SEQ ID NO: 102750 - DNA, 176 bp, Arabidopsis thaliana columbia
aatgacagctttgaaggagattgccgcatataataacattgttctgaaactagaccaaacttctacgtccactgatggaataacatatatgcagggaacatcagatcttactatgactaagctaacaagtacagatggcagaggagaacgttatggattatctgattcggtcaaga

SEQ ID NO: 102751 - DNA, 424 bp, Arabidopsis thaliana columbia
agcccacgcgtccggaagagagaagaagaagaagaatgaagctaacacataacttctcgtttcttcttcttcttcttcttgttcacatgagctcgaaacacattcttgcttctaaagattcgtcttcatatgtggtgtacttcggagctcactctcatgtcggagagataacagaagatgccatggatcgagtcaaagaaactcactacgactttcttggttccttcactggaagccgtgagagagccacagacgccattttctactcatacacaaagcacatcaacggattcgctgctcatctagaccacgagcttgcttatgaaatctccaaacaccctgaagttgtgtctgtcttcccaaacaaagctttaaagcttcacacgactcgatcatgggactttttgggtttgggacataactc

SEQ ID NO: 102752 - DNA, 361 bp, Arabidopsis thaliana columbia
acttttgggtccctaaaaaagctccttcgtttatcttgttttctaagttatctttttgtatgagtttcaaagcttatcattatctcactcttcttccatagctatgactactttaacgaagattcaagtgtacccacaagtcttggagcaccgtctcttcttcagagatccgatacgggtcgggtcaagattgacttgtagagaacgtagtaatagggtttatgtgcatcggtgtgagaaaaaagttgaaagaaagagaaaagttgagaaatttaagggaaatgggtcgtgggattctttgaaatctgggtttttagggtttagtaaattagggttcttgtctaaagatgagtataatcag

SEQ ID NO: 102753 - DNA, 422 bp, Arabidopsis thaliana columbia
aggaaataatggagaagctgtcatcagctgctgtagttcctcagctcctccgcaacatcatcgtcgccgtcgttgttttcgctgatgaatctctccttcaaatctccgggaattcaaagctcctcgagaaactccgtgtatttctcgtcacgtgtttcctcttcttcttacgctctcttccttcaatcgtctctttcgcaaaccctaattcgtcagtcgtctctttcgccaacccttattcatcgaagacgaagaagaagaataagatactggtgatcaaccattgcgaagaatcgggaatcggtcgagcaatttggcagttattgtcagcgatgaatgaaattccggtgagttctagaaagtaccaagtggttcgatcgttggcggagagactaatcaacgataatcaaggagaaaactca

SEQ ID NO: 102754 - DNA, 336 bp, Arabidopsis thaliana columbia
cgaatatgaaatatctgaatctgttgattcatttattctccgcatgaagctgtgttggtgaagtttttcggagatttagggtttctgagttgttcctcgtttggttggtgaataaagcgaagatgcttgtgaaggagtttccttggatcaaaggatttaactttgatcttcctcatgtcattgaagttgctgaagtcttggacggtgttgagaatgttgagggcgatatgtttgattctattccggcttgcgacgccattttcatcaagtgggtgttacacgattggggagacaaagattgcataaagatattgtgattattccactcctcttgag

SEQ ID NO: 102755 - DNA, 341 bp, Arabidopsis thaliana columbia
ccaaactgcatcttggtcccattctcttggcgtttgctttgcatgggacaatggtggtgattgtgcttcacttaccaataaaaacaatcagtctcatcagccagtcctttttccctctccaatttggggtgtacgaggatgagtttgtgtttggcttacttgttgcttatatgtgcctagtaatattcggtccccggtggttagccaatttaattagaccatccatcagacccatagttcacaagtgggttatcactatcagttctttgctcaagttgagtgatttcttgcttggagagccccgaaaacaccgtgcaaatcataatatgagacttcggtgt

SEQ ID NO: 102756 - DNA, 166 bp, Arabidopsis thaliana columbia
aaggtgtgtgtctgtgtggaaagtgtcttgttgttgtgataaaaccatttttaaaaggttatatatattccaatggtatgcgatgtagtagtaacatataaacttttgtcatggtttggtttcagacattactttatagagtgaaaatgtattgtatgtttttatt

SEQ ID NO: 102757 - DNA, 155 bp, Arabidopsis thaliana columbia
ccgaaatgaaatcacatacagacagacattttctccgatcgtgaaattagatcggtcaatcagtgatcatattggtatacaaaacagattagagatgcagcctaatcccatcctcacattcggatcaattttggatagtccaattctcttcattg

SEQ ID NO: 102758 - DNA, 417 bp, Arabidopsis thaliana columbia
acccacgcgtccggttatagggccgtgcttcttgatgctcagaaacaaactgagccatttgtatattattgtggtgtttttcttgtccccaagactcgtgctcatgagtggctgttctgttcagaagaaggacagtggcaggttgtcgagagttctcaggccgctcgtctcataatggtttttctcgacagtagccatagtggagccaccatggaggatatccagaatgatttatctccaatggtgacacaactagctcccagaaatgatgatgaagctcgcattccgtatatgatggcaagtgatgggataaaaaagcgtgatactgtccacgaggttacatctcctatgactgggaaagtggttgttgaagatgtggtttatgaaagcgctcctagtaatttagaagacttgtct

SEQ ID NO: 102759 - DNA, 410 bp, Arabidopsis thaliana columbia
aggagggaagaagatctcgttccctctaagccatgaatcgtcgtaatcgtggctcttcttcttcttcttctagggtttcgaatacttatgggaaccgccagttctctgataacccgaggactggatccggcggcggagttaatgaatcctttcagagaagatccgatgcaccgcacaaacgaaacaatgaaaaagacgaatcaaaacataaagacgaagatcctgctgacgtttcattgattgtaggaacttgttcttctatgtgcccagttcttaggtcaattaggtactttcccttcatcaattcatgatccttccgtgcatcggcagttcagaacaaagaattatcttttgctaggggtttagagagggaaagagtcacaagagaacgcctgcgtgatcttgcagtg

SEQ ID NO: 102760 - DNA, 411 bp, Arabidopsis thaliana columbia
cgaattttcaggtttctctttccgtttgtttgaagaagcttttaagtagaattcataaaatcttgcttagcttctgggtttgatttgtttgtggtaaagttttgattttttttttagtttgagagctggatttgtgattctttctctgggttggtgaagttttttacttgcttcgatcttatagatcagagcttctagcagcgtaaaaaatgcagacgaggtatatggagaggactaatagtatgagagagaagagaaaattggaggaagatgataatcagcagcagcagcaacagcctgagcgtaaaaggccagctcttgcaagtgtaattgtggaagccttgaagatggatagtttacagaggctttgttcttctttggaaccgattcttcgccgagtggtaagtgaag

SEQ ID NO: 102761 - DNA, 416 bp, Arabidopsis thaliana columbia
agggaagagagagacggcgatggcggctacaggatctggacggtctcaattcatttccagttccggcggtaaccgaagcttctccaattctccactcatcgagaactctgattctaatcagattattgtctctgagaagaagagctggaagaatttctttgcttacttaggccctggttttcttgtttcaatcgcatatattgatcctggaaactttgagactgatctgcaagctggagcacactacaagtatgaattactttggatcatattggtggcctcatgtgcggctttggtgattcaatctctggctgctaatcttggtgttgtcacaggaaaacatttggctgagcaatgtagagccgagtactccaaagttccaaactttatgttatgggtcgttgctgaaattgcag

SEQ ID NO: 102762 - DNA, 416 bp, Arabidopsis thaliana columbia
ttaaaaaataattaaacatggaacagtaggatgctaacatgactgacgagactgtagctgctcaaaagaaagtctaagctaaattagaaccaaagggcactcctgaggatgctgaaaacctaaaaaattaaggcaatgaggaatttaagaaaggaaactacgcagctgctatttaacactattccgatgcattggatattcaaagaagtgaagctatcctcactaacagagctgccgcttatatcagcttaaaaaaatataaagaagcattattcgactgtgagcaagctattggtctcaaccgatagttcctgaaatcttattaaagagcctataaatgttacatgtagttgggtgacttgcctaaggccaaggaagtctctgaagttgctaaagaccttggagatgctgaagct

SEQ ID NO: 102763 - DNA, 100 bp, Arabidopsis thaliana columbia
  unsure (1)..(100): unsure at all n locations
agcaggcaagtgcagcacacattcaggttttactctcaccaatggaggacttgggctgcttgtttcagagctttcacggtcctcgtggggngcgggagat

SEQ ID NO: 102764 - DNA, 338 bp, Arabidopsis thaliana columbia
cagaagaaaagattgatttaaatttgagaaaccaagcgactgtttgtttactttctttattattacagatttacaggtacagacaaagttgtatgtaagtgtgattagaacagtggatgctcttatcacgggtccacttgctctctaaaaagaatattgaagctcataattacatctttagagactaaaacaatcttaatcattcaccttcaccaagtacttgtgtccagaagaaaaagaaggaaaaaaagaacacaccattcaagaaagagagaagcttcttgtgataagaaatttcacagattgggttttaacattccaaggagaggactttgtct

SEQ ID NO: 102765 - DNA, 290 bp, Arabidopsis thaliana columbia
ctctaatgtgcctaaagctgaaatgactttggatgaaactttggaagcacttggtctcaatgctaactctaagcaagataaggttcaagagacaaaaccaaatgctgattcttccaaaaaggcttcttcacgatttgtgttggaaatagattccaagtatctgaatcttgagaacgagttgaggagaacgtatggttcaaaggctatgcgatcatttgagagtgagagtggctctcaaggtggtagtagctctagacgagggggaaggcgtggagtccatcatatcacaa

SEQ ID NO: 102766 - DNA, 375 bp, Arabidopsis thaliana columbia
atccaaccttggcacagatgttgtctctgtacacagtgagacctgtttctgtttccattactagagttctgagtcgatcgaagatccggagacgatgaggaagcgtcagccaaaggcatcagatttaacagagccatcttcgtcgagtaaagaaactgatgcgtcttctgataaagatgctctcgataaggaagtgcaggctgatgttaaaagatcagggaaagtatggttgtcagtgttgactttgatcacttacgcatcgtggtttgtttacaattatcagcttgggaatttacctaaacccgtaaccgcaaaacaagctggtaaaaggggtttctctgaaattgaagcaatcaaacatgttaaagctttgac

SEQ ID NO: 102767 - DNA, 334 bp, Arabidopsis thaliana columbia
aggacgcgtgggcggacgcgtgggctgaaagggaaacctaggtttgctgatttcaatctcatgcctcctgattggggtgctaattttgctccttgggtttctactatggctcaagcttatccttgtcttgagaaagttgatttgaagaggatgtttgttactgatgatgatttagctcttcttgctgactcttttcctgggtttaaagagcttatcttggtttgttgtgaaggttttggtactagtggtatctctattgttgccaacaagtgcagaaagctgaaagtgcttgatttgattgagtctgaggtcacggatgatgaagtggattgga

SEQ ID NO: 102768 - DNA, 391 bp, Arabidopsis thaliana columbia
gcatagtgaagctgaggaagcacaagggattgaagctagggaagcaaaacagattgaagctggggaaacttcaagatcatctacgaaattgattacttttgagccaaagttggttataaacaaaggaatatcggttcttggattcgttctgcggttatttgctgtttttggaactataggaagcgcgcttgccatgggaacaacacatgaatctgttgtctctttgagtcagctcgtacttctgaaagttaaatacagcgacttaccaacgctcatgtaaaatattcagtgatcagtatatcgatgaatcatgaatttgattgtgtatatataataatactgctctgttttatacgtttttcgtggttgcaaacgccatttctggtggata

SEQ ID NO: 102769 - DNA, 385 bp, Arabidopsis thaliana columbia
cccacgcgtccgctctactcaaggaactccacaaaaattaaaatctcacaactccaacatcttcttataacacgtcttgatttatctttaagaaccaaacaaaaaaccaaaacctagaagagaaaatgggagatcaaggagtacaacaaatgcaacagcctattgttgtgtatccaaacgcttacaataaacagtatccagacccttctacaaaaccttcttcttcctctggctcaagcggaaactttgggacggtcttcatagtcctagccgtgatctttgtcttgtcggctcttgcttgtgtctttggaaggctatgtaaccgtgaaagccgcgcggctaagcagcaacatagcaagcatccgaagcatgagaaagcttcttc

SEQ ID NO: 102770 - DNA, 256 bp, Arabidopsis thaliana columbia
tctctccctacttctcgactctctgactcaatcaacctctataaatgtaaaacgagtcagaaggaacacagacgcacatcaagaatttaaatcactaaaatggattaccccatgaagaaggtaaaaatctttttcaactacctcatggcgcatcgcttcaagctctgcttcataccattaatggttgctaaagccgtggaagcgtcacgtcgttccacacaagatctccaaaacttttacctctacttacaataca

SEQ ID NO: 102771 - DNA, 293 bp, Arabidopsis thaliana columbia
cgaatctgaacaaagttgggttttttattggtacccagaatctcaattctccttctttccttctgggtataggaaaagtctcgcctttttttatatttatccaatcgctcctgttcattgattccccattaggattgtagtttttggttattgggaaaattgagtaaaggaggagatgggttgtttctcgtgttttgattctagtgatgacgagaagctgaatccagttgatgaatctaatcatggtcagaagaaacaatcataaccgacagtatccaataacatatctggac

SEQ ID NO: 102772 - DNA, 379 bp, Arabidopsis thaliana columbia
gtgagatatcttcatctctctctctcgcgccagattttcaccggctcgatttcagattgaagatctcagacacagagctccgacatgtcgacgttcagcggcgatgaaacagctcgcttcttcagactcctcagtgcggcagccgcactcgttttcgcttgtacgggagctgcttatggtaccgcaaacagtggtgttggagtggcatctacgggagttatgagaccggagttggtgctcatgtctattgtgactgttgtgatggctggagtgttgggtagctatggattgatcactgccgttatcatcagtaccgggattaaccccaatgttaaatcttactatctcgttgatggatacgcacatctcacgtcaggac

SEQ ID NO: 102773 - DNA, 202 bp, Arabidopsis thaliana columbia
tactaccatggttctcaagaccgagctttgtcgtttcagtggacatcagatttacccacgaataggaattaggtttatccgatctgagtctcagggtttcttgtttcttaactcaaaatgttagaaggtacttccataacaggttgaagccatccaagcttgcatggacagccatgtacatgaagcaccacacgacggatgc

SEQ ID NO: 102774 - DNA, 365 bp, Arabidopsis thaliana columbia
cccacgcgtccgcccacgcgtccgcccacgcgtccgcccacgcgtccgcccacgcgtctgctctcgatttgtcttcttcactcagtttctcgcttgttctgtcaaagatcgaaactttccggcgtctattgtcttcgcactattgcactcgtcttcgtcgtcgttcttggtgtgaaccgacactaaattctatctttttgctctacacgatgaacgatcttctgaagggttcgtttgagcttcccagaggtcaatcttctagagaaggatatgttgaactacgggaacatcatggtggagatcagagattggcagattttttcaacaacgttcaagtgattgacatacagtatgataagctagac

SEQ ID NO: 102775 - DNA, 397 bp, Arabidopsis thaliana columbia
ggacaagagacatttcatgaactgttctcttatcatttgtatctagcctcgcatcaaacatttcaatggttggaatcatgttacggatcgatcgtcgaacccaattgactagatcccctccttgctccagcggttgaactgggggctttcctgttattagctccagaagcacaactccaaagctatagatatcacatttctctgtcaccttcatcgtgtaagcatattctgaaacacagcaaaacatcaattagatatgttagataagcgattgtgggaagaaagaaaactgtgatgttttactcacctggagcgatgtatccgtaagacccagcaacagctgacatggactttgagtaagagagatcaatcaacttagccaggccaaaatctccaa

SEQ ID NO: 102776 - DNA, 410 bp, Arabidopsis thaliana columbia
cccacgcctccgacccggccagccacagatctccgtggccatctctctctttctaattattacaaagaagcattattattattattttaattatataattattgtataatcaaatctctctctgtaagtaataattatcgtataaatcctccccattgttgagttaattagttcttgtaaacccatgacgttttccgtcaaagctgaaatggaagttctcatggtctcagatagccactgttgcttctgtcattgttctcgtttccttggttcatctgtttcttggtcctgtagtgccttcttttgattctattactgtaagacaagctcagaatctttgtggaccaagtaatgaatcaatctcacaagtgactaagaattcaagtcaatcccttgttgttgttgccttt

SEQ ID NO: 102777 - DNA, 379 bp, Arabidopsis thaliana columbia
  unsure (1)..(379): unsure at all n locations
acncacncatccggtcctctggtggtttatggcactgaaggatctaagatagttaaggcgtttagaaaccttcctggtgttgagctttgtcatgtggagaggcttaatttgttgaagcttgctcctggtggtcaccttggtcggtttgtgatctggaccaagtctgcctttgagaagcttgagtctatctatggttcgtttgagaagccatcagagaagaagaaggggtatgtgcttcctcgtgcaaagatggtgaatgctgatcttgccaggattatcaattcagatgagattcagagtgttgtgaatccgatcaagaaggatgcgaagagggctgttcttaagaagaatccatttaagaatctcaatgtgatgttga

SEQ ID NO: 102778 - DNA, 308 bp, Arabidopsis thaliana columbia
aattttctgaagtgaatgcaaagatgatgatggaagagaaacttgtgatcaacgaattggaactagggaaagagcttgctaaccgattgatgaacaatctcaaacacacttcttctgtcgattccaacagaaccttgatcgctgatatcctccgtatttaccagaatgccattttcatgttgagcgtcaaccaagacaagaacatccttaagcgaacccttgagatcgatggaaaagattctaaagacgtcttcaaacacaggaaagtatcggagaagaacacagagaaagttaaagtttttgttgca

SEQ ID NO: 102779 - DNA, 418 bp, Arabidopsis thaliana columbia
acaacttttcagaagatactctgcctcgcttccatggtcaacaagaatgaagatcgctcatggagctgcaacaggacttcaatttctacacgaagctgaaaatcctgttatctatcgggatttcaaagcctccaatatcttgttagattccgattacacggcgaaactctctgacttcgggttagccaaagacggaccagaaggagacgacactcatgtgtcaactcgagtgatgggcacacaaggctacgcagctcctgaatacatcatgaccggtcatttaacagcaagaagtgacgtatacagctttggagttgtgttgctagagcttttgaccggacggagatcagtagacaaaaagagatcatcgagggaacaaaaccttgtggactgggctcgtccaatgctcaatgaccca

SEQ ID NO: 102780 - DNA, 339 bp, Arabidopsis thaliana columbia
agcgactttacttctctctctctctctttctctctgactctgaaaaagatgaagtggagaagttaatgttcaccaacttaatactgcaaagtcgaaatctttctttcttcttctttgccttctttcaagtgctttccctctctcattctccttcttcctcctctgtttctttgttgttctaaacttaaaaaaagattgaagttgcaagtaacagaggagctgtctcagatctggttctaaagcgagagaaagagattttgagttgaggaaaaatgagtaaagaagagttcatgaagatccagacttgtgttcttaaagtgaacatacactgtgatggct

SEQ ID NO: 102781 - DNA, 270 bp, Arabidopsis thaliana columbia
tctttttcactttcatcgttgtctctctctgtctagacgcatgtgcttgtgttgtgtttgtgcgccactttctatctctactgttttcttctctcgtcacggcttaacttttgcaatcttttagctgaagctaatttcaacaagttgttatttgtgcttccaattttcttacgttttgatctctcttttccacgaaacctcttatcatacatttctcacttctgggtcgaaactctaccttctatttttgggcactgatttttattctta

SEQ ID NO: 102782 - DNA, 355 bp, Arabidopsis thaliana columbia
agaagggtttaagttagggcttttgaagtaaaccaattttgtgcgtctcccttttcttcttctcttcccaatttcaccgcctctctctatcgccggaaattaaccatgaaacgcggcggaagaagctacgtaacttcacctccatcattctccaacgacgctaaaaagcttctcgtctgcacaggaaacactgtctctgttttcagcgccgccactggcttacaggtcatacagctccagtaacaactctaattgttgttcctgcatcaagtcctgctcaaaaaatcctttgttattgttggactgcttctcttgatggtactattcgtcattgggatttctctggacctgagct

SEQ ID NO: 102783 - DNA, 417 bp, Arabidopsis thaliana columbia
acaaattgcgagttctaagcctacaggtagtgaaggattgaaatgtgccattgatcacatccttgaagctgagcagaagggagaaatcaacgaggacaatgttctttacatcgtcgagaacatcaatgtcgccggtaacttctatttcttacttgtaggatacgtaatcaatcctctagacgtctctgcttgcataaggaattggacattagtgttttaagtgaatcctagaaatccggaattgtaaccataacaggaaattaggctcatgtaggttggttttttggtctcccctgaagaggctggattgtatatggttttgtgaagctgatatcttgatttctgctgaaacagcgattgagacaacattgtggtctatcgagtggggaattgcagagctagtgaaccatcctgaaa

SEQ ID NO: 102784 - DNA, 344 bp, Arabidopsis thaliana columbia
gaaaagagtaaaaaagcacatggcctcattaccattggggcctcagcctcatgctcttgctccgccgctgcagcttcacgacggcgacgctttgaaacgccgtcctgaattggattctgataaggaaatgtctgcagctgttattgagggaaatgacgctgttactggtcatatcatttccactactattggaggcaaaaacggcgaaccaaagcagaccattagttacatggctgagcgggttgttggaacaggttcattcgggattgtttttcaggcgaaatgcttggaaactggagaatcagtagccattaaaaaggtcttgcaagatcgacgctataaaa

SEQ ID NO: 102785 - DNA, 366 bp, Arabidopsis thaliana columbia
acgaaaaatatgggagaaatcggtggagaagaactggtcttagatgtggatgagacgattttcgtcgcggtggcggaagatgtggagagaagcaaaaccacggtgttatgggcggcgcgtaacttttccggcaagaagatttgcttgctttatgttcatcgaactgctcgcgctgcctcctggacgcacaagaaacttgttggtggtagctttaaaaagcatgatgtcaaggtgattgagcgagttgagaaacccaaagtggatgaactgatgaattcttatctccaacttttatctgaaactgagattcaaacagataaactttgcattgcggggcaaaatatcgaggaatgtatcgtagaacta

SEQ ID NO: 102786 - DNA, 424 bp, Arabidopsis thaliana columbia
  unsure (1)..(424): unsure at all n locations
aatgggttcatggatacccaagttgctgctgctgcaacttgtgcttctgttgactaagcatgctgattcaagttctatcatcaaatatcttcctggttttgaaggccctcttcccttcgagctcgaaaccgggtttgttcctcttcatattagccttatgatgtatgactctgtgttctctaagttttggagttaaatcattaaggtacattggtgttggtgaggaagatgaagatcaaatgttctactacttcatcaaatctgagagcaatccaaaaacagaccctcttcttctctggctaagtggaggacctggttgctcttctttcactggtcttatatatgagaacgggccacttggtttcaaggttgaggcgtacaatggaagtatcnccacgttggtctctactacatattcatggac

SEQ ID NO: 102787 - DNA, 156 bp, Arabidopsis thaliana columbia
attaaacatcattctcacttcatttctctattcagttgtttattttattattattgatatcaatagagttatcacagaagctctgcaagaggctctgctcaagacaatcatatctctacgcacatctctggttctaactctggatttacatcttca

SEQ ID NO: 102788 - DNA, 124 bp, Arabidopsis thaliana columbia
atcctctcacactctctctcctttggattcttcagtgaggagaggaaatgtcggatcttcagacaccgcttgtgaagcccatgaggcagacgacgtgggttgattagcttgtccagttcagatg

SEQ ID NO: 102789 - DNA, 227 bp, Arabidopsis thaliana columbia
ataaacagagaggaatcgccataaaaaaacctactttgtctttcaacaccgaaattaaaggaaatctctttttctctattgagcttttttcttcagcggtgaaatctcccttccttgtctctcagtagtgatttttacatacagctccgctctcagaaacgacgagtcttcattgatttggtttccccaccagctcttcttcttccttttttgttccgagacctttt

SEQ ID NO: 102790 - DNA, 338 bp, Arabidopsis thaliana columbia
cccacgcatccgcggacgcgtgggcggacgcgtgggcagcaccccactattgcgcacaaagctgccgggcagttcatgcgttcaagtgtttccaacgacgttcaagtgggttaccagaggccttctatgtatcaaagacatgcaacctacggaaactactccaatgctgcatttcaatttcctccgacatcccggatgttggcaacaactgcttctcccgtgtttgtccaaaccccaggagagaaggggttcactaactttgcccttgactttctgatgggtggtgtttctgctgccgtctccaagactgctgctgctcctattgaacgtgttaagct

SEQ ID NO: 102791 - DNA, 424 bp, Arabidopsis thaliana columbia
cccacgcgtccggtgcgtgtcttcttcttcgtttgacctgtaattttaaagcgcattttcttcttcgcatagcagaagttttatttctccttggatccacttccacgtctttttttctccggatcttcagctctgaggatttttaaagcttttaagcgcttattggagttcgtatgagcaaacgtgagtcttgtctgcctgaaaaatcttctcttggcttggttctgaaatgtgactgaaagtattggttttaggcagattttgattcttcaattttttttcgttaagagggtttcgtgtatcagacaacatctgaacagagaaaagtatttatcttttctgttggttactacagaattggtgggattttattgcaaaaggtcaataaatggcagaccaaagctctgttgatgggattttagag

SEQ ID NO: 102792 - DNA, 414 bp, Arabidopsis thaliana columbia
cttcactctttctctttctttctctctctctctctctctcgctcttctaattttgcctcaaaaacctccaattaataagaaaaagccaatggtcccccctccggaatccggttaaggcgttttgggccggaatctgacaagggatatggatgtaggagttacaacggcaaattcaatacttgaaaagcctctgaagcttcacactgaagaagatatttcacagctaacgcgcgaagattgccgcaaattcctcaaagagaaaggaatgcgcaggccttcgtggaataaatctcaggcgatccagcaagttttatctcataaagctctctatgaacctggagatgattccggcgccggaatcctccgcaagatccttgtttctcagccgccaaatccgcctcgcgttacaacaac

SEQ ID NO: 102793 - DNA, 333 bp, Arabidopsis thaliana columbia
  unsure (1)..(333): unsure at all n locations
cggacgcgtgggcggacgcgtgggcgaacctttcaagattgcaatgcaaaaattcacaaagaagattgtggatatgatgaaagaagaaaagctgtttgagactcaaggaggacccatcattctctcacagatagagaatgagtatggaccaatgcaatgggagatgggagcagcaggaaaggcttactcaaaatggacagctgaaatggcattgggactgtccacaggtgtcccatggattatgtgcaagcaagaggatgctccttaccctattatagacacatgcaatggattttattgtgagggtttcanaccaaactcagacaataagcc

SEQ ID NO: 102794 - DNA, 331 bp, Arabidopsis thaliana columbia
cccacgcgtccgttttagagagcctcgacagagaattatttttttcttttttattttcgtttacaagtttcaattcttctctatatattaaaaaaacaaacagatgcaaccttggagaagaaaatttccattgttcgaaacaggagttacaatgaaacagaggaagaacagtaatctctcaatcttcgtcgtagtcttctctgttttcctcttcgggatcttcatgtacaatgaagacgtcaagtccatcgcagagtttcctttctccacctcaaaacctcacgacgtccacgacgaagcgacaccgatcacagagatcacaacactaccg

SEQ ID NO: 102795 - DNA, 276 bp, Arabidopsis thaliana columbia
gtgctgcactactcaacctcaatggccgcctcaacaatggctctctccacacctgccttcgccggtaaagccgtcaagccttcccccgcagcagctgaagtccttggaaatggccgtgtgacaatgaggaatcactgttgccacagccaaagggcccatcacgcagcccacggtacggatctgaacgtgtcaagtacttgggtccactcactggcgaaacaacgagctaccttaccggaaagttccccggagactacggatgggacaacgccggac

SEQ ID NO: 102796 - DNA, 187 bp, Arabidopsis thaliana columbia
catcatgcttcatgcttctcgtggcaacaagtggtcggtcatagcgagacatttacctagaagaacagacaacgagatcaagaactactggaacacgcatctcaggaaacgtttgatggaacagggtattgatcccgtgactcacaagccactggcttctagttccaaccctacggtcgaggagaat

SEQ ID NO: 102797 - DNA, 315 bp, Arabidopsis thaliana columbia
gctcgcatagccaatagccccaaagagttagcggagatgagcgacgttgtgttcacgattgttggaaacttcaacgatgtccgatcattgcttctcggtgacgatggtgtactctctggtcttacgcccggtggagtaacagtggacatgactagtagcagaccaggattggcgcgtgaaatacacgcacaagcgaggcgtacgaattgttgggcggtggatgcgccggtatcaggtggagacgctggagcacgagaggggacgttagggattttcgccggcggagattcagagattgtggagtggttgtccccg

SEQ ID NO: 102798 - DNA, 396 bp, Arabidopsis thaliana columbia
gtgatgggcctcttctctctgtttaggtttctctttttccaataaaattcgtcttcttcttttctgggtaccgtcgatttcttcctacgagttcgaaattagggtttttttcttcttcttagggctgattttgaggtcgagtagtgggttcttaacgaacttattcgttgaatttctttagggttttctttgtggtctagtttcatagagagattagaagtttggttatgctattgaacgatgtttcatggacaagggttttcgagaaaccgttgtaatgttgtggcagttgtttctggagcagagctttgcgatactaataaccagatagatggaacttctcatcaacccaaatacccttttccagatctctcttcttcagggcgtctcaagttt

SEQ ID NO: 102799 - DNA, 419 bp, Arabidopsis thaliana columbia
cgggccgacccacacgtccagatttaacaggaatttgcggaattttgattatatcagtgagtagaagaaatgagcgcagtctcgggtgtaatctcgaggcaagttttgcctgtttgtggtagcctttgtattctttgccctgcgcttcgtgcaaggtctagacagcctgtgaagaggtacaagaagctcattgctgagatttttcctcgtaatcaggaggaaggcataaatgatcgaaagataggaaaattatgtgagtatgctgcaaaaaacgctgtgcgtatgccaaagatatcagattccctggaacatagatgttacaaggaattgaggaatgagaatttccactcggcaaagatagccatgtgtatttacagaaggcttctggtcacttgtaaggagcaaatacctctattttc

SEQ ID NO: 102800 - DNA, 275 bp, Arabidopsis thaliana columbia
agttggatgtatcaggagaaagaggctgggagatagagagaaagagagtctctgcgaaaactaataatgttttttcagatatctaaataataagctttttgcatacattgtattgtaaatttgtaacattcttctcctctcttccaatgatttttttttcttgttgactattcttactaaataacgatgaggtaaaatataggtaaatgattatcattaaaaaaaaaataaaaaaaaaaaaaaaaaaaaaaaaaaataaaaaaaaataagaaagg

SEQ ID NO: 102801 - DNA, 414 bp, Arabidopsis thaliana columbia
tgaagcgagcaagatacgacacgaaatcgatctcccccttgcgttttccatctccgtcgtctgctgaaaccatttgatcgatctctcagataaggttctcaggatttaggttgcttctatgagaaggacacgttgcagttggtgcttcatgtctagtttctcaaccgtatagggagtcttcaacttctgggcataagcaagtttgcaccactcgtaatggctggacagcatttgtaaaaagagtctctatggctagtggagcaattatgagattccaggagcgtgttttagggcctaataggaccggtcttccgagcacaactagtgacgtatggctcttgggtgtctgctataaaatatctgcggatgagaactcaggggaaaccgatactggcactgtattggctgcattgc

SEQ ID NO: 102802 - DNA, 319 bp, Arabidopsis thaliana columbia
gtccgatcatttaaagagagcatgttcccataagcaacctcttcacttgtctttggttcaacgaagttgaccgattcacttctagagatcaaatcagtttctcaacagtaagagataagatggcagcaaagacaaactggacagtaagcatgttccttgattgtgaaagacgcaattttgtagttcagagatatcaccgagcagaacaagaaagatttgcaaggcaacgacctccggtgcctaattttcctcctccaccagcttcgccgcctccaccagttttaatcagcagcgatttgcctagaagaatgtcaagtgg

SEQ ID NO: 102803 - DNA, 442 bp, Arabidopsis thaliana columbia
agctgatagtggtgctgctacgtcgtctataccaccaaatgtctatggtagctcagtcacggctatgcctggacagcctccatatatgagttatccgtcttactacaatgctgttccccctccaacacctcctgcaccggcctcgtctactgatcattcccaaaacatgggtaacatgccatgggccaacaatccttctgtctcaacacctgatcactcacaaggtcttgttaatgcaccttgggcacctaatcctcctatgccacccactgttggctattcacagagcatggggaacgtaccctgggctcccaaacctccagtacagcctcctgcagagaatccatcctctgttggagagtctgagtatgagaagttcatggctgagatgaagtagcatgcgtgttctgatgagaaactccttagtggagaggtgtgatgt

SEQ ID NO: 102804 - DNA, 267 bp, Arabidopsis thaliana columbia
ccatcgcctgatccccacatcagcacaggctgctggtctcggggggcggcacagctgaccgctgtatccgcttctggaacacgctgacaggacaaccactgcagtgtatctacacggtctcccaagtgtgcaatctggcctggtccaagcacgccatcgagctggtgagcacgcacggctactcacagaaccagatccttgtctggaagtacccctccctgacccaggtggccaagctgaccgggcactcctaccgcgtgctgtacc

SEQ ID NO: 102805 - DNA, 441 bp, Arabidopsis thaliana columbia
cttgcagcttattagcgaaccaaaacttccatccctgtttcttcaggtcatttcttgggttttgggagaatatggcacagctgatgggaaatattctgcctcctatattagtggaaagctgtgcgatgtggcagatgcatactcaagtgatgaaactgtaaagggttatgctgtttctgcactgatgaagatctacgcatttgaaattgcatctgggagaaaggtggatgttttgccggagtgccaatctttgattgaagagctattggcttcacattcaacagatcttcagcaacgtgcatatgagcttcaggctctccttgctctagatgcccgtgctgttgagactatactccctttagatgctagttgcgaagacattgaggttgacaaggatctttcatttctcaatggctatatccaacaagctatcgagagtgg

SEQ ID NO: 102806 - DNA, 236 bp, Arabidopsis thaliana columbia
atctgacccggcatctgacctgaaatccgggctgaatcgacggatggggaaagatggtctgagcgatgatcaggtctcgtctatggtcgcatccttcatggtcttcgtcacggacggcgacagcaatatcgaacggtcagagctcgggatactcatgcgatttctcagcggatatctcagccaagcccagctgaaatccatactcacatccataaatctctcttcaacgtttgctt

SEQ ID NO: 102807 - DNA, 355 bp, Arabidopsis thaliana columbia
agatcatctccatctctctctctctctctctcattttcttgaaaaagatgagaaccgtaaagactcagaccacaaggggaagaagaagagcacatgtgtcgtcacgtacgagagttttacacacgtgctgtggaaatggtagtagcgactgagggaagacggtgatggagaagcttcttgcgttaaagagccttcttcctccaccggtgaatgtcggtggtggagagacggaggagctgtttcaagagacggcggagtatatcgtgaagcttagaacacacgtcgtggtgttgaagaaactgattgagatttacgataactcttctgatcagaagagagatgttgttatacaatg

SEQ ID NO: 102808 - DNA, 311 bp, Arabidopsis thaliana columbia
cacgcgtccgcccacgcgtccggaaaattttaagcatttgaaacaaaaaaaatgggctccaaaggtttggttccgttgggtcccctttgcggttcttctcgtcgtctcagaattacccccggaaccttcggcaaaattgaattcaaaaattaaggaaacggtaaaactcatataacttggcaacgtgaacaatggaggaaattacaataacggaggaggttaccagagaagagggggtaattaccagggaggaggaggtaattaccaacgaggaggaggtaattaccagagaagaagaggaatataccaga

SEQ ID NO: 102809 - DNA, 265 bp, Arabidopsis thaliana columbia
agtgtatccagatctcagccaagtggaagccaattggatgtttctatccaaataccaccaaaaccgacgcctagtttaggaattttgagaaatctgagtctgaaaaggaaagcttctctaccaaactatgagagaagattgctactaagtcctagtgtttcagaaaccagtgaaaagcctcttgttgcaagtccgatcacatcgccttactggaaaaggtgtttgtcacttccttctagtaattctgctaaactgtctctggttg

SEQ ID NO: 102810 - DNA, 408 bp, Arabidopsis thaliana columbia
ccgggctttatttcctctacaaaaccccaacaactacctgaagactattctctctcaaaagcttacggaacgaaatgactcaccgtatagctcctcgatgtttctccaccatcatgcttctatgtcttctatatacttcacctctagatgttatagctcagggtcagggaggacaaggtgatataccagttgttaatcctacagctccaggtggtagtaccacaacaccaaccataacacaaccgtcaccgccttccttgacattcccaggtccaactacaccaactggtggttatccacctcttgacggtaccacgccaaccggtggttacccaccactttatggtactacaccgccaggtggaggtgatgtacgtggtggaggaggcggatatggtggtggtacac

SEQ ID NO: 102811 - DNA, 252 bp, Arabidopsis thaliana columbia
aactcattcgtcctcagatagtgcgcattgcagaacacaaaatctctacaagaaaaccccaaaaatggacggactttgctacgtcatcttcatcatcttctccctgctatcctgcgctttctctcccttatcatacgcctctccggccactttcagtcgccgtcaccttcttcaagctcctgtaactgatccttccacattctcaccgccgttcttcccactttacagctccaactctcctcctcctcctcc

SEQ ID NO: 102812 - DNA, 285 bp, Arabidopsis thaliana columbia
actcatcctccagctcaccattttcatctcttcatctccgatcacagaaccaccgtatcatctctctcaggtttttgattttccacggcaatggagtcttcgattctcaaaagccctaatctctcttcaccatcgttcggtgtaccttcaattcccgccttatcctcctcctccagctcaccatttgcatctcttcatctcggatcatcagaataccgatatatctctcttagcaccgcctgaaaattcagtgtctcatattctctctccagcttcttcacctct

SEQ ID NO: 102813 - DNA, 348 bp, Arabidopsis thaliana columbia
aaggagactttcatgattcgtgtcttggagaacaagcttctcttcgttaagaagaatttgatactattcttctcgatttagaaatttcaggggtttgttcttgtttcaggttttgggaagagaatctgtgcgacaagagactgtgactggtggttgctggaacgagaaaacctccaagactggtggtaatgttgatagaaacagggaacaacaggagaatcatggttcaggttatcagcaggatcagagagtacaaccctgtcatctgagttcttccatctattacggtggtcctgatgtttatttccagcctcaaaattccaccagcaactctacgaacaagaaaga

SEQ ID NO: 102814 - DNA, 400 bp, Arabidopsis thaliana columbia
acccacgcgtccgcccatcttgagtttagcaggaaagagaggatggctgaccattatgagtctgtgaaggaagattatccttttgtggagttgggatcaagagtggtggatgaacgagatgatcactacaggaacttccgtaacgaagaaagaaaggttgtttatttggataacaaatgtcaagtactgagaaaggattatctatatgatggtgttgacagtaagaagaatcttgatttcagtgaaccatatgctgtagtagatcgagatgataaagcttcacagagcataacacgttgcttaaataaagaaagggaagcatatttggataatgagagaatgctgttttttcagatgataaaagacaggaactgagaaacgagtatcaccctggcaatga

SEQ ID NO: 102815 - DNA, 335 bp, Arabidopsis thaliana columbia
acttgtacaggttacctcaaattctgttagattagttagttctacaactagagagttgcggaatacatgggatgccccagctggattctctgttaatgttgcaactgcaaatgcgagccaggttcttttggccactggaggtgggcatttggtctatctagaaattggggatgggacattgaccgaagtgaaacatgtcctgttggagtacgaggtttcatgtcttgacatacaccccattggtgataatcctaattacagtcagctatctgccgtctggatgttgactgatataagtgtgaggatttttgtgctaccatacatgactcttatta

SEQ ID NO: 102816 - DNA, 309 bp, Arabidopsis thaliana columbia
aggcgacgaggagagagaatttcaaatctctctagatcaaagtgaaagacaagtacaacaagtaaccgacaaagtgaagcgcaagtacttgtttctttccttttcctttaatatttgataatttgagaaaagtaaaaatgataaaatatatatagtttctgtccgaatcggcctatcttcacaaaatctcgattccaatcaagaatttatggcaggaaaggtcgatgaatcaatcagatgatgatcgatctagagatctctaaatgtgtgttgttgtgaattgagaatgcgagagcattcgacgatgta

SEQ ID NO: 102817 - DNA, 374 bp, Arabidopsis thaliana columbia
cccacacgtccgattggccaaggctttggccggtcagacaaatgagagtttcttcactgccaacgctgacgcattgtcttcgaggaggtcttccccaagagtcaccaatgagtctgtccagaaggctgctgctgctttgaagggatctgaccaccgccgtacaactgaagttagcgcaaggctagatgctcagcagaagaagcttaaccttccaatcctcccaaccacaaccattggatccttcccacagaccgtggaactcaggagagttcgccgtgaatacaaggccaagaaaatctctgaagaggattacgtcaaggccatcaaggaagagatcaagaaagttgttgacatccaagaggaccttgacattg

SEQ ID NO: 102818 - DNA, 355 bp, Arabidopsis thaliana columbia
aactccaaaagcatctctctgtttcttctcctctcttcaagctttttgtttcgtctcagtcgtcgtcatcatctctgacagatctaagaacaagtttcgagattggatattgacgacaacgatatgggacttggaggtagtgaaacaatggaatgcaagtgtggtatgcctctgtgtatctgtgtagctcctcccaaatcaactgataaaccaaacccacctgctaccattgctcctgtggttcttcctcagttgaagtcagaggcttcagcaaaaagtaaaggttccacttccagcagcaatgctagatcagctctaaatgctggactagacaccccccaaagagactatgaag

SEQ ID NO: 102819 - DNA, 336 bp, Arabidopsis thaliana columbia
tggagatgacaatcctgtgtttatgattcaagaagtgtctactgaggaacctcgaggttccgtgctcagactcacattcgcctgtaactcttttctatcatggtcaactatgtcaggcgttcttgatagtgcttcgatttgttgcaagaagatacaaatctttgagaagaaggggttgactctcggggttgttcttcttctggatcaatctgggcaacatagtttgtttaaaacccgggtagaaaacaccctcaaggttgcaaccaaaaagccaaaaccgacatctgttaagctccctttcgggctttgtggctgtcaagaacagaacggtggtgt

SEQ ID NO: 102820 - DNA, 352 bp, Arabidopsis thaliana columbia
  unsure (1)..(352): unsure at all n locations
atggcttctctcctttagagcgcatcaattcagactgttgtgtgtttcccttacttgggcggagtcattgagctgggcgtcactgaattgatttcagaagaccataacctgcttcgaaacatcaaatcttgcttgatggaaatatctgcacaccaagacaacgatgacgagaagaagatggagattaagatcagtgaagagaagcatcagcttccattaggtatttctgatgaagacttgcattacaaaagaaccatttcaacagtactcaactactccgcagatagatcaggtaagaacgataagaacattcgtcatcgtcagccanatattgttacttctgaacctggct

SEQ ID NO: 102821 - DNA, 354 bp, Arabidopsis thaliana columbia
gacgaccactcatagtaatcgttatcttcatttatataaccgccggcgtgaaaatcgccgccgcggatgagccggtgccgacgccatggccacaccagttccacgcgctaatgttcatgaattactccggcgatctctcgatgatcgacctttggtacgactggaccaacggtcgtaatttcaatatcatccaggagcagctcggtggtattacctacgaccttgaatggaacaatggtacttccttcttttacacgctcgacgagtcaaaatcgtgccgctccggtcagctcgaggttggaatactgcgaccaaactggctagatggagccaagtaccttggtcaacagaacg

SEQ ID NO: 102822 - DNA, 312 bp, Arabidopsis thaliana columbia
cacaaagaaggagctcttaaaggctatagacttaagacttgaagctattaaaaaggacttgacaacgtccatttctcatgcatcagctagcggtttcgaccctcatactgtttccgaactcaaacaatttgctgatagatttagtgcacatcatttggatgaagcatgcagtaaatatatctcactatggaagcaaaggccagacttgatcgacatgaagtactcgaatcagttggctggtgttgacaatgtcagcctccaaaaagatagcacgcgccagaagcaaaatgcggtaaacgaatcagaacatca

SEQ ID NO: 102823 - DNA, 347 bp, Arabidopsis thaliana columbia
atcaaagctacaaaagccataaacgaaaacattcttcttgaaatgccagttcccattgttatcaaggaagcaatacctaaatctggaaagaacagcctcggtgatgaactgtacaagatgttggctgtggaatctgcaacagtagatgaaatctttatatcgctcaatctgggaaccgaacatgcagcactcgagacagttaacaagttagaatctgctatgtttgcttggaaagaaaggattacagaacaaggcagcaatggtaaatcccctgtaagagcatcgtggtcattcgctaaagatccgttgtctgaaattggtcgcaatgagtcactcttgaaccgagc

SEQ ID NO: 102824 - DNA, 358 bp, Arabidopsis thaliana columbia
  unsure (1)..(358): unsure at all n locations
accacgcgtccgaagacgttaaacaaaccatctctcgattctctcgggaaaacactccaactacgaatctacaatcatcgagcacatacaaagaggaagatttcanatccaatcatcaatcaccccttttgattgatcggattcaatctacttgccccttaaattaatggttgatccgtttgaatttggtgtttgttgaggcggaaatctcaaaaatgaaccaccttcaaggtaaccttcaatggcttcttcttccctctcttgtggtttccccttttagcgaggctcgattcgttgtggagaagaatagtttgtcggtgacttcgccggagagtataaaaggaactcatgatagtgc

SEQ ID NO: 102825 - DNA, 366 bp, Arabidopsis thaliana columbia
gttgttcccttatataaagaaactcttcctttcataccaaaaaaaaaaaaaaaatccattttcatttctcctcttaaaaaaccgccatgacctctctctccaccgccggttaccttcttctccttctccttctccctataagctacgacggtggcttcatcggagccgccgatgcagaacatgacctcagagccactgatctccataatcatcgccatcgtcgccaccgtaaccaccatcgcggagaagagtttgagtactcagccatatcatgtagagcttactcagcctcattggacgagtttggcgccgtaggagacggtgtaacttcaaatacagcggcgtttcgcgacgcggtgtcacaac

SEQ ID NO: 102826 - DNA, 352 bp, Arabidopsis thaliana columbia
cccacgcgtccggactactctcatcattgctcatcgcctttctaccattcgaaaagctgaccttgttgctgtgctacagcaaggaagtgtctctgagattggaacgcatgatgagcttttttccaagggagaaaatggagtctatgctaagctaattaaaatgcaagaagcagctcacgaaaccgccatgagcaatgcaagaaagagtagcgcaagaccgtcgagtgctagaaactcggttagctcgccaataatgactcggaattcgtcgtatggaagatcaccttattcacggagactatccgatttctcaacttctgattttagcctctccattgacgcttcgtcctac

SEQ ID NO: 102827 - DNA, 406 bp, Arabidopsis thaliana columbia
caacggtcgagagatggtgggtctggttcgagaacccttgaacgtatatgacaataatgcaatcagagtactcaacacgcgatctgagcaagtgggtcacatcgagcgtacagtagcagccgttctcgcgccgatgattgattctcacacgatcgtcgtcgagggtattgtacccaatactcgttctaactccaataggtacagaatcccttgtcaaattcatgtatttgcaaagttagaagcgtcctctactgtgaaatcgacgatttctagaggtgggttagtattgatttcggagtcagatacatcgtttgggttatctgaggctgttgtggttaaggaacagatgggaaatggagataagaggagtgttgataagatttttaaacttgttgatgagaatgtg

SEQ ID NO: 102828 - DNA, 427 bp, Arabidopsis thaliana columbia
  unsure (1)..(427): unsure at all n locations
cggaagagtattcaccagataacctaatttccaagactgagaggtttctctctcattccgtctacaagagcttgcgtgaatccattaaagctctcaaagcttgtgagtcagtctctcctttagccggatcgcttggtataacggaacagtgcatcgactctatagtctccagagcttcctcagctgatccttcactcttcggttggccagtaaacgatggcggcggaagaggaaacatctccgccaccgatctgcaacttatacccggcggcgcggcgaaatctcgaaagaaaccgagtagagattcgaacatggagctgtggtttgaagatctgacgcaactgagtcttccgatcttcanaactgtgatcctatcaatgagatcaggagatctgagctccgatatcatagagagctgtttgatttg

SEQ ID NO: 102829 - DNA, 355 bp, Arabidopsis thaliana columbia
tcgacttattcatatatatgttgctttttatcacataaagctcgttgtgcaaaagaacagaatgagttctaagtttgatatcggctccttaagcatagtaatgactctgcttatttgcttcttattattatctttggctccaaaacttgaggctgagctcgcaacggtccaacatgctccaaaccccgatggctctatcagttttctggtgattggagattggggtaggcatggactctacaaccaatcccaagttgccctccagatggggagaatcggggaggagatggatatcaattttgtggtatcgacgggtgataacatctacgataacgggatgaaaagtatcgatgat

SEQ ID NO: 102830 - DNA, 358 bp, Arabidopsis thaliana columbia
aggaattctgatagacttgattggtttttttctttctttctttctcttttttatgtggaaaggattgaagaaccctaatttgattcataagaaagacactatttttagattttgcgtttggttgattagagtaaccctaatttgttactcggatctaatcgtctactttgacttaagatgaatgatctgtaaatatttagatctaacatgtcttgagaaagtttcaattttttcttaacggtgaatttgatttcttattcttcagtatatatactcttccacaaaggaagatgctcaaggtccctgaacaccaagttgctggtcacattgctagtgatgggaagctcggtccactcgt

SEQ ID NO: 102831 - DNA, 387 bp, Arabidopsis thaliana columbia
cccccacagatgaatctcaaaatgatggtagtgctgaaaaggaggaatcagacgaggttaagaaagtggaggattttgtaaccgagaagaaggaagagttgtcaaaggaagagttggggcgtcttgttgcctctcgttggacaggagagaaatctgataagccaactgaggcagacgatatccccaaagctgatgatcaggaaaaccatgagcacacgcccatcactgcacatgaagcagatgaagatgatggatttgtttcagatggtgatgaggataccagcgatgatgggaaatacagcgaccatgaacctgaagatgattcctatgaagaggagtatcgccatgattctagttcttcatacaaatctgatgcagatgatgatg

SEQ ID NO: 102832 - DNA, 370 bp, Arabidopsis thaliana columbia
acggacgcgtgggcggcgaaaaagagagcgaagcttgaaatctccgattaagccatgaatgctcccgaacgatatgagcgattcgtcgtccctgaaggcaccaagaaggtttcttatgatagggatacgaagatcatcaatgctgcttccttcacggttgagagagaagaccatacgattggaaacattgtccgcatgcaacttcatcgcgacgagaatgtcttgtttgctggataccaacttcctcatcctcttaagtacaaaatcatagtgaggtggtttctgtatgtagattcacacaacaagccagtcttccccaatgcaagcatacaaccaggccatcaatgacttgggcaaggagctcgactac

SEQ ID NO: 102833 - DNA, 413 bp, Arabidopsis thaliana columbia
caaactgctgaagtggtgactaacgcggataaccagttggaagctagcagtggtatgacaactggtccagctacagagaagaagagaaagcgaacgaagggctcaaaagatcacatcaaacaatctactgctgctgctactacaaattcaagaaaaattgtgaatgagataaatgaattacctggaaatggagattgtggtgatgctacttctaaatctcttccaatcccagaaagagaaactcttcaaaatcctcttgtagaagcaatacaaaaagaaactgagttgggtgtgaaaactgtcgaagatgtgggaacaaataatatggaaactgatactctagtgagccacccggaaaatcatttggtggccaacagtgagttgacatctactccagttactgagaagaagaa

SEQ ID NO: 102834 - DNA, 387 bp, Arabidopsis thaliana columbia
atccgttttgagatcaagaagaagttcattttatcgtctttcatggcgaaggagcagcacttacgaccttggtttctggatctagtaccggctttggttgttttgctcgccgcagctcatgtcatcgccttgggttactggatttacagattggccactgatcgtcgagctcagagtcagagaggcaaattccactgaagaaacattcgaataggttcgtgatctgaactacggtggtccagaaatttcaacagttggtggattttgcttccgatctgatatttgcgattaggtgggggttttgtgatcattgatttagtcgcttatgaggatttcggaaatgtttgcttggaattccgcctaactagaagtgattttgaagatact

SEQ ID NO: 102835 - DNA, 429 bp, Arabidopsis thaliana columbia
  unsure (1)..(429): unsure at all n locations
gacactaccactttccattacaatctctttgaacaaacctcctctgaggaagagaatagtaaaaagaatcttctggatatggtagagagaagcgcttattatgcagtccgagtcattctgaaacgtttgctttcggaacacgaaaacgctcggtttgtagtcactggtcacagcttaggaggtgctttagcgatactgtttcccacattgttggtgttgaatgaggaaacagagataatgaagaggctgcttggagtttacacgtttggacaaccaagaatcgggaacagagaggtcgggttattcatgaaagctcaactgaatcaacctgtggatcgatacttccgagtcgtttactgcaacgatatcgtcncgagattgccctacgacgacaaaacgttcctctataaacatttcggactctgtctt

SEQ ID NO: 102836 - DNA, 181 bp, Arabidopsis thaliana columbia
atcatctctctcgctgtcatcgcagagaataatccacatcgatagcaattgtctctcgacggttcaatagagaagcaagcggagtccgtggacgtaaacaagtacacgatcaaatttcaagtcagagtttcggggaaagtgcaggaatgggggatcatctggtgagagctgacgaattcga

SEQ ID NO: 102837 - DNA, 422 bp, Arabidopsis thaliana columbia
acaagccgtctgaacgtgaggccaagcatctagaggccaatctccatataagctcagtctatgtgaggtacaatcaatctcttactggtctcaggctgatcgatccttgggacagaaacttgcaagccgtctgaacgtgaggccaagcatctagaggccaatctccatataagctcagtctatgtgaggtacaatcaatctcatcgatctatcatcgcttggtcgttaaatccgtcaaaaagataatcacatgtgttgttgtttcttgtctatataataataatgcttgtaatcccaaaaactcatgtttccttcctttctactctcactgtctttgtaatctctttttacaataaatcaatgtttcttgaagcagtaaaaaaaaaaaaaaaaaaaaaaaaaaaaaaaagggcggccgctct

SEQ ID NO: 102838 - DNA, 378 bp, Arabidopsis thaliana columbia
cccacgcgtccgcccacgcgtccgaaaaagctgaaaattgggggaagaagagagaagagtttcatcgtcactggaatcaatagagtcaattggcgggagaggttagtctcgaaaagaagtggaagccctagggggaaactttctcgctcactcgctcgtctgcaaacaccatggaagacagtcctcaaggccttaaaaggagtagagatccggatcaggatcaggatgacgacagcggcgaggctggcaaggccgacggaagcggcggagagaatcaggagcgcagcagcgaccagattgagctcgatgacgacgatttccaggaaacccgtcccaagcccaagcgtagtcgcacccatcctcctcaacagaatctca

SEQ ID NO: 102839 - DNA, 390 bp, Arabidopsis thaliana columbia
caaaaccttacccagctcactgatctcagcctgcaaaacaattctcttagtggtccaattcctaacctccctcctcgccttaaatacttgaatttgagcttcaataaccttaacgggtcagttccatcttctgtcaagtccttcccagcatcctcatttcaaggtaatagccttctatgcggtgctcctctgactccatgcccagaaaacaccactgcaccatctccttcaccgacaacaccaacagaaggtcctggtacaaccaatataggtcgtggtaccgccaaaaaagttctctccactggtgctattgtgggcattgcagttggaggttcggttctgttgtttatcattcttgccatcataaccctttgctgtgccaagaaaaga

SEQ ID NO: 102840 - DNA, 402 bp, Arabidopsis thaliana columbia
  unsure (1)..(402): unsure at all n locations
acggacgcgtgggcttttccaagtttttaaagagagagagagagactgaaagaaaaacaaaaaacagagagctttggttccggatcttgattatggcaaatgggtgggtcaaatcgttacaatgcaagtcgaaagctttcgatgatgtttacaatccgattaaaaacccgaacccgaatccgagcccgagtccgaaacatctcatgtcaagctacagttgcagaaaaagcacacagagtctaaaagatgtgatcgaaaccaaaaaacccaaacctaaaccgaagaaacccaatccaaaaccggataaacgagaaaccgacccggttttatcaccatcaacccggatccgatcaaccggagttcgtgatcgtgatccgtntttaccgacattgacggagctat

SEQ ID NO: 102841 - DNA, 421 bp, Arabidopsis thaliana columbia
aacacaggaacaacttttgcagctacaaatttggataatctaagcagagaattatgtcatcgaaccaagaaaatgccaaggaagagaaactccatgtcaaaataaagacgcaggaattggatccaaaagagaagggggaaaatgttgaggtggagatggaagtgaaggcaaagtcaattgagaaggttaaagcaaagaaagatgaagagagtagtggaaaatccaagaaggacaaagaaaagaaaaagggcaaaaacgtggactcagaggtaaaagaagataaagatgatgacaaaaagaaagatggaaaaatggtctccaagaaacatgaagaaggccatggagatctggaggttaaagagagcgatgtgaaagtggaagagcatgagaaggaacacaagaagggcaaagagaagaaaca

SEQ ID NO: 102842 - DNA, 240 bp, Arabidopsis thaliana columbia
ccagaaccctagaactcgaaatctctatcgaacccgacacagcgccatgtcgctcactaatccggcgaatctcgttcacaagccgagatctaacacatctcgcactcaatctgtacctaaatcctccgcatgatgcgtctgttcagatgacagatcgtcctcctccagacttcaatcgagtgtaagctttctccgccgccgtcgccctctcgtcgatcctcctctctgctcctatgccag

SEQ ID NO: 102843 - DNA, 399 bp, Arabidopsis thaliana columbia
aaaaataaaataaagaaaaggaacagtttattttcaaaaattaaaaactgttcttattctccacatccacatgatctctacaatctccaaacactgttttctttcacaccttacacaaaaaaaaaactgttcttttaaataattaaaaactgtttctttgtttttttattattattttgtaatattgatacaaattttttgtttttataacactaatgcatatgtttgatattctcaaaatattttaatatattttataaattaatatttaattaactctgcataacagtggcataattctagtatatatataattaaagaggtttaagaaataacgaaaatttacgtactcatcaaattattttactacagacaaaattttgccaaaaaacaaatttg

SEQ ID NO: 102844 - DNA, 232 bp, Arabidopsis thaliana columbia
gaagaaagatagagaaaaaaaatgggaggcaaaggtgtgatgatggtggcgatactttgcctttgggcactctctgcaacatctgaagcagtaacagaggctgagccaggtttgatgatgaacttctacaaggacacgtgtcctcaggccgaagacatcgtccgtgaacaagtcaaactcctctacaaacgccacatcaacaccgctttctcatggctccgtaacatcttcc

SEQ ID NO: 102845 - DNA, 171 bp, Arabidopsis thaliana columbia
aaaaaacgtttcgatttctcgcatccattcgaatcgaaaatcttgttatctctttctctctaactctactgcactcagaatctctctgtatagaaaagccctaagtaagttgtgatgttgcgagctttagcatggtgtctcgaatggtgtttgggaagcaaagctagtggt

SEQ ID NO: 102846 - DNA, 269 bp, Arabidopsis thaliana columbia
cttcataagaacaatcctcaccaaacccatcttcaaatttttcttcctttgaccaccattgcatgcttacccgattgggaaactctttggtaaccgtactgatcctcttccaacggcgatttcccgatccaaattttgggttgaatgcattcaaagtttccgtttatacaaaccaatttcgggaaagttttcatccattttttatggctgcttacgcgaattatcaccgacacgcatcacatgggagagcacgttcaggtgtaaacctg

SEQ ID NO: 102847 - DNA, 122 bp, Arabidopsis thaliana columbia
ctaaaatactgaggcagacattagcgttgataaacctacaaacgtacgaacgagagatagacagccatgtctgcgaaaacaatcctaccatcagtacttttggaggttctcgtcgccgcatc

SEQ ID NO: 102848 - DNA, 226 bp, Arabidopsis thaliana columbia
cacgcgtccggagaccgctctctcgtccttatcctccatcgtcgaatggtttaatccagcagctgtcgactatgtcgacaacgtactccgctatttcctctagtagatttactgggttttcaccaataagtgtaccttttgctattcagatcgtaaccagaaggcactttcttaatcacaagacgtcttacagatttgggttctctccatcacttcagggaactag

SEQ ID NO: 102849 - DNA, 110 bp, Arabidopsis thaliana columbia
gcatctctctcgcgcaaccttcgattttcgtttattcgcatccatcttgacagagaaagacaatcaatagatcgaccatgcttggtgtaccaagatcgtctcaccggtga

SEQ ID NO: 102850 - DNA, 425 bp, Arabidopsis thaliana columbia
  unsure (1)..(425): unsure at all n locations
aagggtgtgatcaggaggtactgtaatctcgcacacaagaaccattgatcttggtccaagtgagaaagacaggggctacctgaacctgcatcttccccgacggttcagaagacctctgtttccggagaggatttccagctcgcgccgccgaaattgggcgtgattttcgtgatctcttcgcttctgtgttcgctttatctttaccttctctgtttccactacaatgttgacaatgagctcaagcgtccgatcctcattaacgctgggcttagcttggttggattctttgtcacactcaagttgattcctgtagctgctagatacgttctgaggcgtaatatgtttggttttgatatcaacanaagaggcactcctcaaggagaagttagagtgcctgagtcattgggaattgttgtcggtattgt

SEQ ID NO: 102851 - DNA, 177 bp, Arabidopsis thaliana columbia
accaagcatccggtcatggtttgcctttgtgaggaatgtcattgcttgagaaaaacccattttccaaaaatcttttctagctccatcgatggctctgtaaccgaacttcaccgtcgtgatgatcaacaacgtctatctgattcatcactgcataatacatcttcagggttttgggcc

SEQ ID NO: 102852 - DNA, 159 bp, Arabidopsis thaliana columbia
cccacacgtcggcgcatctcattgcttcatcattagcatatcatcaacttaatcgtttcactcaaaattagggttttctcttttctcgaaagtcttgccgttttctgaatcatctctatctggtttgagggtttcgtttgatatctggataaaggggtt

SEQ ID NO: 102853 - DNA, 437 bp, Arabidopsis thaliana columbia
cccacgcgtccgtgtcactagaggaagctcgacaacttgggcataactacattggttcagagcaccttttgcttggtctacttcgtgaaggggagggtgtggcagctcgtgtcttggagaatttgggtgcagatcctagtaatatacggacacaggttatacgtatggtcggggaaaacaatgaagtcacagcaagcgttggtgggggaagcagcggaaacagcaaaatgccaacacttgaagagtatgggactaacttaactaaactagcagaggagggtaaactggatccggttgttggaaggcagccacagatcgaacgagtggtccagatcttggctcgaagaaccaagaacaacccatgtcttattggagaacctggagttggtaagacggcaatagcagaaggacttgcacagcgaatagctagtggtgat

SEQ ID NO: 102854 - DNA, 385 bp, Arabidopsis thaliana columbia
caaccccatttccccattgagacttttgttgacctaattcctccaaaatctcaccttcacattgctcgatttcagtcctctgaaaaaatctccctgctttgctatggctctgaggtgttttcccatttgggtttgtccccaaacgactcatcatcgttctcctctcatgggtctcgctgaattcgacgctgataaacgccgtcgtttctgtctctgggagtgctcttcttcagcttctcagagagctgtcactgccattgaaggcgagattccttttagccgcgagctcaaaaagtcctctgatgaattgggtttgactcaagagactcaatctctttcttttcacagagacttaagtatgcttcctaaaacgctaactgcaaac

SEQ ID NO: 102855 - DNA, 352 bp, Arabidopsis thaliana columbia
  unsure (1)..(352): unsure at all n locations
ttattttctctgtcaaagttgaattgctttttctcttgtttttcgtcgaagtggaaaatttgattttattttttccggaattttgaaaatctgtgagctcataaatcttcgctaatcgcagagacgaatctgcgaaaattccaacaccagattccggcgccggagcgccgatgaacaatcaggtcgtttagtaaaattcgatgaatctcccgcggaaataattagattcgatttcgatttccgtggggaagttttgtgccatttgatttgttttcgttcgtcnccgttggagattttttgtaatttctggggacagaaacaatgtctaaggtagtgtacgaaggatggatgg

SEQ ID NO: 102856 - DNA, 332 bp, Arabidopsis thaliana columbia
gttcttcctcgctcttcgccgccttcactcgcagtcgcaggtctgcccagttgaatacattacaagggttatttttgtctgaatggaaactactcaaaaagatgagctttcgagcttcttaagtgttcttcctcctgtggatttctgttgtgtttatggttcaacattgcacccaaataaccaagataagtctaagatggtggactatatccttggagtctctgatcctataaaatggcattctgcgaatctgaaaatgaattcagatcactatgcttcatggatggttcaccttggtggagctaggctgattacaaatgttgccgataaag

SEQ ID NO: 102857 - DNA, 353 bp, Arabidopsis thaliana columbia
cttacattctccctctattttttttttctctctctccacaagaaacgccgtcgttcattaaaaatgatggcggtgggcagatccggaggcaccatcctattgttctgcctatcattcttcgccgcggtaaccgcggagagtccataccgattctttgactggaatgtaacatacggcgacatttacccactcggtgttcgtcagcagggaatattgattaatgggcaatttccgggaccagacattcacagtgtgacaaacgacaatctcatcattaacgtacacaacagcttagacgagcctttcttaatctcatggaacggagtacaaaacagaagaaattcttatgttga

SEQ ID NO: 102858 - DNA, 275 bp, Arabidopsis thaliana columbia
ccacgcgtccgcccacgcgtccgcccacgcgtccgatcagctgcagcaactccaaaacccaggggaatcgccgccggtgcacccttttgtagcgccgttgtcgtggcgattaggaacatggagaggacaaggagaaggtgaatatcctactataccgtctttccgctacggcgaagagatccgtttctcacattccggcaagccggtgatagcgtatacgcaaaagacatggaaattggaatcaggagctccgatgcacgccgagagtggttact

SEQ ID NO: 102859 - DNA, 207 bp, Arabidopsis thaliana columbia
tttaatatggcaaactctcccgctgctcctgcacccaccaccacaaccggtggtgactcccggcgacgcctctccgcgtccatagaagcaatatgcaagatgagattccggagagatagcaaaggaggtggcagatcggatatggtgaaaccgtttaatatcacaaatttttcgacacaagacaaacacagtagttgttgttgtttc

SEQ ID NO: 102860 - DNA, 377 bp, Arabidopsis thaliana columbia
accacgagtccgcccacgcgtccgctctggctccgaggaccagtcatcatgaaaggttatgtgggaaacgagaaagcgagtgcggagacagtagacaaagaagggtggttaaagactggtgatctctgttattttgattcggaagattttctatatattgttgatcggctaaaggagctaatcaaatacaaggcttatcaggttccaccggtagagttggagcagattcttcactcgaatccagatgtgattgatgctgcagttgttccgttccctgacgaggatgcacgagagattccaatggctttcatagtgagaaaaccaggaagcaatctcaacgaagcgcaaatcattgatttcgtagctaaacaagttac

SEQ ID NO: 102861 - DNA, 380 bp, Arabidopsis thaliana columbia
gcggacgcgtgggaaaagatgatggaacgcaatgctagggaaatgtggtttctcactggcgtttattcttctctttagtgaccgaagttgcattgtggatggccgctttaacttgagatatcttccgagttcacaaatcattacaagtttggtgcaaaactttatcagctggattcggtatagtaaaacaggagatgactcttcttcactgctaagacgctccacggaacttagtcttaggttgattcggaatggacaatctgatgctgttgagcgaatccttgtggttgtggaggcaagtttacgtggggagaaaacatttggatgttctcaagatactagtggagattggtgtcgtcttcaacatctccgtggttgtt

SEQ ID NO: 102862 - DNA, 367 bp, Arabidopsis thaliana columbia
ggttgaaagagctttagttccgtacaaatggcgagtaagaaggttgacggagaaggaaaagggaaagctatagcgaatacgaggatgcttcgaagcatggatcgaaagactcgaggcgatactaagcgagatggttcttcttctaagctcatgaagatcgaatctccggagaagaagaaacggaagacgacgaaagcgaagaatgttggagctgcgaagaagaaggtaaagaaagaagaggtagctgtgaaaatcgagaaagaggaggaggaagatgatgatgctgcagagaaagaagaagatgacgactccgataagaagaagattgtgatcgagcattgcaaacaatgcaaatcattcaaggaga

SEQ ID NO: 102863 - DNA, 380 bp, Arabidopsis thaliana columbia
tggcgaagaggatccacctgacggaactaggctgcatcgcgtgtgaggaacttactgagctcggtgcgggtaaagaaggatggctcgtgaacaatccaaagcttttgagtgcacttgattctcactctttagccctagccaatcgatttctcatattgattgtgaattggggtgatcctgatgcgcctcgtgtcaagatcagacctgatctgtctccgattgaggctgagtcgattacggcgatcgagtggttagtgtttgatgatgtcagagtcgtcgttgcggggacttcttgtggatatctcttggtttactctgttaccggtgatctgatccataagcagattgtacatcaaagccgtatattaaaaataagagtt

SEQ ID NO: 102864 - DNA, 389 bp, Arabidopsis thaliana columbia
cggacgagtggggaaaggtcaaggatctgggtctgattcagatgatgaacaagggcaaaagagtaaatcgaaatcggatgatgagattcttaattacggattgaccattgcttcgaaagggcaagagaatgtattacttgtgcttgatcaggttttacgagactacagttgtttcacagagcagagaatgtctgaaaaagccaaggagactggagaagaggtgctgggaaattcagtggtggcggacacttcgccggaggagcttaagggtgagagaaaggatgttgtggaaggtcaatgtgcggcgtattggacaacacttgcaccgaatgtcgaggattatactcacagtactgctaaaatgatagcttccgggtcaggtaagctga

SEQ ID NO: 102865 - DNA, 349 bp, Arabidopsis thaliana columbia
agtcctaaccaaatcatttcacaattccggtgatcgccggaattatcaagaaatttatccagattccgatttatcgctagatggcaacgtttaacagcttccgtaaagctgtcggagcaatcaaagattccactaccgtaagtatcgccaaggtcaacagcgaattcaaggatttggatgttgcgatcgtaaaggccacaaatcacgtagaatctgctcccaaagaacgtcacattcgtagaatattctcggcgacatcggtagtgcaaccactagcagatgttgcttactgcattcacgcattaaccaaaagattgtcaaaaactcgcaattgggttgttgcgatcaa

SEQ ID NO: 102866 - DNA, 305 bp, Arabidopsis thaliana columbia
acccacgcgacaagaaagagagagaaccctagaaaacttttttttttcttcaccattgttgattgatggatgagaaagcttattcacacttcatttctttgcttttggtgagagaatggggcagagaagaagagatgaagaaaattaaagttctttccttttctcttttggatctaatttcatcttgagattttctcatagcttgatactaaagctacataaaaaacaattaggtgaaatgaaagtttgtgtgttttgataagttttcagagattttcggttgcatgttgttatcttgcgcttga

SEQ ID NO: 102867 - DNA, 368 bp, Arabidopsis thaliana columbia
aagaaaaagtaagtatcaaaaaaacagaattttgtcttcgttcttctctgagattaaagctttctcttttgtaatggaagaatctcagggcatcaatggcgtcgatgattcagatcgtcatctcccaattctctacttaacctttttaacgatctggtctttctccgcttgttcttggacggttaacactttcaaaaatcgccactttcagacaaatagtttacaatggactcttgcttcagttccattaatcaaagccttacagctcacactatctttcctcttttggcattcatgttttcaccatcacatttgctctctatggatgtcttttggtgtatatgtgactggtgttctgtttcagacag

SEQ ID NO: 102868 - DNA, 406 bp, Arabidopsis thaliana columbia
acgatctcttgcatcatcataatcctttgcatgcgattcggcttttagcggcggtgatgctacattgagttagtacccacttgcctctcttcttctcttttattgcaattttcgacctaacccaagtgttcgaagctcgtggcatttcctcactcgaagtttgaatttggttttgtgatgggatctaaacaagtatcaaagactagaaatggtggatttagcaagttaaagactgttgagtcctctgcatcttcaacaacctcgtcttcaaaactttatcaagaggcgtctgtagatagccatagctcccctacttcttcatcggttcgaagcaagcctcagttaccacctaaagcctttgcagtccagagaaaatgtcactgtcactgtgcgttttcgtccactc

SEQ ID NO: 102869 - DNA, 375 bp, Arabidopsis thaliana columbia
acgaaaacaaaaccaccattttctctctctctctcctcgccagcttctgcaattcgaaagttcttcgcatcatcttgctgtcaccactctctcgcgaatcgaatcacgattcttcaatcttcttcttctctattgcgatctctctgaattttgtagcttcacgatttcagtatctctactttcatcaccaatcgttgggggtttagggtttttgcatcgacgccatctatcgagctacggagaagcatactcatcttctattttggctaaatccgaggtcaacttaatctctacgaaatagcttttgagtgatgattccgatggataattattgcgtaccgagtactagcacgaccggtttagtgttttcggcga

SEQ ID NO: 102870 - DNA, 233 bp, Arabidopsis thaliana columbia
aaactccaattctctattcactactaatcattgatccaaatcaacgccggtggcttttaatcggcgagacactctctgatttctcggtcaccgatcaactgatggagggttttttttggggacgacaatgcaaaggtagatgatggatactggtaataataatatgaagagagccaagaggaatttggatgggaacgatgatgatcatcctgagcgaaaacgccctgcttttg

SEQ ID NO: 102871 - DNA, 405 bp, Arabidopsis thaliana columbia
aaaacagtcaagtactgctcagagacttgcaccgattcaagaacataacaatgaagagagacaagaacagaaaccgatacaatcgctcatggacatgccgatacaatacagagagaagaagcaagagattgaagaggagcctaggaattcaggggaaggaccatttgtgttagattcttctgctaaatgggaaacattcgatcatcatcccgtgacgccattgagctcgactactgcgaaaaataacgcgatcccgcccaggtttaattgggaattctttgattgagaaagttcacattttgtgaaactttttctttcttttatcttgtatgcttatataattcttgtgtggaagtgttggttttttttcaggcttcttcatcttcttcgtcaccatcattatga

SEQ ID NO: 102872 - DNA, 312 bp, Arabidopsis thaliana columbia
aagaggcaagccatagccaaagggttcgtgtcggcttcaaccaaacactgactgtgtgtgtatacacctttatatacacacctttatctctctctctctcacatctttgttacaaatcaatcttctactgttttctttttcctcttcttacattattttttgacagcaattcttagtttctcttctatcccctttctgggttttgtttgaactctacctcgctttggatacaatggttttaacttagaggtaaatttatcgacagtaagtatattcctaatggcagcttccaatcattcatctgctaaacct

SEQ ID NO: 102873 - DNA, 362 bp, Arabidopsis thaliana columbia
agaccacgcgtccggaagaactcaaacgcaagacagaaagatcaatggcgagcaacggagttaccaactgtaacgcaaacgccaatgtttggcggttcaaaggaaacggtgcaacgagtgatgcggcggcggtgacgttgagaaagcttgcttttgggatgtttaaaaactgcaccatgaacagtggaaagaccattttgttcccaactcccggcgagccctccgcccattccaacttcaggacttgcccggaagccgaggaagccgttgccgcagctgcacgctccggcatggctaactcttacgcacccagccctggagttttcaaggctagaagggcggtggctgaatatttaaacgga

SEQ ID NO: 102874 - DNA, 284 bp, Arabidopsis thaliana columbia
agaatgttttttttgaagggagagaagatttgatttgctaacaaagtggcgaaagaagggtggagtctttttgatgggatatacaaattttagaaacctgtctcttgggaggggggtgaaggacttaaatgcggccatagggatctgtaatgccttgagggatggacctgatatacttgtttgcgacgaggctcacatcattaagaacaccaaggctgacacaacgcaagcattgaagcaagttaaatgccagagaataattgccttaactggctcaccccttc

SEQ ID NO: 102875 - DNA, 396 bp, Arabidopsis thaliana columbia
acgcagatgatgagattacacatgatgaacaagtggcaacttggtctgctataagtaaagaaaccaagtcactaatccatttgaatggtgttgcttcagtcgcatcatccgatctatctggcttcagagccaagaaaagtagtaatggtctcaaagatcatgggaggccaaaattttcatttaactcacatactcatggagaaacgtcatccaagataagtgacatggctgaaatctttgagcctgatgtggaggatcaggctatagaagaggatccaattattgaatgccccaacagttttgatgaaagatcagaaaacaggcagggtgtttctgttgctgagtcgagagaagttttgcacgagtgcactaaagatgcggtacccaagcttcaag

SEQ ID NO: 102876 - DNA, 303 bp, Arabidopsis thaliana columbia
ctttttggagaagaaaccaaagaaaacattcgaaaccctaaaatctccattagaattcgaaaatgacaaagaagagaaagctcgaaggagaagaatctaacgaagctgaagaaccgtcgcagaagctgaagcagacgccggaggaggagcagcagcttgtaattaaaaatcaggataatcaaggagacgttgaagaagttgaatacgaggaagtagaggaagagcaagaagaagaagtagaagatgatgacgatgaagatgatggtgatgagaatgaggatcagacggatgggaatcgtatag

SEQ ID NO: 102877 - DNA, 361 bp, Arabidopsis thaliana columbia
acgacttcttcttcgttgccactgccccaattaactctgtctatctctctcttcatcccctagattgaaactaattgcaattggagtgtatattgcagtatctagtttttgaatctctgggtattcctttatggatccagtagatatggttgtgtcacagccaattacgcctggtcaggtttcgtttctgcttggagtcattcctcttatgatagcatggctatactcggaatttctggagtataggaggtcttcttttcacgctaaagttcattcagataagaatttggttgaactggaaatggtgacgaacaaagatgatgaaggaacagttttaatggaaggaggtcttccaagatct

SEQ ID NO: 102878 - DNA, 432 bp, Arabidopsis thaliana columbia
cggacgcgtgggttggaggacacagagaagcgcaaattatcagacagagtgagaacgaagaagaagaaagcacaggatgctaagcttgagatattcattaccttatcttcttcttcaaacaagggaatcatcaactaagctcttcaccaaaaagcctaacaatgttgtggtttgtgcggcgagaggtccaagacctcggtctcctcgtgtatggaaaacaaggaagaggattggaactatctctaaagctgccaaaatgattgcttgtataaaaggattgtcgaatgttaaagaagaagtttatggagcgcttgattccttcattgcttgggaattagagttccctcttgttatagttaagaaggcattagttatacttgaagatgaaaaagaatggaagaagattattcaggtgacaaaatggatgctgag

SEQ ID NO: 102879 - DNA, 376 bp, Arabidopsis thaliana columbia
acaatgaaagtttctccaacaaaaaaaaaaaaaaaaaaaaaaaaaaaaaaaaaaaaaaaaaaaaaaaaaaaaaaaaaaaaaaaaaaaaaaaaaaaaaaaaaaaaaaaaaaaaaaaaaaaaaaaaaaaaaaaaaaaaaaaaaaagggggggccccccaaaaggttcaaaccttacttacccttcaatgcaacttcaaaccccttcaaaagtttcacctaatttcatttcattggccttctttttaaaacttcttaattggaaaaaccctgggtttccccaatttaacccccttgcaaaaaatccccttttcgcaatttgggttaataccaaaaaggcccccaccattcccccttccaaaaatttgcccaccctaaat

SEQ ID NO: 102880 - DNA, 374 bp, Arabidopsis thaliana columbia
gcgtccaatgccaatttttcttcctaaatcctctctctctctctccgttcccgagacaagcaaaagcttcaatctcaaatctttcagcagctacaaaaatgttcttcatctaaaagagactgtgaagcagagagagagagagagagagagagagagagagatgggaggtgtgacgtcatcagttgcggcgaagttcgctttcttcccgccgagtccgtcgtcttacaagctggtttacgatgaactgaccggacttcttctgatgaacccatttcctcaccgtgaaaacgttgaaatccttaagcttccgacacgtagaggaacagagatcgtggctatgtacgtcagacatccgatggctacctctactctgc

SEQ ID NO: 102881 - DNA, 213 bp, Arabidopsis thaliana columbia
cccacgcgtccgcggacgcgtgggatcgtagcaccactcagaccaccggagatcgttgtggtgttgagccggagtcaccgcgtgaatcatcctcaccggagagatctgtgccactccgccgttccaaccgccaagcaaaccgtaagggagactcgtcgagaaaagccaccgagaaagattgagatcgttagtggaccttttcccgttgctgtt

SEQ ID NO: 102882 - DNA, 319 bp, Arabidopsis thaliana columbia
agccaatcgaatccttttcaacccgacgggtcgtgaaattccccaaaagattcctctttctcagctcaatttccaaaagctccgacctttacgatcctctagattctcggcgccggtttctcggagtaaataatggctcagttcacgggtcgggtcgttggagactacttggtgggtcgtcaaatcgggtcgggttcgttctctgttgtttgggaagcgaggcaccgcgttgacggtactgaggttgctatcaaagagatcgccatggacaggcttaacaagaagctgcacgaaagtctcatgtctgagatttttatct

SEQ ID NO: 102883 - DNA, 172 bp, Arabidopsis thaliana columbia
aaaaccacaaaactttcttttctttttctaactattttatttattattcctacaaaatgtcatgtttgaagtatttcttgatcttattgatgttgggactgtgtgtctcagcggaggagaattttcaatatgactacttgaaagttccggcaagcgagtttgtgagctccat

SEQ ID NO: 102884 - DNA, 337 bp, Arabidopsis thaliana columbia
cgtaggtgacttgagtcaaaagtttttactcgcaatgaaatatttcgaagagccactagaggagctcctcgtgacaatgagaccagactgtcttgtcggtaacatgttcttcccttggtcgactaaagttgctgagaagttcggagtaccgagacttgtgttccacggcacaggctacttctctttatgtgcttctcattgcataaggctccctaagaatgtggcaacaagttctgagccctttgtgattcctgatctcccgggagacattttgattacagaggaacaggtcatggagacagaagaagagtctgtaatggggaggtttatgaaggca

SEQ ID NO: 102885 - DNA, 388 bp, Arabidopsis thaliana columbia
cggacgcgtgggttttagtttcaaatagggaaacatcacgctgttttgttcgaattcgttttgtcgccgtcggtaatggcgaaaaattacacagtcgccgatgtcgtaaatatcgacagtgacagtgacagtgacgacgacaacggaggagtaataggaatggttccgagcttggcatctctaatagagaatcagaaagtttcgatcgctgatgctgcgacggtggctcctcgagaaaccctagagtgccgaagtttctggaaagccggcgaaaactttgtgatcccttcaagtgttactctaactgccataggtatggttgagcatgctcgtgttcatccaaagtttcttcactcgaatgctacttcacataaatgggcttttggag

SEQ ID NO: 102886 - DNA, 350 bp, Arabidopsis thaliana columbia
gcgataactaggtttctctcctctctctcatctctctttgtttcgacccttttttagtatatttccaggaaatatcttcttcctcctttcgttttctctatctcagttttctctcgtctcagcattaagtagtcaacggtcagcgatctcggcgttccttctaatcggaaaagtctagcttcagtttcttttttttttgcttttttggtttccgcgattaatcgatttgggtattttgattttctcttcaaattaagtcaacgggtggatacgcgttgagagggcttttctcgtattctgcttctaatttcatcatcttggtattaccttgtgtgggtggtagcttaatc

SEQ ID NO: 102887 - DNA, 103 bp, Arabidopsis thaliana columbia
aggcccattcaacctcaatcttgattgtgaccactacatctacaactctatggctttgacagaatgaatgtgcttcatgcttgatcgtggaggcgatacaatc

SEQ ID NO: 102888 - DNA, 292 bp, Arabidopsis thaliana columbia
ctcacagctatatgtgaggcagaatttcattatcaagccaaaatagatccaatttcttatgcagtggatatttcttcaaacatgaagatatatccaaccaagcattggctggtaggatcatcactgccttcgaaatttaatccagctattgtgcaaaaggttctcgatgagctttctcccaataatgttcgaatcttttgggagtcaaataaatttgaagggcaaactgacaaggttgagccatggtataacactgcttattcacttgagaagataaccaaattcaccattc

SEQ ID NO: 102889 - DNA, 258 bp, Arabidopsis thaliana columbia
acgcgtccagttttgttggttctccgatctcagtggtgtcttcttctccggtagataattctcgtgttgaaaatctccggtagtgtttgactgagttacgaatatgccggtggtttgcgctggctaaggttgttacttctccggcggtggccggagatttagcggttcgtgttccgttcatttaagggaaacgactagtgtccaatcgtgtttctttcaggaaattgatgcgccggagttgtataggtcaatgcgtaa

SEQ ID NO: 102890 - DNA, 383 bp, Arabidopsis thaliana columbia
accacgcgtcagctttagctatttcttctgtggaggctaaggaggatagacaagggaagaaagatgtaaagattaaagtagcggaaaagaaagttcctaaacatgttcgagagaagcaagagactcttgcgcggtggaaagaagctgaagatgggaagaagaaggaagaagaagagagattgaggaaagaggaagaggagcgccgtatagaggaagagcgagaaagggaagctgaagagattaggcagaagagaaagatcaggaaaatggagaagaagcaagaaggcctgattctaacagcaaagcaaaagcgtgatgctgctaagaatgaggctttcagaaaaagggtgttgactgatgctggaagtcttcttgttgcagat

SEQ ID NO: 102891 - DNA, 426 bp, Arabidopsis thaliana columbia
aaatggagtcaactcccaagacaaaacctatcaacattaaatgtgatcctacaaaacctagttctgcttggaactggttggagaggtggatgtctgttccaaaacctgagaagacttctaaagcaaatttgacaacggaagagcaaaatttggaagaaacacagaatgttaaaatatcacctcaagctgactttgtgaattctgactcaacggtagagaacaaaactgaaactgatatgccaagctatgaagcaagtaaggtagaaggtcagaatgtggagctatctgagacagagaaaatgagccaatatgattcaccagaagcatcagcggaggtttattatgactcaatccagtctcagccacttgctgctaaaccagattctttgctcgaagagcctgaatatgtggatggacagattaaac

SEQ ID NO: 102892 - DNA, 409 bp, Arabidopsis thaliana columbia
agaaaatggaatctcatgttgttcataacgcacaaaagccacacgtagtttgcgtgccttacccggctcaaggccacatcaatccgatgctgaaagtggctaaactcctctacgctaaaggctttcacgtcaccttcgttaacactctctacaaccacaaccgtctcctccggtcccgtggtcccaacgcgctcgacgggtttccttcattccggttcgagtccatccctgacggtctaccggagactgatggcgataggacgcagcatactcctaccgtttgcatgtccattgagaaaaactgtctcgctccattcaaagagattctgcgccggatcaacgataaagatgatgttcctccagtgagttgtattgtatcggacggtgtgatgagttttactcttgacgc

SEQ ID NO: 102893 - DNA, 270 bp, Arabidopsis thaliana columbia
atggatcaacaccatagcagtactcacgcacagtacttgttcggcagtcggacacgtgctcagaatccccgaatcctacactctctcgtcccgtttctgcaccgctctgcaatagcaacaagtaaccgacacggttcaagcaaaggaggatgtagttaatgcgttggagccacaacgttacgacggtttggctccgacgaaagacggagagaagccaagagttttggttctcgggtcgggttgggcgggttgtcgggtattaaaagggat

SEQ ID NO: 102894 - DNA, 305 bp, Arabidopsis thaliana columbia
attgaaaaccgtgacgaagttagagctgatcatcggcgtattagacaggctgagattatatctacggaagaagaagaatcgaggaatcaagagaatagagacgaggatgatgatgaagatgccttggaagaaagaagaagaagaattaaggagaagaatcttagacgagcacaagaggaggctgctttacttcctttagaagaagaagatgagatacaagaggaagaagaggaggaggaggagtctgagtacgagactgattcggaagatgatatgcctggtattgccttgattaagcctgtttt

SEQ ID NO: 102895 - DNA, 257 bp, Arabidopsis thaliana columbia
atcacacatcagatgtcttcttcggttctcgcttttatctgagtcttcattgagtatctgagtacacccacatcaagtggacaggtatcaaagttttcggacacccagcttcaagtgcagcaggagagtcctcaacgccctccacgagaaacagctcgacattgagctcgttcatgtcgaactcatccatggtaagcatatcatagagcctttcctcacacgcaacccatttggtcaggttccagcctttgaagatg

SEQ ID NO: 102896 - DNA, 155 bp, Arabidopsis thaliana columbia
cccacgcgtccgaagttagtcaccaaaacatggaatcaacacagaacgtttcaatggccgcctccacaatggctctctccgctcctgccttcgccggaaaggctgtgaacctttcccccgcggcatctgaagtcctcggaagcggccgtgtgaca

SEQ ID NO: 102897 - DNA, 355 bp, Arabidopsis thaliana columbia
caaaatctctctctttctctgttagtttttttttatttcttctgcttctgggtttttttctccgttaactgtagttgggctagggtcttgagctccgttcctcgataatggcggtttctttgagaagaaagctcgtgtcttccttctattaaaaaagctaactttccccttttttatactaactttcaaaatgggaaatttctgaaaaatgtgttgcaagttaagcttgtgaaagtttcgatttttcgttttggggttcttaaattttaggacaattatttaactttttaaagattataggataattattatccgttgggagtaaattggaagctaagtgagtgtatctctttga

SEQ ID NO: 102898 - DNA, 284 bp, Arabidopsis thaliana columbia
  unsure (1)..(284): unsure at all n locations
agcacacaaagcaaaaacgctggtttgtctttttaaaaaaaaagaacttcgtttctcttcaattccgttaccgtcactgtcaccgttcacctccgtttatctcatcctcaccgttcatcttcttcgatctaactcgccgtcgttcaccttataatggacaccgtcaacgattccttttcgccgggatcttcccgaccttcgccggcgacgctttctcgtgaagattgctggagcgaggaagcgaccttcacgctcatccaagcctgnggtaatcgctacgtcga

SEQ ID NO: 102899 - DNA, 325 bp, Arabidopsis thaliana columbia
aattgatattgtttgatatctactgtagatgattcgtcttgacaaagaggaaggaggctgcttgacatcgaccaccctgaaagtccttttggtacaaaggaatctcctgctgtcgtacagtcctactttgacaagagaaatatcggatgccgtggtggtgaaggcgaggatggacacgacgtcgtttggttctggctagataaaggaaagtcatttgaatgtccagtgtgctcccaatactttgagcacggaccaccagacggtcatggtgacgatgaagaccaccaccattgattccggtcttttcttaacggcgaaatgtttt

SEQ ID NO: 102900 - DNA, 322 bp, Arabidopsis thaliana columbia
cggacgcgtgggcggacgcgtgggcggacgcgtgggggtgaggattattggcctgaaggaacttcgagccgggttagagctgctagagctcctcaaccagctggtgagtcttcgagttttccttcctatggaaagaatcctggaagtaggagaaagaagaataggaaagctactgaggagaatgtgactgttgaaacgaatgacgaagtatccgattctgaggatagctctgaagaagaggaaaatgattcctcggatgggtttgttacctataagaatgaatttgagagagaagaagaggagactggttttgaattagaca

SEQ ID NO: 102901 - DNA, 353 bp, Arabidopsis thaliana columbia
actctaatctctttgccatggaggtagatcctaccgttgaaactgatgacatggctggtacagacgggatggatggtttattctctgatttggcaaatgcgattcctggaatcgatgaggctatgagttttgctgagatgttgaagttggtgcaaacaatggattatgctactattgtgtttgacactgctcctactggacatactctccgcctgttacagtttccggccacactagaaaagggactttcgaagttgatgtcattgaagagtagatttggtggcttgatgactcagatgagccgtatgtttggcatggaggatgagttcggagaagatgctttgctgggaaga

SEQ ID NO: 102902 - DNA, 369 bp, Arabidopsis thaliana columbia
agccgagcaactgaagcatgctgaagagcaggttgatcagaaaacacaaaatcgggatgctcttagagcggatatccagaagatacgcgcaatatgtaaggactatgatatcagttacaaggcggtcatggcagaagagagatctgcaagaaaagcaatgcattcaaaacggcaggaaattgaggcccttcagtctatgattagccgggttaaaagtgctgcgtctgttgatgatattgattcaagggtgcgtaatatggaacatacgatgcagcacacaactttatctctgaatgaagaaaaaggtttcatgcgtgaaataaagcagttgaagcaacttcgcgagcagatatcttcgagtatgggtac

SEQ ID NO: 102903 - DNA, 409 bp, Arabidopsis thaliana columbia
actcaaaccaaaggagaatcctctggaagaaaaagagagtttgaaaatggttgaagggaaggaagaggtcgtgagggttaagatcaagatgacaaagcatgaagctcaacggttgttgtcgaaatgcaaaaacgacagcgttttaaagttggagcatcttatggaccagatcgcacacgtccctgttcatcagcttcaagtcgctatggtgatggttggttgtaataatgagcgacaaggaaatggctgctggttatcccagctggaataagttaatcttgagtttttctatcaaattttgtagttttagagtagaaactatataaatttacgtttgtatatatattttgtaacagattaatagaagtaacatgattttgtggaattttttttgttgtcgtctcataaa

SEQ ID NO: 102904 - DNA, 385 bp, Arabidopsis thaliana columbia
ttcttagatctatgaattttcaaattcgttgatccatttttccgcttcaatcgtctccgatctgatttcatcagcttcgtaccgctccggtcatgaatccattctcttccggcacgcgtctcagcgacatgattcgagctatacgtgcgagtaaaaccgctgctgaggaacgtgctgttgtgaggaaagaatgtgctgcgatccgtgcttcgattaatgaaaatgaccaggactatagacatcgggatctagcgaagcttatgttcattcatatgcttggttaccctactcattttgggcaaatggaatgcttgaagttaattgcttctcctggatttcctgagaagaggattggttatcttggattaatgttgcttcttgatga

SEQ ID NO: 102905 - DNA, 165 bp, Arabidopsis thaliana columbia
gcgtccattttatgttacttttgggattgaagagttatcgaaccgtaacaaaaaagcatgtctataaccattaaaccattgagtaaaggctatcaactttactcccaaccagcagggggtgcccctgacggtggcgcggcagcttcccatccaccatctgccggt

SEQ ID NO: 102906 - DNA, 331 bp, Arabidopsis thaliana columbia
  unsure (1)..(331): unsure at all n locations
agagaagaaagatagagaaaaaaaatgggaggcaaaggtgtgatgatggtggcgatactttgcctttgggcactctctgcaacatctgaagcagtaacagaggctgagccaggtttgatgatgaacttctacaaggacacgtgtcctcaggccgaagacatcgtccgtgaacaagtcaaactcctctacaaacgccacaagaacaccgctttctcttggctccgtaacatcttccatgactgcgccgttgagtcatgtgatgcgtcgcttttgctggattcgacaagaagagagctaggagaganagaacacgacaggagcttcggactta

SEQ ID NO: 102907 - DNA, 380 bp, Arabidopsis thaliana columbia
acgagaattatcaccatctagaatcttccctcaacctctagaaaacaactttcgtatccttcaaaaaccctaaaccctagcttttgcacagacgcaatttcatcgcatcattttgcaattttcctttactgatctgtcaccacctcttgaatttcgaaaccatggctaccgcagctctcctccgctctattcgacgccgtgaagtcgtttcctctcctttctcagcttacagatgcctttcaagcagtgggaaagcatcattgaacagttcctatctgggtcagaattttagaagcttttccagagcctttagctcgaagcctgctggaaacgatgtcattggtattgatttgggtactactaattcatgtgttgccgtc

SEQ ID NO: 102908 - DNA, 354 bp, Arabidopsis thaliana columbia
actaaaagatatccaagttcaaaagcaaaaaaatatcttcttttctctctctctactctcttctcttcttctcttcttctcttcttctctggctgggcaaccatgattactgtcgtcacctccaggctctctctccttcctccagtcttctccgtcgttaactcttcttcttcgcgttccaaagatatgaatctagagccaaaaaagaaggttaaattaagagaagactggagagaaaagtccagacctatcccacccggaggaacctatccagctaaagaccattgcagtcagtgcgggctatgcgacacctactacattgcccatgtgaaggacgcatgtgcatttcttgga

SEQ ID NO: 102909 - DNA, 390 bp, Arabidopsis thaliana columbia
acccacgcgtccgctctcgatcagcttcatgcggcgtccacatcatcaaattggagaagataaccgaagaaaatcgtcccccttccgccgtgatcatcatctcaaccgacggtctcaacatctgtgacttcgaacataatcggcgattttgatgaaccaaatcggagagagaagattaataagatagttttgaggaagaaatcacaattagagcttaaagcaagaataaatcacaatcacaagatgagaatttttcggacaacgtagtgataatcagtcaatcggagaaagaaggtgacccgagtgttataaccatcaattgtcctgacaaaacgggtctaggttgtgatctttttcgtatcctcctcttcttcggcctcaacattgtct

SEQ ID NO: 102910 - DNA, 405 bp, Arabidopsis thaliana columbia
accacgcgtccggagagagatcggttaaatagccggagtaaacggcggagaggagaacgcttaatgatggttcacggtaatctagacgacggtggcgacgatagctcggaagagagtgtcaacgacgatgaagaatatgacgacggaggtgtaggaccaccttcttcgttgaagatgcttcctccgacgagcaataatatctcagctgcatcgttttcatcgtctctatcaaatcatcacaacggaggtagcggtaatctccatcaccaccatcacagccacaacaataaccatcagaggaagaataattttccgccgacgaaagttttcagatcgtctccttctccggcgccggtatcacctcttgtctcgacgtggaaagccgccgacgagatgatcggtgtt

SEQ ID NO: 102911 - DNA, 249 bp, Arabidopsis thaliana columbia
tcttaaacgttttactttgtgctgcactactcaacctcaatggccgcctcaacaatggctctctcatcccctgccttcgccggtaaggccgtcatgctttcgcccgcggcatctgaagtcattggaaacagtcatgtgacaatgaagaatactgatgccatgccaaatggcccatcatgcagcccaaggtacggatctgaccgtgtcaagtacttgggtccattctcaggcgaatcaccgagctacctt

SEQ ID NO: 102912 - DNA, 343 bp, Arabidopsis thaliana columbia
accacgcgtccgcataaagaacacaaccatgcttaggtttgattacttactaatcacggcacttgccatttcaactgtttcggttgtcatggcccaagtccctcccgagaaacaattcagagtgctcaacgaacccggctacgccccatacatcaccgagtacgacgcgagttaccgattcctcaactcaccgaatcagaatttctccacactctcattcggccgaaacggaaaccttgtgctcgctgagttaaacggccaagtcaagtggcagactaacacagccaacaaaggcgtcaccggattccaaatcttgcccaatggaaacatggtgctacacgac

SEQ ID NO: 102913 - DNA, 309 bp, Arabidopsis thaliana columbia
  unsure (1)..(309): unsure at all n locations
aaaaacctctctcttctctctctcactagctcgaacacgcanaacagttagagattcanatgccgtcggagtcatcgtacaaagtcgaccgtccggcgaaatccggaggatctcgacgagactcaagccccgactcaataatcttcacacctgaatctaatctcagtctcttctcctccgcttccgtcagcgtcgatcgttgctcttccacctccgacgctcacgaccgggacgactctctcatctccggtcnctctctgatgaacaggagcgagatcagagggtaagttcgagctgtaaagatctaga

SEQ ID NO: 102914 - DNA, 363 bp, Arabidopsis thaliana columbia
aggcttcttctactagattaactattatacaatcaagcttcgtctccgcaagaacaagactcaattacgtctccaagacaaatcattctgggttcgcttgtcgttctctttcaaaacccagaaacttgagtctctctgtttattctatgggttcttctagttcttctccgaaaccagacaacgtccaaggttctttttaaaaatttaacctttttgaattgattctgtttctctctgattatccgatgattcccataaatcccatttcatgttgtgtactgtaatttgcgtaaaaatggtttctttctttgtgggtttaggttaatgagttttgtctttttccaaatgttatgtttgatgttt

SEQ ID NO: 102915 - DNA, 355 bp, Arabidopsis thaliana columbia
aataatatgggtgtgtttctttatgatgatcttttagcgattttgtcgttgcgttatcagaggattcatcttcttcagattagagattctggtcatcttgttgatgctcgtgctattggttacttttgtcgtgaagatgatgagcttttcctcaattctagctctcaggcaatgatgagtcaagataagagtaaacagcagagtttatctgggagtaaggaagatgatactggagagaatgggttgcgtcatagtctaagtcagccaagtggttcgaattcgtttcttagtggtgttaagcaacggttactttcttttatcttcagggagatttggaatgaagaatcagataacg

SEQ ID NO: 102916 - DNA, 329 bp, Arabidopsis thaliana columbia
cgcatccactccctttcaatctaactaccaaatatatattccatgtgttattgctatcgttatcttatgtgcggctaagattacttctaagatgatcaactacaaattaaagtcgcgaatatctaaggtaattcagttatttgctagctatatgaatatttctgaaattttatatatacggttagatttagtgtgtgcatggatctaatccgtctagtccatgatctagtgtgtacaaatcaaccaaaagaatgaaaccaccactactatagtattttaatctattgtgtcctgatattagtaagaataatagctgatattttgattga

SEQ ID NO: 102917 - DNA, 386 bp, Arabidopsis thaliana columbia
  unsure (1)..(386): unsure at all n locations
cccacgcgtccggagatggtcaacccggagtctcaagacaggatgtgtcttgaaggggccgacgtcgtgccagctcaagagatcgccgagtgcgatcgaagtcagtccgttcaggtcgtcgagcctgaagttcaaaatattaccgacgaccgctccgtcgtcgtttatgccgcccctccagcaggcgaagaggtcaacacgggcctaactatccttgatcaagacaaggacgaaaccgttgctgagcccgggatttccaggaggtcccgtgaggagaaagggaaaggaggggctaaccaatccaagaagaggtcggcttctgaagccggtttagatgaggccgctgctccaaagacgtntcgcctgtcgcgaggcgagactcttaa

SEQ ID NO: 102918 - DNA, 280 bp, Arabidopsis thaliana columbia
atcaaaatgtattgaatggtcagttgttgttgggtaattgctatgcccgcctcctaagcagtatggcgcaagatctgcttggagctgaggattttaaaacacccataaaaaaagtccgtgatagtgtcaagtatgtgaaaaccaaagatagttgccaagagagatttgatgaactgaagaaacaacttcaaaccccttcgacaaaagatcttctcactgacaaccaaacgaaatgggacactacttacgacatgttattggctgcctgtgaacacaaaga

SEQ ID NO: 102919 - DNA, 246 bp, Arabidopsis thaliana columbia
attaccacagacgaggatgaagataccaaggaggaggaggacggtaccaacgacgaggacgacgataccaaggaggcggtgggcgacaaggaggacggggaagtgggggaagttactgccgccacggctgctgctacacaggttacaacggctgttcaagatgctgctcgtatcccggagaagctgttcagactcagcccggtcactatcacactatattaaccaatcaccaccatgcatgtattg

SEQ ID NO: 102920 - DNA, 299 bp, Arabidopsis thaliana columbia
aggctcttcattggtgggatttcgtgggatacagacgaagaaaggttaagagactactttagcaactatggtgatgttgttgaagctgtgatcatgagagatcgtgccacaggtcgtgcacgtggcttcggcttcattgtctttgcagacccctgtgtctcagagagagtgatcatggataaacacatcatcgatggccgcacggttgaggcgaagaaggctgtgcctcgagatgatcagcaggtgctaaagcgacacgctagtcctatccaccttatgtcacctgtccatggtggtgg

SEQ ID NO: 102921 - DNA, 333 bp, Arabidopsis thaliana columbia
cgaatcctgatgttacaggcttagatgaggaagggagaggtgaatcgaatgatttgcctcaatttcgtgagttctctatagagactataaggaacgcaacttcaggatttgcagcagagaatatagtttcagagcatggtgagagagctcctaatgttgtctataaaggcaagcttgagaatcaaagacgtattgctgtcaaaaggtttaaccggaaatcttgggctgattctcgtcaattcttggaagaagccaaagctgttggtcaattacggaatcatacgatggcaaatctacttgggtgttgttatgaagatgaagagagactactta

SEQ ID NO: 102922 - DNA, 274 bp, Arabidopsis thaliana columbia
acccacgcgtccgcggacgcgtgggcaatgacaagctccgataaatctctgtcgcacgacgttttcgtctacggcagtttccaagaaccatccgtcgtcaatctgatcctcgaatgttctccggtcatggttcccgctcaactccacggctagtacgtctctttctctgtctctctctgtcacttcacttctccgatctttatctttcttaagcttcaagaattgattcaattcgatttctgtgtgttttctttgcagtcacgtatatagactc

SEQ ID NO: 102923 - DNA, 201 bp, Arabidopsis thaliana columbia
atccgcccacgcgtccgcccacgcgtccggttttatcagtcaaggaaaagccaaagaacagtggtggtgaatgtacttggagacaagattccactctatggaagtggctcaacattagtcccaccaccacctcctgcaccaattccaaaacccaagaagaagaaaggacctatcgttatcgtcgaaccaacaacgcctcct

SEQ ID NO: 102924 - DNA, 404 bp, Arabidopsis thaliana columbia
  unsure (1)..(404): unsure at all n locations
cacagtctgggttagtttttagcttttaacggtggcgatgcgtcttcagtgtcttgtaatatcgccactagaggaatgggcacaaacctcttcgacaagccttctcacccaaactctcccaccgtctacgattggctatacagcgacgacactaggagcaagcaccgttgagccgagagggtagagtgacatgagaatgatgtaaaataattatgttctttacgccacgtgtttatgttctgtttcgtctattttggctatatgtgcaatcttttatttgcttcatgtcgtttgtgtttgttagtgaccgttgatttccaccatctgggttagtttttagcttttaacggtggcgatgcgtcttcagtgtcntgtaatatttttactgttcggtaatattacaa

SEQ ID NO: 102925 - DNA, 376 bp, Arabidopsis thaliana columbia
cccacgcgtccgtttgattctggtcgttatccagatcagagaaatccgtgatccttttttctctctcactttcttctctgaaataggaaaaacaaaaaacaaatctgataatcgaaactgatcactcactgctgattccgtaacctaaaaaatgtcggcagcttcttctagctccgttcttcacctccgaatcaaccaacaactgttatcactccgatctctcaaaaattccacctccgttgcatctcaattggccgttacgtctggtgttagccgtagaagatcgtgtacggcgcgatgctctgtgaagaaaccggtgattcctgagagtcctttcctagggactcgtgtgcggagatccggatccgagacgctt

SEQ ID NO: 102926 - DNA, 434 bp, Arabidopsis thaliana columbia
ccgacgcgtgggtagaaatactgattacccccaaatccgaagaaacgatttcgtctggagatatcaaagatttgacaatgtcaccggatcatagaatgtcaccggatcatagagatagccatagaaagaggtctcgtcctcagtctgactacgatgataacggtggaagcaaacggagatatcgtggtgacgatagagattcacttgtgattgatcgcgatgacactgtattccgatacctgtgcccggtaaaaaagattgggagtgttattggtagaggaggtgatattgtcaagcaattgaggaatgatactagatcgaaaattagaataggcgaagcaattccgggatgtgatgaacgtgttattactatctatagccctagtgatgagaccaatgcctttggagatggagagaaagttctttctcctgcg

SEQ ID NO: 102927 - DNA, 415 bp, Arabidopsis thaliana columbia
caatctcatcaggttggaagctctcatagcataagaggagagataacaccagctgtaacaaggagagtcacaagagtaacagatgaatgagaaggttcgttggagaaagattcaagtcatagtttgcatcatccatgtactttgtttaggctggctggatctgcagttcttaagtgtttcgggattgaccggagtactgaagaaaccgaggattctttgagacatgaatctaatgaaagagagatgattgaagctcttgtgaatagagaagagagaacattactaacacgttttattatgtgtttatcgtaactatcgagtatgaagagattgaagaaacttgtaagtatagatgataaggtgaaattgttggtgtaacacgaacgagttgactcaacgcattcgcttttttctt

SEQ ID NO: 102928 - DNA, 419 bp, Arabidopsis thaliana columbia
cccaagcgtccgcaaattatcaactttgtttctttgatcagctttgtcatcttgaaattatcaacgttttgactaaatttaaagaacagttgtgttcgttcgtgccattcttttgaatgcttatacgtacatttcttcttgaaaagactttgaatccaagaacccgtgaggaagtaatcccagtgaagagaagacgacaaagaaaaaggagcctataaagatccaaagcttcccttgtctttagttctcatcaaaaaaattgaaaaacgtttggagttattgagagagagagagatagagaaagatgttggaaggcaaagcaatggtggaagattcagacatgccagtgaagatgcagatgcaagctatggcatttgcttctcaagctcttgacctttttgatgtccttgactgtaaat

SEQ ID NO: 102929 - DNA, 263 bp, Arabidopsis thaliana columbia
agtccaagagcagcagcagccggatgttcctccatctgttggaagcgaaactgttttgggtgatggtaacgaaggtggtgaacaaagtgaagaacatgaactgttaaatagcaatgaagttatgcaccctcttcctttgaacagtacaccgaatgagattgatagaatggaagttggggaacggggtggagcacctattgagcaagtacaccgtgaagcagtgcatcttatctccagtgctcagggtcaatctgatacttccg

SEQ ID NO: 102930 - DNA, 238 bp, Arabidopsis thaliana columbia
tgagagagagacactcttgtttcatcttcaacttccactacctttgcaagattctacctgagatagatggcgaagttccgacaaatgggttcatcaatcttcttcctctttcttatcataatctcattatgttccgcccacaaagaagcgttttcttcaactgatcttgttcaaatggagtgcttgagagtcccaccgttagagtttgctgaagcggccaaaaccgtcgtcgacgcta

SEQ ID NO: 102931 - DNA, 252 bp, Arabidopsis thaliana columbia
cacacgcgtccggctcattagtgcaattgtgagatttgtttgcatccaaatccaattcataactcacactcgtctcaaattcgaaaaatgtcgtctctctcctgccctacctaccgctcccgcacttcgtcttcgtctcctttcttgtcgaatcatcatcattcttcgctgatcaatgttgttgacccacgccgctcactctccttccactacgcttctcctcaagggcttaatctagctgagctctgtgtt

SEQ ID NO: 102932 - DNA, 365 bp, Arabidopsis thaliana columbia
atatgtatgtatcaccttgccttttctccaaagccctaattgatttttctttcttctttttttgtgtatgctttaaaggtttcatttttaaaatcttcttggactccatttcttttccttttcctttatctttttgcctctctttgtggagtttttgaaatcatccctcatttcattcctattttcgttgtctctttgagtttgagtcagctttgtgttgtgtctaaattctaaacaagtttcagatctttaccttcctttgacttgtctcctgtcttaaaactaaggtttaattttctttctctgttcaagtctcagatttgaccagcttggtccagaatttcgcttctcctcgatcataaatc

SEQ ID NO: 102933 - DNA, 340 bp, Arabidopsis thaliana columbia
gaaattacgccatagatcggagcgattttggagcatcgccgaagctaaagaggaattggaggtttctgtagatcggaaaacacttgttgttctctctctcgattcatcccaaagcaagattcttggatctgcctcttaagatcgatcggtgcttttgtatcctcaggtatgtgttgatacttgatcgtatctatctacagagattaatcgtatcgtagtctgatttggtagatttggaattgggaatcgagaagtttaaaaatggaggaggatagagagaatgcaaagagagtagtgtttgtaactgtaggaacaacgagtttcgatgctcttgtgaaag

SEQ ID NO: 102934 - DNA, 232 bp, Arabidopsis thaliana columbia
cacgattttaatggcagtttaacgggaacacttctctctctctctctagatcccaaaactcaaaatcgttcctttttgcaaaaattgttcatctttctgttttcccagaaataggaaagctctcttgatttgcctttcctggtattgaggaaatatgtttagatcatcaccgagaagaggacagagatcaaagggtttcaaggtgaagcattgtattcaattgactttgttg

SEQ ID NO: 102935 - DNA, 348 bp, Arabidopsis thaliana columbia
aaaaagagtttgaaattcagaattgtcatcttttgtttcgatcggattccttattcgtgtatcttctccgattcgatgggaattggctctcatggcaatggtaatcaagaggtttcgcgttaatcaaaaggagtgaaacgatggcgttttgtatttggtgtttaagcaacttcagttcttaccgttttgagtgttgatcatttgtttggcagagaacttaaaaggttagatctttcttctgaaatgatttcattattaattgtctgcttgtacttgaatcatgttaattatgactgagcttttcttcttgaggatgaggaaatcgtaatggctaatgcatacaatttg

SEQ ID NO: 102936 - DNA, 298 bp, Arabidopsis thaliana columbia
agctattgcattagcctgaatggtcctgtctgcctttcctctctaccagatattgttgttgagactccggaaaatggaggggaagatcttctgctgaccagtgagttcctcaaggaatgtctggagatgtactctgtaccatcacgaggatttgagacaaacccacgcgggtttcaatcaaagcatcttaatatagtcgatccgcttaaagaaactaacaatcttggacgcagcgtaagcaaaggtaacttttatcgtatacgaagtgcattcacatatggtgctcggaagcttgggc

SEQ ID NO: 102937 - DNA, 428 bp, Arabidopsis thaliana columbia
cccaaacagtctccctagtgagcgatgatgaaagcaaaccagaaaccgaaaccccacgcgccaccgcgtcctctcttctcctgtggcttcttccgccgctgcacacaatccgtcctcagcccaacctctcctcaccagcagcaacctcgccgtaaagccaccaccacttcctcctcatcttcctcctcctcaacctcaacttcccaaagcttcactcaatggcgctttcctcatcatcttgatcaaactccatccaccgctcctcctcctcctcatccacctcctccaccaccgcctcttccggtcaccaccactctccaagaaaccttccagatcgcagagcttcacctcacatccgtctctgaatccgacaagctcctcgctctacagctactcgagcgggtagtcgtacctgacccgccatctga

SEQ ID NO: 102938 - DNA, 371 bp, Arabidopsis thaliana columbia
ctggagttgtccaactaagacaaaaagtgcaatacatgaggcgtcgaggtgcaaaggtgatgctggagggatggataacaagagaggggattcattgtgattgctgcagtaaaatactcacagtctccaggtttgagattcatgctgggagcaagtcatgtcagcctttccaaaatatttatctggaatctggcgcttctcttcttcaatgccaagtcagagcgtggaatatgcagaaagatgctacgaatcttgctctccatcaagtggacactgacggggatgatccaaatgatgatgcttgtggtatatgcggtgatggtggagatttgatttgctgtgatggttgtccatcaacatatcatcaaaac

SEQ ID NO: 102939 - DNA, 398 bp, Arabidopsis thaliana columbia
cccacgcgaccgagttgcagagcacgaggatttatgattatttgggtctttcgccgagttttccctcaggagttctccatgagagcaacatgggaagtgatcttgtcattggttttcttgactcaggagtatggccagagtctccggcttataatgacgaagggcttgaaccaataccgaaacattggaaagggaagtgtgtagccggagaggattttgacccagcaaagcattgcaacaagaagttagtaggagcaaagtacttcactgatggctttgatgagaacaattctggaatcagcgaggaggactttatgtcccctagaggttatagaggacatgggacgatggtctcttcaattgcagcctcttcatttgtgcctaacgtgtcatatggt

SEQ ID NO: 102940 - DNA, 406 bp, Arabidopsis thaliana columbia
  unsure (1)..(406): unsure at all n locations
ttcaattcacgtttggaacaatttcgttgctcaatcttgccaatccgtcgttacctatatatttcccgatcaaagctcttcgagacctgaaatttcgttattacttcgattccttttcacttccagtttaatctctccaccgttcctctccggcgacactccgatgacttaccgaatcgcccaagggatttagtccgccacgatatgaaaggaggatgaagaggacaagtggatatatataagggtgtgaaaacgacgccggatttgcgaatcgtttcggatggacatttttgtttacttctctccttctctggccactcttcctccttctgctggaccaatactgctcatanggatgatggcgttaaaagagatgaatcgcgatttgtgtattgctgaggatttt

SEQ ID NO: 102941 - DNA, 383 bp, Arabidopsis thaliana columbia
caaaacttatgcttcttttgggtctctttgcatttcttttcatcgtctcagaaatggctgccgcgggtacgtgttatatatatttcagtctacttcatacatccaaggctaattaaacctaaactaacgtaccgatattagatattttcaaactatttcgtcaatagtagttacaaaatatattcacttatacagaagtggaaatatacatatatatctcaaactaaaacaaatacaaatagaaacttgtatatatgtttagcagtgaaagtaattacgtttctttttctaataatatggatgatatattcccataaataattctcaatctcgtaatcttggtcttagcgatcttaattcattttcggttgatctctcaacag

SEQ ID NO: 102942 - DNA, 379 bp, Arabidopsis thaliana columbia
cccaagcgtacgggttttttgagaatttgcgtaaaggaagaaactttttcaaaacttttttttgcatcaatggagaacataaccgcgcagctcaaacgaggtatctcaagacaattctcaactggttcgattcgtcgaacattgagccgacagttcacgcgtcagtcatctcttgaccctcgtaggaccaacatgaggtttagtttcggtcgtcagtcttctctcgatccgatcaggaggagtcctgattcttccaagagtgatgacgagccacatatgtcggtaccggagaatctcgattcgacgatgcagcttctctttatggctagcaaaggtgatgtcagaggaatcgaggagcttcttgacgaaggaattgatg

SEQ ID NO: 102943 - DNA, 393 bp, Arabidopsis thaliana columbia
gtcgatgcaatcaatgtgagtccgattgagtatgggcatgtgttgctgattcctcgtgttcttgattgcttacctcaaaggattgatcacaaaagccttttgcttgctcttcaaatggcggctgaagccgataatccgtatttccgacttggatacaacagtctaggcgctttcgctaccattaaccatcttcactttcaggcttactatttggcaatgcaattcccgatagagaaagcttcttccttgaagatcactaccaccaataatggcgtcaaaatctctaaactcttgaattaccctgtgagaggtcttctagttgaaggtggaaacaccattaaagatctcgcagatactgtatcagacgcatccgtttgtcttcagaacaacaac

SEQ ID NO: 102944 - DNA, 380 bp, Arabidopsis thaliana columbia
catatgttaaagagataaactggagatttttagagagagaaagaaatagagagagagatcagttcgtcgttgacgatcgatgtcgaagatgaagcatcttctacggaagctccacatcgggggaagtagtggcgtcggcggcggatttgctgaccatcacaggttagacgactcgactagacctatgatcgatcctagccctattcttagtactagccctagccctgcatcgacttcttccgtctcttcctctggttttggtaacgcttccacgacaatgccgagactggatacatttgagcctgttggccgtgatctgacggctgttgatggtgttgatttcaatttgatggacgaggagtaccaagtccagttagcta

SEQ ID NO: 102945 - DNA, 438 bp, Arabidopsis thaliana columbia
cccaagcgtccgggcgtttgatttgagataacgttcttctccaaaattgcttgaggaagtggttttgttgtgtctctctgggtttgaaatatgagcggagatagacttgaatttgaaaaccctatagaggatgcggtttcgaggctcagattctcccctcaatcaaacaatctcctcgttgcttcttgggattcttatctgagattgtatgatgtggagagctcttcgctaagtcttgaattaaactctcaagctgctcttcttgattgttgtttcgagaatgaatcaacttcatttacctctggttctgatggattcatccgaaggtatgatttaaacgctggaacagttgatacaattggaaggcatgatgacatttcaacatccattgtctactcttatgaaaaaggtgaagttatctcgactgggtttgatgag

SEQ ID NO: 102946 - DNA, 380 bp, Arabidopsis thaliana columbia
ccaacatgcacaaagaaatatgaatggtatatttcctgaggaccctggtcagcttgtgaatgagtattgcatgaaaagaggagtttcattgtcatcgacggacaatcaaaaatcaaatcctaacgaagaaccgatgaaagatttgagaagtagagggctttgtcttgttcccatctcatgcacactacaagttggcagcgacaatggtgccgactattgggctccggcgttcggaaccactctccagtgaactattcactttctgttattttatttttggtcagccaaaaaaaaaatagtagatgttataacatcatgagcaaccaatcaattgagaaaacatcaaaatgagtttccaaatttgattgctcatgatgcta

SEQ ID NO: 102947 - DNA, 168 bp, Arabidopsis thaliana columbia
aaagtatccagatctgggttcactgttttcgtctaaagagagattgttacctctctctgaatgtttttctgtgggcattgcatcaaaaacagatattccacaactctgcctcaatgtcctctctcggttaacagcttatgctccttgcttggagacgatggtatctga

SEQ ID NO: 102948 - DNA, 348 bp, Arabidopsis thaliana columbia
gaaaaaggacaacattttcggaaacaaagttgagagttttgagagttgaaaaagggcaaatctttcttctccttcgtcactctaattgagttgactaaacacagttcgagttcgagagacaatggatcttgctaagtttctgtgttggattgttttgctactgggaatctcactcgtagaatcaaggtacatggtctacaatacttcacataccattgttcctggaaaacttaatgtccatgtggttcctcattctcacgatgatgttggttggctcaagaccgttgaccagtactatgttggctccaacaactctatccaggttgcttgtgttcaaaatgtactgga

SEQ ID NO: 102949 - DNA, 412 bp, Arabidopsis thaliana columbia
acaaaaaccatgcgtttgcatttttgctcgctactcttactctactgtatcgtcttcgtttcaagcttcttgacgaccgacgctcttgcttgtcttcctgaccagatccaagctctaatcgaattcaagaatgagtttgaatctgacggctgcaaccgcagtgactacttaaacggagtccagtgtgataacacgactggtgcggtcacgaagcttcagctcccaagtggttgcttcactggaactctcaaaccaaacagtagtctctttgagttgcatcagcttcgttaccttaatctctctcacaacaacttcacttcctcttcactcccttctgaattcagcaatctcaccagattagaggttttgtctcttgcctctagtagctttactggtcaagttccttcctcaa

SEQ ID NO: 102950 - DNA, 424 bp, Arabidopsis thaliana columbia
ttttacttttcgtaattccttacatttcactcaatattaatccccagaatctccgatccacccacaaatttagcaattttctgagatttgatcatttgggtcaccaaaaaatcttgtctttttgatctgggtttaacgccaataacatatgggaaacattagcagcagcggtggtgaaggtagacgccgtcgacggcgaaaccatacggcggctccaccaccacctcctcctcctccttcttcttctcttcctccaccacctctacctacagaaatccaagctaatcccatcgttttcgctgccgttactccctatcctaatcctaatcctaatccggtttaccagtaccctgcttcttactaccaccatcctcccccgggagccatgcctcttccgccgtacgaccaccacctccaacatcat

SEQ ID NO: 102951 - DNA, 296 bp, Arabidopsis thaliana columbia
caacatgttcctcattctccgcaaatcaagcatagaaagagactcttggagatcatccaagtatccgattctcagaccctaaaaatataatgtccatgaaagggatctcatcagcagagtcagataagctctctaggagaatatctttgacccacaagcgcaattccgaagagcttgacgtgtttgaagctgccgtgtacttcggctacaatgaagcctcctccggtgaccatggacatacacaaaagtatggctataacgcagcgagagaggagaatccgaggagatggggaata

SEQ ID NO: 102952 - DNA, 318 bp, Arabidopsis thaliana columbia
caaacttctcttctctcttctcttcttctctttagtcatctcaaccaccatgagtcaccagcagccgccgagctatgccaccgagccaaacaccatgttcgttcaagcagacccctctaatttccgtaacatcgtccaaaagctcactggagcaccacccgatatctcctcctcatccttctccgccgtctcagccgcacaccagaagcttccattaactcccaaaaagccagcgttcaaactccacgaacggcgtcaatcatcaaagaaaatggagcttaaggtcaacaacatcacaaaccctaacgacgctttcag

SEQ ID NO: 102953 - DNA, 335 bp, Arabidopsis thaliana columbia
acggacgcgtgggtgaatttatattatgaatttatattatggttttcactagtgttagaaatacatgtttgccattccattcccaactctctccataattaactgttttttttctttcttttctttaaaacacacaataaatatttatttacataaatgcaaataaagatgtgtttgacttgtattattacaatttcttttatatttcaacatatttttctgaatttgtatgtagcaaataaatgtattcttttttagttgttaataaaataaatgtttccttaccaaacttttttttttttgcagattttaccgactagaaaagtaccaacgtc

SEQ ID NO: 102954 - DNA, 359 bp, Arabidopsis thaliana columbia
atgcaaccttttatggcggaagtgatgcctctggtacaatgggtggagcttgtggttatggaaacctatacacagacggctacaagacaaacaccgcggcgttaagcacggccctgttcaacgacggcaagtcatgcggtggatgttaccaaatcttgtgtgatgcaaccaaagtaccacaatggtgtcttaaaggcaaatcaatcactatcacagctacaaacttctgtccaccgaactttgctcaggcaagcgacaatggaggttggtgcaacccaccgagacctcatttcgacatggctcagcctgcgtttctcaccatcgctaagtacaaagctggaatcgtccccattctttac

SEQ ID NO: 102955 - DNA, 382 bp, Arabidopsis thaliana columbia
cgaaaatgaagttttggggctggatgcatcataagttccgggagaatagcaaagagccattaaaagatgcttctactggcaacagctattccattctttcagctcatccatcccttgatagccaagaggtttacccaacagcatgtgctggctccagatacaatactggattcagaaaacaggtcaacctgttccaggaaagctccttcgcaggacccaagcaatacacagaggaagacttcaaggatgagagaaacagtgatttttttgatggatttcttgccattggaacccttggtggagaaacacttcttgatgaacaaccagcaacgccgacatttggcatgtcaattgaggacccagcaatagatgatgcagatgt

SEQ ID NO: 102956 - DNA, 384 bp, Arabidopsis thaliana columbia
cccaagcgtccgccctctttctaaaatctgcggcacaaagtatatgaattaagaaagcaacatgagtttgtggtatatcatagttgtgttcgtcttctttgcatctatattcattgcaaagaacacaagaaagacaaagaagaatctacctcccggaccaccaagacttcctataattggtaacttgcaccaattgggatcaaaacctcaccgttcgatgttcaaattatctgaaaaatatggacctctagtgtacctaaagcttggaaaggtaccgtctgttgtggcctcaactccagagacagtgaaggatgtcttgaaaacgtttgacaaagattgttgttcgcgagcttttttgacatatcctgcaagaatttcatacaa

SEQ ID NO: 102957 - DNA, 369 bp, Arabidopsis thaliana columbia
cggacgcgtgggcggacgcgtgggcggacgcgtgggtttcactgatagtattctcagctcttgcaccgccgatgaacggatcatggtgtttacgatgactgggaaagaacaaattgacccggctatgcttcgaccgggtcgggtcgacgtacacattcattttcccttatgtgatttcacggcgtttaaaacgctcgctaataactacttaggtgttaaagagcacaagcttttctctcaagttgaaggaatatttcaaaacggtgcgtctttgagtcccgccgagatcggagagttgatgatcgcgaatcgtaactcgccgactcgtgcattgaagcatgtcatcaatgctttgcagactgatggtga

SEQ ID NO: 102958 - DNA, 311 bp, Arabidopsis thaliana columbia
cccacgcgtccgcccacgcgtccgcccacgcgtccgcccacgcgtccgcccacgcgtccgcccacgcgtccgccgagctcacgtcatcgctctcggtgctttcctctgggccactgccactttcctcgtcgccgtctccactactttcttccaggtggcagtatcaagaggcttgaacgggatagggctagccattgtgacacccgcgattcagtccctagtcgctgactcaactgatgactataaccgtgggatggcatttgggtggctacgattcacatcaaacattggttccatacttggctatgtat

SEQ ID NO: 102959 - DNA, 354 bp, Arabidopsis thaliana columbia
ccagaatcagttggataggaaaatggcggcgaagcaaatggaagagatacagaagaagctacggctgctaagttaccctagggcaaatgctccagctcagtctctcctcttcgccgggatggaacgttatgctcttctcgaatggctctttttcaagttattacgtgataaatcacctttctcacagcaaaatctccaaggagatgctggagttcgtgatgaagaaactgttcgtattcaatatttggcagagattgcaaagtttttggggattacaccaactgtagacattgaagccattcaaggacatggaacctatgaagatcggatggaaatgcttcgcaatattgttga

SEQ ID NO: 102960 - DNA, 276 bp, Arabidopsis thaliana columbia
ataaatctaacccaaacccttctcttcttcttctgccctcttcttcatctctctttcgctgctttcactccaactgataattatctcatcaattccggttctaacaccaatacatctttcttcacaacccgttcttttctcagcgactcttcagaacctggctcgagttttctctccaccgatcgatccatctcgatttctgacacgaacccatctccagattcacccgttttgtacaacacagctcgtgttttccccgtcggaggatcatacaaa

SEQ ID NO: 102961 - DNA, 264 bp, Arabidopsis thaliana columbia
gtctcgtctctatctcgcctctttgcctttttccactcactacatgccaaactcgaggatatggcagctatctcgctcactgcccctccttctttctccggtctccgccgcatttctcacatgctcgacgctgccgccgtctcctcccaccattccttctgccaccgcgtcaattcctctacacgtcgcgtttcgtcgtcttcttcgtcacatcgctcccccagaggtgttgttgccatggctggatccggtcagtttttcgtt

SEQ ID NO: 102962 - DNA, 321 bp, Arabidopsis thaliana columbia
cttcctctttctctttctctgtttctgcaacacaaaaacaccattgagaaccaatcaaaatgtcgacaaaccctaacccatggtcaccatacgattcatacaatgattgttctcaaggaatctgcaacatctactgtcctcaatggtgttacctaatcttctctcctcctcctccttctttcttcctcgacgacgactcttcctcctcctcctccagtttctctcctctcctcatcgctctcatcggtatcttaaccagcgctctcatcctcgtcagctactacactctcatctcaaaatactgtcatcgccaccaccaaa

SEQ ID NO: 102963 - DNA, 315 bp, Arabidopsis thaliana columbia
caaactctaaaatcaatctctcaaatctctcaaccgtgatcaagatgcagatcttcgttaagactctcaccggaaagactatcaccctcgaggtggaaagctctgacaccatcgacaacgttaaggccaagatccaggataaggaaggtattcctccggatcagcagaggcttatcttcgccggaaagcagttggaggatggccgcacgttggcggattacaatatccagaaggaatccaccctccacttggttctcaggctccgtggtggtatgcagattttcgttaaaaccctaacgggaaagacgattactc

SEQ ID NO: 102964 - DNA, 376 bp, Arabidopsis thaliana columbia
cccacgcgtccgggtgctcaagagtgcaaacaaatatttgcaagattctattgtgttaatgagaaagcttcttcaataacaactctcaggttccaagaagggtgctaagaaaggtgctcaagtaacagctgtgccagaggggaagctaaaaggcctagtatatgtgaatgagcaatttgatggatggagagctcactgcctgcggattctgcaaagtagatttgaccagcaaacctgtagtttccccccggatacagagatgcttgcagaactaagtgcaacattgttgcatgagggaaaaaacttgaaagccattcaaaaggtttgcatgcctttccttaaattcaagaaggacgaagcaatatctattggcact

SEQ ID NO: 102965 - DNA, 294 bp, Arabidopsis thaliana columbia
gtcggagataatcgggtgatcggcgatggagaatacggacgtcttcttggggctgcatgatttcctggagcggatgcgcaaaccctccgccggcgatttcgtcaaatccattaaaagtttcattgtttcattctcgaacaatgcaccagacccggaaaaagattgtgctatggttcaggagttcttttctaagatggcctggagaagtatgttatgacaaagctatttactcgggtgtttgcttcaaacactgaggaggttatagctgatgagaagctatttcagaagatgtca

SEQ ID NO: 102966 - DNA, 329 bp, Arabidopsis thaliana columbia
ctccttataaataagagaagctcagtgcgttactcaaatggccgtcactttggtaacgtccttcgcttcttcgtcttctcgcttccatttccgctcattctcctcttctccgtcgtctctctcctcttgtttcgtccgattccagttcccctctcgccttagactcgcttttgccgtcacgcctctctactcttcttctagagccatggctcatacaatctcacacgctactctcggcctcactcaggctaactccgtcgatcatcctaagatctcattttcggggaaggagatcgacgtgacggaatggaaaggtgatatactcgctg

SEQ ID NO: 102967 - DNA, 282 bp, Arabidopsis thaliana columbia
caaggtcggtggtgcttcaaatcgacggtttttcccggatcaaggaaagcatggtacttggatttgcattccacagattccgctgttgttcgcgtaaatgtttggattgttcaatctgtctagctgaggactttcagggattctacctttaagcttgttgttacgcaaatccaatgtattcagctcgcttagcttggataacgttttcgggatttcgccagtgaggttgttgtgtgaaaggtctaagctctctaccttctcaagatctccaaaactttgtgg

SEQ ID NO: 102968 - DNA, 345 bp, Arabidopsis thaliana columbia
cggacgcgtgggcggacgcgtgggcggacgcgtgggtccatatcgaggtcggagtggttttgctcgaggacgaacaaagtttgtaaacaaccccaaacgagattttcctggatttcgttcacgatctccagttagatcaagagaaagatcagatggttcatcctcgtctttcaggaatagatcacaggaagagttcagtgggcatacagacttttctcatcgaagatcaccctcaggttacaaagtggagaggatgagctcgcctgaccattctggttattcaagagaaatggttgtcagaagacacaattctccacctttctcgcatagacgatcgaatgctgg

SEQ ID NO: 102969 - DNA, 212 bp, Arabidopsis thaliana columbia
atcatttagagaagttgtacttagagaagagcttcatattaagaaatatggcgtatcctgagagagatctcattgttgatcctagaagcggtttctgcaaatcaaactctacattctatagcaagcgaaacccattatgtctcccgccaaatccgtcgcttgacgtcacaactttcatatcatctcaaccgcaacgcggcacaaccgccttc

SEQ ID NO: 102970 - DNA, 359 bp, Arabidopsis thaliana columbia
cccaactctttttttttttttaacttgtcttctctctttccttaactttgatggcactgtcccttctctcctacaacgtctccgacctctgtctcggcaaacctcctcttcgttgtctttcctcctcttcctcctccgtatccgacgccatcgctgccctcaaatcctctgaagacactttcctctccgtctggaattgcaatcacgacgatgacaataacacagagtgcgagtgcttggggaaaatatcaatggctgacgtcatctgccacttgtccaaagaccatgaccacagtctctgtgccttaaactcatccgtctctgttcttctccccaaaactcgttccattgtcctccat

SEQ ID NO: 102971 - DNA, 394 bp, Arabidopsis thaliana columbia
tgcaagcaaggaaacagcgagaagcagtacttgaggctgcactagctgagaaagaatacatagaagaagagtttaggaaaaaagctgaagaagcaaagagaagagaagaggcccttgaaaacgatttagccaacatgtgggtgcttgttgccaagttgaagaaagccaatagtggcgccttgtcaatacaaaagagtgacgaagcagagcctgcaaaggaagatgaagtgacagagttagataataagaatgaacaaaatgcaatcttgaaagagaggcaactcgtgaatggacatgaagaagtaatagttgccaaggctgaagagacaccaaaggaggaacctcttgttgctcgtcttaaggcaagaatgcaagagatgaaagagaaagagat

SEQ ID NO: 102972 - DNA, 387 bp, Arabidopsis thaliana columbia
gttaatttagagcaacatccgtccggtgttccaaactttcaagcaccaatgggatggccaaaccatatgcctcaatacttttacccgtctccataccaaggctatccgtaccctcctatgcaacacatgccaaatcaaaaccaaggaaacatgccatggccttcaaggggcaaaacatccaagaaaaaagggaagggggattctgatggagatgagtctagtgaatcaagtgaatctagtgaatctgaatcggccagcgatgattctgcttcatctttggaagatcaaggtaaaagacactctcgtacaagtaaaaactcacgccgatcaaagaaaaaccggaagaagtcatctaaaactgttatcatccgtaatattaactatata

SEQ ID NO: 102973 - DNA, 369 bp, Arabidopsis thaliana columbia
acggaaacgggtttgattctcatgtggttccctttgataatattgggattgtttgttttgaaatgggtgctgaagagagtgaatgtttggatttatgtgtccaaacttggtgagaaaaaacactatctgccaccaggtgatttgggatggccagtcataggcaacatgtggtcctttcttagagctttcaaaacatctgatcctgaatccttcatccaatcctacatcaccaggtatgggcgtaccgggatttataaagcacacatgtttgggtacccatgtgtactagtaacaacaccagagacttgtaggcgagttctaacagatgatgatgccttccacataggttggccaaaatctaccatgaaa

SEQ ID NO: 102974 - DNA, 243 bp, Arabidopsis thaliana columbia
gtgattcatcgtgatttgaagcctaaaaatattctagccaactctgattgcaagttgaagatttgcgactttgggcttgctcgagtgtcctttaatgatgcaccttcggctatattctggactgactatgttgctacaagatggtaccgtgcgccagaactttgtggctctttcttctccaaatatactcctgccattgatatatggagcataggatgcatatttgcagaaatgctcactggg

SEQ ID NO: 102975 - DNA, 272 bp, Arabidopsis thaliana columbia
cccaagcgtccgggacagagcggcatgaatcacgtcgaatagacaatcagttgcgtgggcgaagtggccggcaaggggatcctggaagttcccgattcttccttagtcttgaagataacatattccgcatttttggtggagatcggattcagggtatgatgagggcattcagggtggaagatttaccgatcgaatccaagatgcttactaaagctctagatgaagctcagagaaaagttgagaattacttctttgacatcagaaagcaatta

SEQ ID NO: 102976 - DNA, 356 bp, Arabidopsis thaliana columbia
cccaagcgtccggatcattcgactctcattagtactgctacttgcatctgagtttatgaattgggacaatggatctgcagattgtgtgtgatctgatgaaaccattgttgtgtttttttgtttcatctcaagaaactagctaaagagatctgttactgcattatctattgatgttgtctatttatgtgtgtttcaggtgatttaagacaacatcaatagataatgcagtaacagatctctttagctattgatgttgtctatttatgtgtgtttcaggtgatttaagacatttcctcgatgatttgtgatccaactctgtttctcttttgttgttgtactctcatgttcccactttt

SEQ ID NO: 102977 - DNA, 257 bp, Arabidopsis thaliana columbia
cggacacgtggggggctgtagattccgggttgcatctagtacaacttttaccagtaaatgacacatccgttcataagatgtggtgggactcgtatccctacagctcgttatctgtgtttgcattgcatccattatatcttagagtgcaggctctctctgaacgtctgccagaagatatcaaggaagaaattcagaaggcgaagaatcaactggacaagaatgatgttgattatgaggctaccatggaaactaacctt

SEQ ID NO: 102978 - DNA, 376 bp, Arabidopsis thaliana columbia
cccaagcgtccggatactggcagagatatatctacttgtggattgattatgcactgtttgaagagattctagctgaagacgtggagcgtactcgagctgtgtacagagaatgcctcaatcttatcccctcactccaaattctcttttgccaagatatggttgctcgctgcacagtttgagatcaggcaattgaatctctcgggtgctcggcggatactaggaaacgccattggcaaagctccaaagcataagattttcaagaaatacattgagattgaactccacttgggaaacatagatagatgtagaaagctgtatgcgcggtatcttgaatggtctcctgagagttgctatgcttggaccaagtttgctgagt

SEQ ID NO: 102979 - DNA, 269 bp, Arabidopsis thaliana columbia
cccaagcgtccgggctattcctggtatgcctcaagggatgaggtatcaactctgacaatagtcacagataaacctgcccaaggcacagagaaggaggatattgagaagaatttgaccagtcctcgtgaaactaataaaccaaaagacgaagccttgaagaccaatgactcgaacgctgacaacaatcctgaagcctccaagaaaccagagtaaagggtttccaactttttaaccttatgtttagagtttcgggtctgaattcgaactgg

SEQ ID NO: 102980 - DNA, 281 bp, Arabidopsis thaliana columbia
atttagttttgggtcaagcttgttgccatttaagtttaatggaggatgcaatgggtcctcctcaaaccggttaacgccttaccaacggctgctttcggccgtcagagtatttgttggcctgacaatagcttcattctcttctcctccgaagacggcggctcctctcctccctcctccgtcgtcgtaacttccgcatctcagccacgatccgagagcatcgctcacgtgttatctcacatcaagctactcttaagacggcgcgccgccgcactcgccgctct

SEQ ID NO: 102981 - DNA, 296 bp, Arabidopsis thaliana columbia
gccacaagctctcgcgattcctgatgttcttcagtaatttcttgcaatccttataaacaaagagcgtggagaatcgtttcagaggaaagaaaactaaaaatggcgactcttttcaacaaatttcagcaggctgttggagttcttgccaagagtaccacatttgctaagaacccaaggcaactgcagtttgaagcagacgttaacaaactctttatgtatacaagctataaccggttgggacgagaagctgaggagactgatgcagaggagatcattgagatggctggtaaagccac

SEQ ID NO: 102982 - DNA, 242 bp, Arabidopsis thaliana columbia
gttcaagatcgcgagcgcccgccctttttttttttttttgaagtataaaccatatgcaaactttatataaaagatataatgaaattacaaaataaaggatcaaatgcactcacagaatgccacattaactactaaaaaagatcaaaaagatcagcctaaatctttcaagaaaagatcacaagaaagagttcaatgggcatacaaaacttttctcatcgaaaatcaccctcaggttacaaagt

SEQ ID NO: 102983 - DNA, 409 bp, Arabidopsis thaliana columbia
gggctcggttccatactcggtggcgactcaaaatgggtcaagaatcgtttatctatagcttcgtcgccagaggaactatgatcctcgccgagtataccgaattcacaggcaatttcccgtctattgctgctcagtgtctccagaagcttccgtcctccagcaacagcaagttcacttacaactgcgatcaccataccttcaatttccttgtcgaagatggctacgcatattgtgttgtggcgaaagattctcttagcaagcaaatctcgatcgcatttctggagcgtgtgaaagctgatttcaagaagagatatggaggtggaaaagcaagtacagctatcgccaaaagtctcaacaaggagttcgggccggtgatgaaggaacacatgaattatattgttgaccatgc

SEQ ID NO: 102984 - DNA, 369 bp, Arabidopsis thaliana columbia
cccacgcgtccgggtcactgtgccaggtgctcttgcacgtgatttgattgagcaggctgaggtggaagttgataggcttgaccagctgaaagctagccgaatgaaagaaattgcgttcaagaagcaatctgagcttgaagagatatatgctcgtgcccatgtagaagttaacccggaatctgctcgtgagagaatcatgtcgctgattgattctggaaacgttgagcctactgaattattggcagacatggatagccagatatcaaaggctaaggaagaagcatttagtagaaaagatatattggaccgagtcgagaaatggatgtcagcttgtgaggaagagagctggctagaagactacaatcggga

SEQ ID NO: 102985 - DNA, 270 bp, Arabidopsis thaliana columbia
aaccgcttgattggctgcctctgagaactgataaaaatgatccgcttgttctatgcattgccggggctgatagcaccttccggctcgttgaggttactgtaaatgaaaagaaagctggctttgtgccccagtctaaatcagtaaaggagaggtttcgtcctatgcctatgtattcccctatcttacttcctgtgccacatgcgctggcactgcggatgattttacagttaggagtgaaaccatcttggtttaatacgtctagcacaactt

SEQ ID NO: 102986 - DNA, 348 bp, Arabidopsis thaliana columbia
gcacctgatagagttgtgtatactacgatgattcgaggattctgtgagaagggatggttagggagcgcgaggaagctttggtttgagatgataaagaaagggatgcgaccaaacgagttcgcttacaatgtgatgatacacgggcattttaaaagaggcgaaatttcgcttgttgaagcattctacaatgagatgttgagaaatggctatggaggaacaatgttaagctgcaatacgatgataaagggtttctgctcacatggaaaatcagacgaggccttcgagattttcaagaatatgtctgaaaccggggttacaccgaatgcaatcacgtataacgctttgata

SEQ ID NO: 102987 - DNA, 358 bp, Arabidopsis thaliana columbia
  unsure (1)..(358): unsure at all n locations
aaatcaaacggacaaggttaaggaccttgaaaattctgtggctgagttattggatttgcatagtgattgtaatcaccgttcgacagcaattcaatccgttgcaaatcggtaccaacccgtggaacaattaacggactttaaaaagttgcttgatgatgaattcacaaagctcaaggctacaccttcctcagtgccacaaaatgatcatttgatgcgccagttcagggaagcagtttggaatgttcatcatgcaggtgaaccaatgcctggtgacgatgatgaggacattgttatgaccagtactcagtgccctcttctaaacatgacatgtcncttgagcgggaagcctgtcactgaa

SEQ ID NO: 102988 - DNA, 286 bp, Arabidopsis thaliana columbia
acggagcggttttacgacccgaactcaggacaagttttactagatgggcaagacctgaagacgctgaaactgagatggttaaggcaacagatagggctagtgagtcaagaacctgcattattcgccacttctatcaaggagaatatactcttaggccgtcctgacgcagatcaagtcgagatagaggaggctgctcgagtcgcaaatgctcattcctttatcatcaaactacctgatggcttcgacacacaggttggggagagaggattgcagctgtctggtgggc

SEQ ID NO: 102989 - DNA, 348 bp, Arabidopsis thaliana columbia
ggtagatttcatctttcccccgcctccagtgttctcaataatggcgaaatctctacacttcacaagactaatgtcttcttcagcaagaatgtcaatgacttctcctctcttcttctccgcagtcaaaccatggagaaacatccataaaccctacttggcttctctcttcctctccacaacatctactcgatacccacttcaatacgacatgatcatcaatcgtcccacacaatcatctctctctcaaaaccgtcgtcgtccccctaaagccatcgaatccggtgcacctgactcagcagagccggaattcgattcatgggtcgacaataaactggctatggagcgtga

SEQ ID NO: 102990 - DNA, 291 bp, Arabidopsis thaliana columbia
cggacgcgtgggcggacgcgtgggttacaattagaggaagaaaaccagtggaagaaatggttatgattagatggatggcatggaggaaagaagatatatcgtcctcggtcgattttcgcttctccaaagacccatttggtcctctggtgctttctcgagaaaccgattcgagattcatcatcatcattcatcttaaaggattcaaaaaggaaggtattgaaattgatataaacgaagagggaaataggattacaattagaggaagaaaaccagtggaagaaatggttatga

SEQ ID NO: 102991 - DNA, 323 bp, Arabidopsis thaliana columbia
  unsure (1)..(323): unsure at all n locations
aaccgcggacgcgtgggcggacgcgtgggcgccgacgccgcagcacaaaggaggagaagaaggatcaaaggcgcgacaacaatggcgacaggtaaaacagtgaaggatgtctctccacacgagttcgtcaaggcttacgctgcccatctcaagcgttccggcaagattgagctgcctctgtggacagacatcgtcaagactggtaaacttaaggagcttgctccatatgaccctgactggtactacatcagagctgcttccatggctaggaaggtttacctgaggggtggtcttggagttggtgccttccgtangatctatgg

SEQ ID NO: 102992 - DNA, 335 bp, Arabidopsis thaliana columbia
gattatgatgatgattgcgagagtgatgatgaagtaatgagcactggtcactctccttatccaaatgaaggagtttgcaacaaaagggaattagaagaaatcgatggtccttgtaaaaggcagaaactactggataaggtcaacaacatcagcgacttatcatcacttgtgggcactgagagctccacactactcaatggatcttcctttcttaaggacaaaaagctccctgaatcaaaaaccatatcgaccaaagaggacactggttctggtctgagcaacgagcagtcgaagaaagacaagatccgcacagctctgaaaatactcgagagcgt

SEQ ID NO: 102993 - DNA, 355 bp, Arabidopsis thaliana columbia
tagtgaaaaacttcttgctcaagacacttcagcttcaaggttgggagaaacgggttgaccggttcaagcttggggaaggcgttatgccagcgagtttcaaggtgcttcatgatccagttcgtaaaaccgacacaattattgcggattttggagaaagcgctataggaagagtagcaccggtggattcaggattctggtggatcatacttctccgtgcttacacgaaatctacgggagatttgactttatctgagacaccagagtgtcagaggggaatgaggcttatactctctctttgcttatccgaaggttttgatactttccctacgcttctttgtgctgacggttgttctat

SEQ ID NO: 102994 - DNA, 411 bp, Arabidopsis thaliana columbia
gatgatttcgcagttttctttctcagaggcggctcatggcgacactgtgctttctcccatcggcttgatttcattgtgattttctaaattgaggatatgattttctgagccatgggaagggagagaagaaagcttagcttgagcttgaattatgattcatctgagaaatgcaggcaaatgttgatgcacatctcctgttgttcaagtaaactttttctgattcgccactacagtatcttgtccgttcagtttctgtctgattgatggccttttttcgttcagaatcattgtttggtgttgatgagaacacgggagctgcaaatcataggtatcaaatgcgaaagacgagtacttggcgtgaacatggcggacttgactttgtattcagcttgctggagaaaatttcatcga

SEQ ID NO: 102995 - DNA, 381 bp, Arabidopsis thaliana columbia
cccaagcgtccgtctctctcgccggaaaaaagaacaacgtcgtttatagctaaagattcgatcatgttggatcttaacctaaagatcttttcttcttataacgaagatcaagatcggaaagtaccattaatgatctcaaccaccggtgaagaagaatctaactcatcttcctcctccacaacagactctgcagcgagagatgctttcatcgcttttggaattctcaaacgcgacgatgaccttgttcctcctcctcctcctcctcctcataaagaaacaggagatctctttccggtggtggctgatgctcgtcggaatatagaattctccgtggaagacagtcactggttgaatctttcttctttacaaagaaatacacag

SEQ ID NO: 102996 - DNA, 325 bp, Arabidopsis thaliana columbia
cttatctctttcctctgtgggagattctggttttgcccaacatagtgacaaaaaggaaaacgcagtccacacacacacacaccaactcacactggaaaaaaaaaacaagagagagagagagaagagacaaaatttgaagtttgaagtgaagaaacaatttcattttgcggcgacgaattcgaattttccgatcgatcatgccgtccggtgcgaagaaaagaaaggcgttgaagaagaagaagcaacaggaagcgattggaacaagtatcaacggaaatgatgaacatggaagccaagatgggaggggaagtgatagcagtttgag

SEQ ID NO: 102997 - DNA, 256 bp, Arabidopsis thaliana columbia
aaccgtctgtatcacccaactaaatcctcacgggattagatccaaagtctcaaactttgatccaaaaacacaaactttggtcaaaagacataaactttgagccaaagtcacaagctttcgtggcgagcgatggattacaatccaaatcttcctcctttaggaggaggtggtgttagtatgagaagaagcataagtcgaagtgtaagcaaagcaagtaggaacattgaggatatcttcgcatctggttcaagaagaa

SEQ ID NO: 102998 - DNA, 330 bp, Arabidopsis thaliana columbia
gatatatcactccatctgtgcgattttgccgactctccctaagatctttggagctccttcgtaggtagccggaggtgaagtagaatacaagacagaagaaagtccaagtgtcgcttctcatctcttttctccagtagataatggaggggagattggctaatatgtggaggttgactgttaacgaaagtaaattcgtggaaactgcgttgcaatcggagctcagagtagatggacgtggcctttatgattatcgcaagcttactattaagtttggcaaataatatggtagctcggaagttcaacttggtcagactcatgtaatgggtttcg

SEQ ID NO: 102999 - DNA, 213 bp, Arabidopsis thaliana columbia
cccacgcgtccgcccacgcgtccgcggacgcgtgggcggacgcgtggggaaagcaacgaagaaattcgggagtcggagaaattgccgggtggatggatgaatacctgtcagtttatggacaaacagatacaggatcgatcttcttcttcatctcaaccgtcgactgatttcaacgatctgatgaacactcatgacggcgatgatcaccagaag

SEQ ID NO: 103000 - DNA, 372 bp, Arabidopsis thaliana columbia
gtgtacgtcttctccgcccttcttattcatttctactctgctgcgttatttctccgtcgtcctcaactcatcgccggcgtttaccatccgctagatccgtcgcctctccggtcgactatttatatggaatcgtaaatttacagacactaataagaatagtttgacaaaatctgtagctggaataatgtcgatgagcaattccttgaaaaagctctcttcttgtgttcttattgatctcgatggtaccttaatcaacacagatggtgttgttggtgacattttgaggaaatacttgtgtaaatatggtaaacagtgggatggaagagaatcattgaaaatagttggcaaaactccagtagaagctgctactac

SEQ ID NO: 103001 - DNA, 371 bp, Arabidopsis thaliana columbia
agaggctcatgctttctctaccgccgatggtttctctctcgatgtatttgttgttgatggctggtcgcaggaggaaacagaaggtttaaaagatgcattgaagaaggagataagaaagtttaaggatcaaccttgttcaaaacagaaatctatcactttctttgagcatgacaaatcaaccaacgagctgctacctgcgtgtgttgaaatacctacggatggaactgatgagtgggaaattgacatgaagcagctcaaaattaaaaaaaaggtggcatgtggatcatacggggaactatttagaggaacctattgtagtcaggaagtagctatcaaaattctcaagcctgagcgtgttaatgcggaaatgc

SEQ ID NO: 103002 - DNA, 370 bp, Arabidopsis thaliana columbia
ttatcccaagaaatgctcatcctccagagcctgaaacccttgatggaaacatggatgcaggggctggccagactccgcagctgcgattgcctcgcattaaggaagtacagcttaatggaatcacatttaaggtcaagtactgtgacacttgcatgctctataggccgcctcgctgctcgcattgctcaatttgcaacaactgcgtagaaaggtttgaccatcactgcccttgggtcggccaatgtattgggatgaggaactaccgattcttcttcatgttcgtcttctccacgacccttctatgtatatatgtgtttgccttctgctgggtctatataagaaagattatggaatcagagcacacaaccac

SEQ ID NO: 103003 - DNA, 281 bp, Arabidopsis thaliana columbia
ggctcaccacccatctcctcatttctcttttgcatttctttctttttttctgcattgcattcttttgaggggtttaattttctgcatagctttgtctaatctcttagagctcaataagagaagatggatgttccacggccagctttcaaatgttttgatgacgatggccggcttaaacgttcaggtaaaaaatttgaatccccttgttggttacttgacagtttacacctttgaaatgaatgatccagagagaaaaactgcgattgtttcatggacggttt

SEQ ID NO: 103004 - DNA, 372 bp, Arabidopsis thaliana columbia
tcaaccaacctgctcatactgctccacagcttatcagacccgctgctcctgcacatctttcctctgattcgacttcctctgtgaaagcacgcaatgcccaaaatgtaatgtcatctgctctacctgtaaatgcgaaggtatcagtgaagccagctggggtttctgaaaagcttggatcaccaaaagacaggtcacatggagaagttaacatttctctgtcacaaaagaacgtggaggcatgttcgttgagctcttcccagcagccgaaacctagctttgtctctggagtaccaaattcgtctgctccgccagcaaagtcgcctgtggagactgttccgctagcaaagtcgtctgtggagactgttccgccag

SEQ ID NO: 103005 - DNA, 378 bp, Arabidopsis thaliana columbia
gacaacttgtaggaagatagtaaattggagaaattacttgaaattcccagatgaggttagactatcaccagaagccaaggatcttatttgtaggcttttatgcaatgttgaacaaaggcttggaacaaaaggagcagatgaaattaagggtcacccttggtttagaggcacagaatggggaaaattgtatcaaatgaaagctgcctttattccccaagttaatgatgagttggacacccaaaattttgagaaatttgaagagactgacaagcaagttccaaagtcagccaagtcaggtccatggagaaagatgctctcatccaaagacattaactttgttggttatacttacaagaacgtagaaatcgtaaatgatga

SEQ ID NO: 103006 - DNA, 235 bp, Arabidopsis thaliana columbia
ggtgaaggacgggttggtgtatatggagactcaaattgtttggatagtagccacatggtcaccaactgctactggctcctgaagaaaatgctagattttagcagttcaaatatcagagaccctgtacgtttctcaaaatttgctaagagatattcaccagtaatcatagacgagaagcaactgccagcccgaagaactgacgtaaacttttcaacatactcctctgtgatcggaa

SEQ ID NO: 103007 - DNA, 349 bp, Arabidopsis thaliana columbia
gaaacttagggtttatgtggtggatgaatgatttagcagcgaattgaagggtgtggtggaagatggagttttgtccaacatgtgggaatctgttgcgatacgagggaggtggcaattcgagattcttctgttccacatgtccatacgtcgcctacatccaaagacaggtggagataaagaagaagcaacttctggttaagaaatctatagaagctgttgtgactaaagatgatatacccacagctgctgaaactgaagccccatgtccaaggtgtggccacgacaatgcatacttcaaatcaatgcagattcgttcagcagatgagccagaatcaagattttatagatg

SEQ ID NO: 103008 - DNA, 363 bp, Arabidopsis thaliana columbia
cggacgcgtgggtctctcgctccgtccttcctcagatctgatcgtccgccggttttcacgatgccgtcctcgtgttccttcttctcgtttcccttctcactcctacgttcgcatccgattcagatcacaagtatcaagccgaggagcaggtcaccctatgggtaaacaaagttggcccatataacaatccacaagacacatacaactattacagtcttccattttgccgcccatctggaaacaatgttcacaaatggggtggtcttggtgaagttctaagtggaaatgagctgattgacagtgagattgcgataaaattcatgaagaatgtcgagagaagtgtcatctgtccgcttgaactcg

SEQ ID NO: 103009 - DNA, 395 bp, Arabidopsis thaliana columbia
ctcagattcagaaaaggccaggtctgatttctcccgggttcttaagaaatccgccgccgatctcgggattgagatttggatcctattgacgagcctaaggtgaagcaatccatcgaagatgccacttcgcaaccagaatcgcgctcctttacctagtccagacgtcaaaaaggaagcgctctcaagtattccttttgacaagcgaaggaaggagacgcaaggtactggaagaagacaagtgctttcgacagtgaacagacaagatgcgaacagcgatgtgggaagcacagaggagtgtggtaaagttgagtttacaaaagatgaagtgttggctttgcttaacgagagagctaaagctggaaaatttgataccaagggtaagattgagcaaatga

SEQ ID NO: 103010 - DNA, 376 bp, Arabidopsis thaliana columbia
cgccgatcaaaaaaccctagaatttcttccactgttatgtaagtttgatcttgttgtctccactaagaggcgaagagagaaagagggttttaggttgtgtgttctgtttcaaagggtttacttctcgttgaccccgatcgagatggttgattcttctcgtgattcgtgtttcaaagctggtaagtttagtgctccaggttttcgatttcaccctactgatgaagagcttgtggtttattatcttaagaggaagatctgttgtaaaaaacttcgagtcaatgccattggtgtcgttgatgtttacaaagtcgatccttctgaattgcctggtctatcgatgttgaagacgggagatagacagtggttctttttcact

SEQ ID NO: 103011 - DNA, 375 bp, Arabidopsis thaliana columbia
cccacgcgtccgatctgagctgagaaaaagtgatttatcgttagggtttcggccttttcgggccaatgagcaaccccaatatccttggctggcggctccggtgacggaaaggaagaagatgagaagcttatattcaaacagcagctgagtttgtcccatttatggcttcttctggtgctatcagtggctgttccattactccaatggtgtttgagcaaacaggacaagacgggtctctggtttgagctgttggggttgctttgtctaaacactcaacatggtagacgtgatggcaggggaaaacaccagtggctggcatgtctctggatctcaatatcttgtatgagctccatggagatttctgagataaaagct

SEQ ID NO: 103012 - DNA, 342 bp, Arabidopsis thaliana columbia
ttcttctttctctctgttttcttcttcttccgccgaatcagaaagcttgtctttttctttactccggctaccaaaacttctcggagtttctctgagagtttcatttccgaccttcttcttatccttatttgcggcaagatttccagcgagagtttttttctcttttcctttatcgaacataagaaatctctggtttgctggaagttttttttccggaaggtggaagcttagattggttctgatttcagaagcaaatcgtttgttgttgcctaagtaaaccgaatcaatttatgggatctatagaaacagacggagaacagaggaaattaagctgattttttc

SEQ ID NO: 103013 - DNA, 370 bp, Arabidopsis thaliana columbia
ggacctggagatttccttgttatcgaactaactgatcagctgcaaaaactgaaggtggaaccagtgctgctacattatctttctcagatgaagattcttcaaggtatggaactgagaatgactactagcacaaggttaaaggcgtgtttatacagttttacctctcctggaggtccaatgtacccgacaagagccgtccgtcatgcagcctgggatgctttggattccctctttcctgtgagtattaccttgtaaaaagttcaggtttaggcccattgttttgattgcaagatccagtgtaagtgtgtatgggtttcaaaaacatcatctaagagttttaggcaatcacctaaaaatctgaaagctccca

SEQ ID NO: 103014 - DNA, 305 bp, Arabidopsis thaliana columbia
gtctaaaacgtcgtcggattaactcagttgttcgtcgcatcgaatcatcggaggtgatggaggaaccggagtgtccggtgtgtctacagtcttacgacggcgagtctactgtcccgcgcgtactcgcctgcggacacacggcgtgcgaagaatgcttaacaaatctacccaagaagtttccggacacaatccgatgtcctgcttgcaccgttctcgtcaagtttccacctcaaggaccatcagctctccccaaaaacattgatcttctcagattgttcccttcgatttcgaagcttaagctggaa

SEQ ID NO: 103015 - DNA, 136 bp, Arabidopsis thaliana columbia
acaaaggttttagatcgctcctcgagttcatcgaggaagatatcacacatattgtccccacagagttgattggatgaattccatgtacaccatgggctatggatgtgacgagcagacagcacactggtggacacat

SEQ ID NO: 103016 - DNA, 381 bp, Arabidopsis thaliana columbia
cgcttatcttctcttcctgtccttttcaactccgtgactaaaaaaaaaaaaaaagtaacctttacctacttttcttctgggttttcgataatctcttttgggtatttgcaaacccctcaaagattcttcctttctcctttaaatcgtctctgctttggctttgtactagccatcgcaattcatcatcatctattgcaagtatctccaaggttttgatttccacaatggcaacaactactctcaatgacagtgtcaccactacacttgcttcagagcctcaaaggacttaccaagttgttgttgctgcaactaaagaaatgggtattggtaaagatgggaaattgccatggaatttgccaacagatctcaagttctttaaag

SEQ ID NO: 103017 - DNA, 361 bp, Arabidopsis thaliana columbia
acggacgcgtgggctgggacatcagtgaagatgtctaggtatcctgtcagagttgttctttctgcctttatgatactcggccatccagatgctgtttttaatggtcaaggtgatcaagaggctgctctcaataacgcggctaaagggtttgtgagggagcttaagttattgataaacgttattcaagagggtcctgttcaggtttcgggtggagaatcaaaacatcggaccttaagatctcagttggacttattcgataaggcttggtgctcctttttgaactcatttgtgatttggaaagtcaaggatgctcggttgttggaagatgacctggttagagcagcttgtcagcttgagcttt

SEQ ID NO: 103018 - DNA, 360 bp, Arabidopsis thaliana columbia
gacaggcgttagtggcgattggcgatggcagctcctgcggtggaggcaaccgtcgcaagtgctctccgctctgtgattcttagagctcgtaaggcggcggagcaagtaggaagagatcccgagcgggtcagggtccttccagtctccaagactaaacccgtctcacttatccgccaaatctacgacgcaggtcaccgttgcttcggcgagaattacgttcaagaaatcatcgataaagctccacagcttccggaagatatagagtggcatttcgtggggcatttacagagcaacaaagccaaaacgctattgagtctgacttttatccccatctttaatattgaattaggggtttagtga

SEQ ID NO: 103019 - DNA, 344 bp, Arabidopsis thaliana columbia
cggagttctgaatcaatcaaaaggcatgagattgagaaagatactattgcgtcgaggaagctagaagatactaatactaagttaatacaagatcctgaagaaatggcactttatgcgaaagtgagatcacaagaagaggagattcatagtctccaggaacgaattgctgctgcttgtttgaaggatatgcagctgctgaatgagaagtatggactagagagaaaatgtgctgatcttcgagtggcaattgatgagaaacaaaatgaatctgttacgtctgcgttgaatgagttggctcgtagaaaaggtgatcttgaagaaaatttgaagttggcacatgattt

SEQ ID NO: 103020 - DNA, 407 bp, Arabidopsis thaliana columbia
caaaagatgagaaggtcagtgaatcttttcctgctcttgatgtagtgttccaaccaacaaatgctaaagcttcaaggcgcgccatgcgttcttcacgagggggacgtgacactttgccggagaaggatgttgtcaccagaaaattagaggatgacactgtggattcggataagtccaggaaaaaggaccttcctggtaaagacaaggaaatgaaattagacggtccaagaattgaaccacgttcttggagagcttccagtaatgtatcactgagaggaaagtccgtgaggaccataagatctgatcgtcatgggaaagatgtaaagacagatggagattcatctgaggatcgggcagaagctaaagtagaaagccgaggaagaacgaaatcgagaagacacgacaag

SEQ ID NO: 103021 - DNA, 246 bp, Arabidopsis thaliana columbia
gtgaagctggagaacagtttaacgccacaatacattgcaacaacaggctaataggagctaggtactatctaaacggtgtactcgccgcaattggaggaaaattcaacagaacaatcatccaagatttccaatccaccagagatgcaaacggtcacggtacacatacagccacaatagctggtggctcatttgtccccaacgtgagctactttggtttagcccaaggtcgtgtccgaggtggtgctc

SEQ ID NO: 103022 - DNA, 322 bp, Arabidopsis thaliana columbia
ggagtgcgataatattctttgaagctttaacattgttgcgaagaccagactctcagactcagactcgggagatggcagtccactactggacagccctgtttctattgttgccatgccttttctgtatttcaaatgctagtgctggcgatgctgatccagattacaggacatgtgtttcagaatgtgagataagcggttgtgttggacaactttgctttcctcagtgcaattcttcatccgatggtggtccatggtacatccaagaacctttgtatttacaatggaaaaaatggggttgtcaaggtgattgccgttatcaatg

SEQ ID NO: 103023 - DNA, 245 bp, Arabidopsis thaliana columbia
aggacagagagaaaagggaaaattaccagacaagagttcttctttcttctctctgcctgcttctttttcctctcttttctctctctctctctttctttgtgaaaatctagaagaagagaaagctacaaaaatctcaacatcgaggtaagagttttggctacagagcaaccatgctaacttgcgccttctcgcaaaatcgtatgcactaatctcggtaaggaaagtgatgttggcaaaatggtgaa

SEQ ID NO: 103024 - DNA, 285 bp, Arabidopsis thaliana columbia
tgatgattttgagtctagcagattaggaaggagaacaatggctggacttaagatctggcaagccatctttatcaccattgcactgatcatcattgtcgtactctctgttctttcattttgtctcatttggaaaaagaaatcaagaagatccaaaaccttaagtcttcccatcatacaaacccctgtggtgtcaaaggagatcaaggaagtcaggatcgagcatgttgtctcaacgagtagtaacttcgatcctcaggatgaaaacaacaatgaatctgacaaatt

SEQ ID NO: 103025 - DNA, 254 bp, Arabidopsis thaliana columbia
aggcgggagtatggcgcatctcgtcaaagactgtcctgataaattcaaccaagagtcagcccaaccaaagaagacttcaagatttgatgctacaccaagaggaaagctcactaagtttagtggggacgatcttgaagacgatttcactgaagagcccaaaagcagcaagaagatcaatacctctgatgattcagctcagaatagtgtcgaggtgaagaaaaagaaacaaggtccaaagattgtcaatttcgttg

SEQ ID NO: 103026 - DNA, 294 bp, Arabidopsis thaliana columbia
actggttcgagcctaaagatccaaattcgagtgaagacgtcaaagcagctagacgatccctcgagtaccaactcggctggtttcttcgccctctcacatatggacagtatccagcggaaatgttagaagatgtaaacatccgactgcgtgaatttacaccagaagaatctgagaaactaagaaaatctttggatttcgtcggattaaattactatggagcattcttctctacccctctcgccaaagtcaattcatcgcagcttaattatgagaccgacgtacgtgtaaactgga

SEQ ID NO: 103027 - DNA, 308 bp, Arabidopsis thaliana columbia
aggatcctctttttaccctttctctctctctctttctctgcttttgcttttactgtttccttacaattgtgattgtattgagctaattttggtcggattcatttactcttctctttgtcaatttgcttgtttttgttaaagatgtgacatttattactaaaggcagatccacagtgcctgttgattgtttcttcctatcatcaatctcggaatttgagggggtcttattattaaggggaccataatgaatgaactccgaggcacaaaggctcacaagattgaaagtccagttccaggatgcttaggga

SEQ ID NO: 103028 - DNA, 187 bp, Arabidopsis thaliana columbia
gcttgtgccgaataattggttaaggttgacatatgcaatcaagtctgagcaaagcggcaagcttgagtgtctttcagttcttgcaaaattggggcctcttttcacaatctgttcaagagccgagagtcctgctgcaatggaggatttacctgtctggaagcatgaaaatcgtgttgaatctctgcca

SEQ ID NO: 103029 - DNA, 269 bp, Arabidopsis thaliana columbia
cccacgcgtccgcccacgcgtccgcccacgcgtctgctttttttcctcttccccgaagcaaaacccttctccttcttggcggctgcggccatttttttcttctttctctcttctattctatctcttaaaccctagatttgatctgggtttttcctgattccatttaaggtttctctatcttctttttttttcttcgtcatcttctttctctttggtcgcatccccttttatccgagaaggatctagccaaatctttgtttgtcgaatct

SEQ ID NO: 103030 - DNA, 325 bp, Arabidopsis thaliana columbia
ccaaagtgtcatcataacgtcttttgcgacctgaatccttaaagggagggatctcgcggactgaagaagggttcttaatctctgaaggtctcataagtttctcccgtgttcggggaattgaagctgtgctccattcaattcgtcgatcatagccctgagagtcatccctagtcgtatgatgatttgagtagcgagcatttgcaggtgggttccagttctgagatcgagaattgtcaatacgacgccaagcatgtttacaattagcatttacaacttgtttgccttctgtttttctcctgcggtagtcagatgttgttgggtcttc

SEQ ID NO: 103031 - DNA, 369 bp, Arabidopsis thaliana columbia
acggacgcgtgggtgaagaaccttctcttcctgcctctgttgaagcaacttcttctggaatgaaaaagcctcagggtttaccagcgaaaactaaaattgttaagaaagtaaagaagctggtaaaaaggaaaattataaaaggcactgctgctcaggtggctggtgaggagaatgtcatcaaggaaggtgaacaaagtggagagccttctcttggcgaaagcgaaaaggacaaagattcagaaccctatcttggaggaaacgatatggaatttcagaaagaattagcagtagctactcaacctgcagttgatgttaaagttgttggaggggagccttctggtaaggaaacactaaaagaggtaaagggaa

SEQ ID NO: 103032 - DNA, 353 bp, Arabidopsis thaliana columbia
cttcgttgattgattctgctgcgagctctggtggttcacctccgatcctgaagcctctcttcgagtcccaaaggctgtgctgtacaatattttactctttgaactttcaggacttaccggagtttttcgaggatcatatgaaggagtggatgggagagtttaagaagtatctatcttcaaattatcccgccttggaaagcacagaggaggggttaacacttgttgatgatcttcgcgctgctatttgcgagaatatcaatcattatattgagaaaaacgaagaagactttcaaggctttttgaatgagtttgcatcacttgtctggacattgctccgggatgtgtcaaagtct

SEQ ID NO: 103033 - DNA, 161 bp, Arabidopsis thaliana columbia
atacatatatattttgtcttggttggattttgttcgcgtgggttacttacttgagagaacctcgagacctgtcttgtctttatgcttcagaagcaaatcaaagcatctctccaagatttgaagctccatctatggcagcccttcgtcaccttttccttttc

SEQ ID NO: 103034 - DNA, 291 bp, Arabidopsis thaliana columbia
aattcgtaccttgctcgattctcctctttgaccaaacgtcctgacgaaataagatggcaaacgtgtctgttgctgcggaatggcagcttctctatgatcgatattataggaagcctgagatataccaaatgaaatggaaacatgtagatttgagtcgtaacaaggtggcgtgtgcttcgtttggtgggccaattgcagttattcgagatgactcgaagattgtccaactatatgctgaatctgctctaagaaagctccgcatctttaactcagcaggtatacttctctctg

SEQ ID NO: 103035 - DNA, 313 bp, Arabidopsis thaliana columbia
tgagtcgtattaaacatcacctctgagtggaaaaaattgagtgagcgccattgtaggagagcttcgggaaagaagaagaagaagaagaagccatgaccatggctcttgcttcttctaaagctttttcctcaatcttcagtactttatcaccaatcaatcagtcgaaatttgtgttagcttgctctggttcaaatcatgtagacgtcattgatcggagaagaagaatcatgatctttggctcgagtttggctctcacgtcgtctctgcttggttccaatcaacagagacttccgatggaatccgcaatcgcatt

SEQ ID NO: 103036 - DNA, 376 bp, Arabidopsis thaliana columbia
ccctctaaaatgaatcatattaagagagagagagagagatatgatggacggcgttgaaggcggcacggcgatgtacggtggtctcgagacggtgcaatacgtacggacgcatcatcaacatctgtgcagagaaaaccagtgtacctctgctcttgtcaaacacatcaaagctcctcttcatctcgtttggtcacttgtacggagatttgatcagccgcagaaatacaaaccgtttgtgagcagatgtacagtaatcggtgatcctgaaatcggcagtcttagagaagtcaatgttaaatctggtcttcctgcaacaacatctactgagagattagaacttcttgatgatgaagaacacatcctcggtatcaaaatc

SEQ ID NO: 103037 - DNA, 352 bp, Arabidopsis thaliana columbia
ttacattgtgctgcactactcaacctcaatggccgcctcaacaatggctctctcctcccctgccttcgccggtaaggccgtcaagctttcccccgcggcatctgaagtccttggaagcggccgtgtgacaatgaggaagactgttgccaagccaaagggcccatcaggcagcccatggtacggatctgaccgtgtcaagtacttgggtccattctctggcgaatcaccgagctaccttaccggagagttccccggagactacggatgggacaccgccggactttcagctgaccccgagacattcgcaaggaaccgtgaactagaagttatccacagcaggtgggccatgctc

SEQ ID NO: 103038 - DNA, 358 bp, Arabidopsis thaliana columbia
taaagtgagtcgtatgacacgagaaagctgacctcactcgctacttgggttgattgtgtaaatatatgaaagtatcgtcgttgagaaattgggactctgatctgttgcagaaagccgaaagctttggtctttggagctctaacctctgcctctggtaaattttctattttttctttatgatcgatttggttattgttgaaatccagatcaatttttgttgagatgggtttagttgttgtgatgattgctaagtcttctcagctgcttttgttttcatttcttacatattaccccccaaaaaaaggctgtgttttttccaggtttaagtgcaattgagtttgcttcaaagggtttactt

SEQ ID NO: 103039 - DNA, 401 bp, Arabidopsis thaliana columbia
accacgcgaccgcccacgcgtccggcttttctgtgatgattttcaagattctcgaaactcttttgatggcttcttcctttttgttttaaaatccgtgtccttatttataacaaatctaccaacttgttcatcactcattcaactactcccttcattacttttttctattacagaactaaagtatcaattatttgccagtgtgtctcatcattcatcaaggcatatttgatcctttttggctttggttttttgtttctacaaatcgctaaagtttttgtttttgttttcttcttttgtgcaattcagtgctacggagtgcaaggattgtatttgtgtgtgatcatggtggaggagaaaacgggaaacgtgactctacttgatcaaacagttgaagatttgtt

SEQ ID NO: 103040 - DNA, 350 bp, Arabidopsis thaliana columbia
tcctcagctttctccaagaacaacaacaataagtctattaatttccatactgatccacttcagaaccctttaattacgggaatgccaccatcatcttttggttatgatcactccattgatctcaacctcgctttcgctactctccaaaagcatcatttatcctctcaagctactacgccttcttttgggtttggaggtgatctttctatttatggaaactcaacgaatgatgtacggatcttcggagggcaaaacggtacttataacaatagtttgtgttatgggtttatgtccggaaatggtaataataatcaaaatgaaatcaagatggcttctacattggggatgtc

SEQ ID NO: 103041 - DNA, 224 bp, Arabidopsis thaliana columbia
atgactaaacaataacaacgtcccttccttctttgatctatacagagagagagtgcttttgtgtgtacaaaatccaaattcctacccctatatgtatttgtatctgtgtatgtatgtgtgtgtgcagcttgttccgttttctgaattggttttcaaactgaaccaaactgctatatatttggtttctttgaaagagtccaaacatcaaaaacaacaacaatttg

SEQ ID NO: 103042 - DNA, 226 bp, Arabidopsis thaliana columbia
caatccaataacagatctctattcactattttttttaattggtaaaaaaatccatgttcagtcaaaggaaacaagtacacaagtgaaagaaaaaagaatagtaaaagagtagttgtttactgaagtaacaactgccagctctgtctcaaaacggtttgttgttccgattgttgggtttggaggaagaagatgatgacatcgacattgatcttgagtgattttgtgt

SEQ ID NO: 103043 - DNA, 319 bp, Arabidopsis thaliana columbia
ataaaaaaaaaaaaaaacacaaaaaagtttcaatggccgcctcaacaatggctctctcctcccctgctttcgccggaaaggctgtgaacctttcccctgcggcatcagaagtccttggaagcggccgtgtgacaatgaggaagactgttgccaagccaaagggtccatcaggcagcccatggtacggatccgaccgagtcaagtacttgggtccattctctggcgagtcacccagctaccttaccggagagttccctggagactacggatgggacacagctggtctatccgctgaccccgagacattcgcaaggaaccg

SEQ ID NO: 103044 - DNA, 398 bp, Arabidopsis thaliana columbia
acaatggaagctatctctcaaacctgcacaaagatcatcaccaacccatctcagaggatatataaaacctcatctccagtcacggcaattccacaaacaaagctgagccttaaagtcaagaaggagaggtgggttgctgctgctagatgcgtggcttcaggatcggattatgctgcggcaatggagccaattacgccggaggaagaggaggaattgactcagagaagagggatatgtggtggagaagtaaacagaggagtatgggagctcttggagtgccttgagaaagaagctattatggggaatgatgatgggagagatcctagagattacaatagaagagcaaagatttttgacaagagttctaagatcttcaagaacttaaatgaacagagaga

SEQ ID NO: 103045 - DNA, 400 bp, Arabidopsis thaliana columbia
agagacgaccctttttctactacacaaagaaactactgattaattcattaatactaatagagttattaacattaccgatccttatattattatattaaatataaaaaaaaaaaagagaaagaagcgatctctaaaaatcaaaatctcgattttttttttttttttttccgtttggaggcgagaggaataatttttgttggggtgaggatatatgggatggcctttcacgtagcttgtccaattacatgtcgtcggatttgccattgctccttagggttttctcgggatctccgtggagccaatgcgaaacataagtttttgaaagaggttattcgagtggaggagtttctcaaggatcctgctgtttcttctaatgtttttattggaggtaccgttcaag

SEQ ID NO: 103046 - DNA, 377 bp, Arabidopsis thaliana columbia
attctcttcgtcttcttcttcctccgaccttggaaaatctctcgtgactcgctagtcttctctaatgtctttacatgtcaagggacctgtttgtcaaacttgtggcgacataggttttgaagaagcacttgtcttttgtgactcttgtatgtttgagtctattcaccgctattgcttagggataacaccgattccttttacggaatacataacttggatttgtgaggattgtgataacagtgagagtgattctgattgcaatgaagttgatcagactgttaagaagaagaagaagagtagaaatcaaccccttgtggttttagctgaggacaatgtgctccaggaacctttggaggggtctaagagagaagaaagct

SEQ ID NO: 103047 - DNA, 252 bp, Arabidopsis thaliana columbia
aatccacgagagttcggttatgttacaaaagtgtacgaactgttaaagagtagcaataagcgagagtttttcaaattcttgagagaacacagagtgaatgggaacaagatgtacaattttgaatagtttacacaaaaaaaaaaaaaaaaaaaaaaaaaaaaaaaaaaaaaaaaaaaaaaaaaaaaaaaaaaaaaaaaaaaaaaaaaaaaaaaaaaaaaaaaaaaaaaaaaaaaaaaaagggggggccgccca

SEQ ID NO: 103048 - DNA, 262 bp, Arabidopsis thaliana columbia
acggagaagacgattatttcgtcggagagttcaaattcgtctccgttaaacccttcttctacgcggattatctgccatgtatgtaataagcagttctcgcagtacacttgtcctcgctgcaacttccggtactgttcccttccttgttacaaatctcacagtgtccaatgtactgaatcattcatgagagataatgtaaacgatgaattgaagcaagttcgatctgatgatcaaacgaaaaggaagatgctcgaaattttga

SEQ ID NO: 103049 - DNA, 412 bp, Arabidopsis thaliana columbia
  unsure (1)..(412): unsure at all n locations
cgtccagaaatattggccttgtcaaataacaatttgaccggagaagtacctgaatttctagctgacttaaaatcaatcatggtcatagacttaagaggcaataacctcagtggcccggttcctgcctcacttcttcagaagaaaggattgatgctacatcttgatgacaatccccatattctttgcacaactggttcatgtatgcacaaaggagaaggcgaaaaaaagagtatcattgtaccagtggttgcatcaattgtttcattggctgttattataggtgcactcattctgttccttgttttccgaaagaaaaaggcatcaaaagttgaagggacactaccatcttacatgcaagcatcagatggtagatcgccgagatcctctgaaccagcaatagtgacganaaaca

SEQ ID NO: 103050 - DNA, 367 bp, Arabidopsis thaliana columbia
acccacgcgtccgggcgcttgttgcgtggaaaacagacaatgacagagtttgagccccttcataagctgcaagctcataatggccacatccttaaatgtctcctctctcctgcaaacaagtaacatgtttcttatactttctcttttaaccgttttcttcatcctctccttttcgaagctcttacatatttgttagcagatatctagcgactgcatcatctgataaaactgtcaaaatatggaacgtcgatggttttaaactagagaaagttttaacaggacatcaaagatgggtttgggactgcgtcttctcagtggatggagaatttcttgtaacagcatcatcggacatgacggctagattgtg

SEQ ID NO: 103051 - DNA, 419 bp, Arabidopsis thaliana columbia
gggccgacccacgcatccacttcttcttcttctctccgatttgctcagtcgattgcgtcatgtcgtcgtttgatccgccgaatcaccgatattcagccttagtacttattcttctcctgcttggtttttcggtagcggcggccgacgatgtatcgtggaccgaagattccagcctcgagtctcctggctgtaccaataagtttcaaatggtaaaggtcttaaattgggttgatggtgttgaaggagacttccttactggcttaactgctcaatttggagctgccttgccttctgttcctgatcaagctcttagatttcctgctgcttttgtagatcctttggactcttgttcccatctctcttccaggttagatggacatattgccttgtcgatccgtggcaattgtgctttcactgag

SEQ ID NO: 103052 - DNA, 445 bp, Arabidopsis thaliana columbia
cccaagcgtccgaggacgcgtgggtgtgaatggaagccgaaaaggtttgctggtgagttcagattattgatggagcaaagagtgcagctccgtgttggtacaatggaaaccatatccaatgagggagatgtagatagagaacaggttttagagacttttggtattgaaaatgagaccgggaaggagacaaacggctccagaagttttgatgttggttacagttccggtgatacccttgaaacattgcctaaagcgtcaaaagtagatatctctcctgctgacgtgcttaaaacactcttctttatacttgtatggtacactttcagcacatttctgactctgtacaacaaaactctcttaggagatgatttagggaaatttcctgctcccttattaatgaataacattcacttttctattcaagctgttttatcaaagatgataa

SEQ ID NO: 103053 - DNA, 374 bp, Arabidopsis thaliana columbia
aacggtgagaaatccggagtcggtgttgccatccacgaaatcgctcacagctggaccggaaacactgtcacctgcagcaactggtcgaacctctggatcaatgaaggattcactgttttccttgaaagaaaggctgacgttaaattgttcggacctgactactacaagactgatgccgttaatggaaatgactccatgtggactgatatgcttaacttcggactccagaataacttctcaagtcttttccctctcacccagggacagaacccagacaatgcattctccaccattccttacgaaaagggattccagtttttgacctacctcgaaacctacatcggtgaaaccaatatgcagactcttatccacaa

SEQ ID NO: 103054 - DNA, 363 bp, Arabidopsis thaliana columbia
acccaagcgtccgcaaatcttaaacgttttactttgtgctgcactactcaacctcaatggccgcctcaacaatggctctctcctcccctgccttcgccggtaaggccgtcaagctttcccccgcggcatctgaagtccttggaagcggccgtgtgacaatgaggaagactgttgccaagccaaagggcccatcaggcagcccatggtacggatctgaccgtgtcaagtacttgggtccattctctggcgaatcaccgagctaccttaccggagagttccccggagactacggatgggacaccgccggactttcagctgaccccgagacattcgcaaggaaccgtgaactagaagttatccaca

SEQ ID NO: 103055 - DNA, 378 bp, Arabidopsis thaliana columbia
aatccacccacgcgtccgcttacaacaacaaatcttaaacgttttactttgtgctgcactactcaacctcaatggccgcctcaacaatggctctctcctcccctgccttcgccggtaaggccgtcaagctttcccccgcggcatctgaagtccttggaagcggccgtgtgacaatgaggaagactgttgccaagccaaagggcccatcaggcagcccatggtacggatctgaccgtgtcaagtacttgggtccattctctggcgaatcaccgagctaccttaccggagagttccccggagactacggatgggacaccgccggactttcagctgaccccgagacattcgcaaggaaccgtgaactagaagttatccaca

SEQ ID NO: 103056 - DNA, 354 bp, Arabidopsis thaliana columbia
aggagggtacaaccattttgctggaaggtttgttttgttaaaaattatgtggagagattctcatatgttcttctatcttcttcttgttaatctttcatgtttgtagctgatgggaagtgtttttccatgtcattctttcgctcagagacgcttctcgtgcatttgtttctggcaactttacaggagatggacttacagattcgttacaagggttatctagcagtgaggtgaagagcattgttgactggcgaggtttctactccaggacctacactcctgttgggaagcttgttgggcggtactacgatagccaagggaatccaactaaacaccttaaaggagctgaagcaaaag

SEQ ID NO: 103057 - DNA, 446 bp, Arabidopsis thaliana columbia
cgaacatgcttgctggtttctcgttgatggtgaaggtagaaatcatggtccacattctatattggagctttttagttggcagcagcatggatatgtttcagatgcagccctgatacgtgatggtgaaaataagcttagaccaatcacattagcatcgttaattggtgtatggagggtgaaatgtggtgatgctaattgtgacgagccagtgactggcgtgaacttcatatccgaagtttcggaagaactctctgttcatcttcagagtggaataatgaaaatagctagaagagctctactcgatgaaatcatcagcagtgtgatttcagactttctgaaggccaagaaaagtgatgagcatctcaagtcttatccacccacttctgctgttgaatccatatcgtctcgggttattaatgcggagaaaagtgttgtctcaaacactg

SEQ ID NO: 103058 - DNA, 344 bp, Arabidopsis thaliana columbia
cacagagttagaagtgagtgtgccagatattggtattgtgggactacacgcagagaacttgggaattgagagtgttttggtagatggggaacctactgtatttgagtactatccgcaccatcagaactctgaaactgaaagtaactggaactcggtctctgacccagcttcagcagctgatgctgcggccatggaatatgtcggggttcttaagagagaagacactgcaaatttactgatcaactgttgcaagccttctaaggatttatctgaacagctggacagtgtgactttagaaaacggttcccaatcttcaggggaggcaaaacagaatgttaaattga

SEQ ID NO: 103059 - DNA, 396 bp, Arabidopsis thaliana columbia
  unsure (1)..(396): unsure at all n locations
agacgatgcgtctcttgtcgtcgccgataaatcgaggcttcttcgactatgttgaactctatccatcgctcgtttcatcttacttcccgccaccagatcgtccttcggctgtgctctccgtcggcgagtaggacgataatgagttcttctcctcactctccgatcccaaagacgcatactgcatcgcttgactcacttaatgattatgaagagcaatttccaccacttactggtggctctaagacgaagaagttttatcttggttctaccaatccttctactccatgtcaaagttcacagcttcaaaactggacaagcggtaaggatgctttgtctttgcagaggaatttgggatgtaagaatangaggaggagacgggcttcacggtttttacat

SEQ ID NO: 103060 - DNA, 411 bp, Arabidopsis thaliana columbia
ttgagctttcgacgagaaactttcttctctctctctctctccgccattgttcgttccctctccacggtaatctatatccacccgtcgtcaatcggtactttacgaactccttatcaatcgtattttcactttccaattctgagttctcttctcgtttcgtcctctcttcctccgtatccacgggtctcgctttcggtttctagggtttcgcggttctgatcacaagttctgcttcaattgtaagcgatttgatcgcaagtagctgttaaatcggtgcgtaattcaacttttgaaatctcaaggtttagtctctgcaattctgattttgaacacagctaactagtagcagatttaagagttcgtcaaattaggattttgggtttgtttgggtccctttctcaccgaaattct

SEQ ID NO: 103061 - DNA, 346 bp, Arabidopsis thaliana columbia
tggaattttcaggtcataatttctggagatccacaggtcataatttctgaagctatacctaaaacatggcaaaaaaagaagaatccacaggtttttatggatgtatcaattgatggagatccagctgagactatggcttttgagcttttccctgaagtcgctcccaaaacatcagagaatttccgtgcactatgcacaggggagaaacgcatcggacccagaagcggaaaacctttgcattataaaggatcctttttccatagaataatgaaaggttcctcagcacatgatacaggtctgatcgcaacacctgcttttcatgtgatatagttttaaggccggtgac

SEQ ID NO: 103062 - DNA, 275 bp, Arabidopsis thaliana columbia
tctgaagctatacctaatacatggcatctgtcgaacaatccacaggtttttatggatgtatcaattgatggtgatccagctgagacgatggattttgcacctttccctgaggtcgcgcccaaatgatcagagaatttccgtgcactatgcacaggggagataggcatccgtccgaggagcgggatacctttgcattagaccggatcctttttccatataatactgaagggttcctcagcacaggatacaggtctgatcgcaacacctgcttttca

SEQ ID NO: 103063 - DNA, 455 bp, Arabidopsis thaliana columbia
  unsure (1)..(455): unsure at all n locations
ggaatccaaatgttcagtactattccagcaaagaattctcgcggcttgatcacgccttgcactacaacgtgcgtggtacactggccttgcctgtctttaatccctctggtcagtcctgcataggtgttgtggaacttataatgacctcagagaagattcactatgcacccgaagtggacaaagtttgcaaagcccttgaggcggtaaatctgaaaagctcggaaatacttgatcaccaaacaacacagatatgcaatgagagtcgccaaaacgcgcttgctgagattctcgaagtgctgacagttgtatgtgagacccataacttgcctctcgctcagacttgggttccatgtcagcatgggagcgttcttgccaatggtggcggtctaaagaaaaactgcaccagctttgacggtagctgcatgggtcanatctgcatgtctacaaccgacatg

SEQ ID NO: 103064 - DNA, 443 bp, Arabidopsis thaliana columbia
aacaaactttttaaaaaatgtccgtttcaacacatcaccaccacgtggtcctcttccctttcatgtcaaaaggccacatcatccctctcctccaattcggtcgtctcctcctccgtcaccaccgcaaagaaccaaccatcaccgtcaccgttttcaccactcccaagaaccaacctttcatctcagacttcctctcggatacgccggagatcaaagtcatctctctccctttcccggaaaacatcaccggaatccctcccggcgtcgagaacaccgaaaagctcccatccatgtcacttttcgtccccttcacacgcgccacgaagcttctccaacctttcttcgaagaaacactcaagactcttccaaaagtttcgttcatggtctctgatggattcctctggtggacatcggagtctgcagctaagttcaacattccaaga

SEQ ID NO: 103065 - DNA, 354 bp, Arabidopsis thaliana columbia
gaaaagggaagatggagggatcttgacatatgatggtagatatgttatgtacaatgtactcggtaacattttcgagctatcttcaaaatacatccctcctattgaacccatcggccgaggtgcttatggtattgtctgctgtgctacaaactcagagacaaatgaagaggttgctataaagaagatagcaaacgcgtttgacaacagagttgatgctaaaagaactctccgagagatcaagctcctttcccacatggatcatgacaatgttatcaaaattaaagatataattgagctaccagagaaagaaaggttcgaagatgtatatattgtttatgagttgatggatacaga

SEQ ID NO: 103066 - DNA, 403 bp, Arabidopsis thaliana columbia
cattcaccgatctgtgttgccgagtgccgactctccgtagtcttatctccgtcgccgatctggatctcgtcgtcgaattcgccttaatccaccgctgattctgaattttccgtgttctctcgtcgtctctgccaccgtcaccgtctcgcgtcgccgtgttcgaccgctgattctgaattttccgtgtactctctgcgtctctgccaccgtcactgtctcccgtcgccgtgttccagttaccgatttgacactagccgaaggagtgatggatttggaactatgctaaggcgtgatggaaaaactcgtgagcccttcaggggaagacatgaactcgcgagctcagcagaattggtagaatgtaactgctgaagtgaccagtaattactctcggattaccttttac

SEQ ID NO: 103067 - DNA, 335 bp, Arabidopsis thaliana columbia
acgcgtcaacagaggatgaatatattatgctatcatttcgaatttatattagtaaatttgaagtcataattatactttttgaatgctaatactcaatttgtgattattttaccagtgaaatgtgaatccgaacaaatgaaatgttaaacgtgtccaggtccattgttctataatggatggtaccatttcttctatcaatacaacccaaatgcagctgtgtggggtgacattgtttggggtcacgccgtgtcaaaagaccttatccactggctttatctcccagtagccatggttcctgaccaatggtacgatgcaaacggtgtctggaccggttc

SEQ ID NO: 103068 - DNA, 430 bp, Arabidopsis thaliana columbia
cgcggacgcgtgggccaccggtaacctcccaagctccttagtctgcacaaccaaatcacacggcgcatgcgccagcttcttcagcgattcgagcttgctctgcgttgacgacatccatgattacaccgccacaactccggttcctgccattttttctagggttttgagagagtgtggagcagaggagaggggattttataggacgcgatttgaaatttgtttgtggactgtgagctgttggattgagaaaagatagtaaaagtacgtgaatcggacgggtttagaggaaggagcacgaggattgtggtggacgtgagtgtagagaagagaagctacgtatggaaactttgaccacaagatttgtttctttttgttgtaaatgtatagtcgcgaagagattattatcttgttgacgtggaagctcatttcc

SEQ ID NO: 103069 - DNA, 407 bp, Arabidopsis thaliana columbia
cacacgacgtccgcccacgcgtccgcccacgcgtccgcccgcttcttcaacattgcaagtgactgaccaagatgttgaatctttgggatcagtacctcattttgctttgtccaagtgggcttccaagggcggtagcaggaaaggcaaagacttctctactgatacagattcggagataggctcacctctcagcccacagctacgacatcgaggagtttctgaagagaaaccatcagccaaggatgaaaccgttttagcagctgatgaagagataaagaaagaacgggcaaaatctctgtcagtatttggaggtctagtctctcctaagctgcgtggcgctcaacaatcatttgaaacagctcttgaaactctggtggaaatagccaacatgcgtgcatcgatgatat

SEQ ID NO: 103070 - DNA, 345 bp, Arabidopsis thaliana columbia
agaagattgcaagccgtcaagagggtcgcagtcttgattcacaaattggtcctcaatgtgtgaatcaagactgcgaccctcttgatggatagattgctgaccggttttgaagttcacgtttgtaggcctgtatcgcttcctggccgggccagtgctggcgttctgatggatacttcttggaaggtaaagagttggagttctacatgaagaagatccagaagaagaacggcaagggtgctgcttagagtctcttcttatctgccttgagcttttgtcttacaacatgttttgagttttcagtttcaattgtctgagagactaggtttttggattagcttgtggtat

SEQ ID NO: 103071 - DNA, 416 bp, Arabidopsis thaliana columbia
agcgagccgacccgtcgcgtcgtgggtttaggtttaacgtattggcgcgccagtgaagaaaatagacgacgatggcgatgatgcatcctccgcagccgccgcaaggctcctatcaccatcctcagacgctcgaagaagttcgaactctttggattggtgatttgcagtactgggtcgacgaaaattacctcacttcctgcttctcccaaaccggcgagctcgtttctgtcaaggtaatacgtaacaagatcacgggacagccagaggggtatggttttatagagtttatatctcatgcagcagcagagagaactctgcagacgtacaatgggacacagatgcctggaactgagtttaacttttcggttaaattgggcttcttttggttcaggacagaaagttgatgctggacctga

SEQ ID NO: 103072 - DNA, 182 bp, Arabidopsis thaliana columbia
aattttactctgtggagatcgtcttggacgtcacaatcagctcttcaagcgtgtcgaatcggttatcaaatctgctggtccctttgatgctctgatttgcgtcggacagttttttcccgattctcgataatttctatatgagtttttggattaagtccaaggtctagctcaagttccgattc

SEQ ID NO: 103073 - DNA, 381 bp, Arabidopsis thaliana columbia
gttacctatgcatatcggttggagactcatgctcggtatagccgcggttccgtccctagtgctagcgttcgggatcttgaaaatgccggaatctccacggtggttgattatgcaaggccgtcttaaggaaggcaaggagatattggaattggtatctaattcccctgaagaagcagaactccgctttcaagacatcaaagctgctgcgggaatcgacccgaaatgcgtagacgatgttgtgaaaatggagggtaagaagactcatggtgaaggagtgtggaaagagctcattctaagaccaactcctgcagtgagacgtgttcttttaactgctcttgggattcatttcttccaacacgcctccggaatcgaagcagtgct

SEQ ID NO: 103074 - DNA, 400 bp, Arabidopsis thaliana columbia
cccacgcatccgaggacgcgtgggcggacgcgtgggcaaagttagagacttttgctggtgctgatataacctatactattgaggctatgatgggagatcggaaggctttgcaagctggtactagccacaatttaagccagaacttttctcgtgcctttggaactcagtttgcagatgagaatggagaaaggcaacatgtgtggcagacatcatgggcagtcagtacacgttttgttggtggcattatcatgactcacggagatgacactggtctcatgcttcctcccaagatagctccaatacaggtagtaattgtacctatttggaaaaaggacactgagaaaacaggagttctcagtgctgcatcatcagtgaaagaagctctccaaactgctggtgt

SEQ ID NO: 103075 - DNA, 379 bp, Arabidopsis thaliana columbia
gatactgagaatcagtttttgaaagattacttggtgaaacagttgtggaaggagaaagaggagagggttccaggtgaagaagagttgaaggagttgagtgaggatgatcacgaggtttgggatcaggaggattttgaggcacgaagaccgttggatttattaaactataggcatgaagatgagaatgctggggacactgttatgggtcagtctagggttgtggaagggtcggtgaggaagaaggataatgcgaggaaggcgcagaggaagaataaagacgagaggatgaagaaggaggatgatgtgaggaaagacgagttgaagcggttgaagaatgttaagaagaatgagattaaggagaagatgaagaacgtgcttt

SEQ ID NO: 103076 - DNA, 414 bp, Arabidopsis thaliana columbia
acgcgtccgcacgttacatcttttttactcggcgagcttgtgaagaagaaactggtgatttcatctccttcgatcactcccaagattcgcattacctttcttataatcgccgagattgttcgagcctgaataatcaaaatggttgtgcttgctgctgccattgtggtcaagtctgggaaagtgattgtttccagacactatgtggatatgtcccgtatcagaatcgaaggtctacttgcagcttttcctaagctggttggaatgggaaagcagcatacctatatcgagacggagaatgtgcgatatgtttatcagcctattgaagctctgttcctgcttcttgttacaactaagcagagtaacattctagaagacctggccacccttactttgctctccaaacttgtacctgag

SEQ ID NO: 103077 - DNA, 369 bp, Arabidopsis thaliana columbia
gacgtcgtattacgcgtccgcccacgcgtccgcccacgcgtccgctttgccatctgttacaaacaccaaactctcctgattcatcagttttaagtcttcttcaagtcccagggatcatcaatccaatggctcagatcttagcagcttctccaacatgtcagatgagagtgcctaaacactcatcagtcattgcatcatcatccaagttatggagctctgttgtgttgaaacagaagaagcagagcaacaacaaagtcagaggctttagagttcttgctctccaatctgataacagtactgtcaatagagttgagactcttctcaatttagacaccaaaccttactctgacaggatcattgctgaataca

SEQ ID NO: 103078 - DNA, 326 bp, Arabidopsis thaliana columbia
acgcgtccgaccacacgtccgcccacgcgtccgcggacgcgtgggcggacgcgtgggttgtgctttgcgcttctctcttattatagtatcgtctcatgaacgcgctcctatttcctcctaaagccccccttccttgtttctctaccgcaacaaagaaaaaacaaaagtttgagaaaaatggtgtgttcgttgtgtaaccaatgattgggttttagcttactacttcgagagattataagaaagaaagagtgaatatacattatagagagaagagaagcagataccaaaaaaagaaaccattaagtctttttgtgataatgatgata

SEQ ID NO: 103079 - DNA, 386 bp, Arabidopsis thaliana columbia
  unsure (1)..(386): unsure at all n locations
ggtaaggaatctttagaaccgaatcgtgaccgtacaaatcaggttttgtcgttgaaaccttatcgtcgttttgagatgatgttacttgcgttacaatctgataaaggcacgtttgttagagaacctgatgatttaagtgattttgagaattggagtttagggttgaagttagaggagaaaaggaatgagattgttgagttgattaatgggaacaatggtgttaaagagatctatgaggagattgttcctgttgaagttgatgctgagactttttggagaaggtattattataaagtttataagcttgagcaagtanaggaagctacggttaagcttgtgaagagagctatttctggtgaagaagatgaggatttaagctgggatct

SEQ ID NO: 103080 - DNA, 302 bp, Arabidopsis thaliana columbia
cccacgcgtccgtttctctctcactttttctttgcctttgcccaattcagagaactaatggctttgtcggtcatcgatagataaacaaaatttaatctttatctctctctttctcttgtttgtcaaaagatgcccaccaacacagaaatgaggaaaaaaagatctcttttttatttgaatgttgaacagtaagaagaaggtttattctattctattgggttgggttgttcatcaactaaaacatgcaatcaaaaaggagcaaccggccgggggatttggggaagggtttccgaaaactaaag

SEQ ID NO: 103081 - DNA, 380 bp, Arabidopsis thaliana columbia
acacctatgctttatacttgtgcaatctgtgctaaaggttacaggagttccaaggctcatgagcagcatcttcagtcgcgtagccatgttttgcgggtttcacaagggacatcaatcaacggagaggaggatatagcgattatcaggcaacttcctcgccgtgttcaacacaggggttccattgatgatgatagtgaagatgaatgggtggaggttgattctgacgaggaattggctgctgaagaagcctctgattctttgtctaagttgaatgtgaatgagtctggatctgctgaagatatggatgatgatggtgatgcagataagtatgagctggatccaacctgctgtttgatgtgtgacaaaaaacataagacctt

SEQ ID NO: 103082 - DNA, 347 bp, Arabidopsis thaliana columbia
aggacgcgtccgcccacgcgtccgcccacgcgtccgcccacgcgtccgcccacgcgtccgcccacgcgtccgcccacgcgtccgcccacgcgtccgggatttggagcgacctacaaagcagaaatctctcaagatgtggttgtcgcaatcaaacgcctctcgatcggacggtttcagggagtccaacagttccacgcagaaatcaaaactcttggtagacttcgacacccgaacctcgtgactctcatcggttaccacgctagcgaaactgagatgttcttggtgtacaactatctcccaggaggcaacctcgagaaattcatccaagaaagatccacaagagattg

SEQ ID NO: 103083 - DNA, 393 bp, Arabidopsis thaliana columbia
acgcgtccgaccaagcgtccgcggacgcgtgggcggacgcgtgggggcggcgagaggtgctatgcttcgatacctgagagtcaacgtcaatccaacaattcacaaccctagagaatgtgtacttcctttctccattctccttcgtcgtttctccgaggaagttagaggctctttccttgacaaatctgaggtcacagatcgagttctctctgtcgtcaaaaacttccaaaaagttgatccttctaaggtaacaccaaaagccaatttccaaaatgatctagggttggacagtttggacagtgtggaagttgtgatggcattggaggaggaatttgggtttgagatccctgataatgaagcagacaagatccagtccatcgatctagccgttga

SEQ ID NO: 103084 - DNA, 381 bp, Arabidopsis thaliana columbia
ggtcgggccacgcgtccgaccaagcgtccgcccacgcgtccgaccagagatagagagaggtttagcgaaaaatggcgatggccatggctcttcgaaggctttcttcttcaattgacaaacccattcgtcctcttattcgatccacttcatgttacatgtcttctttgcccagtgaagctgttgatgagaaggaaagatctcgtgtcacttggccaaaacagcttaacgcacctttagaggaggttgatcctgagattgctgacattattgagcatgagaaagctagacaatggaagggacttgaacttattccatctgagaacttcacatctgtgtcggtgatgcaagctgttgggtctgtcatgactaacaaatacagtg

SEQ ID NO: 103085 - DNA, 394 bp, Arabidopsis thaliana columbia
atccacaaatccctcgattcctggatttatttcttcaaattaaaaaattcaattttcagatcaatcggagaaatgaatcataaccgtcgatatcacgagagtcttctgattctgtagatggcgatttcaaatgagatcgaaaccgccattaacgagaccttccataaacgtatcatcaaactctgatggagagtcagcaacaacaatcaccggccgttgaaacgcctttgttgctcaattctaatcaggatcatcaagaccgaccttcgccggaaatcgacggcggcggtggcggcggaggaggagaaggtgttaacgacgatctagaccgaacgctagaatggttagagacgtttttgacgctccttgggtttaatcaatcgtctaaacaaag

SEQ ID NO: 103086 - DNA, 392 bp, Arabidopsis thaliana columbia
accacgcgtccggagataacatcctctttggaggtgtgatggatgaacaccgttaccgtgagacaattcaaaaatctagcctagacaaagatcttgagctcttacctgatggagaccagactgagattggtgaaagaggtgtaaatctaagtggaggacagaaacagaggattcaactcgctcgtgcgctataccaagatgcagacatttatctccttgatgatccatttagtgctgttgatgcacacactgcttcaagtctgttccaagaatatgttatggatgctctcgcgggaaaagctgtgttgttggttacacatcaagtggatttcttgcctgcttttgattctgttttgttgatgtcagatggagaaatcactgaagctgataca

SEQ ID NO: 103087 - DNA, 371 bp, Arabidopsis thaliana columbia
  unsure (1)..(371): unsure at all n locations
aaacaacaaaaactcaagaacaatatctccacttgatcactaccacattgtccaatcactctacaaagcctgtacgtacacaacaacattaccatggtgaaacaagaacgcaagatccaaaccagcagcacacaagacgaaatgcctttgtcatcatcaccatcgtcatcttcgtcatcatcttcttcctcgtcatcgtcttcgtgtaagaacaagaacacgaagagtaagattaagaagtacaaaggagtgaggatgagaagttggcgatcatgggtctctgagattacggcaccacatcanaagacaacgatttggttaggttcttactcaacagctgaagcagctgctagagcttacgatgttgcact

SEQ ID NO: 103088 - DNA, 349 bp, Arabidopsis thaliana columbia
ccacgcgtccggcaagcaaacatggagcttgagttccagaggaacaaggagaggtttgctttccttaaatggggttctactgcgttccagaacatgcttgttgtgcctcctggctctggtattgtgcatcaggtcaatttggaatatcttggaagagttgtgttcaataccaaaggccttctctacccagacagcgtggttggaactgattcacatacaactatgattgatggtttgggagttgctggatggggtgttgggggtattgaagctgaggcaacaatgcttggccagcccatgagtatggtattgcctggtgttgttggattcaaacttgccggaaaaatgc

SEQ ID NO: 103089 - DNA, 365 bp, Arabidopsis thaliana columbia
tcttaaacgttttactttgtgctgcactactcaacctcaatggccgcctcaacaatggctctctcctcccctgccttcgccggtaaggccgtcaagctttcccccgcggcatctgaagtccttggaagcggccgtgtgacaatgaggaagactgttgccaagccaaagggcccatcaggcagcccatggtacggatctgaccgtgtcaagtacttgggtccattctctggcgaatcaccgagctaccttaccggagagttccccggagactacggatgggacaccgccggactttcagctgaccccgagacattcgcaaggaaccgtgaactagaagttatccacagcaggtgggccatgctcgg

SEQ ID NO: 103090 - DNA, 375 bp, Arabidopsis thaliana columbia
actcaaagaccaaatccctacttggtttgctgttggaggttatatcacaatagctgcaacatctacagcgatactccctcacatgttccaccagctgagatggtattacattctggtcatctatatctgcgcgcctgtcttagctttctgtaacgcttatggagctggactcacagactggtccttggcttcaacttatggaaagttagccatattcacaattggagcttgggctggctctgagcacggtggtatgctggctggtctagcagcatgtggtgtcatgatgaacatagtctcgacagcttcggatctaacacaagacttcaagacaggctacctcactttatcatctccaaagtcaatgtttgtgag

SEQ ID NO: 103091 - DNA, 300 bp, Arabidopsis thaliana columbia
actgacattactgctaaagtgaatcaagtgagtattgatgagagtaatgaagaaactattgttgtcaaggaatgtcaaagctcggttgatacggtgaaagacgaagtcaaggacagtgtggatagtccagtattggagaaagcagaggagattgctcttgaggaacagaagatagaaatggtcgtccatgtgcatgagagatcagaagaggttttacaagaggatgagaaagaagagacagaagtaatagaagaagtgagagacgacatttcattacaaaatgatactgtggatgcaaat

SEQ ID NO: 103092 - DNA, 314 bp, Arabidopsis thaliana columbia
cggttttgcacgagtgcactaaagatgcggtacccaagcttcaagaaattcctctagataaaattagactgataaaaagaagctctgaactggacagcagacatgaagcaaaaagtcggaaatttactcataagggaaattcatctaacttccaagatagtgatactgatgatgaacttcctggacctatggatagtggatcatcaagcgatgatgagcctagttatcaaagctcagtgccaaacatttccaaccagaagaaacaatttgttggggaccggtttgatgaagcaataaaagcttcctctttgagc

SEQ ID NO: 103093 - DNA, 160 bp, Arabidopsis thaliana columbia
acccacgcgtccgccgatttcaaaattttccggtgaaatcgaaaaaaaaagcgagatcttcttctctaatggcgacgaccttaagcagagatcaatatgtctagatggcgaagctcgccgagcaagccgagcgttacgaagagatggttcaattcatgga

SEQ ID NO: 103094 - DNA, 339 bp, Arabidopsis thaliana columbia
cttcgtttatcctcgataagcatcagaacaacaaacccatttctctaactcattcaattgattctcctccaccaccatctgcttcaatggcggatgaaaagcctaagcctaatcctatttcggcttattaccaaaccagagcggcgcatcatggaattgtgactagcgagtggttggagcaggctcaagccgcggttcgacgttaccctgatcgtgattccttagtttcgggaagaccctttagcgtgattgaggactttaatagttggagacagcaacctgatttggcggaggctgttgcggcgattcgtgctcttgcggctgttattagggctagtg

SEQ ID NO: 103095 - DNA, 399 bp, Arabidopsis thaliana columbia
ccgggccgacccacacgtccagaagatgtcaaagtttttgttcatggtggcgcaagtatcgggtgccccaaaaatgcaggagcagctggaacatactttaatgctgaattagtgagtttaagggttggaaatgataacatgactacagagacagaaactcctttgctcgattttcctacaaggcctctgtggtcaaacatctatgtagataataatgcaaaagttttggtcccgctgctgtggaccagaatgcaggtcggaggtcaaatcagtctttatcggggaagcagcattgttttcgggttatcaaaatatccaatttcagaatttgagcttgttgctgaagaacttttaatgagtaactccgttataaaggtttttggtgcattacgacttgtt

SEQ ID NO: 103096 - DNA, 398 bp, Arabidopsis thaliana columbia
ggacgcgtggggaagcaacgtcgtgatgatgaagatgaggttttgatggataaggaaaggagaaaggctgctactgttgctccgaggactactaggaaaggtcttggtgtgtcggagagtaagagtcgggttgttgtttcgggttcggaagtatgtgccggttcttctgattcttcttccgggtcgggtcgggttcttagtgatgggtctaacttggatcggttcttggagcatactactcctgttgttcctgctcgtttatttcccatgaggagcaggtgggaacttaaaacccgtgaatcggattgccatacgtattttgttttggaggatctttgggagtcatttgctgaatggagtgcatacggtgctggtgttcctttagagatgcatcctct

SEQ ID NO: 103097 - DNA, 346 bp, Arabidopsis thaliana columbia
caagttgatatggcgttaggaagatttgagaatgcgattgtaaaggtggagagagccatgacgattgatcatagcaatagtcccgaggtagtatcggtcgtaaacaatgtgaagaatgtggcgaaagctcgtacccgaggaaacgagctttttagttcggggagatactcggaagcgagtgtggcttatggggacggactcaagttggatgctttcaattcggttttgtattgtaatagagcggcatgttggtttaaactcggtatgtgggagaaatctgttgatgattgtaatcaagcgctaagaattcagcctagttacaccaaagctcttctccgaagagctg

SEQ ID NO: 103098 - DNA, 366 bp, Arabidopsis thaliana columbia
cccaagcgtccagttgaacagccacattcgacaactgattttacaaatggtaattcgactggctgggaattggcacttgtgactgccccaagctcaaatgaaggtgccgctgcagatagcagattggtagatagcatctctccctctctctagttcttatgtttagccgcagaagtgtgttttatgacattagatgtcttcctgtgtcatttgaataaaaaggcgggtggactggacaagctcacacttgacagcctatatgaggatgcaatcagagtgagtcaacagcagaacaggagctataatccatgggaacaaaatccagttcataatggtcacatgatgcaccaacctttctatgcatct

SEQ ID NO: 103099 - DNA, 375 bp, Arabidopsis thaliana columbia
accatctcatgcagatgctttaggatcagcagatgcttatccgcctaacaattctattccaggtgggactaatgctcattcttatgcctctggcccaaacactagcggtccttcaattggtccacctcctgtaattgcaaacaaagctcctagcaatcagcctaatgaggtctatcttgtatgggatgatgaagcgatgtctatggaggaaagaagaatgtccttaccaaaatacaaagtgcacgatgaaaccagccaggtaagttctgatttaccctttttaaagttaagaagagtttgcttttgcaagtctaacccattcggtaggctttatttatacatttctgttccagatcctattgtttctgtgctaag

SEQ ID NO: 103100 - DNA, 157 bp, Arabidopsis thaliana columbia
aatcacttcaatcgcctccctgccaggtatgctttggatgtgaatgtggagagggctgaagacgtcttgatgcacaagcgattgctgcattctgcttacgatccccagaatcggcctgctatcgaagttcatctcgtccaggttcaacctgccggga

SEQ ID NO: 103101 - DNA, 417 bp, Arabidopsis thaliana columbia
ccacgcgtccgcttggatgctttaaacctctctctctctctctctcaattatttttttttctatttcaaaaacaaaaaaaaatgaatatctctcaaaaccctagccctaattttacgtacttctccgatgaaaactttattaatccgtttatggataacaacgatttctcaaatttgatgttctttgacatagatgaaggaggtaacaatggattaatcgaggaagagatctcatctccgacaagcatcgtttcgtcggagacatttaccggggaaagcggcggatccggcagcgcaacaacgttgagtaaaaaggaatcaactaatagaggaagtaaagagagtgatcagacgaaggagacgggtcatcgagttgcatttagaacgagatcgaagattgatgtgatggatgatggt

SEQ ID NO: 103102 - DNA, 343 bp, Arabidopsis thaliana columbia
tgaagagaaataataacaattaactcaaccaaaaatatgaggaagccagaggtagccattgcagctagtactcaccaagtaaagaagatgaagaagggactttggtctcctgaggaagactcaaagctgatgcaatagatgttaagcaatggacaaggatgttggagtgatgttgcgaaaaacgcaggacttcaaagatgtggcaaaagctgccgtcttcgttggatcaactatcttcgtcctgacctcaagcgtggcgctttctctcctcaagaagaggatctcatcattcgctttcattccatcctcggcaacaggtggtctcagattgcagcacgattgc

SEQ ID NO: 103103 - DNA, 172 bp, Arabidopsis thaliana columbia
agagtacttgtatctcataatggagtatttacctggtggggatatgatgactttacttatgaggaaagacaccctcactgaagacgaggccaggttttatattggggaaactgtcctggctattgagtccattcataagcacaactacattcacagagatatcaagcctgat

SEQ ID NO: 103104 - DNA, 455 bp, Arabidopsis thaliana columbia
tccggattaccacaaaccaaataagaaagatcaattttgatgtagaattttgcttctttttcagaagaaaagtctcagcttcactgattcgaccgttgattcaatttctatggcagttcataattttcagaacgttattacaatcttaagcttttagttaatacttaacactacgttgatctgctttgattttgatataagttttggttccaattagatttcgtgtagttttcttcacccacccactactatcagactatcagaatctgaaagtaacccactttaaaaattgacaacacacgcaacgaaacacaaagcgccaaaaattaaggaaaaaaaggtttgtcgtaatctgatactattcacgcgatgacctcgtttttgatcatcttttccttttctatattcttttctcctctgtcgcaaacgattcacttttctcaccatctcaatct

SEQ ID NO: 103105 - DNA, 408 bp, Arabidopsis thaliana columbia
gtctagaagaatgttcagacaggaccattggaaactggcatttgcgtggaataagcggaggagagaagaaacggcttagtattgccctcgaggtcttaacaaaaccaagtctcctctttctagacgaaccaactagtggactggacagtgcttcagctttcttcgtggttcagattcttagaaacatagcaagcagtggcaaaactgtggtttcttcgatccatcagccgagtggtgaggttttcgccctctttgatgacctgctacttctgtctggaggagaaactgtttactttggcgaagcagaatctgcaacaaagttctttggtgaagcaggttttccttgtccaagtagacggaatccatcagaccacttccttcgctgtgtcaattccgatttcgataatg

SEQ ID NO: 103106 - DNA, 229 bp, Arabidopsis thaliana columbia
cccaagcgtccgcccacgcgtccgcccacgcgtccggccgaggttaaaatccaaagcgtaaaatcatagcgagaaatttccttattcctgtgattttgctgagaagaagaagaatctcgaggaggaagaagaaacaggcgacatgggagaacggaaggtgctaaacaagtattatccgccggacttcgatcctgcgaagcttcaacggctccggcggccgaagaaccag

SEQ ID NO: 103107 - DNA, 404 bp, Arabidopsis thaliana columbia
aattttatgggtcaaaccaatttcgatcaaaatcaattggttttgaatcaattttagatcttttgattcctacttgtcttaatcacttgaatccaagttttgtctctttttaaggttgtaataaaattggtttttgtaataaaatcaattgggtttggatcaattttagagctttttgattcctacttgtgtataatcttgtaatttttgaatcaaagttcaaagtctttttttcaaacagtaaaatttcgttttttaatcaatttcatcagaatccaatttctgggtcaactttcgatcaaaatcaactgggcttgaatcaattttaggtttttcgattcctacttgtctaatcagttgaatcaaagttcgtctcttttaagcttgcaatttcaaagatgaca

SEQ ID NO: 103108 - DNA, 363 bp, Arabidopsis thaliana columbia
gcgtccacccacacgtccgcggacgcgtgggcggacgcgtgggcggaagagttggtcgtttggttgctagagttgttctccagagggacgatgttgagctcgtcgctgtcaacgagcccttcatcactactgagtacatgacctacatgttcaagtacgacagtgttcacggtcaatggaaacacaatgaacgcaagatcaaggatgagaagacccttctcttcggtgagaagccagtcactgttttcggcatcaggaaccctgaggatatcccatgggccgaggctggagctgactacgttgttgagtctactggtgtcttcactgacaaagacaaggctgcagctcacttgaacggtggtg

SEQ ID NO: 103109 - DNA, 409 bp, Arabidopsis thaliana columbia
gtccgtttgaaagacattctaaagaaaagagctctggagaatcttaaaagatttcgtggagtgacccaaaagagcggaatagctaaaaaagaggtgtcttctgtttcagaaggagaacctatgcaaattgaatctgaaaaagttgagtcacaagaccatgatctcatggagcagaaactttgtgattctgctgtaagcaaagatcttgagaattcagaaaagattttacatgttattaatgttaaggaatctggaacagcattggctaattctgcctctcaacaagatcagcattctggtgatactgccaaggttaaagttagttctggtcttagctcttgtacaaccaaacgaaagttggttagaccggtattgagtaaagatagtttaaatctagctagcaagaaag

SEQ ID NO: 103110 - DNA, 387 bp, Arabidopsis thaliana columbia
acttgcatttgtttgaatccttccactaatcaatcacttggaactcgcaggaagaagctaccaaaaccaattgatttgtctgagttacttgatttcaatttgatttcacaaaatttcaacaatgacggtgttttgccagacggaattagggtttcgaaagttgattcttctcctgtgttctgcatcgataatcgccctggtttttactttatacctgatgcattgagtttaaaggagcaatgtaaatggattaaagagagcttgacgagttttccgcagcctccgaatagaacaaaccacaatgcaatttacggtcctattgatgatttgtttgattcagctaaagaaaacaaggtattggttcaggatgatcttaccaacaacaag

SEQ ID NO: 103111 - DNA, 419 bp, Arabidopsis thaliana columbia
agcattagctggcgtcctcgtcttcataattctggttttggcaatactcttgctgttgccaaaatgtgcaagacgtagagaacatgctaacagagttttcaaaccgcatcaagttggtgctgatagaggaagcagagagaatgctctggaaaacgggactccggtactgccaccacctggtcgatctgaaaaagttcaaagagaacccttcaagaaagctggagaggaaccaaaggtcttacatgaccttgagaggctgcggagacctgcacctatatcaagacaggaaagtcaagatattgacttttcaatgttgatgcctcctcctccaccacctccaccaccaccaccacctcctcctttggatgagaaggtcacggttatgccaatcatatcacccgaaagaaccgttaagaaaa

SEQ ID NO: 103112 - DNA, 415 bp, Arabidopsis thaliana columbia
cgtccgccgatatctgtttcttctcgtttggatctttggaaattttagagtttttttcgttttgaaatggcgaggaagaagatcagagagtatgactcaaagaggttggtgaaggaacatttcaaaaggctttctggcaaagagcttcctatcagatccgttcagattaatgaaacaactgatctaaatgagctagttgaaaaggaaccttggctctcgtctgagaagctggtggtgaaacctgacatgttgtttggaaagcgtggcaagagtggtttggttgccttgaaattagattttgctgatgttgccacttttgttaaagaacgtttgggaaaagaggtagagatgagtggatgcaaaggacccataacaacattcatagttgaaccatttgttccacacaatgaggagt

SEQ ID NO: 103113 - DNA, 374 bp, Arabidopsis thaliana columbia
attgaaaagtcgaatagacatggtaaatcaaacaaacattctgatgccttaggaaatgttcgtaaatctgacaaaggggaccattttccacttgaaatgctttctagtcgctcaggaaaggccttcagggacaatcagagagatgatgttcatttgaaaaataagtttccaaggaataaaaaagatggtgagtcagccattcgaccttcattacctaccgagacatccgatagaaagcccgatgaactggatggaagtgacaaggatcccaagaatgtttcaggcttgagcataggttcttctcccttagatagccagagaacatatttggcgaaattacctaagggaaatggacctgtcctccaaaaacaagt

SEQ ID NO: 103114 - DNA, 425 bp, Arabidopsis thaliana columbia
  unsure (1)..(425): unsure at all n locations
ctctattgaagctctctgacgtgaaaggaactgatggcaaaactacacttttacattttgttgttcttgagatcattcgttctgaaggcgttcgtgctcttcgccttcagagccgaagcttctcaagcgttaaaaccgatgattcaaacgcggattctagtccacaatctgtggagcgttaccgcagcacgggtcttcaagtggttacggggttaacgacagagcttgaagatgtcaagagagcagccatcatagacgctgatggtttggctgcaacattggcgaatataagcggttcacttacgaatgcgagggagtttttganaacaatggatgaagagagcgatttcgaacgagcattagctggatttatagaacgtgcagatgctgattttaaatggttgaaggaagaagaagagagaatc

SEQ ID NO: 103115 - DNA, 301 bp, Arabidopsis thaliana columbia
gagagaactcacaaaacatacttcgaattcccattgtttaaaagacgaagataatggatttctccggtttgtttctcactctctccgcggcggctctgtttctctgtttactccgatttatcgccggagtccgccgtagctcctccacgaaactccctcttcctccgggaacaatgggttatccttacgtctgcgaaacattccaactttactcacaataccctaatgtgttctttgcagcaaaacagagaagatacggatcggtgttcaagactcatgtattgggatgtccatgtgtgat

SEQ ID NO: 103116 - DNA, 354 bp, Arabidopsis thaliana columbia
gataaaacggtcttcttcttcttcttcttcttcttcttcttgtaagaaccagtcatgggaagatctccagcttcttcttgtctccgtctcatctcttgctccggcggtgatgatacctccgccgatcctaactccaccgccctcgaggttttgacattttctctccctctttgtaatgttctcgcgatcttcaatttctgtttcggatttgtctctgctcgaagtttctattttaagatctgatattagtgtcttgtcggattttggcattacttagtttctaattttgtccaaatcttagggtttttaattgtttggtttggaaattacttaaggcttttgttttgtctggta

SEQ ID NO: 103117 - DNA, 355 bp, Arabidopsis thaliana columbia
ctttcgatggcgttacttgctgagatcaatcgaagtaactttgtcgtctctgcaagtaacgccaaagttacttcgattgatctcagctccaagcctctcaacgtcggattcagtgccgtgtcctcgtctctcctgtctctcaccggattagagtctctgtttctctcaaactcacacatcaatggctccgtttctggcttcaagtgctctgcttctttaaccagcttggatctatctagaaactctctttcgggtcctgtaacgactctaacaagccttggttcttgctccggtctgaagtttcttaacgtctcgtccaatacacttgattttcccgggaaagtttcaggtgggt

SEQ ID NO: 103118 - DNA, 212 bp, Arabidopsis thaliana columbia
gatgatatctacgcggtgtttgaagaaatgaatctcggtgaagcccatgatagagaaatggggaaatctgtcccttacagtccaatcatccacgactctaaagttcacacggtaagtctagatgccaatatgatgaacatgatagggagacactcatatgcttatactcaccagaatggagacattgcacaagatgatagcggttgggaaac

SEQ ID NO: 103119 - DNA, 223 bp, Arabidopsis thaliana columbia
caaaatatcacacaattttcctctctttacccagaagatttcatcagaacctcttcgccattaatggttacagcgatgttttgtgcatcatcttctccaattacatctcctctctacccaaaagcttataaattttctcaaacaaaatcgaattcgaagagattttcctctctgcgtgcttcgttgcctgtttctgataacaagcttcttaaatttgaataca

SEQ ID NO: 103120 - DNA, 342 bp, Arabidopsis thaliana columbia
cataaagatagaagagacagaagcccaaacaacagcttttcttgtctctctgcttcgtcaataatctcttcaggtgcgtgtgggataaaaagatgtatctaccggtttagattactcgcatttccgcggttactaagatgctgtgtgactgagctttaatgttatgggttcatttgccggaaagtgtgaaatagttgaagaaaaagaagaccgtcaaaactcgattggttactcagcgaaatcaaccactattccacattctagatcaagcattgtcgacgacaaggatctggagcgaccggtactgaaattacgttacagaggttcactagaagatgacat

SEQ ID NO: 103121 - DNA, 299 bp, Arabidopsis thaliana columbia
ctcaatttacaccttctcttctctgaacaaggcaaacaaaaatggttacaacccaaaacacgaaggccagagtcacctccgtctctcaccgccgatcacagcaagatcctgagtcgccggtgaagaagttcttcaagttggtcttaccttcaacgatgaaggataagatgatgaagattccgccaagattcgtgaagctacaagggtctaaactctcacaggttgttacattagagactcctgcgggtttcaagcgttccattaagctcaaacggatcggtgaagagatttggttccat

SEQ ID NO: 103122 - DNA, 407 bp, Arabidopsis thaliana columbia
aattccggagtgtctctctcccaaatcgaatctgcgatgctgatttgggagagagacactccggaatcagcatcccagattcgatttctcagcctaagagacctgaaaaatggagggtggcttcaaggcattgctcgatgatcttgacgttctcgacaaatctctctcagatccggctctgatcaacaagctgcgatcacatgttgagaatctagccactctgtctaaatgtaatcctcaccggcgttccaaagtcaaggaactaaactcggaagtggtagatagtaatccttacagtacgcttatggcacttcagcggatgggcattgtggacaactatgagagaattagagagttttccgtcgccattgttggaattggtggtgttggaagtgttgcggctgaga

SEQ ID NO: 103123 - DNA, 384 bp, Arabidopsis thaliana columbia
aggtgctgcaaaaggtctcagtttcctccatgaagaagctttgaagcctgttatatatcgagatttcaaaacatcaaacattttacttgatgcagactacaatgcaaaactatcagattttggacttgccaaagatgctcctgatgaaggcaaaacccatgtttctactagggttatgggtacatatggctatgctgctcccgaatatgtaatgaccggtcacttgacatcaaagagcgatgtttatagttttggggtggttctacttgaaatgttgactggacgacgatctatggacaaaaaccgcccaaatggtgagcacaacttagtggaatgggcaagaccgcatcttcttgacaagagaaggttttaccggttacttga

SEQ ID NO: 103124 - DNA, 295 bp, Arabidopsis thaliana columbia
ctcaattcttcttctcattctttcactttcaaatctccacttcacttcaaccaccggaaacaaccacattaacgacagaaaatccttagaaatcattatcggtggtggtaacgacaacaatcctccaccgtcaccttcaccggaaccagaaccagaacctgcagattgccctcctcgccctcctcctcctccatgccctcctccaccttctccccctccatgccctcctccaccctctcctcctccaagccctcctcctccacagcttccacctcctccacatcttccgccgcct

SEQ ID NO: 103125 - DNA, 313 bp, Arabidopsis thaliana columbia
agtcacagagatacttttctcactcatctctctctctctttcccgcttccctccttaaaccccaattcttctcctgctcacaaaaaccctatcttttgggttttgttatacagtgatgatgaaacctgcttctttgcaaggtttctcctcacatgcgtcctcctctatctactccgatgttcgcaggccagctactactccttcgaaaatggcagcttttagtgccctctcgctttgtccctatactttcaccttccgccaaagctctcgaattaagtctaccgtttcctgttccgtcacttctgctcctgct

SEQ ID NO: 103126 - DNA, 231 bp, Arabidopsis thaliana columbia
tccgaccggcaaaatcactgagaacagacaaaaagctcgttgtgttgttattcctctcatttgtttcttcttcttcctcagctcctttgattttgaatcttgatctgtgaggaaggctctttgaaatatcttcacaagacgtgaatttgacgcgaacccttttggattctcgtgttcaattgtttgaaccaacaatctcccagaggagtaaggcgggaatctcaaaattcg

SEQ ID NO: 103127 - DNA, 391 bp, Arabidopsis thaliana columbia
cttcattcataacagttctttttctctcgttctctggtttaaagcataatgacggaagagctcatcgaccaatcaccaccacctgacccagacccgattcaaaattcgaatttaataatccacccaagacgtgttcctttcgagcacggccttcttccgatccagaagctcgtttttaccgacccgattcaaactctagctccgatcaagcaaaagttagcttctttggcgacgaatcatcgcgtcggatctgctgccatttccgatgcactctcgatctccgatgaccatgcgcgcctcgttctcgaaactctctcttcggtgctccattgcgagactgacccattggttttggccaaacctgaggaagttgattccgtgggagctgatt

SEQ ID NO: 103128 - DNA, 398 bp, Arabidopsis thaliana columbia
aacccacgcgtccgtggtggccaagttacatgatattgagccgccaaaactggctgcaggtaacgtgaatcttcagacacgacaatttgggccatctttggataattcaaacgtgacatgcgaagagtacaaggaggctgtggtcaaggccaaagaacatatacttgcaggagacatatttcagatcgtgctgagtcaacgttttgagcggcgaacatttgcagacccctttgaagtttatagagcactaagagttgtgaatccaagtccgtatatgggttatttgcaggctagaggatgcattttggtagcatcaagtccagaaattctcaccaaagtaaagcagaacaagatagtgaatcggccattggcaggaaccagcaagagagggaagaatg

SEQ ID NO: 103129 - DNA, 321 bp, Arabidopsis thaliana columbia
ccttgatgttaaaacccgagtaagaaacggttcgaagcgtaaatttgtctctgccttctgtcaatcaaactgtggtgatgtgagtccaaatactcttggtaccttttgcattgacactggactgccttgtgatttcaatcacagtacctgcaatggacagaacgagttgtgctatggccgtggtccgggctaccctgatgaatttgagagtacacgtatcattggagaaaagcaattcaaaatggctgtggaactttttaacaaagctacagagaagctgcaagggaaaattggttaccaacatgcgtatctagatttctc

SEQ ID NO: 103130 - DNA, 366 bp, Arabidopsis thaliana columbia
cccacgcgtccgcagaaaccaaagaagattcatcaattctcctctaacaccaatcctgcttgctttcactttccttctccgatttcgttctcacgccttcgcattcctttttttaatttcgtttcgaaacgcgtttcaaggttacgtcgatctcaaagtaacatcgccttcagagagaaattgataaaccttgctccaattccattgttattcatggctcttagaaactttacctagattactcggattcaatcgtcaagtttatattggatcgttgtgtcgtaggaaccctaatttcgaaggcctgtgcactcactcactcactcaatttgcacaacaccctcagagaccaacaagagcaacatg

SEQ ID NO: 103131 - DNA, 286 bp, Arabidopsis thaliana columbia
cccacgcgtcagcggacgcgtgggtcagtttcctgctaagaagccgactaggcaatgggctgcttggacacatcaagaagaggaaagtttcttcactgctcttcgtcaagttggaaagaattttgagaagataacttctcgtgttcagagcaaaaacaaggaccaggtcaggcattactattatcgtttagtgaggcgtatgaacaaacttttgggcccggatctgagccttgatgccaagaacccaaaggacaccaatgctgcaatgctacgatggtggtctttg

SEQ ID NO: 103132 - DNA, 331 bp, Arabidopsis thaliana columbia
cccacgcgtccggggatactggtcaggactatgataacttgtgttttgaaaagcgtgacgccagctaactcttttatctgggatcaatcacagataagcccgcatgcgattacgacttgttcagacacgactcagagcatgtactgccaactgctttgtgggcttctacaacgagataatgtacgtcgccttggtgcaccatttgcgtcatcctttcgcgaaataatcaagttcttggatgatcactggcctgagttttgctcaaacataaggactggttgtctcagtgactggattacagacccccaatgtgtttcagggatcggtaagt

SEQ ID NO: 103133 - DNA, 369 bp, Arabidopsis thaliana columbia
cccacgcgtccgcccacgcgtccgcccacgcgtccgcccacgcgtccgtctcacattaatgggtcaaaccttttgctcttccttttgattaatttagtgtttgacaatctcctcctccttctccttcttcttcaaagttttgtcgcagtatctattgttcttacagagagaaaggaaagctttagtcttttaccagtttgatccaattctgggtttcactgaaaaaaagttgggagtttgattcttctaactgtagaagaaacagagtcaacagaagaaaactaaaaaagttgagatttttctctcacgcgctcaagaacttgagtatgtcttcttctgtaacagtgttatgggttgctacttcttctc

SEQ ID NO: 103134 - DNA, 231 bp, Arabidopsis thaliana columbia
cccacgcgtcagctcatcgctcagtgactgattcagatgaccagtgtctccgtcgccgtcgtagctcctccgcatcgttgcccattctctagtcatctgaatctgaacaagctttctcttcaagtagtaatctttctctctcttcgatctatctcactctctcagtgtgtctctccataggtttcatcttcccaaccgtttcgtttttttttgctcttcggttgtgatttt

SEQ ID NO: 103135 - DNA, 420 bp, Arabidopsis thaliana columbia
gggaagtcataaggacatatcataacgtttggagtcatctctttgatggcgaaagatctgcggccttacattccgaatatatcttttggggattctggagaaataaagatgaaaagatttggaagtttctggtttaagacagggagtaaaaacgggttagaagctccggttctgaagacactggtcttggtggcaacgaggtcgttgtgtaatgaggaacttttgctgaattacaggctgagcaactctaagagacgaccagattggtatactccggttaacgaggaggaagataggagaagatggagctaaatttctcttttatgttttaatgaaacttgaaaggctctgtttcaaaacatgctcctcggttttctttagactattagcgggacgtcgtttcgctgattgtgtcactat

SEQ ID NO: 103136 - DNA, 420 bp, Arabidopsis thaliana columbia
gaaaagtgtcatcggatccagttgctattgacgcacctggtggatttctgtttgagtggtggtctgtcttctgggatatatttattgctaggaccaatgagaagcattccgaggttgctgcatcttacatagagacacagatgatcaaagcacgagaacagcaattgcagcaatctcaacacccacaagtttcacagcagcagcagcaacaacaacaacagcagattcaaatgcaacaactcttgttgcaacgtgcacagcaacagcagcagcagcaacaacaacaacatcatcatcatcagcaacagcaacagcaacagcagcagcaacagcaacagcagcagcagcagcaacaacaacatcaaaaccaaccaccttctcaacagcagcagcagcaatcaacgcctcaacaccaacagc

SEQ ID NO: 103137 - DNA, 296 bp, Arabidopsis thaliana columbia
gtcatcttcgtacgcgtcgagctgcactaaattgatctctctcaccaaacaattaagctcttacgcgaaccaaggaaaccatgaacaagctcttaatctctttcttcaaatgcattcgtctttcgccttacctctcgatgcacacgtcttctcactcgctctcaaatcgtgcgctgcagctttccgtcctgttctcggtggattagtccatgcacactccgtcaaatccaattttctgtcgaacccatttgttggatgcgcgttactcgatatgtatggtaaatgcttgtctgttt

SEQ ID NO: 103138 - DNA, 324 bp, Arabidopsis thaliana columbia
tgaaaaagtgttgctccctgtccgtcagatttatgaaagatttgatgcagcctccataacccaagtggacgatgcacgtcttgaatattttaccaaaaagattttcccaaagattaaagattctgttcagggaggagtaatgatctttatccattcttacttcgagttcgtcaggcttagaaactttttgaatacgcagaatacctctttctgtcttcttggagattatgcaaaacatgcagatatatcccgagcaagagaacagttttttgtagggagccgagagatcatgctttacactgagagagcatacctttataagag

SEQ ID NO: 103139 - DNA, 322 bp, Arabidopsis thaliana columbia
tttattctctcctcctcagtatatatctaatctctgtttgctcttttttcgcaccatgtcatatcaatctaccatcaatcgatcgtctcttcttcctccgtctgcgttgatcttttcgtttcgtcttctccgattgatgctctgtcgcgagagtcatgcctacattttctgctgccgctttgggtagatcactaaattcagggacgtccttatctagtaaatttccaagcacactgcagtcaaagccgtctattttgaatgatgaaagtaagcaacctaaagaaaagacattcactcgtcctcagatgtcaccttctctata

SEQ ID NO: 103140 - DNA, 318 bp, Arabidopsis thaliana columbia
  unsure (1)..(318): unsure at all n locations
cccacgcgtccggggagaanggtttaactcaaagtttgccaaagggcagatgttggatggagtggtcaagaatttaacgaggtcaggagcgtttataactataggagaaggcgaagaagggtttttaccgaccgctgaggaagcagatgatggtattggaagcatgatgatgggtggctcttcgttgcaagctggacaagaggtgaaggttcgtgtgttgaggatagcaaggggacgtgttactttaacaatgaaagaggaagatgatggtaagtttgatgaaacaaccactcagggagttgtgcatacagccacaaa

SEQ ID NO: 103141 - DNA, 392 bp, Arabidopsis thaliana columbia
atttgcagtactgtctaagatcttattccgctcgaccaagtttgttctttttagcataatttgggggagtttttccccattaattctcactttgtcttcttcttgtgtcggttaggttttcaagaaaaaccctcttttgtcttgtctcctcaaaatcagttgcttcttctctataataatagagggtttattcatatcttcactatctagcttcttcttctatcatatgtactccaactctcggatatgatcgaaagagctttgttattattatctttacaacttcacgcagacgcataagagagagagttgatcaaagatattcgagattgagatgaacaagagtaatcctgctggttcggtgactggttcggatataatagacgccaaga

SEQ ID NO: 103142 - DNA, 352 bp, Arabidopsis thaliana columbia
ctaaatctgattttcaaccaaaagccaaattcagcggaggaactgtcgttttcctttcttctttacttcttcacctttctcctatttcatcttaacatataatcatcagaagaaaaaaaaattctaaaacaaaagaggaacttgagaattttatgcttgagacaaaatggcagaagatacgtacgaggaagagtgcgactacttgtttaaggcggtgttgatcggagactcagccgtcggaaaatcaaacctcttgtctagattttctaaagacgagttccggtttgactctaaaccaaccatcggagtagagtttgcttaccggaatgttcacgtcggagataaaatcatc

SEQ ID NO: 103143 - DNA, 282 bp, Arabidopsis thaliana columbia
ggccgcttgtgcaccgctgtgttcgtcatgacgccggccacattacatatgtgttcatgaggcctcggttgccgttgtggttgtggtgttcgacaccgcactcgctgtgtctgccgccgccggccggcgaggtggcgttttcttgagacccaacaacaaggacttggcccacgcatcggatgcatcgctgttgttgtcgttgcccgagtcagccgagctggacggccgcggtatacgaaaggactcggtacgtctcaatcccgcctttgctgctgcaaagtt

SEQ ID NO: 103144 - DNA, 375 bp, Arabidopsis thaliana columbia
atcatctcccccgccacctccaccaactgaagctcctcctactactcctattacatcacccagcccgccaacaaatccaccaccaccaccggaaagccctccttcactacctgcaccagaccctccaagcaatccacttccaccacctaagttagtcccaccatcacattcacctccacgtcatttaccttccccgccagcctcagaaattcctcctcctccacgtcatttaccttccccaccagcctcagaacgtccttcaactcctccatcagattcagaacatccttctcctcctcctccagggcatccaaaacgtcgtgagcaacctcctccaccgggttctaaacgtcctactccatcacctccttctcc

SEQ ID NO: 103145 - DNA, 409 bp, Arabidopsis thaliana columbia
cccaattatctcctcctacgctcccgactagcgtttatcctattccggtcgccgccggagaccttgtatctccatataatggtgtcgccgaaagatttagtggcgatagtacactcttcgctgctcggaacatcccggccaactccaacgcagcgtatcgaactcactcatgccattcgcaactcatttccctctcttcagaacctcctctctttcccgcctccgaagccgtcggacagagcgcaagttcagtccaaagaaattcgactcccggattcgctgccaatatctttggatgaccaagatatcgctattagcttgaaactgagtgatgagcttcacctaaatgagatagattctgttcgtctgcttgtatcttcgaatcaggagtggggcttaatgggacgag

SEQ ID NO: 103146 - DNA, 398 bp, Arabidopsis thaliana columbia
agtgaatgaagaaatgatagagacattgttcaaggtgaatgatccaacttcgagaacaagagatggcgttgttcaatccgtgagtcaggagaatcggtttcttgatccaagaaagtcacacaacattgctattttgttgagagctcttaatgtaactgctgatgaagtatgtgaagctcttatagaaggtaactcggatacgcttggacccgagcttctcgaatgcttgcttaagatggctcctactaaagaagaagaggacaagcttaaggagcttaaagatgatgatgatggatctccttccaagataggacctgcagagaaattcctcaaagcattgttgaacattcctttcgccttcaagaggattgatgcaatgctttacattgtcaagttcg

SEQ ID NO: 103147 - DNA, 369 bp, Arabidopsis thaliana columbia
acgcgtacgggaaacggaagcaaagcctctgcttaaggaagatagaagtgatccggcgattcatgattctcaggagaagaagagacctagaatggttgctgaagctgaacaccataagtttgagaggaattgtgaactcaaactcgacttggataaatctgatcatgtgggtttagtacacaagcatcatgttcagaagccgccaccgcaacagcaactatctgttcctgataaaactgctcaagctagccatttgcctctgcatatgtctatgcctggctggcctgggggccttcctacaatgggatacatggcacctacacaaggagttgtgcctacggataccagttccttatcagctgcagcaat

SEQ ID NO: 103148 - DNA, 261 bp, Arabidopsis thaliana columbia
attctctctctcttttcttgaacttcttatctctcttttttttacagttctcctttctcaaaacatcacattgtgtcttcagtttcagtgccgtaaattttgttttcctcttcattttctgcatactataagttcttttgggtatttgtgatttgtcatctccgaaacgtttctctctttaaaactttttttgaccgttctttataatttgaattgaaagagaagatgggaagagctgcgagatggttcaacggtattttt

SEQ ID NO: 103149 - DNA, 449 bp, Arabidopsis thaliana columbia
atcaccaacaaaatttaatgaatcatgtctctgcttctaaagatgttattattttccttattcttcttctatatggcttcaatttctcaatgctcagacccaaccggtggacagtttagcttcaacggttacttgtacaccgatggagttgcggatctaaacccggacggtttgttcaaactcataacttcaaagacacaaggaggagctggtcaagttctttaccagttcccactccagttcaagaactcaccaaacggcactgtttcatccttctccaccactttcgtctttgctatcgtcgcagtacgtaaaacaatcgccggttgtggactttccttcaacatctctcctacaaaaggcttgaattcagttccaaatatcgaccactctaaccattctgtttcggttggatttcataccgctaaaagcgataaaccggatggtga

SEQ ID NO: 103150 - DNA, 255 bp, Arabidopsis thaliana columbia
cgttatgacttcgcatcttacggagatgggaaaacaactggttactgatccggaaaagtcaaaggatccggtggaatttgtacaacgtctattggatgagcgggatacatatgacaaaatcatcaacaccgcatttggcaatgataaaacctttcagaatgccctgaattcttcattcgagtatttcatcaacttgaatgctcgttctcctgagtttatctccctgtttgttgatgacaagctacggaaaggact

SEQ ID NO: 103151 - DNA, 368 bp, Arabidopsis thaliana columbia
attgggctcccgagctggagctcttagacaaatgctcctggatcttttagaggatccccatgaaatacgccgcatatgcatcatgggaagaaattgcacacttagaagaggagacgatgatttggagtgtacattaccctcagataagctgattgctgaggaagaagaggaggaaatcgaaatgctcttggagaactatctgcaaagatgtgagtcatgccatggacaagcagaaagacttctggattctgcaaaggaaatggaagactcaattgctgtcaatctaagttctcggaggcttgaggtcagcaggttcgagttgcttcttcaggtcggtacattttgtgttgcagttggtgctctcatcg

SEQ ID NO: 103152 - DNA, 343 bp, Arabidopsis thaliana columbia
ctcaatttcatctcctttctcattgattgatactcttcttgagataatttaatttagctggcttcttcttcttcaggagagctctgaaaaaaacctgaaagattgagtttttagggttcttgattcttctaaagttcctgcgtttgattgatacagagagctcaagatgatcttgttccgaccaatattggcttcaatggattcatatggctgcatttatgggatttgatagattgtcaataaaagaaaacttgtggttatggattctcgaggtgacagttctaggttcgggcaatatccgacaaagcctacaaagaacatgtcttcatcttcatcagctgct

SEQ ID NO: 103153 - DNA, 357 bp, Arabidopsis thaliana columbia
cccacgcgtcagccagtttggatggagctcatctgtggctgggttggtccagtcttccttcttttggggttatgccttgagccagttgcctggaggttggctttccaagatttttggcggaagaaaagtgcttgagattggtgtctttacatggtctttcgctacagctcttgttccactacttgctggatttatgcccggtttgatcttttctcgaattttggtgggaataggagaaggtgtttccccatcggctgcgacagaccttattgccaggacaatacctgttaaggagcgctcaagagcggtaagctttgtttttggacgactgactttggggagtgtaatggggcttct

SEQ ID NO: 103154 - DNA, 438 bp, Arabidopsis thaliana columbia
gaaactccaatcccacagcagaagcactacgaatccaaaccattcccggcggtgatatcaccaccgtctgcttcgattccaattcctgctctgtctctcccactattcactcaaactatcaaaactcagaaacactatctcgattctctcttgcacgaatccggagcagtgctattcagaggttttccggtgaattccgccgatgatttcaacgacgtcgttgaagctttcggtttcgatgagcttccttacgtcggaggcgctgctcctcgcactagcgtcgtcggtcgtgtcttcactgctaatgaatctcctcctgattagaagattccttttcatcactagatggctcaggttcgtgagtttccatcaaagttgttcttttactgtgagattgagcctaagtgtggtggagagactccaattgtgttgagtcat

SEQ ID NO: 103155 - DNA, 392 bp, Arabidopsis thaliana columbia
acgttccggcgatgattttctctctcggaggctactcgatgaacaatttccacgatttcaccgatatagtgattcctctgtacacgacggcgcgtcgattcaacggagaagtacagtttctcgtgacgaacaagagtccatcgtggatcaacaaatttaaggaattagtgaggaaactctctaattacgaagtgatttacatcgacgaagaagacgaaacgcattgtttcagcagcgtcaccgtcggtctcactcgccaccgtgagtatttcaaagagttgacgatcgatccttcgaattcggagtattcaatgtccgatttccggagttttctaagagacacctactcgttgagaaacgacgccgtggctacgagacagatccggcggcgg

SEQ ID NO: 103156 - DNA, 313 bp, Arabidopsis thaliana columbia
ggagaccagtgatgatcttatcaggcatatgcaagagagatttaaagaaaaggctcgcaaatctgagtcagtttattatgcagcctcggatgtgattatactcagatttatggttgaggtttgttgggctcctatgttggcagctttcagtgttccacttgaccagagtgatgatgcagtaataacaacattatgtctggagggtttccatcatgccatccatgtcacttctgtaatgtccttaaaaacgcacagagatgcctttgtgacttcactagcaaaatttacttccctccactctcctgctgatatc

SEQ ID NO: 103157 - DNA, 120 bp, Arabidopsis thaliana columbia
gccacagcaataaaggaggctggtggtcctgatatcccgatgacatactgggacacttgctcttgtaacacctgaacagtgtccagacgaaggaagactccctgatgctggacctccttc

SEQ ID NO: 103158 - DNA, 174 bp, Arabidopsis thaliana columbia
aaaacaaattacgacacagaaaagatcaggaattagtttgtgcacaaatccaactggagaagccgagtaactatggtagccacagatgagttcaacggttttgaccaaatccgagaggtttcgtctatgccgctgaaataagcctccgctccttcttcacaacaatgtctccga

SEQ ID NO: 103159 - DNA, 229 bp, Arabidopsis thaliana columbia
agtcaccttgatccaaaaagtacaactacattccctgccagactcgctgagctgaccgctcgactgaaaaagtggaaaaatattcttcagagcaatgttgaatacaggtttcctgctgtgttaagattggaacatgagagcagggttttgcgtgacgttaatgttgttgatgtggagataccagggcagtactttgctgaccaggaagtagcacctgatcatacagtaa

SEQ ID NO: 103160 - DNA, 372 bp, Arabidopsis thaliana columbia
attctctcgagaaaacaaactgaatttttttgatcgaagaagatctaaaaaaaaagatggagagacgacaagcgaagatccatgtctttgtattgataggtctaattctattgaattcaatcaatcaaatctcatctctctctgtaacggtgaacgacgaagaatgtgtccaagagtacgtcctttacgaaggcgacactgtttccggtaacttcgtcgtcgtcgatcatgatatcttctggggatccgatcatcctggtttggatttcacggtgacgtcaccagctgggaacattgtacagactttaaagggaacatctggagataagtttgagtttaaggctccaaaaagtggaatgtacaaattttgtt

SEQ ID NO: 103161 - DNA, 214 bp, Arabidopsis thaliana columbia
ctaatccccaagaagcttcgttttgatatcaaacgatctggtttgtcggatttgatattggagcaatggctttggtgagtccaattccagcaatgggtgaaagagctggatccatgagatttcacggaattggtagcccaggatcaaggtctagtaggagcgggattatggacgaacctgtctcgcggctgattgacgagaagatcttcgttgc

SEQ ID NO: 103162 - DNA, 228 bp, Arabidopsis thaliana columbia
cgaaggagtaatgggaattacggcgactacattggtctcactgactctcttatggattgtcgtcctcttcgtcacacttgctctcattcagatcagattgactgatgttgcagatcctattgtcaatgagaagattcttgatgctaagctcaatcaggtgggagaggatttagaaggagttacacacaaagtttactttgacattcagatcagtggttcaccagcagg

SEQ ID NO: 103163 - DNA, 224 bp, Arabidopsis thaliana columbia
cccacgcgtccgcccacgcgtccgcccacgcgtccgcggacgcgtgggccatccgccgcccctgtggctgccgcgcctcccgtcgtgctgaaaagcgtcgatgaggaggttgtggtggccgaggaggggatcagggagaagataggtagtgtacagctgacggattccaaacattctttcttgagctccgatgggagcctcactgttcatgccggtgaaagatt

SEQ ID NO: 103164 - DNA, 281 bp, Arabidopsis thaliana columbia
ggaacagtggagttactagctctatcagtcttccaaaagcactcactgagaaagaacaacaagagcttgttgatctcgtcgatgtcaagcttggtcaggagtacgagcttgttgtcaccacctatgctgggctttacaggtacagagtgggtgatgtcctaagcgtggctggtttcaagaacaatgcgcctcagttcagcttcatatgccgcaagaacgtggtcttaagcattgactcggacaaaaaccgataaggttgagcttcaaaacgcagttaaaaa

SEQ ID NO: 103165 - DNA, 284 bp, Arabidopsis thaliana columbia
gaatcccataaagtccacaactctctccttgtagagagagagattttatggcggtggagctcatgactcggaattacatctccggcgtcggagctgatagcttcgccgttcaagaagcagctgcttcaggactcaaaagtatcgaaaatttcatcggtttaatgtctcgtgatagctttaactctgatcagccatcttcttcttccgcctccgcctccgcctccgccgccgcagatcttgaatcagctcgtaacacaacggcggacgcggctgtttcaaagttt

SEQ ID NO: 103166 - DNA, 281 bp, Arabidopsis thaliana columbia
cggacgcgtgggcttttgctcgccgattttccagatctcagtagggttcttgctacaggtttcagatctttggataggccttggtggatttttatctatcaatcgataaaaggttcttacttttactctgtaaatcgtagtttgggttgtttgtactactttctcatccatgggtaggcacggtagttcctccgacgaagaagagagagttagaagaagggataggagaagacgagagagaagccctgatgttagaagatcgaggactgagacagatgatg

SEQ ID NO: 103167 - DNA, 279 bp, Arabidopsis thaliana columbia
cccacgcgtccggaaaattctttgattctcatgggagaaattggagggaatgactataactacgcattctttgtgggcaaaaacattgaagagatcaaagagctggttccgcttgttattgaaactatctcttctgcaatcacggagttgattggtatgggggggaaaacatttctggtgcccggagagttcccgctcggatgctcagtagcctatttgagtttatatcaaacatcaaacatagaagaatatgatcctctaacaggatgtttgaaatgg

SEQ ID NO: 103168 - DNA, 275 bp, Arabidopsis thaliana columbia
ttttgtctttcaatcaccattagaattcagctgcaacacaagtgtttgcaaaagagagaatcatggagagagctatggcaagacaaaagatactgcttcgtcatctcaatccagtttcttcttctaattcttctcttaaacatgagccttctcttctgtcttttccccaatggctgcgtttggagatgacattgtgattgtagcggcatatcgtaccgccatttgcagagcgagacgtggaggtttcaaagacactcttcctgatgatcttcttg

SEQ ID NO: 103169 - DNA, 279 bp, Arabidopsis thaliana columbia
ccgtcttctgcggagaataatccggtgaggtcgaggagcaatcccaatcagttgattcatcaagaacaaaccggaaactcgtcattcccctatgcacatgaagtagctgaaattcaggaagctactagaagaaagtcttcggctgtagcaccttctgataaaccccttggagatgaccccatattgtctcaacatgactctcaaaggttttcgacatctccacctacgtcaggcacaaagtcatatacactttcaagaagttcagattctcaatttcct

SEQ ID NO: 103170 - DNA, 277 bp, Arabidopsis thaliana columbia
cttcaccatcttgtggggaaaaacaaaacttctccggccatggatcctggcgacccaacttcaataatcttttcaaagatcagaactttcgaacttgagaacgcttccagagtcattgactattttctcttgcaagacatggaacaaagagatttgattcgaattgcttttggtcctgactctctcatacagactttctgtcagaaagctaaagtcgatttaggtttttcctcgaacggtttctcgagacccatcaatatccatggccagtcattgt

SEQ ID NO: 103171 - DNA, 280 bp, Arabidopsis thaliana columbia
atagtcctcaagaacagggtttaacggtgaggccgagagaaactaaaggagttgaagcaagtcatgcaatcaaatgcgcaaatactactgtcaaaagaaagatggatcatcagaaagagacaatgttgggaaagaaacgccacaggcagaccatgtttctcaacctggacgatgtcaggcaagctggtcctattaagacaacaacacctagaagacagaatttcccacaacctgtcgtcacacgcacagttagagaatctcgtgcaggccctccaactgc

SEQ ID NO: 103172 - DNA, 392 bp, Arabidopsis thaliana columbia
gtcaccaccaccaaaaaccccttctttattgctctgttctttgagcaaacaattttgatttcttcgcgagcgaagaaacctcaaagacgaaaagtctcgaaatttcataactttttcttgaagatctatctagatcacccattttcttaaaaacctcttgagatttttctatctcgtgaaaagaggttttaaggtttagatgggtgtggctcactctgatcttcacaatgatttgtcttcttcatcttgttttggggatcggaatatcttgaagcctggtttaggagatttaccagaggcgtgtgtggctataattgttgagaatttggatcctgttgagatctgtagattctcaaagctcaatagagcatttcgcggcgcttcttgggctg

SEQ ID NO: 103173 - DNA, 115 bp, Arabidopsis thaliana columbia
cggacgcgtggggcatctattatcgtaatgattatgtccgtattagggcaacactatagctgtgtgctcgtggtggtaatggtactgttgacactgatatagagagcaacgattt

SEQ ID NO: 103174 - DNA, 403 bp, Arabidopsis thaliana columbia
cttgaagaataatgatgtagaaagatacagggagatgttgctggaacagcaaactaatatgcctggtgatgctgctgaaagatatgctgttctctcttcatttttgacccaaaccgaagattatcttcataaacttggaggtaagattactgccacaaaaaatcaacaggaagtggaggaggcagcaaatgctgcagcagtagcagcgagattgcaggggttgtcagaagaagaggtcagggcagcagctacttgtgctcgagaagaagttgtgatcagaaatagatttacggaaatgaatgcgccaaaagaaaattcatctgtcaacaagtactatactctggctcatgctgtaaatgaagtggttgtaagacaaccttcaatgcttcaggctggaactttg

SEQ ID NO: 103175 - DNA, 394 bp, Arabidopsis thaliana columbia
atgaagactatcaaaaccgagcttcaagtctgcttagcattgctagcatatcaggatgttgtcaggtgactgtgccactcggacatcatgagaaatgccctatttcagtttctttcataggaagacacggtggtgaccgctttttactagatacagtgcagacaatgtatccatctttgcaagagtactcgagtattgttaccgatcccaaatcttctaaaaaggctatcaccaaagaagagtcagccgagattgccaaagagaagggtaaccaagcgttcaaagagaaactatggcagaaagctattggtctatactcagaagctataaagctaagtgacaacaatgctacctattacagtaacagagctgctgcatatcttgaacttggagg

SEQ ID NO: 103176 - DNA, 396 bp, Arabidopsis thaliana columbia
gcaaaaagttgatgaactaaatgaggtgcaaactgatctccagtatattaaagaagatataaatgccgttgagagacatagaatagatttataccgagctagggacagatattctgtaaagttgcggatgctcggagatgatccaagcacaagaaatgcatggccacatgagaagaaccagattggtttcaactccaattctctcagcataagaggaggaaattttgtaggcaattatcaaaacaaaaaggtagaggggaaggcacaaggaagctctcatgggctaccaaagaaggatgcgctgagtgggtcagattcgcaaagtttgaatcagtcaactgtctcaatggctagaaagaaacggattcatgctcagttcaatgatttacaagaatg

SEQ ID NO: 103177 - DNA, 395 bp, Arabidopsis thaliana columbia
accacgcgtccgattttgcgttttcagaatcttggtttctagggtttcacttaccttccctccgcgcccttgagctctctacctgagcttctccgggattcctaaagctgaaattcaaacacctccattttcatcctcaagggagataaataaaactctattgagtagaaaatgagtgctgcagcacacaggactcctaaatcagggaggcaatctctgctatttcaagatttagcttctcctgtttcagcacgtagagggaaattctcgagtccgggacaggcagctgcggtatctgcactatggcgtgagaatttcggaggatctgatcttccaccacctccaatgtatactttggatgaccggtccgatttctctcctgagtctggtattgc

SEQ ID NO: 103178 - DNA, 363 bp, Arabidopsis thaliana columbia
cccacgcgtccgaaaattctatataactataatctgttctcttgtgtgtttctcgcgtggcttgcgtgttacttcattcatcactgctttagcttctcctcatatgaatctcgaggcaatccagtcactgacttttctcactccccatctctagggttaaaactgtgagcatttggagtagcaaaagtaacaaagcatggcaacacttaaagacattggtgtatcagcagggataaacatcctcactgcattcattttcttcataatctttgcgtttttaaggcttcagccattcaacgacagagtttacttctccaaatggtacctcagggggttaagaagcagccctgcaagtggcggcgg

SEQ ID NO: 103179 - DNA, 374 bp, Arabidopsis thaliana columbia
cccacgcgtccgtgatagtgttgatccagagaccctgtgggagttggacagatttgtaaccaactataaaaagggcttgagcaagaaaaagagaaaagctgagctagctattcaagctagagcagaagccgagaggaatagccaacaacagatggctccagcaccagcggcacatgagttttctagagagggtggcaacacagctaaaaagacactacctacgccattaccttctcaagtggagaagcaaaacaatgagacaagcagatcaagtagttcaagcagctcttccagttccagctcgtctagtgattcagacagcgacagctcttcatcatctggatcagatcagacctagaggctagtgtacaaga

SEQ ID NO: 103180 - DNA, 396 bp, Arabidopsis thaliana columbia
aaacattttactttgtgctgcactactcaacctcaatggccgcctcaacaatggctctctcctcccctgccttcgccggtaaggccgtcaagctttcccccgcggcatctgaagtccttggaagcggccgtgtgacaatgaggaagactgttgccaagccaaagggcccatcaggcagcccatggtacggatctgaccgtgtcaagtacttgggtccattctctggcgaatcaccgagctaccttaccggagagttccccggagactacggatgggacaccgccggactttcagctgaccccgagacattcgcaaggaaccgtgaactagaagttatccacagcaggtgggccatgctcggagccctaagctgcgtcttccctgagcttttggcta

SEQ ID NO: 103181 - DNA, 274 bp, Arabidopsis thaliana columbia
aagaaaaggaagaactgagtgagatgggtaagcctgtaactaaggggaaagagaagaaagataagaagggtaaagcaaagcagaaagcagaggagatagaggtaactggtaaagaagagaatgagacagacaagcatgggaaaatgaagaaagagcgaaaacggtaagaagtctgaatcaaagaaggaagggggtgaacgagaagaaacccagaaagaggctaatgagtcaacaaagaaagagagaaaacgtaagaagtctgaatcaaagaagc

SEQ ID NO: 103182 - DNA, 354 bp, Arabidopsis thaliana columbia
ttatttgatgccattgctaatttatgtgtcccggtgattgtaagcgatgggattgagctaccttttgaagatgtcatagattacaggaagttctctatattcttgaggagagatgccgctttgaaaccagggtttgtggttaagaagctgaggaaagtgaaaccaggaaagattttgaagtaccaaaaggttatgaaagaggttaggcgatattttgactatacacatctaaatggaagtgtgaacgagatctggagacaagttactaagaagataccgctaatcaaactgatgattaatcgggagaagcgcatgatcaagagagatggaagtgaccctcaatgttcttgttta

SEQ ID NO: 103183 - DNA, 334 bp, Arabidopsis thaliana columbia
tccgaaacttacaaagacaaaatccattgcaaaagagcgagcaacaacgacgaaatttcgaaatgccatcgccaccgacgacgacttctctctcggtgacacagaccataaacggatcacacagcttcacaatcaaaggctattctttggctaaaggaatcgggatcggaaaacacatcgccagcgatactttcaccgtcgggggttatcaatgggctatctatttctatcctgatggcaagaatcctgaggataattcggcttatgtctccgttttcattgctttagctagcgatggtaccgatgttagggctctttttgagctttctttgct

SEQ ID NO: 103184 - DNA, 342 bp, Arabidopsis thaliana columbia
gccgtcaagctttcccccgcggcatctgaagtccttggaagcggccgtgtgacaatgaggaagactgttgccaagccaaagggcccatcaggcagcccatggtacggatctgaccgtgtcaagtacttgggtccattctctggcgaatcaccgagctaccttaccggagagttccccggagactacggatgggacaccgccggactttcagctgaccccgagacattcgcaaggaaccgtgaactagaagttatccacagcaggtgggccatgctcggagccctaggctgcgtcttccctgagcttttggctagaaacggagtcaagttcggagaggcggtt

SEQ ID NO: 103185 - DNA, 237 bp, Arabidopsis thaliana columbia
cccacacgtccgggattcagtaatacgagtagtgcaacaaagaagaagagaagcactacattgcgtcggccttggaatgatcgacagttacaggattcttcttcattgccatccacaccagtcgctgacaataatgagaataagatagaagagagggaagcagtggagtcggatgaacgttcaacgaatggttcattccaaggaagtaaccaagtgaggcaaggtggaggccacagc

SEQ ID NO: 103186 - DNA, 352 bp, Arabidopsis thaliana columbia
ctaaaagccaccgactttttcaaccatttctcactaaatcactctctacttctccacaaagcaacactgaatcaacccatgaacctaatcacaaaccctcttctctatcttctcgtcttagcttcgttttcgatcaaatcgatgctattgagaaacgtcactctgagaaagacgaaacccttgagcgtattcgtgcttggcgtcaatctaaacagacgcatcagttaaaaactcctccttctgctccacaacaagatccggatcttagagaagtcgaatccgttgtgtctaatgataaattggattcttgtgttgtgcttgagccgattcagattgattctggtgagttgag

SEQ ID NO: 103187 - DNA, 341 bp, Arabidopsis thaliana columbia
cccacacgtccgctcatgttggtggtgtgaatgatatttccttctcgactccaaacaagcaactatgtgtaataacttgtggtgatgacaaaaccatcaaggtttgggacgctgcaacaggtgtcaaaaggcatacttttgaaggccatgaagctcctgtttattccgtttgtcctcattacaaggaaaacattcagttcatattttcaacagctcttgatgggaaaattaaggcttggttgtatgataatatgggttcccgagttgactatgatgcacctggtcgctggtgtactacaatggcttatagtgccgatggtactaggctattctcttgtggg

SEQ ID NO: 103188 - DNA, 331 bp, Arabidopsis thaliana columbia
cctaaaccttgtctccgcgccgcgttatcactcttacgtttctctctctctctcaacttcttccacagcaaatttcttcgattctctgagctctctcccatccttttcaagtggcttcgtttctaaaaaattgattggttgaagaaagtggaaacatggttgaatcggacaagtcatccgttgaagagctgaagaagagggttaggaagagaagccgtgggaagaagaatgagcagcaaaaggctgaagaaaaaacccacactgtagaggaaaacgctgatgaaacgcagaagaagagtgaaaagaaggttaagaaagtgagaggcaaaat

SEQ ID NO: 103189 - DNA, 347 bp, Arabidopsis thaliana columbia
atcttcctttcccaaaaaaaacgaaattgagagacgatgattcgaagcctatcttattgctttcttaccatctatttcttcttgagcattcttccattaccaaacaccattgcttgtcccacacggttactgtgccgcagcgaccaaagagatgctcttttagaggtacaaaaggagttacatgtaccaacaactacatggaacaagaacgttgactgttgttcttgggatggtgtcacatgtgatgctatattgggagaggtgatatcactacaactctattatagtactgctaacatcttcgtgagctagtgctttcacgttgcaaacttcaaggggaaattcct

SEQ ID NO: 103190 - DNA, 342 bp, Arabidopsis thaliana columbia
ccagcatctgtgtcaacttctggaaaatctccgcttggtattccaaacggtgttgctaaagcagcagctcctcttgttgatttactcgatctgggctctgatgatactcctgcgcctacctcctccagtaacaactttcttcaagatcttcttggtgttgatttatcgcagccttcagcacaacctggtgccatgcagccatcgcaagctggtgcggatattcttatggatctgttgtcaatcggaactcctgcccctgtgcaaaatggctcggcgaatggagacttattatctattcaagataacaatgctccaatagcgccttctttgacttctcccact

SEQ ID NO: 103191 - DNA, 347 bp, Arabidopsis thaliana columbia
caggttttggtggaagagaaatcgagtgttagaatcttgacactaaacagaccaaagcagctgaatgctctgtccttccacatgatctctcgattgctgcaactgttccttgcatttgaggaggaccctagtgtgaaacttgtcatcctaaagggtcatgggagagccttttgtgctggtggcgatgttgcagctgttgttcgtgacatcaatcaaggtaactggagactcggtgccaattacttctcatctgaatacatgctcaactatgttatggccacatatagcaaagctcaggtttcaatcttgaatggtatcgtcatgggaggcggagctggtgtatccgt

SEQ ID NO: 103192 - DNA, 245 bp, Arabidopsis thaliana columbia
atttggtgctcattcggctcatatgtggcctgggatgattctgaaatctggtgataggacaaatgaacctgtgttacctcaaggggaagacttgtcagaagaagaatctgaatatgaattggagtatgaagtgctatcagcacgctcaggtgatccatgggataatattgaagaaagatgggtttctgctagtgaaacgcattcacatgccgatgcaggcggatccacttcacaggaaaacctcc

SEQ ID NO: 103193 - DNA, 293 bp, Arabidopsis thaliana columbia
atttatctttatttgtacaaaagattaagattttgattagctggttaggtgttcaagagaaagttttgatctttttttgggggggatgaagaaagtgtataggaagctgatttggatcagagacccattagcgagattgaagagacatgttagttcacattcagggtttaggtttttcagagatagaaaatggatgttcccttttttagcaagcttggttttgtcggttactcttttgatgtctgtcctttatgtccaactcgagacttcttatgtggaagagccattgcctt

SEQ ID NO: 103194 - DNA, 375 bp, Arabidopsis thaliana columbia
acatgattcgtcattctaaactttctggtgaagaagggtttttggtaagtggagaagtcacaattgtagtcaagatagacgtttatagagtttttggcaaagtagctgcaatagagatttctgaagagggatctaaagagggatatgaatatgaatctgaagaggtatataaaaaggaatctgaagagggatataaatatgaatctgaagaggattacgaaaagagacctatagagagatttgaatatgaatctgaagcggaatctaaaaaggactacgaagagagaactagagggggatttgaatatgaatctgaaccggtatctaaaaaggattacgaagagagacctagagagagttttgaatatgaatctg

SEQ ID NO: 103195 - DNA, 382 bp, Arabidopsis thaliana columbia
atctctccttttcttttcttcttcctctttctctcactaaaacccttgtttccttcactcgccgtcgcttttcccgtcatcggaatcttcaaattcgactctcgcttcactacgatccatgtccggttacatctacgccggttataccacctatacgtcgtcacttagctttcgcctcaacaaaacctccgtttcatccttccgatgattaccatcgatttaacccttcttcgctcagtaataataacgacaggagcttcgttcatggttgtggtgttgtagatcgggaggaagatgctgtcgttgttagatctccttcacgaaagagaaaggcgacaatggatatggttgttgctccatctaataatggattcaccagttc

SEQ ID NO: 103196 - DNA, 376 bp, Arabidopsis thaliana columbia
agatgatgaaaatgttggtggacttgaagctatggacaattcttcaggaacctttttccccatagacccgttgccaaacacgcttgctatcaacctcggggacatggctacgatatggagcaacggaagattgtgcaatgtgaagcatagagtgcaatgcaaagaagcaacaatgaggtattccatcgcctcgttcttattaggaccaatggatacagatttggaacctccaagtgagtttgtggatgcagaacatccgcgactatacaagcctattagtcacgaaggggtacgaaatattagaatgactaaaaaattgcatgatggagaagctctcaagcttataacccatgcaggactagataaatgacctaaa

SEQ ID NO: 103197 - DNA, 398 bp, Arabidopsis thaliana columbia
ctctctctcattctctcaacgaaatctcgatctcgtcgaggaagaagaagaacccagatcagaaaacataacaacaatgtcgtcgtctgcgaagaaacaaaccctgttcatatcgacattaatcatctcatggtactcttcaaacatcggtgttcttctcctcaacaagttccttctctcgaattacggattcaaattcccgatttttctcacaatgtgtcacatgtccgcttgcgctatccttagctacatctccattgttttcctcaagcttgttcctctccaacatctcaaatctcgttctcaattccttaaggttgctactctcagcatcgtcttttgtgcttccgtcgtcggtggtaacatctcccttcgttaccttcctgtctctttcaatc

SEQ ID NO: 103198 - DNA, 230 bp, Arabidopsis thaliana columbia
cccacgcgtccgcgagtgtctccttcgctcctcctaccaacagttccatcgagaaagtatcaaagattgaagctttttgtttatctgtttgttgagaagtgaagaagattgaagctttacaagtagagtgagcaaacctgcagtaatcctcttccaaatgagcagtataagctaacttagagctattctttagattctcattcgcaacacagatcttttcagataaacat

SEQ ID NO: 103199 - DNA, 399 bp, Arabidopsis thaliana columbia
  unsure (1)..(399): unsure at all n locations
gttctctatcattcncagagataaccaaacaatctcagaagaaaccagaaagagcaaagaaactaaaaactattattcattaaagtcagtgtttttaaattcgatttcgtaatgggttcttctgcttcaaagaccgcttcttccgtttcttctgcttcttcctcatctgcgttttctccaccgccgaccaaattcagctccgattcatcttcaccggcggtgcagagagctttttcgtttccgacgccgttggttcaccatcctccggcgagaaaaggcgactctcatcaccttgtttcccttacatctacatcgtacggttctcttctcctccttgatctcgatggatccaaaaactcctcttccgaccaacaaacgctgcctcgtatctcaatctcc

SEQ ID NO: 103200 - DNA, 369 bp, Arabidopsis thaliana columbia
gctatatcttgtcttaaaaagaagaagcaaagagaattagtggagtacgataagcagagaagtatgttaaaggtggtgttgttgatgatgataatgatgttggcgtcacagtccgaggctcagctgaaccgtgacttttacaaggaaagctgtccatcattgttccttgtcgtgagacgagtcgtgaaacgggccgtggccagagagcctcgcatgggtgcttctctccttcgtttgttcttccatgattgttttgtcaatgggtgtgacggatccttactgttggatgacacaccgtcttttttgggagagaaaacctcaggacccagcaataactctgtgagggggttcgaagtgatcgacaaaatc

SEQ ID NO: 103201 - DNA, 237 bp, Arabidopsis thaliana columbia
  unsure (1)..(237): unsure at all n locations
acgtttcctctcttctcacaaatctctcatcactgttttctggatcgccactttcgcttccttattcatctggcaattcggcggcgtttccacaaatctctactccggtttctcccttttctggtcgtcgtcttcaacaaccaccaccgtcttctccggtggattcnccaagctcagacctgtagttttcaatctaacagacttcggtgctgtcggcgatggtgtcacaatcaacac

SEQ ID NO: 103202 - DNA, 364 bp, Arabidopsis thaliana columbia
aggttcttaaatctcggctagggaactgtcgtgaagatatcgtctcagggaacaataataagccccaaacaagctcttcctctgtagctggactcagaagaccatcttcttctggtagctcaaggtcaacgagcagacctgccacaccaaccagaaggtctacaactccaaccacctccacatcaaggcccgtgaccaccagagcttcaaattctagatcctcaacacccacctcacgtgccaccttaactgctgcacgtgctactacatctacagcagctccacgaaccactactacttcaagcggttcagcgagatcagctactccaactcggtctaatcctcgaccgtcttctgcatcttc

SEQ ID NO: 103203 - DNA, 351 bp, Arabidopsis thaliana columbia
cccacgcgtccgtttcgatattaataaaatccgagagagagagagaggaagaaggagagaatctgaagaagctgaaccagacgaaccataaaccgaggcgagagaggagagagcgagggaggtgatctcttaccacctcttcgtctccggcggcgagaaattcagtttcaatcggagaagagaggaaaaacaaagcgatacgcgagagaaaaagttgtgcaacgatgtcaaagaagaaatcggctgccatgacgcttaaggacttccatggcggctcaataccatctgatctccctctcccttccgctcctggagtgactccgaaggttattccggatcgacctgtttttg

SEQ ID NO: 103204 - DNA, 235 bp, Arabidopsis thaliana columbia
gcccacgcgtccgcccacgcgtccgcccacgcgtccgcccacgcgtccgcggacgcgtgggccgcgatcatcgtgtttggcgactcttccgttgatgccgggaacaacaactatatcccaactgttgctagaagcaactttgagccatatggacgggactttgttggtggaaagccgaccggacggttttgtaacggaaagattgcgacggattttatgtccgaacccttagggc

SEQ ID NO: 103205 - DNA, 381 bp, Arabidopsis thaliana columbia
acccacgcgtccgtggaatatgaacttgcggctttgagagaagccacagactcggggctaacgtatttactggctcatggagatgtaagggcgaagaagaattcgattttcgtgaagaagcttgtgattaattacttctatgcgtttctaaggagaaattgcagagctggagctgcgaatctcactgttcctcatatgaacatcttgcaagctgggatgacttatatggtctagtgtatgattctttagctatactctctttggaacatttctcctctggatatctccatgaattagggtttgtttcttgcggttgacgtctgtgactgtcgttaccgtaaggaacaagcaaaggttgaagatttcctaatattatttata

SEQ ID NO: 103206 - DNA, 361 bp, Arabidopsis thaliana columbia
acccacgcgtccggccaaactgtcaggtaacactgcattggatgctgcactaaacgcacagtttttagtccagattggaatctttactgccgtccctatggtgatgggtttcatacttgaacttgggttgctaaaggctattttcagcttcattacaatgcaattccagttgtgttctgtctttttcacattttctctcgggacaagaactcattactttggacgtactattcttcacggtggtgcaaagtatcgagcaactggcagaggttttgtggttcagcacataaagtttgccgataattacagactttattctagaagtcattttgttaaagcttttgaagtaactctactgttg

SEQ ID NO: 103207 - DNA, 359 bp, Arabidopsis thaliana columbia
atatctcctagcgttttaacgtgcactgttcttcgatttagaggagaagaaacgacctaatcctcgcgtatgcttctcattatcttctttagaagaggaagaaacagagctagacttcatgatagcgtggaccgttggattcactgtgtgcttaacagaacgagatggttgaatgatatgaacatgtggaagatcatctagtgcagagtttggtgttacttctgaggctttgtgctgttgaaacttcttctcaggggaccgagatttgagaatgtggttgctctgtggctgtaaggattgtaactgttggctgagtaagtgaattgtttcttgacaagctgcaagcttctctgttgcag

SEQ ID NO: 103208 - DNA, 361 bp, Arabidopsis thaliana columbia
aagaaaatgcagaaaataatggccgtaaactacaagattccaggatatgttcacatatccgaagactgcagaaagttactatctcgtatatttgttgccaatccgttacatagaagtacgcttaaagagattaagagtcatgcatggttcctaaagaatttgccaagagaattaaaggagccagcacaagcaatctattaccaaaggaatgttaatcttattaatttttctcctcaaagagtagaggagattatgaagatagttggtgaggcaagaaccattccaaacctttctcgcccggtcgaatcgcttggatcagataaaaaagatgatgatgaagaagaatatttggatgctaatg

SEQ ID NO: 103209 - DNA, 389 bp, Arabidopsis thaliana columbia
agggtttttgcaaagctttatagggtttaagaactatggctctctgagcttcatttggaaatcttcattgttcttcgacgactttgtttgactccaggcttagtcagaagctgatttgggatttgagatggcgacagagcatagcggtttagaagatcaggagagccaaccaagccaagtggctcctggttttgtaggagcaattgaagaacaatacaaaaaactcagagatcacgctgaagcttatccatatgtttggggttcttatactgttgtctatggtggtcttttcctttggacagcttatagatggaggaaacttaggagaactgaagatcgagttcgtggtcttcagacaaaacttcggaaactcgtcgaaaatgaacaag

SEQ ID NO: 103210 - DNA, 291 bp, Arabidopsis thaliana columbia
acccacgcgtccgcggatgcaccaaaagcagctggaactggtggctggctagaggatacagaatcatcgggacttctaaaactggaatccaagcccaggctaattgagaacggtgtaacatcgatgacatcaagtgttatgcccacgagtgctgtttctgtgagccaaaaagtacggacagcttcaactgatactgcatcattgcaatcccttttgaaggatattgcagtaaatcctacaatgctactgaatctcctgaaaatgggagaaagacaaaaggtacctgaaaaa

SEQ ID NO: 103211 - DNA, 194 bp, Arabidopsis thaliana columbia
ttgcatgaatgagaacacaatgcaagcacatgtttcatcaaagaagcatgctcgtatggagaaattagtgaaagaaggaaagattagaactgatgacgaagaagttgacgatctagagacagcatctcacgagaaggagaaaaaaggaaacagaagatcacaaagacagggaaagagatctcacaaacaggaaa

SEQ ID NO: 103212 - DNA, 359 bp, Arabidopsis thaliana columbia
aagaagggaatacatttgatcaagcacgctatttggcgtaccttggaacggaatggacaggttgtcttattaggttcagctccagatcctcggatccaaaatgattttgtaaacttggcaaaccaattacattcttctcatggtgaccgggctcggcttgttctaacctacgatgaacctctttcccatttgatttatgctggggctgactttattcttgtaccgtcgatatttgagccatgtggactgacacagctcatagccatgagatacggcgctgttcctgttgttagaaaaactggaggactctttgatacggtttttgatgttgaccacgataaagaaagggcacaagctca

SEQ ID NO: 103213 - DNA, 341 bp, Arabidopsis thaliana columbia
actcgatcgtgaagcagaaaagtgaggttccaaatgggttctgtttcgggtcaaacccgaattacaacgatgaacctctcgctctcaacagcagagaagaaccctaatttccgctcgtcgcttctcaattctaagtacattcctcaggggtcaatttcaaagaatacatttttcttggctacaacacactcgacctttgagaaagcgaacagtatttggtcacgtgagctgcgtcatgccgttaacggaagagaatgtggagagagtgttagacgaagtacgaccatctctaatggccgacggaggaaacgtggcgttgcacgagatcgacggacttgtgg

SEQ ID NO: 103214 - DNA, 328 bp, Arabidopsis thaliana columbia
aggttgttaaatcgtacgagaaaactattcgtgtcggaactttagatccgatatttatagaaagcaaccaaactccggctccggttactcgggagttcaagttttggattttgatgggtcatgctcgaactcgtaccggtatcatctccgtcgcttttaaattcttcaggtctctgttccctcgccatcaccgtactaacagcatgaagataaaaacaggaacgtttttgggggtttcgatatcattgattcttataaacttagctgcgatcatggaacgtgcagacgagaatctattgccttcggtttagaaagaagtgagtgaagc

SEQ ID NO: 103215 - DNA, 343 bp, Arabidopsis thaliana columbia
acggacgcgtgggcagagatgtttggattcgttaaggatgtttttgtgtgttgcgctaagaattggggacttgagactttgatcaaggagcttgattgtgttagaaaggttttccgaggaagtgatgatgcaaaaggcaaagcattgcatcttaaagccaatgaaatggttaagaagctagagagtaaacagatttcccctcttgatgcttctaacttcatcattcagttcttcaactatgctgagtcaataccagaaattcccgacccaccgagagagctaaccgttgcagcggaaacgagctacagaaaagaccaggcatctgtgacgccttcaacatcaa

SEQ ID NO: 103216 - DNA, 347 bp, Arabidopsis thaliana columbia
acggagccgtcgcttgtgaaactttccggcgatttaacagagtcatgatggaaatacgaactccgaagactggcaaagccaagcgtgttctcgaaagccgagctcctaagttggttgaaactgggaagaagacgttgatacttcatggaacaaagacgagtgctacacttagctctgtaatgacggaactctaccgtttgaagaagggaggtgccatcagatattcaaggaggaatgagaatattaggcctttcgagagtggaggtgaaacttcattagagttcttctctcagaaaacagattgtagcatttttgtgtatggttctcacacgaagaaacgacctgac

SEQ ID NO: 103217 - DNA, 267 bp, Arabidopsis thaliana columbia
gggtcgactcaaacgtccgcccacgcgtccgcacagtttatggagaactggtgctaccacagggataccttaatgagcattgctaagcattagcaaacaggagaaactcttcccgagaatgtatacgataagctactggctgcaagaacattccgtgcagggtcccttagtcttcgccagttgaagtttgctacagttgatctggagttgcacacaaaatacatgccaggtggggcagagaccatctacgatgttgatcaaagggtg

SEQ ID NO: 103218 - DNA, 186 bp, Arabidopsis thaliana columbia
acagtttagttttttaatcatatcaaagcagactgtgtgatggataagtacaaagtcgccggagaatttggtctcccggacatcacggtggcagagatggaatctttagcgagcttttgtgaagctgtcttgccttcagtgcagccaccgccggaagagctttccggtgaaggtgataaccagcgg

SEQ ID NO: 103219 - DNA, 223 bp, Arabidopsis thaliana columbia
cgatccgcttcagctaccatcgctcgccgccaactcatgttgttgtttgatatcactttctcatcttcaagcagttgctactatcttgagaagaaagctgacagcaagcttaacagacggagaagattcgagactaagtacgaggatgctgctgatctgctcgagaaagcatatgatgccgacaagcttgccaagtcataggctgcatcttgtctagagagag

SEQ ID NO: 103220 - DNA, 343 bp, Arabidopsis thaliana columbia
aattttcgtgagtaagaagaagaaacccgaaaacctcaaaccatggccgagggactcgtattgaagggcattatgcgcgcccacaccgacattgtcacggccatcgctacgccgatcgacaattccgacatcatcgtcacagcgtcgcgtgacaaatccatcatcctctggaaactcacaaaggacgataagtcttacggtgttgctcagcgtaggctcacaggtcactctcacttcgtggaagatgttgttctctcatcggacggtcagtttgcactctccggaagctgggacggtgagctccgtctctgggatcttgccacgggagaaacaactcgtcgat

SEQ ID NO: 103221 - DNA, 334 bp, Arabidopsis thaliana columbia
cccacgcgtccgccggagatccaccgtctaaatcgtctctaaaaatggagaaatcgttgctcgattctggcgaaacaacggagataattaccacagataaaaacgaggaaacagtgaaagacactctcagagaagttaaatctcatgacatagaccacggtgaagcacccgtaccggagaaagtgcctccggcgtataaaagaaaagtttccgttgctgaagaagaacgctttctttataagttctcggagacgaaagatgtgatggttaataaataccaaggcagaacttctctattgattgggaagaaacatgttcgtaaggaaaaagatgc

SEQ ID NO: 103222 - DNA, 286 bp, Arabidopsis thaliana columbia
aaactgtagtgattaagacaaagattcagaagagcagtaaaatggatgtggttaacggtgatgttgggagaattcaacaagtgagtataatgaaaagttgttctgcacacaagatgttcgataaaatgtctccacttaaagaacgactggaaacgaacaagaagatgaaaggattaagatcttggatgttcaaatacaaggctgagaagagaacaattaggaaacgacacaatcagggctggttacgcacttggatcaaaagcttgagatacaacgtttgagaaaa

SEQ ID NO: 103223 - DNA, 359 bp, Arabidopsis thaliana columbia
acccacgcgtccggtggaaatggaggaaattgcttataataagttgtttcagtttcttcgtctcttctcttaaactttccaaaaccctagtattcgatgttttcacttttgatctcacgattaaattggtattgaaagtggagagctttcacgactctgtagcaagtagcactttagcaaggttttggtatcaatgaatgctaaagatgtaatcagccgtctaccagatgaggttcttgggcgtattctgtctcttatctccacaaaagaagctgtttcaacctcagtactctctaatacgtggaagaacatgtttgttttggtttccaatcttgatattgatgatcgtcaatctgtgc

SEQ ID NO: 103224 - DNA, 342 bp, Arabidopsis thaliana columbia
gggcggacgcgtggggaagaaagatagagaaaaaaaatgggaggcaaaggtgtgatgatggtggcgatactttgcctttgggcactctctgcaacatctgaagcagtaacagaggctgagccaggtttgatgatgaacttctacaaggacacgtgtcctcaggccgaagacatcgtccgtgaacaagtcaaactcctctacaaacgccacaagaacaccgctttctcttggctccgtaacatcttccatgactgcgccgttgagtcatgtgatgcgtcgcttttgctggattcgacaagaagagagctaggagagaaagaacacgacaggagcttcggactt

SEQ ID NO: 103225 - DNA, 234 bp, Arabidopsis thaliana columbia
  unsure (1)..(234): unsure at all n locations
aagatagagagagaaaaaccctattcgatcacgagatcgtaatcaacgtttttagcagaatcatcggagggtagaaaaaatgctcaacgatggcgaagtaactccttctagacatgagattctgagtatggtgaagaagcactcaaagtcattaggaaagacgtctcttgatgagcaagatgcgtctgatgtagaaatggactctaatttctggcatggtgtgtntgatgtgta

SEQ ID NO: 103226 - DNA, 322 bp, Arabidopsis thaliana columbia
agctgccgtcaacaatggcgaaagaaggagaagaacgtaagaaggagaagaaagagaagaaggagaggaaggagaggaagcgtcgcgaagctgaagaactcgctgtaagagagaagaaaatctcaaaaaaacataaatcgaaatccaaagaggaagagaaaccagagaaatcaaagaagaaatcgaagaaatacgaagaagtagaagaagaggagaaatctccatctccatctccatctcctaagaaatcgaaggagagtaagaagaaacataagagatcatcagatgaatccgaagagatcgtcgattcaaagcctgttac

SEQ ID NO: 103227 - DNA, 373 bp, Arabidopsis thaliana columbia
ccacgcatccgccagttttgacttttgacttcgagtaatgagaagaaaaagcacagtgagattgctgttcttgacgttgagtcagagtctgtggctaggagcagcttcttttgttttttgaatcgacaatggttgaggaataaacgaaatcctgaccgttggattttttcttttcttttcttctacttaataatgtccgtgatattattattgtctaaaggggagacccgagaaagagcgagaccagttttgactttttggacattgtgtgttttcgattcgatcttttttttctgaagttaacaatgctggtactatcaataagaacaccaagatttgggaagtctctgctgaagattttgacaatgtcatc

SEQ ID NO: 103228 - DNA, 299 bp, Arabidopsis thaliana columbia
aacccacgagtccgaagaagaagtctcttgttcggttggattgttcaggaatttcattttcgtgagcttacttgtttgtttatgtaaagaggtggaattttcatttctgggattacgaaattgatcagtttctgggttgttaattgaagttatgagcaatcttcgagctatctgtagacctcactcggttttctcttcgattgtgtgttgtagtagacatcaaagtcgatcaatttttaggttttcgattaaaaacgtcgcctttagaaccggagttcgaattcgtctccgtcttcgtc

SEQ ID NO: 103229 - DNA, 230 bp, Arabidopsis thaliana columbia
  unsure (1)..(230): unsure at all n locations
ctgaatctggagtcgttgaagacacgagccgttagcttggccaaagccattgctcgaatccttgaagatttcgacgcttatggtcgaaccaacactactcctaaatggcaggatattctanggcagtattcgatggtaaatctcgagctttttaacattgtggaagaagtaaagagagtttcaaatgcgtttgttgtgcttcctaagaacgtcaatgctatgaacgctgc

SEQ ID NO: 103230 - DNA, 289 bp, Arabidopsis thaliana columbia
aaaaattgttcaatctctccaccactgtctccgcttaacagattcgctaactctaaaaagttttacgaaaatcaaattctcaaatctgaatctctttctctctttctcatggtgaagttttgtggcacctgaaactgagagagaagcttcttcttcttcttcgtattgaaacaaaccagtgaagcagagcagtttttcttctttctccatggtgagaaactctctttcgctcgagatcgatgacaatggcggcgccggaagagacggtaatcacaacgctaacaacgtc

SEQ ID NO: 103231 - DNA, 326 bp, Arabidopsis thaliana columbia
cccgcaacgggagcgcaaaagatggtcgaattcgaagaccaaaagaagttgcgcatcttctacgacgacaaacgcatcgcctctgaggtcgttgctgattcccttggtgaggagtacaaaggctacgtctttaagatcaccggaggcaacgacaaacaaggcttccccatgaagcagggtgtcatgcaaagcaagcgtgtccgcttgttgctcgacaaaaactccaactgcttccgtgaaaagcgcagtggtcaccgtcgacgacgatctgtccgcggttgcatcgtcgccaacgacctttccgttcttaaccttatcattgtgaa

SEQ ID NO: 103232 - DNA, 194 bp, Arabidopsis thaliana columbia
  unsure (1)..(194): unsure at all n locations
gacgagatangcatcgtgattggaccacatgcgaccgtagatgacgaagacattgacatggacatgggcaccaccgttggaccgcagaccaacctaaatgatgatgatttgggcaccatcattggacccgagtttgagatccacaagcaagatttccccgcagatttcatatttggaacatctgtttccgcata

SEQ ID NO: 103233 - DNA, 392 bp, Arabidopsis thaliana columbia
acccacgcgtccggtttgtttcttaattaccttgttgcaatgaatcttgcaaatatctaacgatgtctgagacaattctgggtaccgttgtttcaaacagaagagcaaagactctgctctctcagccaaaacatagttcttgtcacttctctctgtaattgacattaaatctttcaccatattccatgaagacttggaattgttaagacaagctttgcgtctccatgtgtacattgaagcttctactctatctgccagctgaagcgcttcatgttctgatacaatcttgagacgatctagaagtttttctggtgaaaaccgccctgaactcgtcatgtgtcgatagattgcatctcctgtgctcgcttttccgctctgcaaatgcataatat

SEQ ID NO: 103234 - DNA, 339 bp, Arabidopsis thaliana columbia
atctcttcttactaaaaaatattcaatggatccatcaaaatatccttttgatattgaaccttaccaatagcagtctaaaattgaagagaagtatattatcaactggtttagggagcgccgaaacaaaataaaggaagactattcatctcatagcaagagaaaatacttcaagagagatcatgcagcagcaaatcaaagactaattgacgaatactttgcaattcaaccaacatatgaagatacaatgttttgtaagcgctccgagtgcgaaaacatgttttacttgggatcgttgcagacctatcaagcagcgacaactacttcaccaaacgatttgag

SEQ ID NO: 103235 - DNA, 340 bp, Arabidopsis thaliana columbia
attttgcctttctctgtctccctctagagtctcttctatataaatatcactagatttagtgtttgatcaaatcacattcaacaatggagaaccctcccaatgaaaccgaggctaagcaaatccaaaccaatgaaggcaaaaaaacaaagggtggaatcatcactatgccttttatcatagctaacgaggcgtttgagaaagtggcgagttatggattactaccaaacatgattatgtacttaatcagagattatagatttggagtagcaaaaggaacaaatgtgcttttcatgtggtctgctgcatcaaatttcactcctctcttgggtgcttttctctc

SEQ ID NO: 103236 - DNA, 374 bp, Arabidopsis thaliana columbia
ggaagacttagttgtggaagaagatgtagttgggagcgaggatgaaatggcagattttattgtagatgaagatgatgagcatggtcctcctaagaggggcaactcgaagaaaaagaaatataggcagggatcagatattactgctatgcgagatgctaatgaaatatttggtgatgttgacgaattattaacaattcgcaaaaagggtttggcatctaatcaaaggatggaaagaaggctcgaagatgagtttgaaccaactgttctttctgagaaatatatgacagggaatgatgatgaaatccgccagcttgatattcctgagagaatgcagatatctgaagaaagcaccggaagccctcctgtagatgaaa

SEQ ID NO: 103237 - DNA, 303 bp, Arabidopsis thaliana columbia
agatgataattcttgacaattcgatacttagaaatggcttcttcgtcttcacccccggcggcgatggaggtcggagaatctacaaactggacggagcttccaccggaactgacttcagcaatcctgcaccgtcttggcgcgattgagatacttgaaaacgctcagaaagtttgcagatcttggcgtcgtgtttgtaaagacccatcgatgtggcgtaaaattgacatgcataacctcggagatttggacgacatggattacaacctcgagatcatgtgccgtcacgctgttgatcgtagccag

SEQ ID NO: 103238 - DNA, 369 bp, Arabidopsis thaliana columbia
ttaatagtaatctaatcggaagattcaagcgagaaatcgatttggttgtctgttaatttgttgggaaataaattgaaatacgagattgattggatggtgagaaggcaagaggaggagaagaaggcggagaagggaatgcgtctggggaaatacgagctagggaggacgctcggcgagggtaatttcggtaaagttaaattcgctaaagataccgtctccggtcattccttcgccgttaaaatcatcgacaagtctcgtatcgccgatctcaacttctccttacagatccaattcttatgaatctgtgcagataaaaagagagatccggactctgaaaatgttgaaacatccccacattgttagattaca

SEQ ID NO: 103239 - DNA, 253 bp, Arabidopsis thaliana columbia
tcggcggctcgatcgcgatttcgattcgattacgagcggccgtcgtcgacgaccttcgctcgtaagaaaacccacgctataccggcaccaacgtcgagttcgtgttcatttaatagcgcacctttaatcataccgatgacaacagcgatcgattgcgaagaatatgatcgtctgatgacagaatcattacaacgtgaaacattcagtgaatttgtcgatcatttcgttaaatttcgacctgaataccgcgaac

SEQ ID NO: 103240 - DNA, 305 bp, Arabidopsis thaliana columbia
aaattacgaaagcagcgtataaagagatgatatcaaggatccttttacagaggtgtcaatgttcaagaagaattatgatcatcttccaaaagatacatattttggaatgtacaaagaagcaacacgaaataatccaaattacgttttgacttatggtaacggcaaatcagttgctcgggttcaagatcaccttcgtccaaatggagcacacagatggcataattacatgaaaactcccaatgagatcaaattggaggaggctgctgtcctacactacacatattcaaaattttctgacttaacat

SEQ ID NO: 103241 - DNA, 347 bp, Arabidopsis thaliana columbia
accaagcgtccgtacaatttttgattcgatttttgtcgaaagaaaaagtgacaaaagtttttagcataattttatgttttctcataaacaaaaagtaaacccaaattgttttttcgaaacaagaatcgatttggcacgaaatcgaagatttgatgaattgtgtaaaacatggcgattcatgaagaaacccagatatcaacaacacaagagcctccttgcagttcgaaagatgccacgtcgcctcaagatcatcggttcgagaagcttcgtggcgtccgatggcgaatcaacctcggaatcttaccgtcttctccttcctccaccattgatgagcttcgcagagtaac

SEQ ID NO: 103242 - DNA, 394 bp, Arabidopsis thaliana columbia
cccacgcgtccgcccacgcgtccgctccgaagccccgagcggccaagacgctacgtttgatttcgtctcaagattcactctgaatggggattgaatttggtgaactccaatgaggtgtttgcaaaactccgcaaagactctacctttagcgtttaaatcggcattgctgcctttgtctcaaaggtggttctgtaaattttctcctaagccatcctcattgacaaacattttcaaggtttcaatttcaaccatggcaaacactctcaatggaaatgtgatcatgacttcaaagcctcagagtacttaccaagttgtggtagctgcaaccaaggaaatgggtattggtaaagacggaaaacttccaaggaatttgcctaccgatctcaagttcttc

SEQ ID NO: 103243 - DNA, 166 bp, Arabidopsis thaliana columbia
cccacgcgtccggtaagtgggctggttttttattggagaacatgcgttggtgaagtttctacttttgattctgactttttttttgcgggcaatgccgacgccggtgactacggcgagagaatgcttgactgaagaagctgctcgtgccctcgacgatgctgttgtt

SEQ ID NO: 103244 - DNA, 318 bp, Arabidopsis thaliana columbia
acggacgcgtgggtagatcgcgagcggccgccctttttttttttttttttcttgtgattttgttattcataattggacatgactcgtaggccaccttttataaaaaaccagctgatttttttcttgggaaaaaagaaaaatacagaaaaaattacataaagaccacaaaactcaagaatacaaaagtaaaaataagaaaagtaaaaaaagtaaaaatatgaggggtcaaagagacctattgaaaatcttttgacccggtgaaagtaataccatgggatcaaacatagctttcctatcaacaaatctcgaccatcggtt

SEQ ID NO: 103245 - DNA, 291 bp, Arabidopsis thaliana columbia
catcagcaacttccactcttcttcttctcttcaatcattctctctctctctttccctcttatacacatcatcacaacacgaagacatctctcattaatggaagtttcaacatcatccatgtcttcaaaaccagaacaaatgcaaaacccacctcctatgatctcatctcctaggtttcagcctcagataatatctcctcatcagcatgaccagcatcaacatctctcaaatccttatccaacaacatttgttcaagcagacacttctactttcaaacaagtcgttcagatg

SEQ ID NO: 103246 - DNA, 205 bp, Arabidopsis thaliana columbia
tatccttcctctgtaccttccatgtctcttgatgtgtcttctttcatcactccgtcaaatcaccggagacgcaagggctagagccgttaaagtcacttgctcacctttgcttgagcacaacgaaaccgcttatgtcccaaatttcgtagccacaatggagaaaatcagcacacaagtacaaacttccggttttggagttgctctc

SEQ ID NO: 103247 - DNA, 389 bp, Arabidopsis thaliana columbia
acgagaaagaaaaaaaaccaaaatgaaaacttttgccaactttgcaattctgtttttattacaaagcttattgtttcctctttacagttcatgccttcatcaaacttcagatgattcatctccatttccttctgatttcctctttggcacagcttcttctgctttccagtatgaaggtgccttcttaaccgatggaaaaggtctgaacaattgggatgtctttgcccatgaaaaccctgggaaaatagttgatggaagcaatggagacatagctacggaccaatatcatcgatatatggaagatatccaatcaatgaattttcttggagtcaatagttacagattatctatttcctggtctagagtcttacctaatggaagatttggag

SEQ ID NO: 103248 - DNA, 307 bp, Arabidopsis thaliana columbia
atcagaacccaaagccaaagcgtttttatcatttctgtcttcttctgtgtaaacagtaagaccccaaaggtcaaacctttaggctttgtttcttcctttaaggcttttttccgacgtttatatcagatttcttcttgtacaatttcttcatttggacaacctccataatccaagaacgacccttttcctctaatctctcctgctgaatggtggaacaaactgtggttagagaacatatcaaagcgagagtcatgtcattagtgaggtctgcagagccatcctcatataggaacccgaagctttacac

SEQ ID NO: 103249 - DNA, 287 bp, Arabidopsis thaliana columbia
actctctgatgctttatatggaggaaatgttgcaacttggtctctcttttgtcaaatggcaaactggttcatcttcttctgtttgaaccgtaccttttcaaactgtttggagactgttcttaccatcatggggctgtactactggccttgtattagagattcttcaatagactatcccgtgaatcggaagtggggtttggtcatagcggccctagcatgtgccataaggccaactagtgcagtcatatggttatacgttgggatgctcgagctatttttgacaccta

SEQ ID NO: 103250 - DNA, 425 bp, Arabidopsis thaliana columbia
acaaagcacttcaagatggacggctattggacgtcccattgagtacagcgttttataaacttattcttggtcaagagcttgatttgcatgatattgtattatttgacgctgaacttggcaagaccttgcaagagctgcgtgttgttgttgcccgcaagcactatctggagggagtaggtggtgacaatagcagcacgatttctgatttatgtttacgtggatgccgaatagaagatctctccttggaattcacgctacctggctatcctgagtacatcctgagatcaggagatgaaattgttgatattactaatcttgaggagtatatatcccttgtcgttgatgctactgtcaagagaggagtcactcggcagatcgaagcttcagatctggattcaatcaggtgtttgacataacatctctac

SEQ ID NO: 103251 - DNA, 345 bp, Arabidopsis thaliana columbia
aaaacgttttactttgtgctgcactactcaacctcaatggccgcctcaacaatggctctctcctcccctgccttcgccggtaaggccgtcaagctttcccccgcggcatctgaagtccttggaagcggccgtgtgacaatgaggaagactgttgccaagccaaagggcccatcaggcagcccatggtacggatctgaccgtgtcaagtacttgggtccattctctggcgaatcaccgagctaccttaccggagagttccccggagactacggatgggacaccgccggactttcagctgaccccgagacattcgcaaggaaccgtgaactagaagttatccacagc

SEQ ID NO: 103252 - DNA, 347 bp, Arabidopsis thaliana columbia
cccacgcgtccggcaagaatctggtcggaaaaggagggtttggaaatgtgtataaaggttgtcttcatgatggaagtatcatcgcggtgaagagattaaaggatataaacaatggtggtggagaggttcagtttcagacagagcttgaaatgataagccttgccgtccaccggaatctcctccgcttatacggtttctgtactacttcctctgaacggcttctcgtttatccttacatgtccaatggcagtgtcgcttctcgtctcaaagctaaaccggtattggattggggcacaagaaagcgaatagcattaggagcaggaagagggttgctgtatttgcatgag

SEQ ID NO: 103253 - DNA, 355 bp, Arabidopsis thaliana columbia
acccaaaccgtcctatcgccagtttcatcttctctggtccaactggtgttgggaaatcagagcttgctaaggccttggctgcttactacttcggttcagaagaagcaatgatccgtcttgacatgagtgagttcatggaacgacacactgtttcgaaactcatcggttcacctcctggttacgtaggatacacagaaggaggtcagttaacagaggcggttcgacgcaggccctacactcttgttctctttgacgaaattgagaaagcacatcccgatgttttcaacatgatgcttcagatcctagaagacggtagactaactgatagcaaaggaagaactgtcgatttcaagaa

SEQ ID NO: 103254 - DNA, 314 bp, Arabidopsis thaliana columbia
acttggtctcctggtgcttatgggaactggaccgtagtaaaggagatgcttgatgttccaatcgtctacataattggagctttcattccagcatcaatgattgctgtgctttactacttcgaccatagtgtagcttcacagctcgcgcagcagaaagaattcaatttgagaaaaccgtcttcttaccactatgacttgcttcttcttgggtttctgacattaatgtgtggtctacttggagtccctccatcaaacggtgtcattcctcaatctccaatgcataccaagagcttagcaactcttaaataccagtt

SEQ ID NO: 103255 - DNA, 354 bp, Arabidopsis thaliana columbia
agagcaacaaaaccctgaactctatgtttctgttaaactcattcacaattttatgagaaattggacaaaaccctgatgtcggattccgtcaaaacgacggtggatccgcttttgaaagatttggatgggaaaaaagagagtttcaggcggaacgttgtgtctatggcagctgagttaaagcaagtgagaggtcgtttggtttctcaagaacaattctttgttaaagaaagcttttgtagaaaagaagcagagaagaaagctaagaacatggaaatggagatctgtaaattgcagaagaagttggaagatagaaattgtgagcttgtagcttcaacttctgctgctgaaaagttt

SEQ ID NO: 103256 - DNA, 351 bp, Arabidopsis thaliana columbia
cccacgcgtccgcccacgcgtccgcggacgcgtgggcgacgataaaacccagatttgggttcaagcttccataactttaaacccctctcgcgatccaggttgctatcaaatacttgggagcccccagtattattgaataacacagcctgacaatgagtgtagtcgggtttgattttggaaacgagaattgccttgttgccgttgcgaggcaaagaggtatcgacgtcgtgcttaatgatgagtccaatcgtgagactcctgctattgtctgcttcggtgacaagcagcgcttcatcggcactgctggagctgcttctaccatgatgaaccctaaaaactccatctctcaaa

SEQ ID NO: 103257 - DNA, 360 bp, Arabidopsis thaliana columbia
ctaacaacaacaaatcttaaacgttttactttgtgctgcactactcaacctcaatggccgcctcaacaatggctctctcctcccctgccttcgccggtaaggccgtcaagctttcccccgcggcatctgaagtccttggaagcggccgtgtgacaatgaggaagactgttgccaagccaaagggcccatcaggcagcccatggtacggatctgaccgtgtcaagtacttgggtccattctctggcgaatcaccgagctaccttaccggagagttccccggagactacggatgggacaccgccggactttcagctgaccccgagacattcgcaaggaaccgtgaactagaagttatccaca

SEQ ID NO: 103258 - DNA, 360 bp, Arabidopsis thaliana columbia
gaatgtctagagtggaagataaggtataaagtggctctaggtatagctgatggtctgagttatcttcataatgcgtgtccaagaaggatcattcaccgtgacatcaaagcttctaacatattgctcaaccacgattacgaagctcagatttcagatttcggacttgcaaaatggctcccagagaactggcctcaccatgttgtattccccattgaaggaacattcgggtaaaagagagaaagctttgtaactatccatgaacagctttgctgatcaaaactataggtttcattgggttttttctccctttagatatctagctccagagtatttcatgcacggcattgttgatgagaagat

SEQ ID NO: 103259 - DNA, 351 bp, Arabidopsis thaliana columbia
gtccgaaaatgtttctgtttggaagcaaagctctggaacagtttgtgaatcgtctggttgaattgcctcaatactgtaaccatattttgcaaatatctcatctgcgtagtactcacccggagttagtcactgttattgaacaagcactttcaaggatatcatctggtaatttagaatcagatgcctctgtttcacactctggtccctcacaatctttccctggaaatggcgagttgagtggttctggaattggccaacctgcattacagctttcttctcccctacagcttcaacagaaaaatgaagtgccaagtgtgccatctaacgaggcaaagccacttctgccatcgt

SEQ ID NO: 103260 - DNA, 341 bp, Arabidopsis thaliana columbia
tttttctctacacagatctctcattcactctctcgtacacaatgcaatcggttctttctctttccttctcacaagcatcgcttcctttagcgaatcgtacgctttgttcatccaacgcagctccttctacgccgagaaatctccggttctgtggactccggcgagaagcgttttgcttctctccgtcgaagcaattgacctcgtgccgtttccatattcagagtaggagaatcgaagtctccgccgctgcttcttcttccgctggaaatggagctccatcgaaatcattcgattatgatttgatcattatcggagctggagttggtggccatggagctgca

SEQ ID NO: 103261 - DNA, 413 bp, Arabidopsis thaliana columbia
acccacgcgtccgcggacgcgtgggtcacagtaaatgcttttgcttgagagagagtctgttagaggttttttgtttgtttctgtttccttctgtcacccagaaaactaaaaagcaaacaaattcaagaagagagagagagagagatagcctcaaaaccaagtcctaaccattgttgatagaagagaaagcttttcttttcttgttgcttatggtgaaagaatgaaagagagagaggaggagaagtaagaagcagagaaagtgtttagagctttgcatgttcctttctctccaagtttatatcttcatcgtaaagtctctcaacctttgattctgttttttcctcttatccatttatcctctttctttttctctctctcctcataattctagccacaatctttttagggtttca

SEQ ID NO: 103262 - DNA, 366 bp, Arabidopsis thaliana columbia
acggacgcatgggatcatcatcagtctacaagtagtaaaaaacccattcgatttgataagaagacccaacggaaagagtcttcccgtctacaaagtaaacccaatcaatcttaataatctttaagaggttttttcttattataattatctatctctctatctatctatctgcggatctctcatgaagaaacactgaggagattctctcgctctgatctcctggttttcggtttggccctccgatttagagggattgatggcccctgatggcgttgaagactccgactatgagagtgatcccgacgagttgaaccgctccttggctacacggaggagagaagccagcgatgatgatgaggatgatga

SEQ ID NO: 103263 - DNA, 408 bp, Arabidopsis thaliana columbia
acccacgcgtccgcccacgcgtccgcggagacgttgaattgattaagcttgagcctcaacagctccgccggaatctcatcggtgagttggttgttagagagatccaggtagtttaaaaccggtaaatcaccgagttccggtggtatcccgcctcgtaaacggttgttggagagatttaattcggttaactcggtgcacgaactcactgaactcggaatctcgccgtcgagcatgttctcctgcatctctactctctctagattcttcaatttgttgatgcaggacgggattgatcctaagaaactgttgctgctaagatcgatgactctgagatcacggagatcacaaagtttgacgggaatcacaccggacaagttgttagcggagatttcaagctgagatagatga

SEQ ID NO: 103264 - DNA, 336 bp, Arabidopsis thaliana columbia
tagcagcaaagggctcagcttctgatcagaaacctggtcctgttccgttcttcgctgctggagtcagctcggttttgcatcccaagaacccttttgccccaaccctgcatttcaattatcgctatttcgagacagatgctccaaaggatgttcctggagctccaaggcaatggtggtttggtggtggcactgatttcactcctgcttacatctttgaagaagatgtcaagcatttctattcgattcaaaagcaagcctgtgacaaatttgacccttccttctatccccgattcaagaagtggtgtgatgactacttttacatcaagcaccgtgatg

SEQ ID NO: 103265 - DNA, 356 bp, Arabidopsis thaliana columbia
acccatttgcttccttgaatggcaagtctcttctcctcacgtctcggctctcaatctctttctctcctcatcaacatcttcttcatctttctcatctttctccatttcgcttcacaaactcctcctccctccggatccatccaaaccttaaattcctttgccggcggtgacagtgacagctgcagcggaggactcgccagccttgacgaccaccgttccaagtgttcttacataagatctcaatcaaaatgtggcccacaaggttacatagactatctcaagattttcttctgcatcttcggacaatcccctgttttgggccatctagttttatccgcctggttgtttgttctgtt

SEQ ID NO: 103266 - DNA, 336 bp, Arabidopsis thaliana columbia
gatcagtctctacaaagttttataactcacctatcaaaacaaacttgattagatttctgacgctggaagactctttcttgattgaaaatcgagcaaccttgagagcgatggctgagtttggggctattcttttttacttttatattagtgatcgaacaagcttgcttggagagtctaaaaagaattacaacagagatcttttcctctttctctactgtcttctcatcatagtttcagccatgacatccttgaagaaacacaatgacaaatcacctataacaggaaaatccattctctatcttaatcgtcaccagactgaagagtggaagggatgga

SEQ ID NO: 103267 - DNA, 333 bp, Arabidopsis thaliana columbia
gtttacaaaattttgctgtttaaattgatagaagaagattcgacctttaaaggctatctgaagaacatctccatcatcgcctggtgtttcttcatttcatcaaattcaacacagaagattcgatgagtagcttcaacggagactccatggatgatttcaaaggcctccgaataactcagcttgatgatgatgacgatgatgaaactgcggtggaacctataaatatggatgaatttgatgatgatgatgaggaagatgatgaagattatgaacctgtgatgttaggtttcgttgagagtcctaaattcgcatggtcaaatcttcgtcaactgt

SEQ ID NO: 103268 - DNA, 410 bp, Arabidopsis thaliana columbia
aaacacaagacgtgcttacaatacaccacacacttcactctttcttcatcttcttcttcttaaatagctcgaaatcacatctcacagaattaaatcttatggctctcgagactctcaattctccaacagctaccaccaccgctcggcctcttctccggtatcgtgaagaaatggagcctgagaatctcgagcaatgggctaaaagaaaacgaacaaaacgtcaacgttttgatcacggtcatcagaatcaagaaacgaacaagaaccttccttctgaagaagagtatctcgctctttgtctcctcatgctcgctcgtggctccgccgtacaatctcctcctcttcctcctctaccgtcacgtgcgtcaccgtccgatcaccgagattacaagtgtacggtctgtgggaag

SEQ ID NO: 103269 - DNA, 339 bp, Arabidopsis thaliana columbia
acccacgcgtccggagaagatcaatcagattaaaaaaatgcagaagtatgaagaagactaagacttaccaagtcttctgtattgctgcactctctgtcctaactctgcagcttatcaatggttcatcagcagcaacacctccacctccaaatagtaattcttcaacttcttgtaacagagcctgtggaggagtctcaattccgttcccgttcggaatcgggaaggattgttatctcaatggctggtatgaggttatctgcaacacttccacttccgggtcgtctggcacaacggttccgttcctctcacggattaatagcgaagtggtgaacatctctc

SEQ ID NO: 103270 - DNA, 409 bp, Arabidopsis thaliana columbia
aggatctcggagcggacctaaaggcactccaagcatcaaagacgaagataaaatcgatatctatgattttggagtgatattgcttgaacttatagtgggaagaccattgagagcaaagagtcaagtcgatgttctaaaagagcagttacaagcaagcatttcagcggatgatggagcacgtaggagcatggtggatccaacggtccatagagcttgttcagaccaatcactgaagacaatgatggagatatgtgtaaggtgtctccttaaagaccctttagaacgtccttccattgaagatgtcctgtggaatcttcagtttgcttctcaagttcaagaaggttggctacaaaacagcaatccctcgagcaatctcggctcgccttctcctgctgcttcctctcttcct

SEQ ID NO: 103271 - DNA, 363 bp, Arabidopsis thaliana columbia
cccacgcgtccggatgcattgtctttaaacggatctgagcgtgtatcactctcgagtacgacaaccacatcatcaacacgagacactgattcaaatgaagtgatgtctcaatcgaaatcagacggtgacttaaacgacacaaaccagcctgatttgattgattcatctgcagatgaaggtctcttggaaaactgcaggatcttaccgagtaattgtttgccttgtctgaatacaacaactgttccttctattgacaagagaaggtctcttagctctagccctcccagttccaggaaaaaatcatctcttagactttcttataaatggagagaaggtcatgcttcaggagccttgtttttgtcg

SEQ ID NO: 103272 - DNA, 388 bp, Arabidopsis thaliana columbia
acccacgcgtcggcccacgcgtccgggacgatttgctttctgattcgagtcttgaggtttcttgggaacaggatcgcttctacagatatttcacccatgtcaagtttaacagtgagaagggtatcgcgcgaagatatacaactggttcagaatctaattgaacgatgcctccagctttacatgaaccagaaagaagttgttgacactcttctagaacaggctaagatcgaacctggttttacagaactagtttggcagaagcttgaagaagagaaccgcgaatttttcaaggcatattatctgaggctcatggtgaagcaccagataatggaatataacgaactgcttgagcagcagataaaccacatgcgccagatgcatccaactg

SEQ ID NO: 103273 - DNA, 325 bp, Arabidopsis thaliana columbia
gagttgttgaggctaaaaattttgcgcttgagcgggaaatatcggtccaaaaagaattgctggaggatttacgagaggagttgcagaaagagaaaccattgttggagctagctatgcatgatatatccgttattcaagatgagctttacaaaaaagctaatgcgtttcaggtagcacaaaatctacttcaggagaaagagtcaagtttggtggaggcgaaactagagattcagcatctgaagtccgaacaggcttctctagaactattactgcaagaaaaggatgaagaactcgctgaagctcgaaatacattgggagaagtgaa

SEQ ID NO: 103274 - DNA, 385 bp, Arabidopsis thaliana columbia
tggaatcagatcttcatcaagttattaaagctaatgatgatttgactcgtgaacaccaccagtttttcctttatcagatgcttcgtgctttaaagttcatgcatacagctaatgtttatcaccgtgatcttaagccaaagaatatacttgcaaacgcaaattgcaagttgaaagtttgtgactttggattggctagagtagcgtttaatgatactcctacgacagtcttttggacggactatgttgccacaagatggtatagagcacctgagctctgtggatcattcttttcgaagggatgacttgaactctccccgaagttgaaaatctatgaatcagtacactcgagctatcgacgtttggagcattggctgcatctttgcag

SEQ ID NO: 103275 - DNA, 345 bp, Arabidopsis thaliana columbia
tgtcaacacattcatcaatctcgcaaccgccgcttcctctcgccggaagagtcgccattgtcaccggctcttcccgtggtattggccgagcgatagcgatccacttagctgaactcggtgcgaggattgttatcaactacacccctaaagccgcagacgccgagcgtgtcgcgtcggagatcaatgattttccagttagggaagaaatcactggaaagggaccaagagctattgtggttcaggccaatgtctctgagccaagccaggttaaatcaatgtttgatgcggcggagagtgcctttgaagcgccggttcacattctggttaactctgctgggattctcg

SEQ ID NO: 103276 - DNA, 388 bp, Arabidopsis thaliana columbia
aaaagaacagaccattgggatcacaaatctccgaagaagaagaagaagatatcaaagtgtttatttttgtgggatttctgctgcaacttgttcaagtctttcttctctgaccattggttgacttcttcttaggtttccagaagaagacgatattgtagtgtatcctcgttttcatgttttcttagcacaagtctatgggttgttgtaaagtgccagctcttattcaggcccaggtagaaatggggttggttaatgatgttgagcacaaaagcctttttagacgagatactgattccccagaaagaaaagcagcttccttgatggaacaaggatcactttctgcaagttttcgagaatgctcaactaaaacacctaataacagtgtgct

SEQ ID NO: 103277 - DNA, 387 bp, Arabidopsis thaliana columbia
ccaagacattagcaaaactaacaaagctaactaatctccatttaagtgataatcgcctgaacggatcgattccagagtttattgggaagttaccaaaacttcaaagattagaactctatgcgagtggccttagaggacctattccagactccatttttcatctggagaatttgatcgacgtgagaatcagtgacacggttgcaggattgggacatgttcctcagataactagcacgagcctgaaatatttggttttgagaaacataaacttatctggaccaattccaaccagtatctgggatctgcccagtttaatgactctggatctttcctttaataggctgactggagaaatacagcatatgcaactgccccaaaatacacata

SEQ ID NO: 103278 - DNA, 381 bp, Arabidopsis thaliana columbia
cttggattttgaaccagtggtcactgaaaggcctggcgaactgactgcgtactacaagattgcacgtcactacaagtgggcactggaccagttgttttacaaacacaaatttagtcgagtgattatactagaagatgatatggaaattgctccagacttctttgattactttgaggctgcagctagtctcatggatagggataaaaccattatggctgcttcatcatggaatgataatggacagaagcagtttgtgcatgatccctatgcgctataccgatcagatttttttcctggccttgggtggatgctcaagagatcgacttgggatgagttatcaccaaagtggccaaaggcttactgggatgattggctgagact

SEQ ID NO: 103279 - DNA, 385 bp, Arabidopsis thaliana columbia
gcgagctccgatctccggaattttctcgagatctctcggttacctccaccgtacgacgccgctatcctccgctactcgtcacctatgcgccgtcgcttctcccgaagctcgaacgaagaaactcgagcgaatcgccgacgatttactcaaactgaatcggattgagctttacgattactcactcctcttcagccataaaataggtctcaatcgctacggttccgccgtagctgttaccggatctgtcggcgacgcgtcagcttctacggagacgaaaacggcggagaagactactttcgatgtgaagcttgagaaattcgaagcggcttcgaagattaaagtgataaaagagatcagagcattcacggatctgggattgaaagaa

SEQ ID NO: 103280 - DNA, 368 bp, Arabidopsis thaliana columbia
tcttaaacgttttactttgtgctgcactactcaacctcaatggccgcctcaacaatggctctctcctcccctgccttcgccggtaaggccgtcaagctttcccccgcggcatctgaagtccttggaagcggccgtgtgacaatgaggaagactgttgccaagccaaagggcccatcaggcagcccatggtacggatctgaccgtgtcaagtacttgggtccattctctggcgaatcaccgagctaccttaccggagagttccccggagactacggatgggacaccgccggactttcagctgaccccgagacattcgcaaggaaccgtgaactagaagttatccacagcatgtgggccatgctcggagc

SEQ ID NO: 103281 - DNA, 331 bp, Arabidopsis thaliana columbia
cccacgcgtccgcccacgcgtccgctgctgcgacccttgtggctgctcagtgtgtggaagctgctgaagttatgggagctgagagagagtatttggcttctgttgttagctccgccgtcaatgttcgttctgccggagatattatgactctcaccgccggagcagctacagctttaagaggagtgcaaacattgaaggcaagggcaatgaacgaagtgtggaacatagcatcagtgataccaatggataaaggactcacttctacaggagggagcagcaataatgttaatggtagcaatggaagctcaagcagtagtcacagtggtgaact

SEQ ID NO: 103282 - DNA, 410 bp, Arabidopsis thaliana columbia
acaaaaatcacgataatccatgatctaactataagagggagtaagagaaacatttcacttggtttttcttactgagtactgatataaataaatatagaatcagacaaagattcgtttgctgaacgattttatataaatttagtccttacctgcgcagctaatcatcgtgagcggagcgactatgcgtcaagaaaaaaaaactaaaatactaataattaagtgactccttctctctccttttttttggggtatgcaccaacctttatttataagtataagcaagaataaataagaacaacaaagcaaacggctcatttctcagaaacaactcaaacatgggttccttcgacttgcctcacagttcatcgttcaagggagaaagtgaaatatttcttcggaatgtgttcgag

SEQ ID NO: 103283 - DNA, 378 bp, Arabidopsis thaliana columbia
cagaagcagtaaagatcttatcagatagcaagattctatcagctcctgtgattaacacagatcacgagagttctttagattggagagaaagatatttaggaatcattgactactcttcaatcatcttatgggtgctagagagtgctgaactcgctgcaatcgcgttgtccgctacgtcagcaactgctgctggtgttggtgctggagctgttggagctcttggtgttgcagcgctcgggatgaccggtccggttgctgctgcggggctagccgcagctgcggttggagccgcggttgctggtggtgttgcagctgaacgtgggattggaaaagatgctccaactgctgctgataagttggggaaagatttctatgaag

SEQ ID NO: 103284 - DNA, 416 bp, Arabidopsis thaliana columbia
acccacgcgtccgttgttaaatgccacaagaagaaagctgaagaaagggagacgaaaaattcgcagaggaactatagccaacactagtcactgcaatatcgagcttggagaaatggagaaggaaagccatgaggagaacaaccacactatctcaggtgatttaacggcaaaacggaaacgaggtcgtccgaggaaacaattgaagctggaatcgaatgagcactctcttggtcattctccaagttttagcaggagtcagcagcagtctcgccagaggaatgacgatgaagctatggttggacagccgattagtggtgtgattgaggcgacatttgaagccgggttcttgctttctgttaaggttgggaattcagatagcatgcttagaggtgtggtcttcaagcctggtcactgtg

SEQ ID NO: 103285 - DNA, 401 bp, Arabidopsis thaliana columbia
  unsure (1)..(401): unsure at all n locations
acaggcagttatatcggaggatagagcatgtcgtgccgctgaggcggttgggttgaaagattacaatcacctggaaccgtacaaaatctttcaagctgcacggctagttgctgttcttgaagcttatgctttgtatgaccctgacattggatattgccaaggaatgagtgatcttctctctcctatactctctgtaatccctgatgaccatgaagtcttttggtgtttcgtcgggttcatgaagaaagctcgtcacaatttcagacttgacgaggttggaatcagaagacaactcaacatagtctcaaagataatcaaatctaaagactctcagctttataggcaccttgagaaactccaagctgaagactgtntctttgtatacagaatggttgttgtga

SEQ ID NO: 103286 - DNA, 398 bp, Arabidopsis thaliana columbia
ctgttgtccagacattggagagggaacatctgtgtatgttctaggcaccccagagaagttggggaattggaaagttgaaaatggacttagactcaactatgtcgatgattccatatgggaagcagattgcttgatccctaaagcagactttcctatcaaatatagatactgtaaagttcagaaggaagatagcatagggtttgaatctggtggtaatcgggagctgtctcttcactccatcggtagtaaacaggaatacattgtcatgtcagatggcttgtttcgagcaatgccatggaggggtgctggtgtagcagttcccatgttctctgtaaggtcagaagatgatgttggtgtgggagagtttctcgatctgaagttgcttgttgattgggctg

SEQ ID NO: 103287 - DNA, 214 bp, Arabidopsis thaliana columbia
agtctatctctcgcatgcaacgtcatcgccctttcaaaccgaccgaatcaactctggaaacttcatctgtctacgtgttttctcagctatgtatctctgggttcgagttcagtaatagcttcatcaggcaaggacttcgataggggttattggaagaagcataaatggaagggcttggcgacggctggttgtttgggaagtgggtatttacgct

SEQ ID NO: 103288 - DNA, 371 bp, Arabidopsis thaliana columbia
ggctttgatggtttaccgcgagacaatttcaggtggaacggttcctactacagaagtagtttcacaagttttggggtgcttgcaacttccacatgatgctgctttgcgggataggctgatttcgactttaggcataaacatttcttcacaaaaacaacataacatattcccactagtcgatggatttggagagtatgatcctcgtgcattttcactgcttgaggtttgttggtagcttcatttagatatatagattcttctgggtctcattagatgtacagagtttatatgtttcatgattatgcaggaggctacttctcttggagttcttccttctgtgtcattcaataaaattccactattttttgaca

SEQ ID NO: 103289 - DNA, 300 bp, Arabidopsis thaliana columbia
agatcatcggacatgaatataatccgacgggaatcgaacgtgagtaccgatcacattcagagagttttagctatcaaatcatcttttcccattgactaactgggctgtgcttactgggatcacctactcacgactcagtgcggagttacggcgatgcgtccacgacgttcgtcgtccgtacaaatgtctcgttgaactgtagagcttctccgatgagaacatcaccgttctcatctacaccgatgaatcctctactcatcctactggcaggaacatccgccgcgcgcttggcgatctcgt

SEQ ID NO: 103290 - DNA, 362 bp, Arabidopsis thaliana columbia
cggacgcgtggggtcgaaagacggtagcggaacgtttaagacgatcgcggaggcgatcaagaaagccccggagcatagtagccgacgattcgtcatctacgttaaagcaggaagatacgaagaagagaatctgaaagttggtaggaagaagacaaacttgatgttcatcggggacggcaagggtaaaacggtcataaccggtgggaaaagtatcgccgatgatctaactacttttcacaccgccactttcgctgcgactggtgctggatttatagtgagggacatgacgtttgagaattacgccggaccggctaagcatcaggccgtggcactccgtgttggtggagaccacgcggtggttt

SEQ ID NO: 103291 - DNA, 380 bp, Arabidopsis thaliana columbia
agaaaggatcgttgacaagaactaaagatctccaagaagataatggaagatcacttttattgggagacaatcagataatcaccggaagtcttaagccgacgccgacatggaggatgaatttcacggcggagctcaagaacctcagccgcatggcgctgcctatggccaccgtgactgttgctcaatatctattacccgttatctcagtcatggtcgccggccaccgcagcgaactccagctctcaggcgttgctcttgccacttcttttacaaacgtatccggcttcagtgtcatgtttggtttagcgggtgcacttgaaactctatgtggccaagcttatggagcaaaacaatacgcgaaaatcggaacttacactttc

SEQ ID NO: 103292 - DNA, 365 bp, Arabidopsis thaliana columbia
acttcgatgtatgaggatacgattgtcgtctcttggtttatcctagaggtgattctcaggctcttcctggttacatcagcatctatcttcagatcatggaccctagaggaaccacttcgtctcgttgggattgtttcgctagctatcgtctctctatcgttaatcttgtcgatgattctttaacaatccataaggattcttggcatagattctctagtaagaagaaatctcatggatggtgtgatttcaccttgaactctagcattttggatcctaagatgggttttttgtttaacaatgattcgttgcttatcactgctgatatcttgattctaaacgagtctgtgagctttagtcgtgataat

SEQ ID NO: 103293 - DNA, 315 bp, Arabidopsis thaliana columbia
ctttggagctcctcaatctctccaatggcgtcttcttctctctcgtctctctcctcaatcctcagtaaccctcatggttgctctctctgtttcaaagcctctacacaacgttgtttcgctcttagattcctctcctcaaaagcaacccatgcttcttcatcttcttcctctgctcttctccctcgttgccgtagcagcacccatcgtctcacacagaaaccgatcaataggaagaagggattttccttaaatctttctagaagcttctctatttctcaaattgctagttccggtaagtttgatggtccaagcctc

SEQ ID NO: 103294 - DNA, 209 bp, Arabidopsis thaliana columbia
tatataaggctctcaagagagcttcatgagaatctactcatagcacaggagaacattaacgatcattccaccaacagagagacgaataatgagacaagaattaactcaggctggttcgatgactcgttctacacttcggcagaacattgcaacagtttcgctcatctgctggaaaatcttctcagtcaaaggtagctacgcaactccaa

SEQ ID NO: 103295 - DNA, 378 bp, Arabidopsis thaliana columbia
cgctttcaagctctcatctgggtctttctttgaatcgtgaaaggaaatgggaagagagaagagccctggtttgaagatcctctgggtatggactatcggcactgctgctatattggtgacaagtgttgtccgcacaagaatgcaggatatgcaaacaatgatgaaccagaaccaggaacaagcaccaaaagaaaaccagaacggaagtgcaggtgattcttccgtcttaatggatgaaacagttttgcctgagtcggatcgagagattgcagaaaagctttaaagaaagaagagcctggttctagtgttgtcttccttttcttctcttcctttttcagctctccatgaaggtgatgaaacatgttttaatggttttgg

SEQ ID NO: 103296 - DNA, 385 bp, Arabidopsis thaliana columbia
acaacaccactctcttcttcttcgtttgaatttgttcttctctttttttgcatagagaagactattgattagaaaatggctatggcttcttcgagaaatggtgcggttagaggatccatgagaccagtctctggagctaattcatccaatctcagatcgtcttctttcaaatccaggattccttcctcggcgcctgctccccgtcggagctcctctgcttctatcggagccgcagacaatggagtgcctgggagagttcgagtggctgtaagattacgacctcgcaatgcagatgagtcagtcgcagatgctgattttgctgattgtgtcgagttgcaacctgagcttaaaaggttgaaactcaggaaaaacaattgggatactg

SEQ ID NO: 103297 - DNA, 357 bp, Arabidopsis thaliana columbia
aaaacagcaaaaattgaagtctactcgtcgtagtagtcgtcgtcttccactaattccgtggtttttttatcgaagacttttgaataaagtacatttgcagagtctgtcaataaccctttcttcacggtattgctctcaagccgcgtactggtaggctccaaaattatcccttctttatggtttttggaacctgggttctccgattttgaggttgttgaaatctttgagtagatttttgtggaacatctgactctcatggcgaagttatgttgcttcggttcttcagactacgatcttgtggttgggagggcatcgactagttctggaaaagggagaaataacgacggcgagattaaa

SEQ ID NO: 103298 - DNA, 376 bp, Arabidopsis thaliana columbia
acccacgcgtccgcccacgcgtccgcttctctgtacgcccaccacagggagggataacagtggaagatagctctttatattttgaaaaagataacaaacatcgaaatccatcatccactggcatagagatttgtgaagcagaagcagaagctgctgcttcagctattgctgtggcagccataactaatgatgaaaccagtgggaatgccttgagtactggctctgtattacctgttgaaaccaaaatttatggaggaacagagttagatgatggggcagcaagtggtactgttggtgggcagactagtcgatcaaaagctgaggaatctctcattgtttctctaccagcagatctttcagtggacaccccaatctc

SEQ ID NO: 103299 - DNA, 347 bp, Arabidopsis thaliana columbia
aattcaacgatttgccaagataaaagcagacactgtacataagctccgcattcacttacgtgttggatacttaatttgacactcttctttgtgttttctcttccaccttctttttcgaggctctgcaaaagaagatgatcaaaacaatcacatctctacgcaaaactctggttctacctcttcatttacatattcgtacgctacaaactttcgccaagtacaacgcacaagctgcatcggctttgcgagaagagcgtaagaaacctctttatcaaaatggagatgatgtatatgcggatttggattgggataatctcgggtttggtctaaatccagctgattacatg

SEQ ID NO: 103300 - DNA, 359 bp, Arabidopsis thaliana columbia
acccacgcgtccgcttggctctccggatccaaattttactttggatgcacatctcaaaggggtaaactgtgtagactactttactggtggggataaaccatacctaatcactggttctgatgatcatactgctaaggtgtgggattaccaaacaaagagttgcgttcagactctcgaaggtcatacacacaatgtttctgcagtatcttttcatccagagctacctataattattacaggatccgaggatggaactgttcgcatatggcacgccaccacttacaggcttgagaatacattgaactatggccttgagagggtttgggctattggacacattaaaggttcacgccgggttg

SEQ ID NO: 103301 - DNA, 377 bp, Arabidopsis thaliana columbia
acggacgcgtgggcggacgcgtgggcggacgcgtgggctccggtcgacgattatcccaatctcgccgggattctcctctgcaccataaaatagaagatgagagaaatccttcacattcaaggtggtcaatgtgggaaccagattggttccaagttctgggaagttgtatgtgatgagcatggtattgatcccactggtcgttacgttggaaactctgatctgcagttggagcgtgtcaatgtttactataacgaggcatcctgcggaagatatgttccccgtgcaattctcatggatcttgagcctggtactatggacagtgtcagaactggaccttatggtcaaatcttcaggcctgacaactttgttttcgggca

SEQ ID NO: 103302 - DNA, 333 bp, Arabidopsis thaliana columbia
cgcgtccgctctgatgcagtaagaagcatcagtttgttttggtgagtacaaaggtaagctcaaggggattcagattcgtcacattcaaggatgagaaatccatgaaggatgtgatcgagggattggctggacaagagctcgatggtcgcagcatcactgtgataatggctcagttacgaggaagtggtagaggtagtgaggatacagcagcagtggtggcggttactcaggagaaggtggttgtggctatggagttggtggtggttactcaagaggaggtggtcgtggcggtagaggcgaaggaggatacagcggcagtgttggcggttactc

SEQ ID NO: 103303 - DNA, 272 bp, Arabidopsis thaliana columbia
cggacgcgtgggttacgggagtgttgaggcatgtccaaaagacaacatcgaggaagcaattgtgttgctaatgttacttgtaaagaagatggtggttggggacatacagtgggatccagaactcatggatcatctcacttacgccctttccatgactggacagtttgaagtgttagcgaactatctagagcagactcttccgggtgtttacacccgccgggaaagaatggaaccttctctccctttgttacagtgctgctgggatcgataaa

SEQ ID NO: 103304 - DNA, 312 bp, Arabidopsis thaliana columbia
accacgaagtctgcggacgcgtgggttttgattgtgcttctgcaagctttgatactctctctgaagctctgaggaagacatgagttcgtctcactcagcttcttcttcattggtttcttctttcgtcgccgttaaagcgactccggtcaccggacctctgattccccgtcgcgatcgtctttcgattcgtatcagagctagctcgaatcagaataattctggttattgttttccacacaagtttaaatcttttgccaaatcagcgattctcaacggtgctgctgtttcaaggaccggaaagttttcaacttt

SEQ ID NO: 103305 - DNA, 364 bp, Arabidopsis thaliana columbia
agttctctcatttttttttcttattattattattttttcgaaaaaaaagaaagtaaataaataaatattcaggaagaaaaagcctgtagagagagaagaagaagaagaagaagaagaagacgacgaagtcgagagaaagaaataatggcggaggagacgatggagaacgaagagagggtgaagcttttcgtcggacaagttccgaagcacatgacggagattcagctcctcacattgtttcgagaattctccatcgtcaatgaagtcaacatcattaaagagaagacaacacgagctcctcgaggatgttgttttctgacatgtcctacaagggaagatgctgacaaggtgatcaatagttttc

SEQ ID NO: 103306 - DNA, 116 bp, Arabidopsis thaliana columbia
acggacgcgtgggcaaagttgacagttttgagagttgaagaagggcaaatctttcgtcgccttcgtcactctagttgagttgacgaaacacagttcgagttcgagagacagtggat

SEQ ID NO: 103307 - DNA, 276 bp, Arabidopsis thaliana columbia
agatcttcactctccaaagaaccaaaacaaaaaaaaaagttgacatggaccaaaaaagctttttccggttgatttttctcatagtcacagctggtttcatcatctccttcacttccactaacttccctcacgcgccgacgaggcttcttgattgcaccgactcttcttcgtcacctctttgcgcttcgagaaactttcttttcaacacacaacaaccacgacctattcctaaacatggatcctaaaccagataccatgaaccatgatcacgtgtcc

SEQ ID NO: 103308 - DNA, 207 bp, Arabidopsis thaliana columbia
agatctgacatggaacaagtgtttggctgatggaattttgaagaaaaatttcaacagtccaacaataaaagattaatccaaacaaaaaaatgaattattggaccaatggtggaaaaatggccaattggttttacaaagccaagctcgtaaagaaccgtcagtccaattccaaacccacaaacaagaaaccctaagaaaacccaacaa

SEQ ID NO: 103309 - DNA, 181 bp, Arabidopsis thaliana columbia
aaatcttaaacgttttactttgtgctgcactattcaacctcaatgggcgcctcaacaatggctctctcctcgcctgccttctccggtaaggccgtcaagctttccaccgcgggatctgaagtccctgtaatcggtcgtgtgacaatgaggaaaattgttgccaaaccaaagggcccatcaa

SEQ ID NO: 103310 - DNA, 205 bp, Arabidopsis thaliana columbia
gccggtgaaagcacagaggtaatagaacaactgcttggtgaattgctcttggtctttgttggcgagagaattgtagaaaagagactttatcactgagatggagatcatggatgaccaaatattacctgcagcgctatctcaaagatcaaaccttttacaagatccagtctcagtctatcatcgacaatcctgatcagcgccttgt

SEQ ID NO: 103311 - DNA, 310 bp, Arabidopsis thaliana columbia
cccactcatggcgtctcgaagagttttatcatctcttctccgttcatcttccggtagatctgccgccaaattagtcaaccgaaaccccaaagctcatggtgggttctctgtgtttgctggtgtgggggaacgaacccgtgagggcaatgacttgtacagagaaatgattgagagtggtgtcatcaagctaggcgagaagcagtctgagagcaaatgtgccctagtgtatggacaaatgaatgagcccccgggtgctcgtgcccgtgttggactgactggtttgactgtggctgagtatttccgtgatgct

SEQ ID NO: 103312 - DNA, 280 bp, Arabidopsis thaliana columbia
aaagacattggggtatgagaggctggtttcatgacggtgtaaactgggaagaacctcgtggagcagagattgttttgccctggagaaacaaaagccttgcagtcaggccgatcattcagccgttaccgggggccctcctgcaagatcacttaattgcaatgtcgcaactaggccgagaccaagagcatcctgatgtggccttccctctgcaaccacccgagttattgaactgtccaatgcaaggggaatctctctcactgatccacggtattcttaatga

SEQ ID NO: 103313 - DNA, 373 bp, Arabidopsis thaliana columbia
aagtttgcttttttgttgtgtcaatgaaatgggagaaatggagatcgaagaaatcgaagctgttcttgagaaaatctgggatctacatgacaagcttagcgatgagattcacttgatttcgaagtctcactttctcaaatcggttaaaccttcaaatagatcggagaagagaaagaatcctcacggaaattccggcgaagataagcgacctggttatgttttcatcaaaggattcgccgtcgatgataacgactccacgattcaggaggcgaagagtcttaacgcaattcgaaccgctcttgagaaccttgaagaccagctcgagtttttccatactatacatacacagcagcgaacagagaaagatgttgcg

SEQ ID NO: 103314 - DNA, 286 bp, Arabidopsis thaliana columbia
aagttcatgcctcaccgtgggtttggtaagctaatgagtccagaaagtacaaccaccgggcataagctggatgctgctggggaaatgcatgaatcatcacctttaaaaccaaccttaaataagggtttggctgtgaatccgtttaacccatcctttgcaaccgaagctgtccaaggaatgaaacacatcagtccttctcagtccaacatggtccattgctctgcttctaatatactgcaaaagccatcaagacctgctatttcaactcctcctgtggctagtaaat

SEQ ID NO: 103315 - DNA, 179 bp, Arabidopsis thaliana columbia
gcgccatagggatgggttgcacaggaagtacgttccaagtacgtgcagttggatcgaatacccctagcgccccgctcaatcaggtggatgactgaatatgaaggacatatttttcttgtagatgcatcgtctctggagcccatggtgtataggcttaaccggttggagtccgtttggga

SEQ ID NO: 103316 - DNA, 389 bp, Arabidopsis thaliana columbia
acccacgcgtccggacttgcagaggaaagaaccaacaagtgaaagcaatgactgatgcccacagtttagcgagtgaaacagatgatcaaccctcaacacttggaacagaccccaagggtcagaattattcttccgaggcaagcaacgttggtgaatctgattgggttgttgtctcccacatccaggagccagagggttctcgaaatcgtattcctgttgggagggttcgtcattcatgcttttaatgttttgaaattacaagatcgctgattgaattattggtttcgtgcaaagaggtccagaatttcacaatttagttgtccctttttcaaattcattttgcaggaacgcaaaacggttcaatccattgtgaactcggtcgacatgga

SEQ ID NO: 103317 - DNA, 128 bp, Arabidopsis thaliana columbia
acccacgcgtccggaaaatctctccgccactgttctctccgactcactaatgggattcttccatcttagcattccgtacaatgagccgccaacatcaggtggtaaggaaatccccggcgggaaaacct

SEQ ID NO: 103318 - DNA, 361 bp, Arabidopsis thaliana columbia
cgatcccaacgaaggccgtaacactctccatggtggttcaaagggatttagtgatgtgatttggtcagtccaaaagtatgttcccactagtcacattactttcacatacgatagcttcgacggtgaagaaggttttccgggcaatgtgacggtgaaagtgacgtacatgttgatcggagaaaacaaactcggtgtaaaaatggaagcaaagccactcaacaaacctacaccaatcaacttagctctccacacttactggaacctccacagccacaactccgggaacatcctctcccacaaaattcaactcctcgccggaaaaatcactcccgtcgacgacaaactcattcccaccggagaa

SEQ ID NO: 103319 - DNA, 228 bp, Arabidopsis thaliana columbia
acccacgcgtctgactctttcaactgctaacaagaaacagagacaactatgacgatctttaactgggtgcagaataagctgcagcaaagtgtcatcaaagatggtgtgaggagaaacgagaacaagaagaggaatgaatgaataagtgagattgagaagaacacgaaagctatactggatcaagttggtttagtggatgcgcttgataattggttcgatggagttctc

SEQ ID NO: 103320 - DNA, 138 bp, Arabidopsis thaliana columbia
aaaaaatggctcctccctttgtattccctcaaattctacgagccctagaagaagatccggaggataatcaccgtttgttcgctcagaatcccgtcgatgtaacctctcttcgcccttccgatctggaagaattcgtca

SEQ ID NO: 103321 - DNA, 205 bp, Arabidopsis thaliana columbia
gacgcacgggagggagagatggcaccacaaggcttcgtggagaattaatggccgctcctccttcttctctcggatccattgaaatcgatactcttgaagtcttgatcaattcaaagctttggttcctatgtgttcctctctgtttcctcaatgatcctatgtctccgtctctgtctcaaagcttcgagatctttcttctctattt

SEQ ID NO: 103322 - DNA, 232 bp, Arabidopsis thaliana columbia
ttctcctccgtctccatcctccgccgtgaacacaagctccactggtttcaaccgcagaaccagacagagattgtccgatgcaacggcgagtgtaagcgagaccgacgtagaagatgaagatgaagatgaagaaggagtggaggagaagatcgaggcgcttcagacaatagttcccggaggaacggaacttggtgtcgacgcgctgttcgaagagacagctagttacattttg

SEQ ID NO: 103323 - DNA, 271 bp, Arabidopsis thaliana columbia
cggacgcgtgggggaggactaatacaagtttctctcctccttcatcgagatgggacgtccatggattaatggatggtattagctgttatggatcttccacatcatcaaatgctaatgttcttcgtagtcccgacctttctcaagctcttcattggacacctaacgattttgaatctgctacaagaagagatcagattgttaagcaactaccaggtacatcaggaaatgtcggtattggtgactctgaacctggtcgtaactcctcaagccg

SEQ ID NO: 103324 - DNA, 217 bp, Arabidopsis thaliana columbia
ataaaataaaaatcccaacaacaaaacattaaaaaccctttctctcttcccactttcacatccatagctaaacccttgaagaagattgtttagtgtgttctcgtctcttcgtttatttcttctccaccgatccaacaatgctactctccggtcaatctccgactctgattcgttaatctccctccgtctctctcgtctgattccttccgtatctctc

SEQ ID NO: 103325 - DNA, 229 bp, Arabidopsis thaliana columbia
aaacaaatcattttttgttaaatcattcgctctcttctctcaatcgacctatcagagaaaaaaaatataatcgttgtcgaatggaaaatttccggtgaagccgtcccgagtgagtcgggctcttgcctggtaaccttcagcttcaacattgcacataaccggtttatgtccagcaaatccagcttcaacacgtggtgttgactggtttttatcttttttccattcaatc

SEQ ID NO: 103326 - DNA, 277 bp, Arabidopsis thaliana columbia
tcgactcagtgctccttcatatctcaaccgagtcaacatcgatgactcagcgagtcaacaactccctccgccaccagcttccaccgctatatggtctccatctccgccatcaccacaacatcctcctcctcccccgccgcggccggattttgatctaaaccagccgatttttaaagctatccacgattatgcacgtaaaccggaaactaaaccggacacactaattcggatcaaagaatccgtgtccgaatcaggcgacccgatacaacgagtcggg

SEQ ID NO: 103327 - DNA, 211 bp, Arabidopsis thaliana columbia
cccacgcgtccgctctgatcagtctcctccatgccgagccgtcacttcctgagacgaagagcggcggcgcgtcggatctcaagctgaagtggagcgtgcgtcagccgaggaccaaggcggcgacgttaaggaacaagggagatcatgatacgcgtgctagtcccacgaccccactttcatggagcggcgcaacctcgtttagcggcggtgg

SEQ ID NO: 103328 - DNA, 188 bp, Arabidopsis thaliana columbia
aaaaaataccaaatcacagcgaaagtttcaatggccgcctcaacaatggttctctcctcccctgctttcgccggcaaggctgtgaagctttcccctgtcgcatcacaactcattgaaagcggccgtgtgacattgatgaagactgttgccaagccaaagggtccatcatgcagcccatggtacggatc

SEQ ID NO: 103329 - DNA, 202 bp, Arabidopsis thaliana columbia
ggcaagccaaaccggcgttgaaatcaacggtggtggcggttttcatcgctagcgaagagaactcttccattcctggtgttggtgtggacatgctggtgaaagacaaacttcttgataagctcaaatccggacccttgtattggattgatacagcggataagcagccgtgtgttggaactgggggtatgataccatggaagct

SEQ ID NO: 103330 - DNA, 286 bp, Arabidopsis thaliana columbia
cccgaggattcggaagtcgataagctcgattatatcgcggcttttcacgcggtggctaaagggattacggttgtggctgctgcgggtaacgaagggcctggtgctcacactgttgacaatgttgctccttggcttttgactgttgctgcaactactcttgaccggtcttttcctacaaagatcacacttgggaataatcaaaccctcttcgctgaatctctgttcactggaccggagatttcaaccggtttagctttcttggactcagacagtgatgacactgttg

SEQ ID NO: 103331 - DNA, 190 bp, Arabidopsis thaliana columbia
gagtgtactacatctccggcgattccgcctccgcaggtggagcattcaccaccacaggagaagccaggcaacgctgaactcttttcccccgctcctcactctccgccgccgccaaaaattacgatgatggatattgtgaatagcaccgggattttaacagatcaattgggtgatgaaaacccatcatttt

SEQ ID NO: 103332 - DNA, 286 bp, Arabidopsis thaliana columbia
ctcacaattagttatgcttttgggattttgaatcatgaaggttctttgatcaagattactgtgttatctaatggtactcttagatcaagattccaatcttgcttcttccccatgggaaaactcgagcatttctcccactcatgccctttgacctcgccggagattgtagctgaaggcatctgcaacatttgcttccaagaccaagttgttgaatacgcatgtaagccttgcaattttgatatatgtaagacttgctccaagctgccgcaaaaggtgtcacatggtt

SEQ ID NO: 103333 - DNA, 225 bp, Arabidopsis thaliana columbia
cggacgcgtgggcggacgcgtgggttgaaaaatctggcaaggatggcaaacaagctgctcgtgtccttcaggacacacgtttgaataatagggttcttgacatcagaacaccggctaatcaagccatcttccgtattcagtgccaagtccaaattgcgttcagagaatacttacaatccaaggggtttcttgaaatccacacaccgaaattgatcgctggcagta

SEQ ID NO: 103334 - DNA, 341 bp, Arabidopsis thaliana columbia
aactccctcttctcagtacctgcaaatggaggaagaagaatccttctctgaaacccttgttctcatttgattcctccttcctctctcttcttctctctctgtctctgattcgttattccacacttatgactcatctttcccgtcaatagctaagtttgcctcttctttgtgaaatttagctgaaaaaggagaggaattccgaattctgtcacttcaaagctcgaattttgcaaactttcctttgatgggttttacttgttttgttgtaatctgattaaaaatagaaactttttgttttcttcgtgtctccttttgctcttaaaagagaagctttttcaatg

SEQ ID NO: 103335 - DNA, 177 bp, Arabidopsis thaliana columbia
gtacaactccccctccgtcttcaatggtttacacgagggcaggcgtatgtattcctcaacttccatcgagcaataaaagtagctcgtctcttcatagtatcaatgagtatcacaggagaagcaacgctgtctcagtctctctgaggaaggactctcgttcttcagggaaggtttgtg

SEQ ID NO: 103336 - DNA, 404 bp, Arabidopsis thaliana columbia
acccacgcgtccgaatttgagcatccatggcctgcaaatcctgacccgaatgtgaaaggaggagtcttgtcttacctggccgagttcaaaccattgggggatactcaaaagcctgtcactttggatttcgagaagccactagtcgaattggagaagaagattgttgatgtgaggaagatggcgaatgaaacggggttggatttcactgagcagattatcactttggagaacaagtatagacaggcactgaaagatctttacacgcatcttactccgatacaacgtgtgaacattgcgcgccatcccaaccgacctactttccttgatcatatacataacataactgacaagtttatggagcttcatggagaccgagcggggtatgatgaccctgcaattgtgac

SEQ ID NO: 103337 - DNA, 417 bp, Arabidopsis thaliana columbia
atttgagagcaaggcattggtttggctcaagatacagtttcaagatggtgtcagcattgatgtgaaacgtggtgtttctcttcccaagcttaagaccctccaccttgattatttcaagatagaaccgagtaagtttaacaagcttctttctggctgccatgcgcttgaagagttagtgctgatcaatttgatgtgggctgattcctcgggatataaagtttgccctgtcacagtgtctatcccaaccctcaagagactaaagttttgtcgttctgaagatttctatgagggtaaatttcatgagtatgaagactatgatgaggagaacattaaaaagggagtgtcattgtcgtttgataatccgaatttggtgtaccttgaatattctgatgttattgtggacaagtataaacaagt

SEQ ID NO: 103338 - DNA, 276 bp, Arabidopsis thaliana columbia
cacgattgtaaaggctgtcttcattgtagcagtggtactacatgttgcagaaggaatctatgcgtggtttctggctaaacgagtcgacccaggaaatgcaatggggtggttcttgcaaaccagcgctctcgggtttttctcaatgcggtttttattgaagagagcgaaagagcaccagatttaaacccagccttgttttgattacaacatcaaaacaaggctgggtttaatgttgtaatcaaaaaaaagttttacatgactttgaatgttttcaag

SEQ ID NO: 103339 - DNA, 400 bp, Arabidopsis thaliana columbia
gaaccatcggagaagaggaagaagatcagtgtagagctatcgggaaatttatctgaagaggaaactgaaattgagatcgaagttttgagtttgggtaaaaaatggtaggaggagtagaagaattgagtattgaacagttagcttcgagtatctctacctacaaagaacaactcgaacaggttaggcagcttttgtcagaggatcctaggaactcggaatatgcagacatggaaaaggagcttaaagaggtgtgcttatatgggtcatgatggccagcctgcttctatctcctgatttctcgtgtttgatccctgaagttctacttctgaaaatctttactgatatattgtgtataattgctagaaatcctcaattctctgaaactttgtttttgcaccat

SEQ ID NO: 103340 - DNA, 268 bp, Arabidopsis thaliana columbia
caatttttccagtgatttttcttctcttcagccaaatgaattgagctcacaaaactgagagagtgagagattatggcgatgcctttggaaatggcgatgcttttgacgaaaacggtttggtttgctctgagcggctggattttaacatgtttgtccatcgccgacgagattgctggttcactcagaaaccgagaagttggtcctcctttacatctcgcatgatcacatttacattcttcacctctttcctagctcctactcgattttc

SEQ ID NO: 103341 - DNA, 391 bp, Arabidopsis thaliana columbia
ggaggggtttggtgttgctcatattttacaagagatgcttacttataaatctgatcatattagagctcgccaagaagtacttggtaccactatcattggacgaacaatacctaaaccagaagatgctccggaatcttttcgattacttgttcgagaactacgatctttggctctggaactgaatcatttccttgtatctgagaagaatttccagattaataggaaggaagtttaatcggaatgaatcacaaaatttcttatatgatcgatcggtataaacatcaacaactccgaattggcttagtttctcctcagcaaataagtgcttgggccactaaaataatacctaatggagagatagttggagaggtgacaaaaccctatacttttc

SEQ ID NO: 103342 - DNA, 393 bp, Arabidopsis thaliana columbia
atacacatcacttatcaatggtttttgttgccaaggagacttcaaaatggctgaagagactttcaaagagatgcaattgcgggaccttgtgcctaacgttgtcacctacacaacacttattcgaagtcttgctaaagagagtagtacccttgaaaaagcagtttactattgggagctaatgatgacaaacaaatgtgttcctaatgaagttaccttcaattgtctacttcagggatttgtgaagaaaacatctggaaaagttcttgctgaaccggatggttctaatcatggacaaagttctctgttttctgagtttttccatagaatgaaatcagatgggtggtcggaccacgctgctgcttacaattctgcccttgtttgtctctgtgtaca

SEQ ID NO: 103343 - DNA, 253 bp, Arabidopsis thaliana columbia
gcacgttttctcgcggtggctttgtttttcccaacgttggacaaagacatggaagaagagcacataatcaagaagcaacctatggttatgcctatatgtgaaccggttcggtttgaagatacacttgaaacattccttgacccaaacagccaactctaccgggaatttgttcctttcggttcggttttcccaacgtgtgatggtattattgtgaatacatgggatgatatggagcccaaaactttgaaatctc

SEQ ID NO: 103344 - DNA, 205 bp, Arabidopsis thaliana columbia
accacaagtggtaattgctgatctcgttgatgatctcatggtgttaaagctaatgcattatgatcgctagattctctgcattggtcacggatcggattcggctgtttcacggtttaaagacatgggtttctcagttgttcaatgggttcctaaacatccattgttttccattttcagtatgaagcatgtcatcgaacttgatctt

SEQ ID NO: 103345 - DNA, 354 bp, Arabidopsis thaliana columbia
cacttctctttctaaaacctctggggttcttgttaaagatgatgtctttgctcccaaatcccgacccgattactgtacccctggtcctcaagctttgctcctttcctccgccacggaggctcttctctctcaggctcaggcgcttcacccgaaagtcatcatctcttcttccgttggtcgctgtttcgtctctctccgctactgccgcaaaacctaccagatggagagagaagccggaattggcggaaagcgactcaatttccctcctcaacgagaggattcggcgtgacctcggcaagagagagactgctagaccggccatggactctgaggaggccgagaagtacattcaca

SEQ ID NO: 103346 - DNA, 327 bp, Arabidopsis thaliana columbia
ggcggccgaaaacgataccagatgatgacgacggcgaactttcacagttcaaaggtttcgatgtcgataacgatttcgctaagagattgttgcacaacaaggaacgcgaggatcttcagcgatacgaagagaagaataagcaaggtctcttcagcgagtccgaggaagagcctgagacggagtctgagccggattctgatcttgggaatccagaaagcaatctcaaattcgttgatttgttgattaaggtaaagaaaaaggatcctattattaaggacaaagatgctaagttctatgagtatgatgatgagagtagtgaagaagatg

SEQ ID NO: 103347 - DNA, 125 bp, Arabidopsis thaliana columbia
tcactgcatctgcctctaacaaagagtctattggtgatttagaatcagaaaaacaagaagaagttgagcttctggaggagcaaccttcagtgagtttagctgtgagatctacacgtcaaactgaa

SEQ ID NO: 103348 - DNA, 342 bp, Arabidopsis thaliana columbia
acggacgcgtgggctagttctagatcgcgagcggccgccctttttttttttttttttttttttttttaacatgaaaactaatttcaaggaatcttgatttgaccacttacacatacagcacatattccgaatcaaatcagagacattacatgattctcatagagaaacataaacacttcacaacaactactaatccacacctctttttagtttaacttatttatcaaaagacaacaagacgatacaaacaaacaggaccaatgagtctgttttgcttcatcaggcagccttactaggcttttttttgtgaagctgcagatctaatggcggtttttgcaagcg

SEQ ID NO: 103349 - DNA, 409 bp, Arabidopsis thaliana columbia
cttgctggtggtgataatacgcaagagaatgctagactcctaggctcgcctccacctcactacaggacagagcccacgacaccgatatacgccagtccctcacctatacacacatccattcatcctttggagtcgactgctgggggagcagggtggggagacgcccaaagcgagcaagaacgagaaagaccaatcaatggtaccgcgatgtacctctcacctaccttcacatcatcaccactcgctgcttcgatttacgggtcaccgacgccatttttaccaacacacatccctggatcgccgcagattctttatccgcaggctagtggacatgggcaggtgttctcgcctccgcctccgtcgccactgttgaggctctcgccgttaccctctgctggtcatgtgaatc

SEQ ID NO: 103350 - DNA, 342 bp, Arabidopsis thaliana columbia
gagcaaatacgtggatctatcgagtgaagagagtcatagatactatcttgcgcggcgaaatggcttgcagatgctccgagacagaggctacgaagtctccgacgaagatatcaatctctcccttcacgattttcgaactgtttacggtgaacgtcccgatgttgatcgtcttcgcatctccgctctgcatcgctccgattctaccaaaaaggtatatcgaagtattttcgtattcgttgtgatttttcgatttctagctgtttttttgtctttgcatgttgtggggtttactgtttggcagtgaagaagatgatggaatatgaaatttgtgactcttttaaa

SEQ ID NO: 103351 - DNA, 99 bp, Arabidopsis thaliana columbia
atattattcttggttattgttcttgagtactttagactcaaattcgtgaatctgaatttatgtttcacgttttcaccaagtaatggcaatttcttgagt

SEQ ID NO: 103352 - DNA, 303 bp, Arabidopsis thaliana columbia
agtgttacaatttgatggtcctctcggattctataaaggaaatggggcgagtgttattcggattattccatatgccgcccttcattacatgacgtatgaagtttatcgtgactggattttggaaaaaaatcttcccttaggttctggtccaattgttgatcttgtggctggttcagctgcaggtggaacagcagttttgtgcacatatccccttgatttagctcgtactaagctagcttaccaggtttctgacacaagacagagtctccgaggtggtgcgaatggattttaccgtcaacctac

SEQ ID NO: 103353 - DNA, 405 bp, Arabidopsis thaliana columbia
ggaaactaagctttcaattgccaagaaaatctttgacatagagaaagaccagactttgaactcaagcaccttccagaaattcttctctgaaaacgagggctggttgaaaccatatgcagctttctgcttccttcgtgacttttttgagacttcagatcatagtcagtgggggaccttttctgactatacagacgacaagcttgaaaaattgatatccaaggacaacttgcactataacactatatgcttccactactacattcagtaccatttacatgtacaattgtcagcagcagcagaatatgcaaggaagaaaggagttgtgctgaaaggagacctacctattggcgttgacagaaacagtgttgatacgtgggtttacaggaatctgtttcgcatgaatac

SEQ ID NO: 103354 - DNA, 365 bp, Arabidopsis thaliana columbia
ctctctggcttgttcgtgcaaccgctcgttgggcatagtagcgataggtgtactagtaagtacggtcgtcggagaccgtttattgtcccccggagctgttgggaatttcaatctcggttatggttattggtcatgcggcggatattggatgggcatttggggatagagaagggaagattaagccgagggcgattgttgcttttgttttagggttttggattcttgatgttgctaataatatgactcaaggtccttgtagagctctccttgctgatcttactgagaatgataatcgcagaacccgagttgcaaatggctacttctctctctttatggctgttggcaatgttcttggctatgctact

SEQ ID NO: 103355 - DNA, 436 bp, Arabidopsis thaliana columbia
atctctctcccaaaaaccaaaacgcaaaacctccgataatgtccggcagtctaggtttaacgccggcatccttaaaggcatctggccggagctccgagaatgtcagtcttcttacccttcaaggtaaaatcaaacgtgacccagaaggttacgaaacagagctccaattgatttacaaacagttcaaaacctccgtcgatctcttccatgaactagcagctctcagtttctcctccactggtggcattggctctgacccttctgtttcgaaagacctcggcgaccgtgccatgtttctagctcacgttactcccttttacccgaagcaactcgcggcgtttccagctcaattaactggtttactccgtacttcgtgcttagctatgccctcggggcttcgaaaccatattgcacaagctctgatccttctaatgaa

SEQ ID NO: 103356 - DNA, 164 bp, Arabidopsis thaliana columbia
ttatcttgaatataaaggccatacaggggctgttacttcaatatccactgatagttctggcgagtggatagcctcaggttcaactgatggatctgtccgtatgtgggaagtggagactggtagatgccttaaggtctggcagtttgacgaagctatcatgtgtg

SEQ ID NO: 103357 - DNA, 429 bp, Arabidopsis thaliana columbia
tatcttgtacccggacgctaattgtgcctaagcgtatgaagcagcctatctacgtatattaccagcttgagaacttctaccagaatcaccgcaggtatgtgaaaagccgaagtgattcgcaattgagaagtgtgaaagatgagaatcaaatagacgcatgcaagcctgaggatgattttggtgggcagccaattgtgccatgtggtctaattgcttggagtctctttaatgacacatacgttctatcaagaaataaccagggtttaacggtaacaagaaaggaattgcatggaagagcgacaaggaacacaagtttgggaaaaatgtgtttcccaagaactttcagaagggcaatctcactggtggtgccagtctagatccaaataaaccattgagtgatcaagaggatctgatcgtgtggatgaggac

SEQ ID NO: 103358 - DNA, 416 bp, Arabidopsis thaliana columbia
  unsure (1)..(416): unsure at all n locations
caataattattcttctctttatctctcttttcctcttaaccatccactaatcaaacactaaaacctagaaaaaaaaaggatcaaatcatggagacggaagaagagatgaaggaaagtagtataagcatggtggaggcaaagttgcctccgggattcagatttcacccgaaggacgatgagcttgtctgcgattacttgatgagacgatcgcttcacaataatcatcgaccacctcttgtcctgatccaagtcgatctcaacaagtgtgagccttgggacatcccaaaaatggcatgcgtgggagggaaggattggtatttctacagccaaagagaccgaaaatacgcgacggggctgagaactaaccgagcaacggccaccggatattggaaagccaccggcanagacagaaccat

SEQ ID NO: 103359 - DNA, 354 bp, Arabidopsis thaliana columbia
cgaattcattaatttattatcttcttcttcttcttcgaccttccaaaactctctctctctctctgtcgtcaacaatggatagtccgacgagcatacgtagtaaaccactaccggagactctttctccatgcggtagtcaacgacggagaagcagctgcgactctaacccacctgagttcgagttctggcgtttaactaactcttcatttcctcaagctgattcagatctcctctccgccgacgagctttttcacgacggtgttcttctccctcttgacctcctctccgttaaatcagagcttcagtccgacccgaatatcgcagaatgcgaaccggattcatctccttcgactg

SEQ ID NO: 103360 - DNA, 423 bp, Arabidopsis thaliana columbia
aacacttgcttctctttattaacttcaaaataccccaaacttaaagccgaatcaagaacatgtccgatcaccagaaaattcatccggtgagcgaccccgaagcgccgccacatccaacggctccccttgttccacgtggttcctcaagatcggaacatggtgatcctaccaagacacagcaagcagcaccgttggatcctccgagggagaagaaaggatcaagaagttgttggtgcagatgcgtgtgctacacgcttcttgtcctctttctccttattgtcatcgtaggagcgatcgttggtatactctaccttgtatttagaccaaaatttccggattacaatattgaccggttacagctaacccggtttcaactaaaccaagacttgagtttatccaccgcatttaacgttaccataaccg

SEQ ID NO: 103361 - DNA, 393 bp, Arabidopsis thaliana columbia
gcgtccggatcaaagcacgagaacagcaattgcagcaatctcaacacccacaagtttcacagcagcagcagcaacaacaacaacagcagattcaaatgcaacaactcttgttgcaacgtgcacagcaacagcagcagcagcaacaacaacaacatcatcatcatcagcaacagcaacagcaacagcagcagcaacagcaacagcagcagcagcagcaacaacaacatcaaaaccaaccaccttctcaacagcagcagcagcaatcaacgcctcaacaccaacagcagcctacaccacagcagcagcctcagagaagagacgggtcccaccttgcaaatggatcagcaaatggactcgttggtaataacagtgaaccagttatgaggcaaaatc

SEQ ID NO: 103362 - DNA, 317 bp, Arabidopsis thaliana columbia
cccacgcgtccggagtagctgaccctacttttctgggatacttcatcgacaaaagtgcagcttcagctgcaaaagtagtgcgcaaggcatatccacaggaaaaagttggagtatttgtaaggaggggaaaaggtgggcctttgactgtagttgagtacacagagcttgaccagtctatggcttctgcaactaatcaacaaacaggacgtcttcaatattgctggagtaacgtaaactcctccctctttataagttttcgaagttatacttagatcattatttccggtactattgcgattgttccatttttgtgcaac

SEQ ID NO: 103363 - DNA, 335 bp, Arabidopsis thaliana columbia
atttggaacaactctccttcttcatcattttgtgaaatcaaatataaagtgttagtgttttttggtgaaaaacctaaagcttctttctttctcttctttatatttcgataaaaggtcattgagctattgtattttcaatcttagatttctatgttaataagctcatttgagcataaaccattcatgttttagaaatgtcttcatggtatcagagcctaggcgattgatttgggtcttattttcacaagcttctagcttccgctcttctggttttgcgtttcttggcgtcagagcttgtgaatgaaaacgccaaggtgttgcaaacgtcgctattc

SEQ ID NO: 103364 - DNA, 323 bp, Arabidopsis thaliana columbia
tccctctccacatcaagaagaagtctctgctagttccaaaacagaacaagtgaatccctcaagtttcttattacaaaacccaaaaaccaaagtgaaccagtgttgttgtttgtactcacagatccattctccactgattcatttcttgctctgcttcttctctcttagttttgttaagaatcttctcttatccattgtgttttttctattttataaatacatatataattttagttgggggagagcttgcctggtgtcgccttcttctctctctaagacttgtgcttaatttacggacatgtgaagatacttcgcttttgcct

SEQ ID NO: 103365 - DNA, 379 bp, Arabidopsis thaliana columbia
gacagtgttgtttcaagagcttcaagactctcatgggctcgttctctaagcgtagcatcatccaccacttcagacccaactcgccggtccgagtttgactcagactggagtttctcaccggaaagacttacttttcccaagccattaagtcaacgttggatcggtggacttgttcctgagaatgatctaaaggtgtttactttcaaagagctgaaaatagctactaaaggtttcaatagaggtcttttgattggcgaaggagggtttggttgcgtttatagaggtgttgttgatgtttcagactctaatggttttgattcgaagattaatgttgctgttaaacagcttaatcgtcaaggtttacagtgttcaggggcat

SEQ ID NO: 103366 - DNA, 313 bp, Arabidopsis thaliana columbia
ctcagcgtcggctgcttggaacgtcaccgttttctggaaaacgcaatcttctcccttccgtgacgtctcaccggaattttctcgcttttgtctactctcctccatctccgaggttctccaagctcagctcctcttcccatcattcatccgaccgccttatccggagaactacaaagaggaaaccaagattgttttgttttgttagactctaccccttttccgattcacatggtaaggacattgaggtagagaataatactaaaaagcaatgggagatgggagttccagtagatccaacagctcaaacagcact

SEQ ID NO: 103367 - DNA, 349 bp, Arabidopsis thaliana columbia
caacaagaattgagtacattgtactcgtttgcaactcattgtgtgaggtctcgaatcctttgctcattttgatttcaaataaagctttctttcccttaattcttagattttgagatgggttggctgaggaagaagaagaagccaaaatccgatatagcgtccgagagaggggccaagttgttagaagagctcatcgaatgttgcgatggcaaatccaatcccatcaaattcttctctgctgatgagatcctcaaagccaccaacgatttcagcgactctaattttgttttacgattagaagttcccttcaaatggtattctggtaagaacgagaatcatcccatgatac

SEQ ID NO: 103368 - DNA, 304 bp, Arabidopsis thaliana columbia
attaattcccatccaatcatatggctgaagccggtgacgagaatctttacgccgccgccagagacatcgccagagctctcggcaaggatccaagtgccgccggagatatcttacagattctctccggttatggcgcttccggaaagcgcggcggagatcctcgacccatcccatcccgcggcggctcaaacgtcaactttgaccgagccctcagctcgttagagagacagatctccagctacatcgtggcagatcgaccgattctggtctgatcccgttgactcgcgcaccttcctcgactctg

SEQ ID NO: 103369 - DNA, 387 bp, Arabidopsis thaliana columbia
agcttgattcttgttttttttttttttttgccagcttcgttccaagaagagtatcaaacgcgtagaatccaccaaatcaaatccatggtggtgggatagtcatatcggtctcaaaaattctaagtggcttgagaataatctcgatgagatggaccggagcgtgaaacggatggtgaagttgatagaggaggatgcagattcttttgctaagaaggcagagatgtattaccagtcaagacctgagcttattgctcttgtggatgagtttcaccgtatgtaccgtgctttggcagagcggtacgagaacatcaccggagagttgagaaaaggctctccttttagagcttcagtcacagggctctggtctttctgacatctctgcttctg

SEQ ID NO: 103370 - DNA, 257 bp, Arabidopsis thaliana columbia
cggacgcgtgggttcaggaattggtaatggcggctatgtcagcggttctgtctctgggtttaggaacactccgcccttcgcatcgttccttgtcctgtttcgattctctccggcaccaccagacatcttttctccgttgccaccaaagtctcatctctagaaatacgacgaggtctccgctcaacaagattcttcaggcttgccttcaatccaattctgcaaatggtgatgctttggtgtcatcatccgatgaaagt

SEQ ID NO: 103371 - DNA, 402 bp, Arabidopsis thaliana columbia
cttggaatgcgcgtgttaaagtggctcttggaactgccaaggctttagagtacttgcacgaagtttgcttgccttcaattgtccatagaaacttcaaatcagcgaatatattgctagacgaagaacttaatcctcacctatcagacagtggtttagctgctttgacacctaacactgagagacaggtttcaactcaagtggtaggttcatttggatacagcgctccagagtttgcactgtcgggaatttacacagtgaaaagtgatgtatacacttttggagtagtcatgcttgagctcttaactggtcggaagcctcttgacagctcgaggacgagagcagagcaatcactagtgagatgggcaacaccgcagcttcacgatatagatgctttgtctaaaa

SEQ ID NO: 103372 - DNA, 385 bp, Arabidopsis thaliana columbia
atccactacaaaagatcataccgagatggaaagggccttcgcttgataagaaccccgagtttctcaataactatcatgaacagcgtgaagcactgttttctggaaaagctgcatctgtatctcctgtgaaatatgaagaacagagctctcatcaggaattatcagagtctgcttcctctgagaacactctcaccccttcatcagaaattacctcaagccagccaaagattgttgtagaaggaagtgatggatctgttagacctggtaaaaaatcaggaaaggagtactggcagcacacgaagaagtggtcacgtgggttccttgagttgtacaatgcagagactgatccagaagtgaaagctgttatgagagacatgggaaaaga

SEQ ID NO: 103373 - DNA, 376 bp, Arabidopsis thaliana columbia
  unsure (1)..(376): unsure at all n locations
gttctctccatattctcctctttagaaagagatagagagagtcttgtttttttcctgtcttgagtgatatttttttcagagccctgagttgttgtctccattaatggcgtcagagaaatctacctccaagggccaagcatggttttgtacgactgggttacctagtgacattgaaatcgaagttgatgacatgacattccatctccataagtttccactcaagttcaaagagcaggaaacttcacaggttgattacagagcaagagactagatcntcctcttccatggcgctgataactgtaatagacccaaaagtagaagagactgacaagaaaggtaaaggccatgaaatcgaggacgataaagaagaagaaga

SEQ ID NO: 103374 - DNA, 400 bp, Arabidopsis thaliana columbia
agcagcaatgtccgaatacatctccaaagtaagcaataagcaaaggaaaatgaagtttgtttccgtcttcctcgttctgtttatcttcttcctcgtcgttcttgaggccccggagaagatagaagccaaagacgacaagttcatatgtgtggttgagtatggaggagacgtgggtccaacgttctgtaaccctaaattcttccccacgttgtgccgtcaaaactgccggagcttcaaaggtgccaaaggcggtaaatgcgtgaagcaacccaaacacaaacatatcaagtgcttctgcgactactgtaaagacgactagacttcacagtaaagtaccaaaccgctggtttcagcttcaatcgccaaacgcaaccgtcccctacggccctaagtgtttgta

SEQ ID NO: 103375 - DNA, 373 bp, Arabidopsis thaliana columbia
cgagtcgctaatcaaataaacctaaaccctagatcgtgatcggcaacggcacctcctcgtcggcgatagcttctcttccactaaaagaaaatcctcttcggtattcttcttcctctaatcaatctctctctccgtttcggattctcatctccactcgatgactagaaacgtctcgatctgttttagatttgacaacgattcatgattctgattcgttcattgatttgattctctttgattttgtgttaactctcgtttataagcttagatttggttctcgtctctgattctgaatcgttcttgtagtgatttgatttatcatataagcgtagaagaacaatttgtgtttagttgaatttgatttttgttatgt

SEQ ID NO: 103376 - DNA, 358 bp, Arabidopsis thaliana columbia
cggacgcgtgggcggacgcgtgggcggacgcgtgggcggacgcgtgggcttaagctttatttctccgttttcgttttgtctttctttatcgtctcggtttcgtcgtctgatgtcaacgacggcgatgatctcgtgatccgtcaggtggttggtggagccgagcctcaggttttgacctcagaggatcacttttctctcttcaagcggaagttcgggaaggtctacgcttccaacgaggagcatgactatagattctcggttttcaaagcgaatctcaggcgagcgaggcgtcaccagaagttggatccgtcggcgactcatggtgttacgcagttctcagatctgactcggtctgagt

SEQ ID NO: 103377 - DNA, 293 bp, Arabidopsis thaliana columbia
ggaatccattctgcaaaagaatctccagccatgcacatcacagacctaactgtgtcggcagctaagatagctaaagatttcctgccatccctgcaaagaatcaggagaatacccgctgttgtggaatatgtcctcagcggacatcggtttaagctttatatcccaaagataacatgtagcatagccttttcaatcactggtgtcagatgtcctgagcgtggcgaaccttattcagaagaagactatctctgtaatgagacgtaggatcatgcagagagatgttgagattgaag

SEQ ID NO: 103378 - DNA, 189 bp, Arabidopsis thaliana columbia
cccacgcgtccgcagagccaaacaggatctgctcttcacaattcggcttagaggaagcaattggattggccagtcccaaaataattcttttgttcttttgttataattgattgtgatctatccagaagctcttttgtaatacagcttgtaatatacactgcaaatataatttccttaaggtattcgttt

SEQ ID NO: 103379 - DNA, 366 bp, Arabidopsis thaliana columbia
aagaatttggacagtctcgaatcgcatttgttacatttactgatcccaaagccctcgaaattgccttgttattatcgggtgcgacgattgtggaccagattgttacaataacacgagctgaaaactatgttcagaggcgtgagacacaggttttgtgttgttttgaaacaggtttttactcaagtccggtctatttgatgtcttagtttctgttcatgtaggaagtaagaatgttggacaacgcgatgcctcttggtcttcaagagagtactacacagactaaaacgaacatggatggtaatagtagagcatacgttagcaaagcacaagatgtggtggcaacggttttggcaaaagggtctgctc

SEQ ID NO: 103380 - DNA, 278 bp, Arabidopsis thaliana columbia
gttttcttcttcttcttcagcttctaatcgaattcgttatcgaattgaaagtttcgacctttcgtcgttgtccctcaatacgctctattcttttgattagcatccctaaaactaaaatcgcagagagaatttctccgtttggatctctaccaaattggggcgcttttgggaataatgccaccgtttatgtctggtctcagagctgtatcttccttactttcatgtcgaaacgcgattagcaggaaactcgttagtcgttctgggatccctcgagggag

SEQ ID NO: 103381 - DNA, 280 bp, Arabidopsis thaliana columbia
gaaagaaggtgaatcaaaaaagcaggctgataggtttatatagcaatgtctggtaacaacaacaatccacaaaagcctcaaggctctgcgcctttgccttttgggaatcctgggatggcctctgcatctgttcctggaaaccaaggttttgctcagtctcatatggcagctaactttcaagctcagtttcagttctctcaagctcaggccctagcccatgctcaagcacagtctaaagttcaagcacaactgcaagctcagttacaagctcaaggcatga

SEQ ID NO: 103382 - DNA, 277 bp, Arabidopsis thaliana columbia
gttcctctctaagccttctagtctaacaattttctcaagctttctccaattcaattaaaaatacttaccaaaatggcaatcaatccattgattctcttaaccatattcccactcttccttctcttgagcttcaccgacgccggaatccctagagtcttctcaggtggttcttggcaaaccgctcacgccactttctacggtggaaacgatgcttcgggaacaatgggtggcgcgtgtggatacgggaatctgtatagccaaggatacggaacaaaca

SEQ ID NO: 103383 - DNA, 379 bp, Arabidopsis thaliana columbia
accacgcgtccgcgattccacaatgggtgaccttgttgccgagcgtcttcttgttgaagctagcaaaatgcgggatcaagatgagcttagatgattggaagccagcggaaccgttgtactaccattacattgatttgtcgaaaaacgagatctcagggagtctagaaaggttcttgaacgagacgaggtatctgcttgagtttcgggcggcggagaacaaacttcgattcgatatggggaacctaacgtttccgaggacactaaaaactttggatctgtcaaggaacttggtatttggtaaggtgcctgtcacggtggctggtctacaaagactaaacttaagtcaaaaccatctttgtggagaacttcctacgacaaa

SEQ ID NO: 103384 - DNA, 382 bp, Arabidopsis thaliana columbia
attttctccgtcactgagtaccttgcctctcgagctcccaatcttaagtagaggattgagcttaaggcaagatgtcgtaaaaccgccgcgtctctgctgaccctcctcttctcatttcatcgacgggagaaaatcccataccatctgagatttccaacagtgaaattaagatgtcaacaggaatatccactgatctccatgtccattttggagctctaaatttctcaaaaacctacaaatctggtttaagcaatcgaacggtgtctttttcgagagtcgggtatgctcagaacaggaaattgagctgcagtgtttccaacacagagaatgtagctcctaaggatgatgaaagaggaaaggatagacctttggttaagatgtg

SEQ ID NO: 103385 - DNA, 281 bp, Arabidopsis thaliana columbia
ggcctaagttcatctgcaacatcaggaacgtttttggttgaggatggtccatattactattgcatgcttgaaatcctacttggaaggctatctggatctctatataaccaggccttgaaaaagatatcaaagtttgttcagacaaatatccttcctggtgcaattgccgaggttgggttgctttgttgtgcatgtgttcattcaacccccgaagaagcagttgctcaaattgttgaaccaatgctccttgctgttatatcttctctgaaagaaatccctgt

SEQ ID NO: 103386 - DNA, 280 bp, Arabidopsis thaliana columbia
cccacgcgtccgtcccactctctctctcgtttgcttcttcttcatcgtttcacccactcacttcattctctctctaaaaccttcactttctctatctatcttcaaaacaatgggaaacctgtttgacagtagcaagactttatggggaaacatgaaccatggatcgtcacgttactctctaaacggcaaaatcatgcttgcttccgtcatcatcctcttcgtcgccgtcattttaatcctctgtttccacagctacgctagatggttattccgccgtcaa

SEQ ID NO: 103387 - DNA, 386 bp, Arabidopsis thaliana columbia
atcacacagcacgatcttggacgtcgttttaagcgcaaaacaaaggaaaaagactgacgtttatacatactaaatactggtttggagttttgccttttggactcagaaaactcaaaagagagagagagacatttctgtatcttatcgggttttgtgttgtcagaaagaagctcaaggacaaaaaaaaaagcaattatttttagggttcaaacgaagcaaaatttggaactttcagaagttgtgggtggtggcttcttgaacaataaagctttttcttagactcttcttccaatttgtgactctacctatctctctctccacgctggaatgatgatggagaataagcggaatgtctgctctctcggagaaagcagtatcaaacgcca

SEQ ID NO: 103388 - DNA, 280 bp, Arabidopsis thaliana columbia
cagaagcttgatactgttcttaagcttctccctcttgctcgccaccgacggatactcctccagcatcttctcaactactcctccactacttgaattcaccaattccgccacgatctcctcatgtaattgaatgttcacaagatgccgacaatgtcaccatcaatcaaacttagcagtggatgagtcctgaagattactttctgcaggagaccttcaggagccatgtcagcctttgtcacaacagccagagtccgttcaccagttttgtcaacttgtcttg

SEQ ID NO: 103389 - DNA, 365 bp, Arabidopsis thaliana columbia
acacaccggtgttgatctcggcgctaactttcacaaccgcggttttcttgggtgtcaagcttgatgcaggaacggttttcaccacaacgacgattttcaagattcttcaagaaccgataaggacgtttccgcagtctatgatctctctttcgcaggctatgatctctctcggaagactcgatgcttacatgatgagcagggagctatcggaagagactgtggaaaggagtcaagggtgtgatgggaatgtcgctgtggagatcaaagatggaagctttagttgggatgatgaagatgacgagcctgcaattgaaaacatcaactttgaagttaagaaaggagagctcgctgcgattgttgggacc

SEQ ID NO: 103390 - DNA, 305 bp, Arabidopsis thaliana columbia
gaaaaaaagatggacgataaaatagataaatattttttttcttttgcacacccaaaaattgcagaaaggtgcgacatattcaaatatcacctccgtcgtcatcggcttccattgattttggcactactacaagagacttacgttcttcttcattaacttcttctctttctgaaaccctaagatttttggttggattgtcttgtcgttctactgttttccttagctgctcctcaaggtgaaattgggtttctgtagctttttttctccgggaaaggtttttcttttttgaagatttcatgcaaatg

SEQ ID NO: 103391 - DNA, 251 bp, Arabidopsis thaliana columbia
atgtcaccggcgatttgtgatttccggtgagtcgacactccgttaacgtggaattcatcaataggagacgttgcagcaccatcggtgaacgaagaaaaaaacaattgttaatttggtagtcccatccgaagtaaaatcgatcagctccaaaatatttcccagataaagagccaatgatgattgaaaaagactgcccacattgtttgattcaccactgatatgaattctataaagagctttgtaagaagaga

SEQ ID NO: 103392 - DNA, 370 bp, Arabidopsis thaliana columbia
actcaatattttatctcccccaaagtccaattttccaaaaaatccaaaacacacagagagaaaaaaaactgaaacatcccaaatggatcatcatcttcaaccataacaacacgaaacccttcttctccaaaatccccaaaaccttgaaacaaagtctcaaaatttcacttcgtggatccgaatgtctcagaacccatcactcttcttcctcttatgtctagggttaggtttttgcgttgacctgggtcaatccctgaaagttcctttcagcgttaacgatgttcttccgatgctacctcgtcaagtctcatggcctgttttgaacagtttccacaacgctgtggatttgttgccggtttttattgggtca

SEQ ID NO: 103393 - DNA, 378 bp, Arabidopsis thaliana columbia
gtttatatggaaaacaagaccatccgaccgcggaatgcgtggcaaaggagtctcaacaggtacattcgtctgcacaactcaatcccctgaagaagatcatctcagtacaatcgcgtgtctaaaaaacctcgattcgagtttacacgcaatgccaaacatcgaacaaatccatgctatgattcaacactatggtccaagagtttacttccatcctaatgaagtctacctaccttcttcagtctcatggttcttcaaaaacggtgcactcttatgcagcaattcaaattcctctgttatcaacaatgaagctatagacgaaaccggctcgaatctacctcatggcggaaccaacgataagcgatattggatcgatttacc

SEQ ID NO: 103394 - DNA, 325 bp, Arabidopsis thaliana columbia
aagtacgtacccaagtcccaatattgttaattgtctctgagagttataatggctccagtcggattacctccaggctttagatttcatccgactgacgaagaactcgtaaactattatctgaaaagaaagatcaacggtcaagaaatcgagcttgatataattcccgaggttgatctctacaaatgcgagccatgggacctcgcagagaagtcgtttctaccaagtagagatccggagtggtatttttttgggccacgtgaccggaagtatccgaacgggtttaggacgaaccgagcaacgagaggtgggtactggaaatcgaccg

SEQ ID NO: 103395 - DNA, 354 bp, Arabidopsis thaliana columbia
aggacgcgtgggcggacgcgtgggcggacgcgtgggaaatcttagacgttttacgttgtgctgcactactcaacctcactggccgcctcaccactggctctcccttcgcctgccttcgctcgtaatgccgtccagcatttccccgcggcatctgaagtccttgatagcggtcgtgtgaccatgacgaagactgttgcgaatccaaagggttcatcaggcaacccatggtacggatctgatcgtgtcatgtacttgggtccattcgctggcaattcagcgacctacgttaccggagagttccccggagactacggatgggacatcgccggactttcagctgactccgagacattc

SEQ ID NO: 103396 - DNA, 345 bp, Arabidopsis thaliana columbia
aatccaattaatggggttgatcttgccacctctcggacctctcaacaactcacaagtctttgagaggtccgagaggtggcatgatcttcttcaggaaggatccaattaatggggttgatcttgaatctgccgtgaacaatgctgtcttccctggtttgcagggtggccctcataaccacacaattggaggattagcagtctgcttgaaacacgcacaatcaccggaattcaaggcgtaccagaaaagagttgtgtctaactgtagagctctagctaaccgattggttgaactcgggtttaagctagtttctggtggcagcgataaccacttggttctcgtcgatc

SEQ ID NO: 103397 - DNA, 397 bp, Arabidopsis thaliana columbia
attctatcagctgacgatgagttcttggtaaattgtatcttactttcgtgtcatatatatgcaactttgattgtttattagacggttgagaataataataggttgaatgtggtaggtaatggcaagcgacgggctctgggatgttatgaacgatgaagaagttattggtataatcagggatactgtaaaagaaccttcaatgtgttcaaagagattagcaactgaagctgcagcacgtggtagtggtgacaacatcacagtcattgtagtcttcctgcggccagtgtctacagccgaaaggatctactagtagtatccaattcttgcacattattattcaacattcaacttctttacatataaattaattcatgtgtgttatcaaaatgaaccttat

SEQ ID NO: 103398 - DNA, 374 bp, Arabidopsis thaliana columbia
cccacgcgtccgcccacgcgtccgttcccttctcccaatctcatcttctccgaaaacctttcttctctcaaatttctgtgaaaacatgtctgacgacgagcaccactttgaggccagcgaatccggagcttccaagacctatcctcaatcagccggtaacatccgtaaaggtggtcacatcgtcatcaaaaaccgtccctgcaaggtctgatttctatttcatcatcaaacatcgttctcgatctctttttcctgattctagatctcgtctctgtatagtagctccttgattttgtttttatcctcggatttgacctggttctgtttagtttgaatttttcttatagatcgctacttagatgaatatgatgaat

SEQ ID NO: 103399 - DNA, 353 bp, Arabidopsis thaliana columbia
acaaagagcaagaagaaggattctcgtgcaacgacgcctgcaaccaaaaagtctgaacaagctcctaagagccatcccaagatgaaacggatagcaggagaggaagtggagtccaatacaaacgagcttggtgaagaactcgttggtaagagagttaatgtctggtggccactcgacaagaagttttatgaaggtgtcataaaatcttattgtagagttaagaagatgcatcaagtaacatattctgatggcgatgttgaagagcttaatctgaaaaaagaacgttttaagataatcgaggataaatcttcagccagtgaggataatgaagatgatctgcttgagtctactcc

SEQ ID NO: 103400 - DNA, 370 bp, Arabidopsis thaliana columbia
gttgatgttagggtttcggctgtattctcaccgctgctgacggagacggcccgaatccgcaatttaatcttcgaggttcgattttagtgaagaacaagattcaatagtgatatgcagatctcatgtctcccaatttcgattccttcgatcactcctcgaacctcaattccactcttaccatcactctcctcaaatcctcgccgcattttcaacctcacttcacttcagagcccaaatcactgtttcttcaaaagattacataaatctcagactggtttcagcaatccagttttggctgccatgagaagagaagaagatgttgaagtcgatgattcgttttatatgagaaagtgtgtggagctagcaaaaa

SEQ ID NO: 103401 - DNA, 334 bp, Arabidopsis thaliana columbia
gaaaaaaagatggacgataaaataaataaaaatttttttttttttgcacacccaaaaattgcagaaggaagctatatatgttaacgttaccttctctgcaaatctccttatctcactctctcgcgtccatttttttttctcaattcgtcttcaaaaattcgttagatagagaagaatctaaaagtctctctcggtcatcggaatatcttcttctcaggaattcgacgagactattcgaaatcggaaatcgcgctttgaatctgaaactcagaatttagaggacgcttactccaaagaatctagggtgttaactttctaagaaagggagtttgtt

SEQ ID NO: 103402 - DNA, 358 bp, Arabidopsis thaliana columbia
gctcaactctttaatctccggtggtgtaggaggaggagatgaagctggagatgaagaagttacagatactgaatggttcttcttagtttcaatgacacagagctttgtcaagggtactggtttacctggtcaagctttctcaaattcagacacgatttggttatctggttctaatgctttagctggatcaagttgtgagagagctcgtcaaggtcagatttatgggttacaaacaatggtgtgtgtagcgacagagaatggtgtcgttgagcttggttcgtcggagattattcatcaaagttcagatcttgttgataaagttgacacctttttcaattttaacaatggtggtggtgaa

SEQ ID NO: 103403 - DNA, 311 bp, Arabidopsis thaliana columbia
cccacgcatccgggcaaagaagacacttcgctgaagcttttttttccaaaaaaatttcttagtgtcgtcaatggctttggctccacttaattttacggaaatgccactgagaagctctcttcctctgacctctagctctcgctattgttcctctccttcgcttcacgcattgctcttctattcgttgggtgtgaaaccctcgcgtcaacaaattgttcggccattctcttcgctgcgtacaagcgagcgtagcaacaacaggagcaataacaatcgtcgattagatcaacgtaatcataaacctactcctc

SEQ ID NO: 103404 - DNA, 416 bp, Arabidopsis thaliana columbia
ggcgaatcatccactatcttcttctcgatccaaccgaccttttttcgtcagatcacttgctggacacacctcaaatctaataattcctgatgagtttttcactgctcacttagagggtaaaactggcttaacgaaattgaaactgacttctgatgcttcggatagaatctgggatgtgagactgaacggccggagattcgccggcggctgggatgatttctccgccgcacactgtcttcgagacgacgacgttttggttttcagactcgacgtgaagatggttttccacgtcacaccttccggacgcagtttctcacagatacgtacatcttctagctccggcgactacgacagtgatgatgatgatgatgaagcaagggacgatgattcagattcgaagaacatttcgttgaaga

SEQ ID NO: 103405 - DNA, 337 bp, Arabidopsis thaliana columbia
gcacttgcttaccacaaggagatgaagctacttggacagatgctttactatgttcttacgacaggttcagggcaacaaactttaggagaggaatattgtgacattatacaggttgcagggccttatggactctctcctacaccagctagacgtgctttgttcatattgtaccagaccgcagttccatatatcgcagagagaattaggtttcgtcgcatttcttattgttgttttacaaagaacaatttgaatcttgtccgctgatattgatataattgtctacagcactcgagctgctacgcaagcagtcacctttgatgagtctgatgagtttttt

SEQ ID NO: 103406 - DNA, 403 bp, Arabidopsis thaliana columbia
aaaacactctctataatggaatcgaaaaccataaacgacgtcgtcgtatcagagtcaaatcacgagttagcatcttcgtcgccatcagaatttgagaagaaccagaaacattaccaagaaatcatcgcaactcttcctcacaaagatggctggagaccaaaagatccgttcgttgagtacggtggtcactggtggctacaacctcttcttgaaggtttacttcacgcccagaagttcttcaaggcacgtcccaatgatttcttcgtctgcagctacccaaaaaccggcacgacttggctcaaagccttaactttcgcaatcgcaaatcgctccaagttcgacgtttcaacaaaccctcttctcaaacgtaatccacacgagtttgtgccttacatcgaaatcg

SEQ ID NO: 103407 - DNA, 352 bp, Arabidopsis thaliana columbia
cgcgtcagcttcaccttacttagtcgacaaagacggtgtaccactcgacgtctctgccggttcattcatcgggtttaacctcgacggagagcccaaaagccaccacgtggcatccatcggaaaactcaagaacattcgtttcatgagcatattccgtttcaaggtttggtggactactcattgggtcggatcaaacggacgtgacatcgagaacgagactcaaatcatcattcttgatcaatccgggtcggattctggacccggatccgggtcgggtcgtccttatgttctcttgctacctcttcttgaaggctccttccgttcatcattccaatccggagaagacgatgac

SEQ ID NO: 103408 - DNA, 405 bp, Arabidopsis thaliana columbia
aagttttcttttttcggtcaaaaacaaaagaatctaaaaatagcaagttcatcgtttgatattttagagtttaacaagaagaatcttgaaagccgtcacctacagatctgaagaatattctcaaggatagagagagaaatggcgacggacttcaagtctttaccagtcatcgacatctctcgtttactcctcaagtgtgatgatcccgacatggcagaggatgtcggtgtggccgaggttgtccagcaactggataaagcttgtcgggacgccggattcttctacgtgataggccatggaatatcagaggatgttattaacaaggttagagagatcactcgtgagttctttaagcttccttatgaagagaaacttaagatcaaaatgactccagctgctggatac

SEQ ID NO: 103409 - DNA, 304 bp, Arabidopsis thaliana columbia
ttgatgagctggttggaatgcaaggtccagtgtttcatttggttgagaatgcctttactgttctaacaagcaatatgatattccttggtgttgttatcttcgtgccctttaccttgggacggattatattgtatcacgtgtcatggctttttgctgctgctagaggccctgctgtggctgcatcattgcatcttacagataccggactctcattggaaaatattactctgaagagtgcgctgactgctgtctcgaatttgactagcgagggccaacgaaatgggctgcttggtcagctcactga

SEQ ID NO: 103410 - DNA, 315 bp, Arabidopsis thaliana columbia
cttgacaagaggctttcggttgtgaagtcgtttaaagcgcagaatcaagctggagattttgatcatactcggtggttgtttgagactaaaggtacttatgggtatgggaacgctgtttggcctaaagatgggtatggaatcgggtcgggtggtggtggaaacgggtatgaaacgccacctgagtttggggagagaagcaagaggcctcttactaggaaagtcagtgtctctgctgcaattatcagtccttacagattactcattgcactgcgtctggtggctcttgggttgttcctgacatggagggttcgccac

SEQ ID NO: 103411 - DNA, 399 bp, Arabidopsis thaliana columbia
gatattttgttttctctcttaacgatggcgaagagtgttttggttaccggcggcgctggctatatcggaagtcatactgttcttcaactgcttgaaggtggttactccgccgtcgttgttgacaattacgacaattcctctgctgcttcgcttcagcgcgtgaagaaactcgccggcgaaaacggaaaccgcctctccttccaccaggtggatctccgagacaggcctgcgcttgagaagatattctcagaaacaaagtttgatgcagtgatacactttgctggacttaaagcagtaggtgagagtgtggagaagcctttgctctattataataataacattgttggcactgttactcttttggaggttatggctcaatacggctgcaaaaatcttgta

SEQ ID NO: 103412 - DNA, 371 bp, Arabidopsis thaliana columbia
aagaaatccaaagatattacttttagatgaagcaacaagcgctcttgatgccgaatcagagaagattgttcagcaagcacttgacaatgtcatggaaaaaagaacaacaatcgtcattgcacatagattatccaccattcgaaatgttgacaagattgttgtcttgagagatggtcaagttagggaaaccggaagtcactcagaactgatatcaagaggaggagattatgccactcttgtaaattgtcaagacacagaacctcaagaaaacttgagatcagtcatgtatgaatcttgtaggtctcaagctggatcatatagttcaggaagaatttttagctcaagaaggacttcaagcttcaaggaagacc

SEQ ID NO: 103413 - DNA, 439 bp, Arabidopsis thaliana columbia
caacatcgtcagccgctgatcagggtttgatgattctccaatctccaaaagtagggttcttcaggagatccaaaaccataaagggtaaacgcctgccttcgtcttgtaaagagaaagaccaagtgaaagaaggtcaaattctgtgctacattgaacaactcggtggccaatttccaatcgagtctgatgttaccggcgaggtagtcaagatactccgagaagatggagagcctgtaggatacaatgatgctctcatctccatccttccatccttccctgggatcaagaagcttcagtaaaaccaaattcgagctggttttgagttatgacactgtgccttgtgtatgcttttagataaagaaacttcattcatatttgtatttgtcttttgcttgtatgaaagttcttctttaagactcttttattctgtatgcttttt

SEQ ID NO: 103414 - DNA, 349 bp, Arabidopsis thaliana columbia
gctctctaaaaaagctctttgttcgtctctatatcatacgaataatggattcttattttttccttggcactgttgttgttgttgctcttgcaatctacacgcttttgggaacaatatcttttatggtttatagaaaattcaggttacaccaagagaagaacaacatatcatcttgtttttctttttcatcttgcttttctttttcatcttcttcatcgacttcgtcgcccggtcgtaaacaccaagtctttccaagtttccacggggcagatgtacgcaaatcctttctcagccacatcatgaaggagttcaaaagcaagggaatcgacatattcattgataaagatat

SEQ ID NO: 103415 - DNA, 151 bp, Arabidopsis thaliana columbia
cagaacagctcggtgcagattagattgtacaagtgacaacacacttagaggatgttggttctgaggttgaacagattcagaaagctatggggtcaaacatcgatgtaacattcgactgtgcgggttttaacaaaaccatgtcgacagcatt

SEQ ID NO: 103416 - DNA, 323 bp, Arabidopsis thaliana columbia
accaccaaacgctaaacgcaacagccaagatgactgagaaggaatgtgaacatcaccacgacgaagatgagaagatgaggaaacgtatacgagcattggtgcttgggtttctcgcagctgttcttttcgtggttttcttggtgtgggcgatacttcacccacacggaccacgttttgttcttcaagacgcaaccatttacgcgttcaacgtttctcagcctaattatctcacttctaatcttcaggtcactctttcttcacgaaatcctaatgacaagatcggaatcttctatgaccgccttgacatctacgcatcttaccgc

SEQ ID NO: 103417 - DNA, 410 bp, Arabidopsis thaliana columbia
ccacgcgtccggaaagattgagagggacaagcgagttttgacccaaggattgttgacggtctatattgaacaagtaaacaaggatgcgtaagtggatctgttgtacatgtcaaatagaagactcaaatgaagagcaacaactgaaaagttcacagcagcaatctgatgcaaatcataagaattcaaaaccagcacctgttgcaaaacatgaggttaagaaggaagctcttcccatcgaggtccctcccttgtctttggatgaggtcaaggaaaagactgaaaattttggatccaaggcactgattggtgaagggtcttatgggagagtatattatgcgacactaaatgatggtgtggcggttgctctgaagaaacttgatgtcgcacctgaagctgaaacagataccgaa

SEQ ID NO: 103418 - DNA, 139 bp, Arabidopsis thaliana columbia
cagtagatcttctcgagagatatgcgacaaagaatcgtggcatgattacatgtatggctgctgggaatgatgtaattgttcttggaacaagtaaaggatggattatccggtatgatttcggaattgggagttctaatga

SEQ ID NO: 103419 - DNA, 385 bp, Arabidopsis thaliana columbia
cccacgcgtccgcccacgcgtccgaaacattctaaaatggccacttccgtcaatggttcccatcgtcgtccacattacttgcttgtaacattcccagcgcaaggtcacatcaacccggcgcttcaactagccaaccgcctcatccaccacggtgcaaccgtcacatactccaccgcagtctctgctcaccgacgtatgggcgagccaccttccacaaaaggtctatccttcgcttggttcaccgatggattcgacgacggtctcaagtcattcgaagaccagaaaatctacatgtccgaactcaaacgatgtggttcaaacgccctgagagacatcatcagagccaatcttgacgccaccaccgatacagagcctatcaccgggg

SEQ ID NO: 103420 - DNA, 399 bp, Arabidopsis thaliana columbia
agaaaagggagtgtacacatagctcgctctcgctctgtgccccttaacgacaaggaattaagcctgaagggaatggattcatttttcagagtaattccttcgactcctcgtgttaaggaaggagacgttttctcaaatgcatcagaggctggtaatactgaaacaggtgatgctgatggagaagacatacctgaggatgaagcagtttgtaggatttgtttggtagagctctgtgaaggaggagaaaccttaaaaatggagtgtagttgcaaaggcgaacttgctcttgcccacaaagattgtgctcttaaatggttcaccataaagggtaacaagacttgtgaggtgtgtaaacaagaagttaagaacttacctgtaacactcttacgcatccaaagc

SEQ ID NO: 103421 - DNA, 407 bp, Arabidopsis thaliana columbia
gcatttctagttattcggtgatggatcaaacacagaacacaatcgccggaattggtgaaatcaacggttcgataaaaaccgaaatcaatgcaattgcaaccgtcgacgattcaaatgagaagctgaaccaaattataaactcgaatcagaaaattttagaactccttcatcaattaaaactcaccgtctcttctttcacacctgcttctcagcttcacctcctccaacgcctcaattctcttgtgatggagcttgataatatggctaagttgtctgataaatgcaacattcaagtccccattgaggttcttaacttgattgatgatgggaagaacccagatgagtttacaaaagatgttcttaataagaactgcattgctaaaaatcaagttacaaagggaaagagt

SEQ ID NO: 103422 - DNA, 313 bp, Arabidopsis thaliana columbia
  unsure (1)..(313): unsure at all n locations
caaacgcgtccgcgaaaaattcaccaaacattttcggtttctcttcacaaaaaatctcaaatttctctgtgaaaatgggcgaagaatcagaaatcgccatggcttcagcagatcgaaataacctaacccagaaaatcgccaagatcctaaacgagactcgcacatcatacgctactcataaccgtaagctaaaggagctcgccacaatccgttcaaaactatcttcatctgaatccgaatccgagtccgtgtcttcttctattcttcaattctcttccgtgtntctcaaaaccctaacccctcttttcatcgc

SEQ ID NO: 103423 - DNA, 123 bp, Arabidopsis thaliana columbia
gtccgcccaggcgtccggggaaatgaggagtggttattaaactcgcttaatgcgagaagagtgtttcgctcagcctgttacgactattgagcactctccttcttttatcatctgatccctctt

SEQ ID NO: 103424 - DNA, 242 bp, Arabidopsis thaliana columbia
catcctcatgtatttcctcaagggaagtctcccttggcaagggctgaaagctggaaacacgacacaccagtatgataggatcagcgagaacaaggtttcaacttccatcgaaacgttatgcagaggtcatccaacagagtttgcatcttacttccattactgccgctcacttaggtttgatgataagccagactatgcatatttgaatacactattccgcaacctttttatccgggaaggtt

SEQ ID NO: 103425 - DNA, 427 bp, Arabidopsis thaliana columbia
cacgcgtccgccattctcagattgaaatcgaaagcacggatctttcttcatacctcaaacctgcaggatccattcatgattttggagatctgtttatcaaatctcagatcagaagcttctacgagttgattatatgctgtgtttgcagatctgggtttggttatatttctgagtaaatctctcacccaacaccatgtgtgatcaaagaccaaatcttttagggtctctcgtgttgttgggtttcttcatcttctttgtaaatggagaagaatgctctaattcgagctcattgattgggcatgagtctgagttcaagatgttgcaacatcagcttcgtggggttttcactgttgtcgatgattgttcgtttaaggtttctcgttttgatatgctctctggttccgaggttcattggtggggtgctatg

SEQ ID NO: 103426 - DNA, 417 bp, Arabidopsis thaliana columbia
cttcttcttcttcttcctcatttctcttcctctcccatattccatggaattgctctacttcttcacctatgagagtaatatatcctcatgtactcaaaatactaatcaaacttcatgcttcaacaccaccttttcttaatcctccttcttcatcttcttcttccactatttcattttccctagtcggtgtaaatatcaaatggaggaagaacggcgagttctgttcggaaagtacgagatgggaaggttattaggcaaaggaaccttcgccaaagtctattacggcaaagagatcatcggcggcgagtgcgtcgcaatcaaagtcatcaacaaggatcaagtaatgaagagacctggaatgatggaacaaatcaaacgcgagatttcaatcatgaagctcgttcgtcatcccaacat

SEQ ID NO: 103427 - DNA, 418 bp, Arabidopsis thaliana columbia
cagcgaacagtcgctgcaacgccatcgtcttctcgatcgtaccaattccacccagctcgtgctgcaattatcgatcttttcaatctctacttagggagaggaagccgtcaaaagcctgatgagtccctccgagatcccccgaacaaatcacagaagcgtgttcatgctcctaatagagacttaccaccaagaaacgagcaattccttttggattttgagctgcttcagagccaattcaatgatccagagcaattgaggacgattactgagtcagttttgatatctctggtggtgcaatgtagcaatcatgcgcctcgtgctgagtttctactctttgctttgcgtacattgtgtaggattagttatatcaattgggatacttttttaccatcccttctctcttccgtttccgctgctg

SEQ ID NO: 103428 - DNA, 353 bp, Arabidopsis thaliana columbia
gaaatctccgatcgtctgaatccgggaatcacgccggagtttgatccgaagactatgcgttccaccaaacctggattgaagcgtctcttcatcaccagctctgtactcttttcattccttttaggtgtgccatttctgtggaagtcagtggaaatatatcgctctccgttaccgttccacgacatcgattctctctccgatcaacttgagtcgacccctttgcgtttcccttgcaatttccacgctgttttcgtcggttttcgatcgacggatccggataacttacgatctcagataaaagatggtataaatcagttaactcatcaaagttcacaatgtggttcttgtgattt

SEQ ID NO: 103429 - DNA, 376 bp, Arabidopsis thaliana columbia
cggacgcgtggggttcatggtgaattagtggtggcaaaaaagttggtactactgggagaaaaaaaaaaaaaggttaggtgaagctttttagccatagccaataatactactcaattttgcagagacagtgaaatgctgaaattgataaagagagaaaaaaagaagaagaaagaagccatgttttgaggaaggagacatgcatcatctcatccttttatgatttttttccatatcttcaccaaatccatagattctctctccctctgattttttggtaaatttggtcgctatatttgactacttgtactctgctttgagaagaaaaataaaaccatttttgggtgaaaagttagaaaaaaatccaaataactttttt

SEQ ID NO: 103430 - DNA, 141 bp, Arabidopsis thaliana columbia
cggacgcgtaggcggactcgtgggataaaaggagaacaataaccttgacagatgcggggatctctaatagcatcaaaccgccgtacaaacgcggctgaatcttcagaaatttaccggtggacgataggttctgctcggttt

SEQ ID NO: 103431 - DNA, 307 bp, Arabidopsis thaliana columbia
gaagaagaagcttcacaatcgtaacaatggcggtgaagacgccatttctcaaacttctccctcttcttctccttctcctccacttccctttctcattctctaccatacctctcggctccgttatttacgcctccggttccaaccagaactggccatctcccaattccactttctccgtctcctttgttccatctccttcccctaactccttcctcgccgccgtctctttcgctggaagcgttccgatatggtcagcaggaaccgttgactcacgaggatctcttcgtcttcacacctccggctctct

SEQ ID NO: 103432 - DNA, 355 bp, Arabidopsis thaliana columbia
ggaatttagaaagcgtgagagatggcgacgaagactgtttggatcatactgttgtgtctatttgttgtttcccaggcagatcagggtttcgatgttcgtcatcacctctccaccgtcaccagatactctacttcgaaagatgttacccaaaatttgattgaagggtcgaatgttcctagtgagtgtacacctatccaccttaaccttgtggctaagcatggaactcgttctccgaccaagaaacgattgcgggaattggaaagtttggctggtaggtttaaggaactggtaagagatgcagaagctaggaaattgccttcagacaaaattcctggatggttgggacaatggaaat

SEQ ID NO: 103433 - DNA, 408 bp, Arabidopsis thaliana columbia
aacgacgaaaggtttggttacttaggtctcccgccaatcgcagccaacgaaccaatcttgtgcttaatttgggaacaaatcgcggttctgatgaccggttcgccggaagataaatcagacgccgccgcgtcgttggcttctttagcaagagataacgatagatacgtgaaactgatagttgaagaaggcggagtcaaccctttgttgaaacttgtaaaagaaggtaaaatcgacggtcaagaaaacgcagcgagaacaatcgggttactgggtcgtgacccggaaagtgttgagcatatgattcagcttggtgtttgttcagtgctttcaagtattcttaaagaaggttcgatgaacgttcaagccgttgtggcttgggctgtttcagagcttgtttctggtaatcac

SEQ ID NO: 103434 - DNA, 352 bp, Arabidopsis thaliana columbia
ggaaaatcttcaactgttcaggctctatttcgtgtgacatctaagaatgatcaaccactcttcacttttgcggttgaaaaggaacaaagtattacagcagctacaataagaaaacagactctcccagagaaggaagactatggacacaagtatacttttttcactgttcaagaagtacagaagaaaaatgcacaatggatgaacaacagcatgaaagtcgaaagccaagagtacacatccaacattgtcgctcagatgagagtctcagatcctaagcctctatttctcgctggagaaagatctgcggaaaacctcttaactagagagtttgtacttgttgcacctgaatcgc

SEQ ID NO: 103435 - DNA, 394 bp, Arabidopsis thaliana columbia
accacgcgtccggtcattttctgctctgtttgttttaaagtcaccctaatatataattggcttttttcggggacctgacgatagagtgaggatttgcctctcaagcaatcagactctgcttcatgtaagttttttgtattcttttgatattttttaattgccgccttatcttatcttatgtgtgacattgtcaatactataatgctgagtattctatattatatagtttgttttatgtgacattaccatattatatcgtttttacgataatgtaaaacgaaatatatttcttctgtttaaatttttattatctgtttgaaagatataatacggttgtgacatgaaaaataatatggttgtgacaatattcaaaaacaatattcatttttttttt

SEQ ID NO: 103436 - DNA, 305 bp, Arabidopsis thaliana columbia
gcccacgcgtcagatctcggtatatacttcatcgctggaccaaaaacgcagagtttgggtttgtacgagatgtagaatcaggggtgacttctcaggaccttaaggccttgatgatctggagcctaagggaagcagcttcaaagtatatagagtttgggacatcgtctctggagaagtataagcttgcatatgagatcatgcgagagggtgggaagaaactgtgttggcagagatgagaaaaccaagtaagattgagaaatcagaagaagatgaacccttacctcatcagtgaaaatggaatctgt

SEQ ID NO: 103437 - DNA, 370 bp, Arabidopsis thaliana columbia
cccacgcgtccgcccacgcgtccggccagtggttgtgttgttgtagttccgttccgtggctgtctttgtttatcatcgtttaatctcaacctcttaaatcggcagccatggcggttcctcatccttcttcttcctcctctagatctcatcctttcctctcccatgtctatcacactagcttccatcatcatcatcatcataatcatccatcgcttgtgctcttctggtgcctcgtgttttctctattatctcctctcgctctctcatcatcatcttcgtcttcttcttcttcctcagactcgtcgtcatcatcgtcctcccatatctctttaggaatcggtgaaacagaagggacgaagcatgatctgca

SEQ ID NO: 103438 - DNA, 380 bp, Arabidopsis thaliana columbia
caaaaacatatatcctcaaattaattagatctcatctatctctaccctcgacatggatcatgaggaaattccatccacgccctcaacgccggcgacaaccccggggactccaggagcgccgctctttggaggattcgaagggaagaggaatggacacaatggtagatacacaccaaagtcacttctcaaaagctgcaaatgtttcagtgttgacaatgaatgggctcttgaagatggaagactccctccggtcacttgctctctccctccccctaacgtttccctctaccgcaagttgggagcagagtttgttgggacattgatcctgatattcgccggaacagcgacggcgatcgtgaaccagaagacagatggagctg

SEQ ID NO: 103439 - DNA, 371 bp, Arabidopsis thaliana columbia
ctccctccggaaaagctacaaccccaatctaaaaccctaacggccatttctaccatcggagctccgaaaatgccgggtatgtcttcggaatctggcggtggagaattggttctgttttcgaccaaggaaaaaactccggtgttgtatcctctaagctatggcctcaagtctccggttcacaggctctccatctcctggggttgcggaaacaacctacgcgtcacggttttaaggaatccagagttacgcgatgatgacgacggagaagttggtggtaaggtcgtaaacgttaggcttagcggcgaggatggcgaaatcagtgacccacagtggcgaaggatcgcttatggatcggtatctccgttcgcgct

SEQ ID NO: 103440 - DNA, 372 bp, Arabidopsis thaliana columbia
accaaatctctctcttcgtctctctctttttctatctctctttccttctctagatgatgcctcctaatgagcaagaatctagctttccgaaaacaccgagcgcaaaccgacacgaaactagtccggttcaagaaaaccggtttagctctccaagtcatgtaaacccatgccttgacgacgataacgaccacgacggtccgagtcaccaatcaagacaatcttctgttctacgtcaatctttacgtcctataatcctcaagtttgaggagttgacgtacagtatcaaatcacaaaccgggaaaggaagctattggttcggttcacaagaaccaaaaccgaaccggttagtcctcaaatgtgtaagtggtatag

SEQ ID NO: 103441 - DNA, 358 bp, Arabidopsis thaliana columbia
gggaaaacaaaaaataagaaaattgtggctggacgactcagcaattcgtcgtcttctttccatatatcttgtttattatttcataactaatccacttcgattctgctttttatataaagttgaggtttttgagctattttttctcctaaaggattccgaaaaaagcttagacctttttgatctgatacgtatctataaatctggaaaggagctgagagtttcaaggggttttaatttcgctgagaaaacgtttaattatctttgtcgagatggattgtggtatggagaattgtaatggtgggatctcaaacggtgacgttttgggtaagcatgagaagctcattatcgatacagaccc

SEQ ID NO: 103442 - DNA, 410 bp, Arabidopsis thaliana columbia
cccacgcgtccgcccacgcgtccggcaaagcctgatgagccaagttgggagagcccttggggtccaggaagaccaggatggcacatcgagtgcagtgcaatgagtgttcattatctgtctccgaaatttgatattcatggaggtggtgcagatcttaaattcccgcatcatgaaaatgagatcgcccagacatgtgctgcatgtgaggatagtggtgtaaattactggttgcataatgggcatgtcactatcaacaacgagaagatggcaaaatcaaagcacaactttaaaacgattagagaaataaccgctagctaccatccattggctctgaggcacttcttgatgagtgcacagtaccggtctcctctgagtttcactgcctcgcagctagagagttcgtcagaagc

SEQ ID NO: 103443 - DNA, 401 bp, Arabidopsis thaliana columbia
cccacgcgtccggccaattctgtattgcctgaatgtcctggagatttatgttctgtctcaaagctacaagatagtccacgtactaagttacgtagaaaagatgcactgcagccttctctttggctctctgaagcgttgtgtctactacgatctgctgctgaagtgatcgaagatggtgatagaggtaaaacagttactccacagggagatggaccaagaaggaaagatcttaaatctgtctctaaaatgctctgggatttctattttcccaagccagaggataaaactctaaaacgtctgtggctaccaccacaatcaatcgtcatgtgggacacccttaagtactctctcatttcaatggaaattggtactcgttttgccaagaattcaatgctgcctgt

SEQ ID NO: 103444 - DNA, 281 bp, Arabidopsis thaliana columbia
ccggttcctatggacgacatgattgacgacacaatgggaccagaagagcttcccatctcaatctcagtctcagctcctctcgctgtgactatggaggaagtcatgaaccgagctgaagatgcacagattattattaatccatccgaattgatgtcatcgattgttgaagtcccgaatccgaaaggagatattctcacaaaggcaagaacacagcagtggcagaacacaatcacaggagtgggtcaacggtttaaaaatgttggggagtttcgtgaagcgct

SEQ ID NO: 103445 - DNA, 274 bp, Arabidopsis thaliana columbia
cggacgcgtgggcggacgcgtgggcggacgcgtggggttcaagccatcgtcaccggaaagggacctttggagaacctcgccgaccatttggccgacccagtcaacaacaacgcttgggccttcgccaccaacttcgtccccggaaagtgagcggctgcttattatgtgaatgagagcagagaaagagagtttgtttgtggtctattctatgtaaatttgtgaactttcctttgtggtatctttgtatagaaatcgaacctctttttctctaaaa

SEQ ID NO: 103446 - DNA, 399 bp, Arabidopsis thaliana columbia
cccacgcgtccgcggacgcgtgggtggctccattggaaaaaaaaactagaagcagatctgttgaagttaagccgagattcatcaattcgtgttatttgtctctcttgataagcaaaaaacatcgtacgaagaagaagaagatgaccttaattttttctgaatgaaatcttaaaattcccagaaagaagaatgacgaacagctcgtcatcgaagaaacaagctcaagatcagccagaaactagcgaacccactctcaaatctctcaaaaccaagatgactaaatccgacgaaaagcagaagaagcttaaagacattgaaataagcgttccaattgtgtatggtaatgtagcattctggcttggcaagaaggctagtgagtatcaatctcacaagtgggca

SEQ ID NO: 103447 - DNA, 380 bp, Arabidopsis thaliana columbia
gcatcaccaagatgctgacccagactttggttcttgtcaagccaaggaactactggaccatctagaaactgttcttgtgaatgaaccagttattgtgaacagaggccaccaaatcgttgaagttaagcctcagggagtaagcaaagggcttgtcaccgggaaaattcttagccgaatgcttgaagatgggatagcgccagattttgtggtatgcattggggatgatagatcagacgaggagatgtttgaaaacatatcaacaaccctctcagctcaatcatcgtcaatgtctacagagatattcgcgtgtactgtgggaagaaaaccgagcaaagccaaatacttcctcgatgaagtaagccacgtggtgaagttgcttc

SEQ ID NO: 103448 - DNA, 380 bp, Arabidopsis thaliana columbia
cccacgcgtccgatacaacactgcatatctctgcttctttctctcctcgctcttcgcgctctctgcagaagaaaaataaaacattttcttgagaaagaagccacaatctctatcactctctactatggatcttgttgagagtttttcccatggcgatcctgatactccgcgtttcagtgacgacttcggttctggctctgcttgctctactccgttcgttagcgctccgtctagtcccggccgtggtcctccgcctggttatttcttcagtgcaccgtcgagtccgatgcatttcttcctttgctctgcttcttcttcatcggagaatcctaaaaagcttgacacgtcttcatgcggcgactttgagtttgacttctcgt

SEQ ID NO: 103449 - DNA, 105 bp, Arabidopsis thaliana columbia
gccctcaaggcacacatcaccacacaaagtccattggtcctaccggtgtcataacatcttctcctcctcacatcgctaatcagacgtaaaatcttcaacccgaaa

SEQ ID NO: 103450 - DNA, 406 bp, Arabidopsis thaliana columbia
aaactcttttgttcgaaagtccaaatactctctgtttttactcttatgatatgttcgactactcaagtttcttctctcccctgttttcattccacaagctactgaaagacatcaccctacaagcctatgagaggtttatggggaacacaaaatgaaaatggagactgatccgatccgtcacattcatataactttaaaggtgctggctagagactgagtaatgatgatggagttcacgaagggagaatgttacggaatagagaaatcaaaatttgaaggtgctagacgggtaataatgatttgagtatagggatatttacaaatgcttgtaagatgtgtgatgagaggatgtatgtgtagtgtgtgtaaacgtatcattgtatagatgagataaatgtgcaagttg

SEQ ID NO: 103451 - DNA, 345 bp, Arabidopsis thaliana columbia
acccacgcgtccggtttgaacggtcctcagaaattcggagcttgtagcttctcggtgcggtgccttcactttaatggcggcaatatcccctgttcaatgcttattctcttgcaattctcatcatcatcatcaacaacgcgagcagagtgggtcgctttggagattgggttctagggttttagtatcttcgagtctatggaagctttctctgttctctggactccatttgaaccgaaggtgattatgttctagttaacgatttcagtaggatttggcccttgaagcgatgattctgtgtaatgcagttggatatgagataattgattgcaatcttttgggtctaat

SEQ ID NO: 103452 - DNA, 319 bp, Arabidopsis thaliana columbia
ctctgagttgactcgaccgagaaaaggcgatagagctggggtttaattcggcgataacaatggacgaagattccgtccatggcgattctcacctcaagacatgtgtcgtcctcggcggacgagggttcattggtcgatcgcttgtctccagattgcttcgtctcggaaactggacagtccgagtcgcagattccggtcacactctccatcttgatgaatccgattcgctcctcgaggatgctctctcctccggccgcgcttcttatcactgcgtcgatgttcgtgatagacctcagatcgttaaagttacccagggttc

SEQ ID NO: 103453 - DNA, 388 bp, Arabidopsis thaliana columbia
acgaacttcgacatcatttctcttttctctcatcgctcggtgaattcgaggatcctcgagctttttgatcggagactttttctctcatcgtcgttgtttgaattctccggctgagagatgcttgcttgacgacgaatctccaccgatcttttaccttttcgcacaacaagtaagagaaggatgtcgactccagcgaggaagagattgatgagggatttcaagaggttgcagcaagacccacctgcaggaattagtggtgctccacaagacaacaatatcatgttgtggaatgctgttatattcgggcctgatgataccccttgggatggaggtactttcaaattgtcactgcagttttcggaagattatccaaataaaccaccaacag

SEQ ID NO: 103454 - DNA, 333 bp, Arabidopsis thaliana columbia
gtattatgccattccactgcttcaatcgctaaccctaactctctcatgtctctctcctccactctccgtctctcttcctcccttcttcgccgctccttcttccgattccccctcaccgacccattatgccgtctccgccgcactgaaccctccgccacgcgtttcttctcctcccgtactcctcggtccggcaaattcgttgtcggtgctggtaagcgcggagatgagcaggtcaaggaagagtccggagctaacaatggcggtttggttgtttctggggacgaatctcgtattgtgccttttgagctacataaggaagctactgagtcgtat

SEQ ID NO: 103455 - DNA, 380 bp, Arabidopsis thaliana columbia
cggacgcgtgggtggatatgtgaacaatgagtataatgatggaggtatggagcaggaccggtcatatggcagaggacgcgggcgtgggagaggaggtggacgtggtggtcgaggaagaggaggctgctaaggaccttacatttggttatgtcaagattgatgacgatgaagaacacggaaaagagaaaaagaaacgaaggctttcaaaggcaagagaacttgaaagggctatgaagttagaggctgcaaagaaggatccagaaaaaggtgatgtaattgcaaagaagcactcatggaaggcagctacaagcagagcagctggtatcaaggttcatgatgacccaaagctattgaagcaaagcatccacaaagacaaaaag

SEQ ID NO: 103456 - DNA, 350 bp, Arabidopsis thaliana columbia
ccgatctgaattccggcgatcaaattacgacagcgactaattcaacgttttaaattactctgtgtgagagaaatttgcgtgtgtatcgtgataaagctagctcgatcgcgatgatcttagaaactcagaggaatgttgaattccctcatcggatcgttgataagcgtcccaggaaacgtccccgattgacttgggatgctgctccgcctcttcttcctcctcctcctccacccacggtatttcaacctccgttgtactatggtccggagtttgcgagtggtttagttcccaattttgtttacccaaacatgttctataatggccttcctcgtcagggctctcctccctgg

SEQ ID NO: 103457 - DNA, 376 bp, Arabidopsis thaliana columbia
acggacactcgggaaagatcatgagctccggtgagtgggttacaagaaaacttcttggatctgttcctcatgatataggtctaaacgatccgtggctagaactaaacgaatataacttcttcaacacggatcgttggaaagacttgaacgccaagtttgttcttcaagtctacagagacgtggttgctactaacgatcagagttttgctaaagcggtttggccgtctgtttacacagcagttgcttacttagatcagttcgataaggacgaggacgggatgatcgaaaacgaagggtttccggatcagacatatgatgcttggagtgttacaggggttagtgcttattgtggcggtctttgggtcgctgctctaca

SEQ ID NO: 103458 - DNA, 393 bp, Arabidopsis thaliana columbia
cgtaatacttgctcttacttatctcttgggtttctcatgaacaaaagtaaattcttgtggcggttagctaaagcgcctatgtttagtcctggaacaacggtggaagtgagttctaagataaataacaaagaagtcgtttgggttcctgcagtggttattaaagagtttaaggaagatgatgagtataagtatattgtcagggtttatgataagtccttcagctgcaagggtaataaggctgcaagactcaacaaaaccgttgatttgtgtagtcttaggcctacaccgccttctatttcggttgaagagtatcaattaaaggaatacgtagaggtgtttcatgatggtatgggatggcgtcaaggacgagtgatgaaaattcaagaacgagtg

SEQ ID NO: 103459 - DNA, 391 bp, Arabidopsis thaliana columbia
gttaagcactactctccccctccagtctaccattccccaccaccaccaaagaaacattacgtatacaagtcccctcctcctccggttaagcactactctcctcctccggtttaccactctccaccaccaccaaaggaaaagtacgtgtacaaatcacctcctcctcctccagtacaccactactctccaccacaccatccttacctctacaaatctcctcctcctccataccactattagatatctctatcacggagaacacgatgtacacaagaagacaaagacaagacgaaaccagtactggtgattgtaataagagaaacaaaagatgaaagagagaatccaagcagagaaagctttctcatcattttcaaagtattgtttgcgtttt

SEQ ID NO: 103460 - DNA, 360 bp, Arabidopsis thaliana columbia
aaaacttgaaagaagagtagtagttagaacgtcagagagctagctacttcgaaggaaggtttcattcatcgaaaatggcagctttattattaaataatcggtcaaactctgcctcccaatccaaagtctaaaacctttccttcttctttctttacaaatccaacaatctcaatgtctccaaatccataactttcttcgatccccttgttcttcctctgtctgctgttacattttttacaaaaccctaatcaaacccattttcttctatcaatcttaaccctagaatcaaataaagactcaatctttctttgctttgctctgttctgctctgtttttgctctgtttttataatggcttgtt

SEQ ID NO: 103461 - DNA, 320 bp, Arabidopsis thaliana columbia
gggcaaatcatttcaaagcgaaaggaaaatgagaaacttagatcgggcagagccacttctactgcgtcgatgcgaccagggagctgcagcctcagataaggattcttttgatgcccagttgataaaggaagcgactttattttaaccaacgagattttatcatcaggatcattgatcaccctcttgagaacatctcgagctttcccagatctatctgagctcctgggtttataaatcgcttccttcacatatcgatgggtggctgcgtgggttgctacagagaacacagatcaactgccgccagtctgaaggatccacct

SEQ ID NO: 103462 - DNA, 356 bp, Arabidopsis thaliana columbia
ctcttgttcccatgatcttcgtcgatgttctttggaaattgtttcctctatactcgtttggatcaggaagagactctctctcagagtccattttgcagatcattcccgagacaatggcttcttctaccactaaaatcctctgtgatgctggcgaatcagacctctgtagagacgattctgctgcatttctccttaagtttgtagccattgcctccattctactagctggagctgctggtgtagccatacctctcattggcaggaaccgccggtttcttcaaaccgagggaaatctctttgtagctgctaaagcctttgcagctggtgtcatactcgccaccggctttgtccatatg

SEQ ID NO: 103463 - DNA, 307 bp, Arabidopsis thaliana columbia
gggtgtcaagtgttcgaaggaagttgctactgccattagaggagctattattcatgctaagctatcagtggttccggtgatggtggaagttacggaggcggtggtggcggctggtaatcaaagatagagttgtttgcgtgctgctgctctgtttttggcttacatttggctttgtgtcaccacttctggtttggttatcgttcgtttggcttacttttttgatgaaacagtttcgtttaagtcttctttgtctggaacgaaatgttaattcacgtgttgtttactacatttataacgtttcctttta

SEQ ID NO: 103464 - DNA, 441 bp, Arabidopsis thaliana columbia
cacaagtaccatggacgagatccaaatagcttcaatcctcaaatcatctgagctttttccgattccacaaggcgtcaagctttcgtatggaacagctggattcagaggcgatgcaaagttattggaatcaactgtgtatagagttgggattctctcagctctccgatcacttaagcttggatcagccaccgtcgggcttatgatcacagcttcgcataacaaagtctctgacaatggcattaaagtttcagatccatctggttttatgctttctcaggaatgggagccttttgcagatcagatcgctaacgcatcttctcctgaagaactcgtttcgttgattagaaaattcatggagaaggaagagattgcaatcggagagaataataaaggtgcagaggtttggttgggaagagatactagacctagtggtgaatcact

SEQ ID NO: 103465 - DNA, 311 bp, Arabidopsis thaliana columbia
agagcagatgaagccatgcgccgcaaactcgccgccgttgacgccgataggtttcttagagagagccgccaccgtttacggtgactgtacctccatcgtttatggcagcaacaccgtttacacgtggcgtgaaacaaacctccgttgtctccgcgtggcgtcttctctgtcttcaatcggaatcggtaggtctgacgtactctctgttctctctctcaatactccggctatgtacgagctccagtttgctgttcccatgtccggcgcaatcctcaacaacatcaacactcgcctcgacgcacgcaccgtct

SEQ ID NO: 103466 - DNA, 391 bp, Arabidopsis thaliana columbia
aaaaaggaggaagaatgtgaagcagagtaaagctaaagcaacaaccaaaccaaaacgtcaaaaagtaattgaggttgattgagtaaaatcagtcgggtagggaacagaaaaagaacaacttcagtaaggctctctctgttcttcatttctggctctgttgttgtatttttagttgtagtagtttctgtttatgtagtgtaggcgtgtaggtgtagcgtaatgttgcttgcttccgcggtttccatgttctgcttaggctgggtctgatcggtctaagctattcgggttaagtttagaagtagtggctgtaacttgtaatgttttggtgcctcgttttggattaatgtagtttctggaaaaacttgcagaagaatcgttttgatctgggaaa

SEQ ID NO: 103467 - DNA, 335 bp, Arabidopsis thaliana columbia
ctaacttacgcttcaatggcgactccaactccatctctatctcctcctccattgaatctctggataatcttatcagaatcaaaacgaatcaatcatccgcttctcacaacaccgtctctctcctccgcggcggactccacaacaacaacgatgatgacatcgataccaaaacaacggtcttacttgtaatcggttacatcgttgttatcaccgtcttcaatctcttagctattggatcaatcgcttatagtgtgtttcaaggattccatggtagacctgtgaaattgaactctgcagtgaaatcgagcttcgcttcgtttttacctcttctcgct

SEQ ID NO: 103468 - DNA, 388 bp, Arabidopsis thaliana columbia
cttaacggttacgacttgacccaatcccctgactctgaaacgttctttgatttttgacccatgaccagaatttttgttgattctttaaaatttctgacttgtcatcaacattaacatctttaatacactactactatagtatatagtataatcttgctacggtgacgcaagcgtgcgtttgactctctcttaaaatcccacctccactcactttctctcttcacctttcacttagcatcatcttcactttcccgcattttctctgcccagattttctctgattcttttgttgtttttttctgatggggagagatgaaacagagacgtacattacagtgccaagtttcttcaaatgtccgatatctcttgacgtgatgagatctccggt

SEQ ID NO: 103469 - DNA, 286 bp, Arabidopsis thaliana columbia
cggacgcgtgggaaagacgaacacttacaaacaattatctctttgtgagctttagcgatcgtaacaatggccaacgacgtgattcttcttgagattctggcctattaggttcgggatgacgacacggatcgcattgagggagaatcgtcatgcatttcagtacagagatcaagatctaaggaacaggaatcctttgcttctccatatgaatccgattcacaataagattcctgttctcatccacaatggtaaaccggttaacgaatccatcatccatgttcagtac

SEQ ID NO: 103470 - DNA, 299 bp, Arabidopsis thaliana columbia
ggagtttggagtcaaaatccagagcgcggggaaacgaaacgagccaacaaatccgccatggcagctcgtaagagagcttcatcgatctcaattcccaacaaaccggacccgtcggaacccaactcagcgccatcggagcagaagatgacccgaaagacggtttctgcttccggtgaggaatttcgtctcgcgccgccgaaattaggagtgatcttcgtgatctctactcttctctgttcgctctatctataccttctctgttttcactacaaggttgataatgagctcaagcgatcgat

SEQ ID NO: 103471 - DNA, 295 bp, Arabidopsis thaliana columbia
acccacgcgtccggatgattcctcggagacatctggcgagaaacaagtagatagatctgttaaaccaagcaccttgcactctccagtgcttaagaactatctcatcgatgccactaccagcaatgatgactcaacatctgcaagtatgactcaaaagaacccagaagaagaagattggaaggatcggctgtattcaggaattgcgttggatggaaagaatcagaaatctcttgaaggtataaggatcttgctggcagaggatacacccgttcttcaacgagtagccgacataatg

SEQ ID NO: 103472 - DNA, 253 bp, Arabidopsis thaliana columbia
gcaaagtactaggttgtacaataagatggaacaggatttacaagaaaacggacccgtgtttcttaaacaaggtgaaacgtctcagtcattgtcactttcagatctcttcacactgaaagatggaaagatagcacctgtccttaaggttgcgaatccccctgtgcgagctaatgtattacatctcagcacagaatactctgtcccagtcttggaagtcgtaaaaaatgtgttcagtccttacttcgaaaataca

SEQ ID NO: 103473 - DNA, 355 bp, Arabidopsis thaliana columbia
tccgctgacttcgcctttcagcggtgaagaaggtttaactgagatggttgaatctcctgagatggggaagaatctatgcgtatcgaacattttccataaagcgtgtatcgaagtgaatgaagaaggaacagaagctgcagctgcatcagctggagttataaagctaagaggattgcttatggaggaagatgaaatagattttgttgcagaccatccgtttctattggtggtcacagagaacataacaggagtggttctgttcattggccaagttctagatcgcgagcggccgccctttttttttttttttatgtatcactattattcttacacacatcaaagagtcaagacaaag

SEQ ID NO: 103474 - DNA, 385 bp, Arabidopsis thaliana columbia
aggtggtgttttaaatctgatgtggaaatttacttctggtaatgatattctgctaccagcatttagctcttctgccacaaattttgctacattgggaagaatagccgagctcaaatccaatctgcaggctatggttacttcggccgagtggaatgaatgttcatattcggaagaaccaagtggattggtgatgaatgctctcactgatgaagccttttggaatgcagtagctttggtaaaccatttaactagtcctcttttgcgggctttgagaatagtttgttctgaaaagagacctgcaatggggtatgtctatgcagcattgtaccgagcaaaggatgcaatcaagacacatctggttaataaggaggattacataatatac

SEQ ID NO: 103475 - DNA, 213 bp, Arabidopsis thaliana columbia
ccagcgcgtccgcggacgcgtgggcggacgcgtgggcggacgcgtggggcttgctcttgttgatagggaaagcacggaacgagaggccttgggagctctaccactataccagcgcacactcccataagcattcctttccccttttcttgtggtcaacgctgcttctctgcataaatctgcaacattgatattttggtgctcactttctgaaca

SEQ ID NO: 103476 - DNA, 387 bp, Arabidopsis thaliana columbia
cagacgcgtgggcggacgcgtgggggtcacaactgcactccctactgttgagttagatccaccaacaatttctatgacgtttggtgtcaatgactctccgttggctggtcaggatggcacccacttaactggaggaagaatcggggaccggttaatggcagaagctgaaacaaatcttgccataaacgttattccaggcttgtcagagtcatatgaagtccaagggagaggagaacttcaacttggtatcttgattgagaatatgaggcgggaaggttttgagctctcagtctcaccacctaaagtcatgtataaaactgaaaagggacaaaagcttgaaccaattgaagaggtgactattgagattaatgatgaacacgtaggatt

SEQ ID NO: 103477 - DNA, 390 bp, Arabidopsis thaliana columbia
cggacgcgtgggcggacgcgtgggctggccatgtggtcctggtcaagagtttttcatttatgcacacgaacaacgcggctatttcaccttttggcagcacatggaaaatgcgtacccgggctccaacattctggtggtgacgttgaccaacgaacaatcaaagcgcgttgaagctcaatcagaccaggagacgatgaaagaggcaatgagtgttctcagggacatgtttggggccaccattccttacgcaaccgatattcttgtccccaggtggtggaacaaccggtttcaacgcggtagctacagtaattaccctatgatatctgataatcagcttctgcaaaatatcaaggccccagttggacggatattctttacaggagaacacac

SEQ ID NO: 103478 - DNA, 300 bp, Arabidopsis thaliana columbia
atttcctcaaaatccatttcgcttccgacgccattctcagtcggtgtgaacgcgtgagagaaagagagagatttggcttactttatctccggcgggcatctttttccggcggagtttccgatgtatctactctagctaagctcagctcttaactgttacaggcagatccacagtgcctgttgattgtttcttcctatcatcaatctcggaatttgagggggtcgtattattaaggggaccataatgaatgaactccgatgcagaaaggctcaaaagattgaaagtccagttccaggatgc

SEQ ID NO: 103479 - DNA, 323 bp, Arabidopsis thaliana columbia
agtagtccgagttatggacaaagaagcaacaattcttccaagatggcgttaaaagagagattcagaggttttaatgccagctttgaagagttatacaggctgcaaacggcttggaaggtcccggatcctcaacttcgtgaagaactgagaatatctatatcagagaaagtaatcccggcttaccgggctttcttcggaaggaataggagtcaactagaaggtggtaggcatgctggaaagtacataaagtacacaccagatgacctggagagttacttaccagacctatttgaaggaaatcaattggttattcaccacccgag

SEQ ID NO: 103480 - DNA, 373 bp, Arabidopsis thaliana columbia
acaacaccgcatagaaatcagacggcagtgttggatcggaggattttgatctgtggagacgaatatgaaaggtgaaacttatcgagtgttctgtgtcggaaccgccgataccaagcttgatgagctacgattccttgctggatcagtgcgatcaaatatcggcgcattctccaaaaactcgtcttccaaggttgaggttgtgattgtggatgtttcggcgggtgctgatcagaagcatatcgataatgttgcagactttgcgtttgtaacaagagaagaagttctctcatgctacattggatcgaaccaggacgaaaaaccggttaaacttccggatgatagaggcgacgcagttggtgtcatgagcaaatgt

SEQ ID NO: 103481 - DNA, 408 bp, Arabidopsis thaliana columbia
agtattcttggggtcaaatcagtatcatctcaatgctgtgaaatctatgaaattcaacgagtaacattgcagtatgaagtttcctgcatctcagttcctcaaaaacatattggaaaaaagagatcccgtgattcttccccggataatttttgcaaagctgcgattccttctgctatggagcaaggctatacatttttgattggcacacataagccttctgttgaggtcctttccttcacagaagatggtgttggtgttcgagtccttgcttctgggttggtatcgctaacaaatacaatgggaactgttattagtgggtgcattcctcaagatgtaagactcgtgttagttgatcaactttatgtcctttctgggttgagaaatgggatgcgtctccgttttgagtgg

SEQ ID NO: 103482 - DNA, 249 bp, Arabidopsis thaliana columbia
acatatccatagcgaaagccagatgatccattggttccagacattgctcagatgtccaaaaccgacatagcaccgtatgaatctactgctagaagctggactcagaagtatgcaatgggatgaaagtttgtgtcctttgatccctcatagactcggttttaatagacagagagagagaatgagagaggacttcttcacatacggatgttccatgaactaagttagattcgtatgttttatcatcacttt

SEQ ID NO: 103483 - DNA, 374 bp, Arabidopsis thaliana columbia
cccattcttaattatactcaacacacattatatttttctgatcatatcattctttcagtccatctatataaccaattcttgatttatacttaaaacacacattatacatctttctcatcatagtttgtatcaatttcctagagtaaactacctaaaggaaaaaaaaatctattttgggaatcatatactaaaaatggaaggaagagatatgttaagttgggagcaaaagacattgctaagcgagcttatcaatggatttgatgcggccaaaaagcttcaggcacgacttagagaagctccgtcgccgtcgtcatcattttcatcaccggcgacggctgttgctgagactaacgagattctggtgaagcagatag

SEQ ID NO: 103484 - DNA, 299 bp, Arabidopsis thaliana columbia
tcagcagctatccttgcaatgattctggtgatgaacaccacttagctggcccagctaacatctgattcatctctttcagtgttactccaacatgcaagtgtcccagtcgaagacaatatactcctttgcctcatcgacatttggctcgacaaggtggaccatgcgtctcccatgcaacagaagacatttggcttggctctttccataatacttacacttagaatgccccaagttcttgacaagcttgatctaatactaagtacatgcaccagtgtgatccttggtgaaaacaaagattt

SEQ ID NO: 103485 - DNA, 374 bp, Arabidopsis thaliana columbia
gtttgcacaaaatggtccaatccagtaatccatagaagctcacgtgcccgagaaaccgggtcatcttctaccagtatcagatatcttgactggaacagcggccttgtggttgctccagaagaggatagacaccaagatagatggtgcggtttgcaagatattggtggtcatatgttaaaaattcccgttattttatttcaagttgtcctttgcatgtatttagaggggactcctgaaagagctaaggatatatcgatcccagtactgttttctccactattcctattgcaaggcctcggtgttctctttgctgcgtctaaactcctacagaagatcgtcctcttactccgcggggaatctggtccgggattgta

SEQ ID NO: 103486 - DNA, 283 bp, Arabidopsis thaliana columbia
tggtgagggtaagtgctggttttgggactggaagagctgcaaagtgtttaggactcttaaatgtcacaatggagtatgcattggagccgagtggcatcctctggaacagagtaaagtcgcaacttgtggttgggacggcttgattaagtactgggactaagacaagcagaggcatttcggagaaagagagagtagaaggcacagaaatcacggcctagcctgggctatacggaatgctgcatctttgggatacaaagcccctttgagttttgctttccgctgt

SEQ ID NO: 103487 - DNA, 403 bp, Arabidopsis thaliana columbia
atgaaagaaaactagggtttcgattttaccggaatattctccgagagagcggcaagtttaacatcagatatgttgttgatcacagattcgcttttctgcgaattttagctggatcggtctttctttagttagttttttttttttgttttcccacttttgaagctttttgataatggatgaagattcgtctatggtggctgacaacgatcaggatcgtgagtttcagagccttgatggaggccaatctccttcgcctatggaaagagaaacgcctcagcagatgaacgaccaatcacctcctcctgaaggcggatcggtgcctacgccgccgccttcggatcctaatccggcaacttctcagcagcaagcggctgcggttgttggacaagagcagcagccggcg

SEQ ID NO: 103488 - DNA, 310 bp, Arabidopsis thaliana columbia
gtcatctccaccgctctaaattctaatctatccacaccagctctgtctatgaactttgcttggctcatctcctttatctccagtttctcctgagctctgctttttaagaacaagacgaggcaatcactcggattcctattaagatgtcaaaacgttgtcaagcgcttatgcggcaaattatttgcttctcccccgaaaagggaagcttttgcgatttgttgggtgcttggcttaggaggatgaaccccattagagctgactggctttctattcttaaagagttgaagaatcttgactctccgttttatat

SEQ ID NO: 103489 - DNA, 352 bp, Arabidopsis thaliana columbia
aaatttctaaaaactgcttttatctccaagaagttgaaaaagatggatcttagtggttgtagagatataatcagtagtttaccagaagccattagttgccatatcctatccttccttcccactaaagaagctgcttccacttcggttctttcgaagaaatggcggtatctctttgcttttgtccctaatcttgatttagatgaatctgtttatctgaatcctgagaatgagacggaagtttcttcaagttttatggattttgtggatagagtgttggcattgcaaggcaattctccattacataagttctctctaaagatcggagatggcgttgaaccagaccgtatcattc

SEQ ID NO: 103490 - DNA, 136 bp, Arabidopsis thaliana columbia
agtaattggtgtcgtcacatgaacattcatcctttacacgacaaacacaacagaaactctgacattgttgctaaaactctattatcacagagaataaacaagtttcgttgaatcccacaaaactttttggttccct

SEQ ID NO: 103491 - DNA, 223 bp, Arabidopsis thaliana columbia
attcccggggccgacccacgacgtccagatacacactacctaataaaccatgtaagcttcttagtgctccgcctttgctttttctattcagctttggcgacttcgtaaaggtgacgaagtttggtttgtgacagagaacgaagccattcacactgtaaccaagactagaacttttcaacgagtggcgaatttcgaagaaaggcttcatccttcggtgttgcat

SEQ ID NO: 103492 - DNA, 255 bp, Arabidopsis thaliana columbia
acccacgcgtccgcccttcatgattgatcctccaaagaatttcgaggaattacttgccctagtggaagattgttcaaatgaagatgttattctaattgtcaaccgaatccggatagcacactcaattaagattaaagctgaaaaccgaaaaaagatgcaggtcttctatggtgttctcttgcagtaatttgccgttcttgcaagcaaaaagcccttgaactttgatttacaaaatatgcttgtcaaacctttgat

SEQ ID NO: 103493 - DNA, 384 bp, Arabidopsis thaliana columbia
aaggacatcgagtcactctttgcattaggaggatttggataaatacaccactacctctttacttttacttttattcatcctctcttacaatctttcaagagcatatggatgatcctcagtctcctcgagttaattcaaattgctcaagtattcctcttcttggttgcatcatggacactcttgttcatctttttacgatcttttctgacgaacaaggcaaacaagtcgtcgacactgcggttgcggaaaatcgtgcagctcataaacactttaggcaactcaactgtgttaaactcaactagcccatgatgataagtttttcttagtatctttggtttttcgtttgtcttgatttatatctaaaaagtaattttttatatgtta

SEQ ID NO: 103494 - DNA, 335 bp, Arabidopsis thaliana columbia
aaggagtatcttcacttcgatattgttcctccggttgttcatagagatataacttcgtcgaatatctttgtggagaaggatatgaaaatcaaagtcggagactttggtctctctaggctcttggtgttttcagagacgactgtgaattcagctacttcgtctgattacgtttgtaccggaccacaaggtacgcccggttatttagacccggattatcaccggtcttttcggttaacggagaaaagtgacgtgtatagctacggtgtcgttttgatggagttgattacgggtatgaaagcggttgatcaacgacgtgagaagagggacatggcttt

SEQ ID NO: 103495 - DNA, 111 bp, Arabidopsis thaliana columbia
acttatcccaatcttatctcagcccttttgactatgacactttagtctttactttgctcacagctttggatcaccaaaattcatcctcaagagagactttgtggccatggc

SEQ ID NO: 103496 - DNA, 340 bp, Arabidopsis thaliana columbia
gcgtccgaacacattgagatcttcacccttatcacttgatccaaccatggctcggctccttctcctcgtgcttctgcatccttagtctagtcgattacgcttcttgttccagacacgaagatgagagaaaccgaatctttcaacttcccggtgaagcaaacgatgtctccttctctcacgtctctggttagattacggtcaacgagtcagcacgaagagcactattctactgggtcactgagtcaccatcgagtgaaaaccctgagtctaagcctcctgtcctctggctcaacggtggacctggttgttcctgcgtagcttacggtgccgctgaagaaat

SEQ ID NO: 103497 - DNA, 364 bp, Arabidopsis thaliana columbia
ccacgcgtcagcacacgcgtccggaaaaatattgcggggattacaaaaatcattatcaagattctaggtagtaatccgagtcccggtggctcttacgtgatttttaataactatgactggtggaaagatatgacaatgctcgactttctgaacaaagtcggtaggtttgctagggttggtactatgatggcaaaggagagtgtgaagaagagattataatcagagcaaggtatgagctacaccgagttcacttatcagttgttgcaagcctatgattttcttcacctgttcaagaacgaatggatcaatgttcagataggtggcagtgatcaatgggggaatataacagctggaactgatttga

SEQ ID NO: 103498 - DNA, 388 bp, Arabidopsis thaliana columbia
cgatcttgtctgtggcaaaaagatgaatttcattggtgattctgtagccagaaaccacatggagtctcttctctgcctcctgtcaatggaagaaactccgaaagatatctacctcatggcaaagtttctagtggccggactcgaaaggactcatgctaagaagaccggaacaggaatctatgatctcgacattgacaagcgagcaatgggcaattgatctgctaaatacagacattgccattgccattggaaatcttaacatctcagatagaacagcttgaagatatttaaacgtgacagcttaaaaaagaagaagtttgaggttttggatgtgactaaggttatgctaatgagaccagacgggcacccgaattcttactggggaaat

SEQ ID NO: 103499 - DNA, 416 bp, Arabidopsis thaliana columbia
cccacgcgtcagcaaggttctgagccttctaaatggtggacagtcaagtgggttgatgagcagctctgataatactgtgaagcgagaggctgctgttgatttacctgacttgattgacaccggtgattcagacgatactttgaacaatctgaatgctatagatactggcagtacagtggcgacagcaggtccattgatggatgatgattggtttggggatagctctgacattggactgagtagcagcgagaagaaaactgatgacgacccctttgcagatgtctcatttcatccgaatgaagaaaaagaaagtgcagatgacctcttctctggaatgactgtcggggaaaagtccgctgctgttggtggtaatcatgtgcctgatctatttgatatgtttgggtcaactgcaaaac

SEQ ID NO: 103500 - DNA, 400 bp, Arabidopsis thaliana columbia
acgcgtccgcatcaatcctcctcttagctttagccactttttaaccctagtttttcccgccgccaccatcccccaataaccagcatcttccgaaaatcttaatagtttttgccgaggtacttacagggaaagatgtggtgacacaagagacagcaggtcgtatgataaatatattaaggcaacttcaacagacactgccaccatcggcgttggcctcaacatggtcaacgctgaaacccgaacagcagctcgctctccaatccatgctttcctcctaaattcaatccaatccgatctctctgtttatttttacagttttgtgagctctgttttcaccacaaagcgtcgtcagttttgcatttatgtgtttacaaaagtgtttcttcttcgtttgcatttt

SEQ ID NO: 103501 - DNA, 432 bp, Arabidopsis thaliana columbia
gaccttcaacaagaaaatccaatggctgatccggcaacgagttctccgttgttggatgaccatgtaggtggagaagatgaaagaggaaggagatcaagatcatcaactttggttcaaaaagtgatcgacgtggaagaagcaaaagctcaaatgatttactctttgccaatgatactcaccaatgttttctactactgtattcctataacttctgtgatgtttgcttctcacctcggtcaactcgagctcgccggtgccacccttgccaattcttgggccaccgtctccggttttgccttcatggtagggttaagtggatcacttgagacattatgtggacaaggctttggtgcaaaaagatacaggatgttgggagttcatctacaatcatcttgcatcgtttcattagttttcagcatcctcatcaccatc

SEQ ID NO: 103502 - DNA, 436 bp, Arabidopsis thaliana columbia
cacctcctcctccatggttttggaccttccgctgtatggcaatggagccatcaggtcaagccactctctcacttctttcgtctctacgtccccgacctagtcttcttcggcggctcctcttcctccggtgagaaccggtcggagatgtttcaagcgttgtgcatggggaagcttatggagaagctcgaggtcgagagattcagtgtcgttgggacgagctacggcgggtttgtggcgtataatatggcgaaaatgtttccggagaaagtggagaaggtggtgcttgcgagctccggtgttaatttgcggaggagtgacaacgaggcgtttatcgctagggctaagtgccaccgtatcaaggaggtgatgcttcctgcttctgcaacagatcttaggagattctctgggatggtttcttctaagagactcgattatg

SEQ ID NO: 103503 - DNA, 426 bp, Arabidopsis thaliana columbia
ccacgcgtcaggaaaattttcgtttggccggagatgaagataggggcggttcaggagagttggcttatacggactccggtacttaggccggcggttcaaggctcaattcgccggaatggaaagccgcagcttgagtttcctctctcgaacaggttgtctcgttgtgtggttatggctgttcaaggagggagaggatatgaatctccatgggatgaaaaaccctatgaaactcttcctactggtaaaagggtttatgttgatgaatctgatgttgtgacgtttcttgatccccccaaggagttgattccattggaccctgcttcatataacccggctgcttatctctggaaaaagattgaagacatccccgaagagaggcgccaccatttgctgcaattattagagccaaggcttatatctagagca

SEQ ID NO: 103504 - DNA, 367 bp, Arabidopsis thaliana columbia
  unsure (1)..(367): unsure at all n locations
aggaccatctgagcatctctcagaaacctcaatgaacgtggaaaaagaactagaaatgcctgccgttgaaattttgccagacaatgacaaaaactctgatgtgttggcagttggagtttctggagacagtgacaatgtggtatctgtcttgcccgcttcccaaacttcctctgatcgtgatgaaggaatgattacagttgatgctgaacctacggaagacatgaaacttgatgttccagattctaaattggttactgatactactgttgactctactaataacaaggatgcccatgttgaggctaatactgaaaggcaagataattctagtgcacttgtgctaaatgatgcanataatgaaagtgca

SEQ ID NO: 103505 - DNA, 255 bp, Arabidopsis thaliana columbia
cccacgcgtcagcagacgcgtgggattgatgtcatgaactctattgctcttggccacaacattcctcgtttcgctgctgctgatctacctcataatgagattgctgcgcaaatttgtcatccggctggatttgtgaagctgctggaacaacactgagaacttaattcacgaggatcatggttaggacacttttgcaactgtttttgcacctatgggtgtacacatgtagacagctcagtttttcaaacgtgattt

SEQ ID NO: 103506 - DNA, 336 bp, Arabidopsis thaliana columbia
cccacgcgtccggacgagagagaagtagaagaagaatgatggagatggtggttttgttttattatttagagtaagcttcttcatttttttaaaaacttctattattttgaccttaagaagaaagtgacaaggagaggaagaagaagaaaaaaaacataatttgaggaagaagaaaaaaaattcggatttgttttttcaataaattgactaattgagtactcgtttaaaggaagtgaagagcggttttttggtagtggtggtcgagaaaagagagagtttgtctctgtgactcagagtgaaatcaatagagcgggaaaagattgttgcttttttttg

SEQ ID NO: 103507 - DNA, 106 bp, Arabidopsis thaliana columbia
  unsure (1)..(106): unsure at all n locations
agaaaaatgccggctggacatggagttcgagcgagaacgaaggatctgttcgcgaggcctttcangaagaagggttacattcctctatcgacttacctgaggacct

SEQ ID NO: 103508 - DNA, 312 bp, Arabidopsis thaliana columbia
gggcagtgattaaaacttcgtctccgtgtctgttcaagctcccattcttgtggccttcacgcttcaggaacaaagaccagtatctctctgaaagactacttctcggaaattttcgtctccatggcacccgtgagggggattcttggcttgcaaagggcagtgtccatttggaaggaaagtaacagactgactccagctttgagatcattcagcactcaagctgcatccacttccaccactccacagcctcctccaactcctccgcctccgttagccaggtgagaatccttaagcgcggcgaagaaatcccca

SEQ ID NO: 103509 - DNA, 367 bp, Arabidopsis thaliana columbia
  unsure (1)..(367): unsure at all n locations
ccacgcgtccaccacgcgtccgcagtttcgtttatggaattcctgaacacgccactagcttcgcgttgaagcctaccaagggtcctggagttgaggaatctgaaccctacaggctttttagtctagatgtgtttgaatacgatcatgaatcaccgtttgggctttacgggtcgattccgttcatggtttcgcatgggaagtctggtaaaacttcaggatttttctggttgaatgctgcggaaatgcagattgatgtgttggctaatggttgggatgcagagagtggtatttctttgccttctagtcacagtatgatcgacacattctggatgagcgaggcanggattgtggatacattctttttcgt

SEQ ID NO: 103510 - DNA, 411 bp, Arabidopsis thaliana columbia
aattttcttcgcacaagaatcctgtttcacgacctcaagtttctgcgcctccaggattttctgctcccaacaggctacctcctcctggcttctcgtcacatgaaagagtgggcctatcatcagatactacactaggaaatcgatttcttgactctacttcattgaggaatgcatatcaagtaccacctccagttggtaattcaaatggtgcaagtgatatcgactttgtggatcctgcaattctagctgttggaagagggatggtaaatgctgacttggacatgagatcaggattctcatcacaactgaattcttttgaaaacgaaacaggactccatatgttgagacagcagtctctgtcttctgcacaacaagttaatgggtttcatcatgatctcagaaacttatctc

SEQ ID NO: 103511 - DNA, 386 bp, Arabidopsis thaliana columbia
attaccgttgcttgctatctttcgccgtcgtctctttagcttcttgcgaagatggttcttcaaaacgatatcgatctgcttaacccacctgctgagcttgagaagaggaagcacaagctcaagcgtcttgtccagtctcccaattccttcttcatggtaatcaaaattttaaagctttctccttctcttgaaccctttagcaaataagtctctgtgattagaactgtatgttaatttggagtttaatgattttctcataatccctagctttgacagtgtgttatgtgatggcgatttttggatgtaagtttgagaatctatgtaactagtttcgagtttgtgaattgtatgtatgttttgagtttgtgaatttgatttgtatctga

SEQ ID NO: 103512 - DNA, 273 bp, Arabidopsis thaliana columbia
cttcaacccggcgattcattcaccattcacagagtttgaagaaaacgccgaaatcggaaatggcgtctattgttcttcgatctcgcctgttgccaagattagcaaagctcagatctcgtaatctgagatgtttctctgcggaagcatcttcgacgaattctacatctaggtattcgggagtcacctctacccagtcgatgttttctgattttccaccgccaaatcagccgccacctcctcctcctcctcaagtggaagctgctgccgcggctg

SEQ ID NO: 103513 - DNA, 317 bp, Arabidopsis thaliana columbia
aatcaatagagggaagaatcaaagaaggaagtctgtatcttttgagctctccaaagatgtttgacgaccaagacctcggcttctttgccaattttctggggattttcatcttcataatggtcattgcataccatttcgtggtggcagagcctaaattcgaatgagaatgaggtttcatctttgttagtttctacaaaaaaaaaacttataaatgtgttggaatcaatatgtctttagcattctataggtcgtgatgtttcgccagtagatgagtaatcaatgtattttgacaatgtggttttggatggattaagagt

SEQ ID NO: 103514 - DNA, 409 bp, Arabidopsis thaliana columbia
acgcccacgcgtccggtctccctctcttaaactctctctttctctttctcttttggtttctgggttatttcaaagaaaagaatcaagaaacccctctttctctcttacaagaatcccatcatggtgtttggaaaagggtcaaaccttgacagattccttcattgcacaacacctgtagtgccaccccaatctctatccaaggcggagattaggagtttgaataggatttggcatccatgggagagacaaaaggttgagtttttcagattgagtgatctatgggattgttatgatgaatggagtgcttatggagctggtgttccaattcgtctctctaatggagaatctcttgttcaatattatgttccctatctctctgctattcagattttcacctctcgttcttcct

SEQ ID NO: 103515 - DNA, 285 bp, Arabidopsis thaliana columbia
ccacgcgtccgaaaagaacaaatcgccgagggacaacccaggacgcatacaccgtggaagaaaattattgttgttgttgagggtatttacagcatggaacgggaaatttgtcatctgcccgagattgtttcaatatgcaagaagtataaggcatatgtttacttggccgaagctcacagcattggagcaattggcaagacatgaagaggtgtttgtgaactccttggagttggcacttctgatctggacataatgatgggaactttcacgaaatcatttgggtct

SEQ ID NO: 103516 - DNA, 373 bp, Arabidopsis thaliana columbia
attacctctctctctctatctctacctggctttgtaatttgtttaccgactacaatggtcaaaatttctctactcctataaaaatgggtcgccttgtttttgatcaacggatttgattcatctttctttttacctgtggaggtctttgtcctggccttaataccgtgattagagaaatagtgagcagtctatcttatatgtatggagtgaagagaatactgggaatagatggtggatatagaggcttttatgctaagaatactgtctccttggactctaaagttgtaaatgatatccataagcgtggagggactatccttgggacctcacgaggtggtcacgataccacaaagatagttgacagcattcaaga

SEQ ID NO: 103517 - DNA, 342 bp, Arabidopsis thaliana columbia
gggaaaaggagatagagattgaagatgcgtgacgcaatcatcgccgatcctcttctggccatcgaccatgaaacagtcgcagagaagaagaaacagagcaaaaatctaaagatttctcttttactgcttctgattctcttagcaacttcagtcttagccttggaaccatcagtgacgtggttgaatctgagaatggtgttgtggctgctgacgacgctcgatgttccgagatcggtgcctctgttcttagaagtggcggtcatgcggtggacgccgccgtggctattactttatgtgttggtgttgttaatccaatgtctagtggaatcggtggtggttctt

SEQ ID NO: 103518 - DNA, 258 bp, Arabidopsis thaliana columbia
gcagatcatcgcatacctcagatcctcgtctttgcgcagagctgctttgaaggctctgtccaagacattaactaccgatgagcttctctagctgaaagcacactttgcaaacttaccaacgaataaaattggtgtcaacactttacatagcatcatactggcacgtgcgacacaggcaacagagccaatgatggaatcacggatcccggactttcttgcattgttaaatggacttcagtacatgagggatggattttg

SEQ ID NO: 103519 - DNA, 388 bp, Arabidopsis thaliana columbia
gcaaaatccacgagagaaacagatagaaagttgcaaaagtgcgttcgatttttgcttcttcttctgtttcggattcggatttggatttggaatctgctcctttagcagaaccagaggaaatggtgacgtacgtgagcgcgttgttctacggattcggagggatagtcgttgccggagtggcgctgctcgtggctttccaggagaagcttgtgtacgtcccagtgcttccgggtttaagcaagtcttatccgatcactcccgctaggctcaatctcatctacgaagatattggacaggaacttttgtaagcagaaccagctagtggagatggcaagtgtaagctaatcagatgcatttgcttcgtctcagttttccttcttttttttgg

SEQ ID NO: 103520 - DNA, 348 bp, Arabidopsis thaliana columbia
ggtcgaggcccgcgtccgcccacacgtccgcccacgcgtccgcccacgcgtccgaagaaaaatcgagatgggttcaactccgttttgctactctatcaatccatctccatcaaagcttgatttcacgaggacccatgtgtttagtcctgtttctaaacagttttacttagatttatcatcgttttccggaaaacccggaggagtatctgggtttaggagccgtcgagctttgctcggagtaaaggcggcgacggcgttagttgagaaggaggagaagagagaggcggtgacggagaagaagaagaaatcgagggttttagttgccggaggtggaatcggacgattggt

SEQ ID NO: 103521 - DNA, 402 bp, Arabidopsis thaliana columbia
ccctttctccaacacctaccaaaagcctctctctctctctagttcttgatttttcaagatttcaagaaaacatggctgaccaaagtggtgggttggttatgatgagagagtacagaaaaggcaactggacgttgaatgagacgatggttctcattgaggccaagaggatggatgatgagaggaggatgcggcggtccatcggccttccaccgccggagcagcaacaagatatccggagtaataaaccggcggagctacggtggaagtggatagaagattactgttggagaaaaggttgtatgagaagtcagaatcagtgcaatgacaaatgggacaatctcatgagagactacaagaaagttagagagtacgagagacgaagggtagaatcgtctattaccg

SEQ ID NO: 103522 - DNA, 366 bp, Arabidopsis thaliana columbia
attcttctcaatccaaaatccagctgataaataaataatttttctcttgtcgtcatattaaaaaaaagaaagattatctgtatttcaagtttcatgagcgtttgccaccacaacattgtcttttcggggttttagtcatacttaatggcttccaattcggagaaaaatcctcttctttcagatgagaaacccaaatcgacggaggagaataagagttctaagccggaatcagcttctgggagttcaacttcatcagctatgcctggcttgaatttcaatgcttttgatttctctaatatggctagtattctcaacgatcctagcatcagagaaatggctgagcaaatagctaaagatcctgcgttt

SEQ ID NO: 103523 - DNA, 341 bp, Arabidopsis thaliana columbia
ctcaaatggtgtttttgggctttatcagatgccagatttcatctgtatccatctgctctctatttctaggcagaagctaacaacagctgtcttcaatgagcgtggtaattggctgacctttggttgcgcgaaacttgggcaactgttagtctgggattggcgaaccgaaacctatatactgaagcaacaaggacactattttgacgtcaactgtgtcacttactcaccggattcgcagctcttggcaactggtgctgatgataacaaagtcaaggtgtggaacgttatgtcaggaacatgtttcattacattcaccgagcataccaatgccgtgactgctc

SEQ ID NO: 103524 - DNA, 246 bp, Arabidopsis thaliana columbia
tatggtgataatggctttggtgatgatgatgatgcttcagcattgaaattgttaaatctgagggtttgttgtattttctatggttttgttgatatcaaaccagagatgatgattcttcttcttctttacgtttccacagttcttcttatttgggggttgttggatttctctgacttgtcgttttttttttttttgtttctttttggattcaatctgttgttttattcgttttcccgggatttgttt

SEQ ID NO: 103525 - DNA, 392 bp, Arabidopsis thaliana columbia
acccattcgaatttcctcttatgatttaggagattctgtgttagtatccttctttttgttgtttatttctttatttctctgccatgtcgaaggaacatacaaatctgaaattcttcttcattatatattagcttcacggtccatgttttttctgttctaatttttattattatgtgttaatttgatctcaggacaccacaagcttatttcataagaaacttcaaattagaatcagaaacaagagcatccttcttcatttacacaggtaaattaggtgtaaaaatggtgatgagaagtgtggatctacgatcagataccgttactagaccgacagatgcgatgcgagaagcaatgtgtaacgcagaggtggatgatgacgtcctcggatatga

SEQ ID NO: 103526 - DNA, 414 bp, Arabidopsis thaliana columbia
gtctcctctgagagtccgtacgcatcgacgattctctcatcttctctcaaacacgacgacactgggttggtaaattagagttgaaagatgtacaacggaatagggttacagacagcaagaggatcaggaactaatggttatgttcagacgaataagttttttgtgagacctagaaatggtggtaagcctgttaaaggtgggaaaggttttgaggatgatgaaggtactgctggtttatctaagaaacccaataaagctatccttgagcatgaccgtaaacgtcagattcatcttaagcttgctattcttgaggataagcttgctgatcagggttattctgatattgagattgctcagaagcttgaggaagctagagtgagtcttgaagctgctgctgctgctaatgaagaagag

SEQ ID NO: 103527 - DNA, 130 bp, Arabidopsis thaliana columbia
aatactcaaatgttcggctcaaacacgctcgacgaccatgggggtctcgttcaacacaacgcttcatcaaccttctctgagtccgaactgtaccatcacgctttattctgggttaaggcctcaatctgca

SEQ ID NO: 103528 - DNA, 388 bp, Arabidopsis thaliana columbia
  unsure (1)..(388): unsure at all n locations
cccacgcgtccgcaagaagctcactgtctcgagtcttgtcaagtctcaggacgaattcgaaagagaggtgaagaaacttggaaaactcaggcattcgaatctggttaaactcgaaggatattactggacaacttctctccagcttctgatctatgagtttctctctggtgggagtttatacaaacagttgcacgaagcaccaggaggtaatagttcgctttcttggaatgatcggttcaacattatccttggtacagcgaaatgcttagcttacttgcaccaatcaaacatcatccactacaacatcaaatcgagcaacgtgttgctagacagctctggtgagcctaaagtangagactacggattagcgaggctgttacctatgcta

SEQ ID NO: 103529 - DNA, 229 bp, Arabidopsis thaliana columbia
ccgctgaagaacatgtcaagaaggagtatggaaacaatacttaaacggttccaatctaaagagctcaatttactggttgccactaaagttggtgaagaaggccttgatattcagacatgctgtcttgtgatccgttatgatttaccagagactgttaccagcttcatacagtccagaggtcgtgctcgaatgcctcagtctgaatatgcgtttctagtggacagcggaa

SEQ ID NO: 103530 - DNA, 336 bp, Arabidopsis thaliana columbia
gtctcttctcactctgaaagattctctgacgatcagagatctcaatcaccggaattaaactctaaaccggtaagacgagaagaagaggcaacggcggatatcaagattcttacggagaggctctctgcagctcttttaaatgtcagtttaaaagaagatcttgctaaacagcatgctaaagttgcagaggaagctgtctcacgttgggaaaaggcagagaacgaagctgcggctctgaagcaacagcttgatgcttctacaagtaaggtttcggctctcgaggatcgaaatagtcatcttgatagtgcgcttaaggaatgcgtgaggcaactctgg

SEQ ID NO: 103531 - DNA, 364 bp, Arabidopsis thaliana columbia
aggacgcgtgggcttacaagcgcgctagaatctgaatctggccatggcgaagattcgagtctttcgtggtctatttcccgctcacgctcccgctccagttcaagatcatcgtcgtcttcttcttattcttctccaatttgattaattagagattggatttggcgattttggtgaaatcattcatgttcaacttgcgatagatcgagctgctaatctttcaagaggagatgcatatgttgaattcaaggcaaaaatagctgatgctgagaaaccacagctgtacatggatggtgtatgtttcaagtgatccaaagggagatgctttaaaatctgataatgttggtactgacattgagaaatatga

SEQ ID NO: 103532 - DNA, 402 bp, Arabidopsis thaliana columbia
ccacgcgtccagaagtgtaacggtggaaacggaggaagtgacaaagaagagaaaagaagaagtgaggaagaagagagtagaagatattggtcaagaggatgcttggtttaagaacaacactcaacaaaaacaagttgaggtttctgttacacctggtggtcgatggaatagattcaagacttactcaactattcaaagaacattggagatttggggttttgttgtacagtttattttcaggacttggttaagcaataagaagttctcttataaagggggaatgactgaagagaagaaggttttaagaaggaacgttttggctaagtggttgaaagaaaacattttgagattaggtcctacatttatcaaaattgggcaacagttctctactacagtggatat

SEQ ID NO: 103533 - DNA, 408 bp, Arabidopsis thaliana columbia
gtcgccaacgagtcaatctcacgaaccgcggcgaagaacccgtacgacgttcttccccagtctgctctcgtagaagtcgaagtgaagcatctcgttgctcacgtcccaatgcacgaactctcctctgtaccgagtcattagactcttgattcgccggttaaccgccgaccggagatcttcgccggttagattacgaacccagtcgggattgtatttgggatcctcccagaatatgttgtggccgcgagcgatgattctgttagctctgacgagattcatcatcttatcagccaatgtgtagttgagtttgccttgatcggactccgtcgcgtaccatttcagctcgttctcgaataccgtggcgtcgaatctcttgacgaaccattcctaccaaaacagaatccgttt

SEQ ID NO: 103534 - DNA, 364 bp, Arabidopsis thaliana columbia
atggaccgtgagacaaaaggcctatatcgaggctttgaatcaagatacaatgtttactccacagtttgttgttcaaggtcgtgttcaattacttgggaatgaagaagagtccttgcttaagtctattgttgaagctcctaggtttccgtctcctgcgtttcgggccacatttcaaagaccaacatcagaaacccttcaagtatctctcaccggagctttgaggatgaaagtggactcgagcgggatcgatataatggtggcgctatatgaaaacggtttggtgaatgattgcgctcgaggagagaactcaggaagagtcttgtccaatgactacgttgtaagaaagctagaaaagttatgcacc

SEQ ID NO: 103535 - DNA, 126 bp, Arabidopsis thaliana columbia
attcttcgtcctcttctctgaatagtaacaatgcgagtcatcttcctccccaaatcgtccagggcgaatctctctgttttccactaccaccttcacgtcactcaccctcgtccatcaactcaagat

SEQ ID NO: 103536 - DNA, 404 bp, Arabidopsis thaliana columbia
  unsure (1)..(404): unsure at all n locations
atatgcttcatctgatgaaaccgataaagatgaagaagctgagaaaactgagatgatgaccaatgaaaataacgatggtgataagaagaaatcggattggcttagatctgttcaattgtggaaccaatcaccagatccacaacctaataataagaaaccgatggtaattgaagtcaaacgcagcgctggtgcgtttcaaccgtttcaaaaggagaaacctaaggctgcagattctcaaccacttattaaagcaattactccgacgtcgacgacgacaactagttccacggcggaaaccgtcgggggtggaaaagagtttgaggagcagaaacaatctcattcgaatangaagcaaagacgttgctggtcaccggagttacaccgcagattcttgcacgcgcttc

SEQ ID NO: 103537 - DNA, 306 bp, Arabidopsis thaliana columbia
aatctcttcaatggaacgattccggcggcgatgtttaaacaatccgggaaaatcgctgccaatttcatcgccggtaagaggtacgtttatatcaaaaacgatgggatgaagaaagagtgtcatggagctggtaatttacttgagtttcaaggaatcagatccgaacaattaaaccggctttcaacgaggaacccttgtaatatcactagcagagtctatggaggtcacacttcgccgacgtttgataacaatggttcgatgatgtttctggacatgtcttacaacatgttgtctggatacataccg

SEQ ID NO: 103538 - DNA, 412 bp, Arabidopsis thaliana columbia
cagcttattacttcaaagaagctctcaataatctccttcacaacgtctcccaaaccctaaacccttattccctcatcttcaagatcgctgcttacaaatccttctcagagatctctcccgttcttcagttcgccaactttacctccaaccaagccctcttagagtccttccatggcttccaccgtctccacatcatcgacttcgatatcggctacggtggccaatgggcttccctcatgcaagagcttgttctccgcgacaacgccgctcctctctccctcaagatcaccgttttcgcttctccggcgaaccacgaccagctcgaacttggcttcactcaagacaacctcaagcacttcgcctctgagatcaacatctcccttgacatccaagttttgagcttagacctcct

SEQ ID NO: 103539 - DNA, 415 bp, Arabidopsis thaliana columbia
atctgcacgttttttaacaatttgtgctcttcatcttccgtttcttcttcgccgtcagattcgactgtaactgattcatgagttaaaagagtatgttcgatacttgtggcccaaaaggagtcaaatctcaagtcatcagtggccaacgcgagaactttgtgagatagtatggactcaaggtactcgcaaagttccgaaacgggtctaaacaaatgcacattgaatatacaaggaggacctaaacgttttgctcaaggaagcaaagcatcatctggatcttttaagaaagggtttagaaaaggatcagaggggctttggtctatacgtcgatcgattggactcggtgtttcgcgcgctgtgtttccagaagatcttgaagtatcagagaagaagatatttgatccacaagacaagt

SEQ ID NO: 103540 - DNA, 262 bp, Arabidopsis thaliana columbia
acacacaagccgtgtaccaaggggctttggttgtggagttctcctataaaaagaacagctcttgacggaactgaatacaatcttttgttattagatagtgaaggaattgatgcttacgaccaaactggtacctacagcactcaaatattctcattagctgttcttttgtcaagcatgttcgtgtataatcagatgggaggcattgacgaagcttcactggatcgcctttctcttgtcactcaaatgacaaagcatatccgcg

SEQ ID NO: 103541 - DNA, 402 bp, Arabidopsis thaliana columbia
agcatactcaatacgacattgttcatcaactatctctctgcttatattgttgagatagaccatgaaaatatactcggtcctgttagcttccttgccgatcttggtggtttgtattgcatcagtattggcatatttttctacctactagtgcagtgtgagtacaggatcaagaagctgcgaaatgaagatactgttttcaggaagataaggaatcgtcgtaaagctctagatcactgggataaactgagaagatatgttgcatacacatgggattgcagcatattggtcgatgatgccatcaaaacgacaaaggtatcaggaatgtgtggtttaacgagacctccaacatcttctaatagctcggaacacggggaatcgatcatggcgaacaagaagcctaac

SEQ ID NO: 103542 - DNA, 410 bp, Arabidopsis thaliana columbia
aaaattctctctttgattcctatcttcttctctttattttcactttgtgctttctctgtctctcctattatgagtctaaaagtctactagctgttcaatagttttgtctttctgtgtttcttcttcttcaaaaccgaaagaaattcaaaaagagtctttcgctgcttgttagtggggtgaggaacaaatgggaagaacaccttgttgtgacaagattggtttgaagaaaggtccttggacgcctgaagaagatgaggttcttgttgcgcatatcaagaaaaatggacatggaagctggagaacacttcctaaacttgctggtttacttcgctgtgggaagagttgcaggctgagatggacaaactatctgagaccagacataaagagaggtcctttcactgctgatgaag

SEQ ID NO: 103543 - DNA, 393 bp, Arabidopsis thaliana columbia
ccaaactgtcagaactgtgccttcttcacagagccgtgaggaaaaactctaagcctatggttgaaatgctcttgagatatattcccaagcaacaaagaaacagcttgtttagacccgatgctgctggtccagccggcttaacacctcttcatattgcagctggtaaagacggttcagaacatgtgttggatgcgctaacagaagatcctgcaatggtggggattgaagcgtggaagacatgtcgagacagcacatgcttcacaccagaagactacgcacgcttacgcggtcagttctcatacatccacttgattcaacgcaagatcaatagaaagtcaacaactgaagatcatgttgtggtcaacatcgcagtttctttctcagacagagagc

SEQ ID NO: 103544 - DNA, 373 bp, Arabidopsis thaliana columbia
aaactcttttccacactcttcttagattattactattcgtagccatctctcatactctgtcccctctcgccggttctttccggatttctaatgactttccggcggttttcaacttcggagactctaactctgacaccggagaacttagctcgggtcttggattccttccacaaccttcctatgaaataaccttctttagatctccaacttccggaagattctgcaatggacgtcttatcgtcgattttctaatggaagcaattgatcgaccatatttgaggccttatttagattcgataagtcgacaaacttaccgaagaggctgcaattttgctgcggctgcgtcaacgattcagaaggcaaatgctgcatc

SEQ ID NO: 103545 - DNA, 398 bp, Arabidopsis thaliana columbia
attctgtgggttgtaaaaggcattcgctttcgagtgttggttgtcgatttcgatgccccaatctgggacctgggtactgttcccaagctccacctggattcttattgatgtgaagctcgtataacttgtgaatcgatgcggcctttttaatttcgcttgggatttcttaggtatttattctctgtatccggatctctatctataatcggatcttgtacctattgggttagtactcttgatctgaatgtaataagaagcgtgtttttttttttttaataatttggaggagcttgtgttttagttcgttgagatctcgttcgttccgaatgtgggtttattaaggttcttgaaaaagtctgcaactttgaattaggtgcattaccaagaaatatatagag

SEQ ID NO: 103546 - DNA, 414 bp, Arabidopsis thaliana columbia
gaatcgagcagcttatcttggccactgttcctgatcccaaaagtggcagggcgcctagtattgtaacagatgaaaatattcttttgctttttgacatacaacagaaggttgatcaaattcgtggaaattattcaggttcagaggtctctttgcccgacatatgtttgaagcctttgggagaggattgcgccactcagagtattctgcagtatttcaagatggactctggaacttttgatgattatggaggagttgagcatgctgagtactgtttccagcattacacttcatcagagacgtgtttgagcgcttttcaggcgcctgttgatcctagtgcagtgttgggaggattctcggggaataattactcagaggctactgcgtctgttgtaacatatccagtcaacaacgtca

SEQ ID NO: 103547 - DNA, 421 bp, Arabidopsis thaliana columbia
tccaatctcaaatctgaatggaggaagtgatgatttctccggtggagcacgaccctcagggccaggttaagcagcagcaagcggccggcgttggtatactgcttcagattatgatgctcgtgctttccttcgttctcggccatgtcctccgccgtcatcgattccactatcttcctgaagccagcggttcgcttctcattggtttaatcgtcggtatacttgctaatatctccgatactgagactagcattaggacgtggtttaatttccacgaagagttcttcttcttgtttttgttgcctcccatcatattccagtcaggtttcagtcttcaacctaaaccattcttttctaactttggagccattgttacctttgctatcatcggaacttttgtcgcttcagttgttactggtggtct

SEQ ID NO: 103548 - DNA, 396 bp, Arabidopsis thaliana columbia
accacgcgtccgcggacgcgtgggctcatacttcaacattctagctttctaagctttaacatggagaagaaaaaaaagacgccataaaattaactatgttttttaaaactccttaaattgcggtaaattggtgaaaaaagattgcggtagatttagcatttatccagtttttcaatacataattagtagattcttttttttactttctctaaacaaataattaggattgtttttttttgtcaacaaatattaattttgttataaaagcaaaaacaaaatgacaatctggcaatcaaattaacgcgtctccttgtcccctaaccccacctgtatatatacttctccgtctcttcctcttctccttagcagatgcttttgggaaaaaaaatatatacc

SEQ ID NO: 103549 - DNA, 417 bp, Arabidopsis thaliana columbia
  unsure (1)..(417): unsure at all n locations
acgactattactcaagattttgattctgactttcaggaagtaaaaatatggactttgatgatgatgacaaaccaaaagaggttaccaaaacccgtagattcgctcctggccgtgccggaaagtctaaacccaaacctaaaccggaacccactgctgataaaccggtacagccgccgccgcagtcacaaactgagtccgtgagcaagactgagcatgacgttgatgctaaattcgttggcactaaggttgaaactgaggtttgtaatggctctgtgaagatggagatcgattcaaaagtcgataaagagcctgagatcatggaaactgagttgatggaggaagatcagcagcttccattgcaggaggagaaggangaagaagaagaagaagacgacgttgttgttcgtgaaattgatg

SEQ ID NO: 103550 - DNA, 405 bp, Arabidopsis thaliana columbia
gattgcgtcactgtagtagtagtagtaatgtctcttcttcttctcttctgttgcttctttacctctctttctatttctcattctcatggagcttccactattcacatttctcctactcagcctcccgcagcttcttcggagaaaaccggttctgtaatgaaatttatagtagcagaggcaccattattaggacctgcaggtttcaacaaccctcaagtaattgaagttgcttcagtagctttagctgctcaaagaacatatagaaaagatcctctcaatggttttgagaaatatactggaggatggaatatcagcaaccaacattactgggcttcagtgagctatacagctgttcctctctttgttcttgctgctgtttggtttcttgggtttggcatctgttta

SEQ ID NO: 103551 - DNA, 419 bp, Arabidopsis thaliana columbia
atctgtaacagtcctaccgggagagtcacgcattgtcacattttctctggcttgggactgccctgaagtgcagtttcctagtggtaaaatatattctaggcgttacacaaagttttatggcaataatggtgatgctgcagcacaaattgcacatgatgctattcttggacatagtcaatgggagtcctggatagaagattggcaaagaccaatacttgaagacaaaagactgcctgcatggtaccctgtcactctcttcaacgagctttattaccttaattcaggaggaactctttggacagatggatcatccccagtacatagcttggcaggagtcagagaaaagaagttctcacttgataaatcccaactcggtctaaagaacgatatcgatgtaccgcatcagaatgatacagctg

SEQ ID NO: 103552 - DNA, 359 bp, Arabidopsis thaliana columbia
atagcatctagggttctcttcttctgttattcaatcgtcgtttttatgggtctttttggatgattgatagtttttaagtttctttataattctctaatcgagagagggagattggcagtgatgactcggaaatttcaagctcaacagaccggaattaggcgtttcttccaatttattggttgagtcgtttctgtgtcgataaccccgctgatctgagccttcctctcttttcatttgattctgatttgtttgcgttttcgaatttgaaattctctggtaatcgatttatacgtttttatcgattttgaaatcggtgtttgcgcttttttaatgatgatggggattttggagattacgat

SEQ ID NO: 103553 - DNA, 416 bp, Arabidopsis thaliana columbia
aaggttttctctctctttgcaatcatggagtctctagggaagctacagcttcatcagcaaccaaatcacctctctttcactcatttctcttcatctttccccaaaaagccttcgtctttctctctcagatccttacccagatcaacatcatccttcaaatgcatttcaatcaaagcttcctcatccaagtctcaagactcgaagctctcaatcctcaaatccacatgcgtcagcttcactgcggcagcagcactgttccttgtgaatctccagctcaaaccttcaccggcgattgcggctcctgtggcggcgacgccgttaatggaatctctcaaacaaagtaacggaaacgtttcatttgaagaagaagagagatcactcgaagagtatcttgcttctcaccctgatgatgttga

SEQ ID NO: 103554 - DNA, 418 bp, Arabidopsis thaliana columbia
gcacaagcgatggcctttgaggtctcttgtctgcagcttcagctcctctgcggcggagacagttactacttcaacggcagcttcagcgacggcggcttttccgttgaagcatgtgacaaggtcgaacttcgagacgacgctgaatgatctacgctcactcgtaaaggctgcagatttcgtggcgattgaccttgagatgactggcgtgacaagcgctccgtggcgagactccttagagttcgaccgctacgacgtcagatacctcaaagtcaaagactccgccgagaaattcgccgtcgttcagtttggtgtctgtccctttcgttgggattctcgtactcagtcattcgtgtcctacccgcacaatttctttgtatttcctcgtcaagaactcacatttgatccaccagctcatgaa

SEQ ID NO: 103555 - DNA, 427 bp, Arabidopsis thaliana columbia
  unsure (1)..(427): unsure at all n locations
cacgcgtccgaccacgcgtccgcccacgcgtccgcctgaaagccctaatccgatctcagattcttccatcttccaggaggaatttcagtgtggcgaccacacagcttggcattccaacagacgatctagtcggcaatcacaccgccaaatggatgcaggatagaagcaagaaatcacctatggaactgattagtgaggttccacctatcaaagttgatggaaggattgttgcttgtgaaggagacaccaatccggccctaggtcatccaatcgagttcatatgcctcgacctaaatgagcctgcgatctgcaagtactgcggccttcgttatgttcaagatcatcaccattgaggcaaattctgaaagtgaactgctggtctctctcccctttttattgcatttttaagtttgtgtantgttttttt

SEQ ID NO: 103556 - DNA, 417 bp, Arabidopsis thaliana columbia
aagaaatctgaagagactgaatccgaagaggagaaagagacatggggcttgctgaaaatcatgttcgaagaggaaggaacttcaaggacaaagttgatcagccatcttggctttactttgcctgttgcggaaaaggatcaggcagtagatgggctctcatcagatctcaatggcattagattagaggatactgcggcagatgcactggatcttgacgacagtaacgaggcagctgcatttgcgatggataatggagaagacttctttaacaactttcctgctaaaccggatacacctgtatctacatctgccaaagattttatgccttctgacacagatttttctaccaaaggagaagaaacgcaagaaatgcaagaagaagaggaagaaagttctgacccagtttttgataatgcc

SEQ ID NO: 103557 - DNA, 208 bp, Arabidopsis thaliana columbia
catctatcttcatctctatctaagcggaggaaactcaaattgttacagttcacaagtaatctcttcctcaagctttctctctctaccaattaaaggtttttgattcattcaacacagacgcaaatcaatttctctcgtgtctttacgatgatctcgaagaacaatggtttgtcatctgcgctcgtttcgaatctccaatatgtgcttt

SEQ ID NO: 103558 - DNA, 382 bp, Arabidopsis thaliana columbia
cacgtggtaaatctattgattttagattttgatatgtgtaaaacaaaattttcatttttatatagaaaaaaataattgtaagtaattataaatatcaaaaagttagttactaactttcaaaaccgtactttatataataagatatgaaaattcactaaaaaattccatacaactttaggcatatagagcttatttatactaaaacccctaaaatatcctaaaacaaactaaaccagcaagactcatgttgcatgtgtcgtcattttactgtgacgcatgagtaagcagcactgagagattttagtcactcacatataaaaatatggtccattgggtgtggattagtgtttcaaggagccatacaaagattgtatgtcactgt

SEQ ID NO: 103559 - DNA, 102 bp, Arabidopsis thaliana columbia
cacacgcgtccgacttttataatacgaccacgtttgtgactccattaatggcggtctcatgctccctcaattcttcatgatctaactactacgagatctgat

SEQ ID NO: 103560 - DNA, 356 bp, Arabidopsis thaliana columbia
  unsure (1)..(356): unsure at all n locations
aaatcctagggcacaggtgaaatcgccgagtgacgtctagccaccgcaccgcctccttctccggttatctcgctactaatcagactattccacagctatgtcacaggtagacaacagaaattcatcagcagccaagcgtgctagaactgacggggggcgtagagaagatgattggatctgcccaagttgtggcaatgtcaacttttcattcaggacaacttgcaatatgcgtaattgcactcagcctagacctgcagatcataatggaaagtctgctcncaaacctatgcaacatcaacaaggtttctcatcacccggggcatacttaggatctgggggtccccctccagtatata

SEQ ID NO: 103561 - DNA, 285 bp, Arabidopsis thaliana columbia
acgcgtccagaatgagaggcgtaacaccaaactattaccattcttacactttcttcttcttcttcttcgttgtcttattagctctgtttcttcatgttttctcgataaacactttgtcagcgagagagactctaacaatctcaagcaaccgaagcattgtgtctcccggtaacatcttcgagctaggtttcttcaaaactacaacaagctctcgaaatggtgatcattggtatcttgggatttggtacaagtcaatctctgagagaacttatgtatgggttgcca

SEQ ID NO: 103562 - DNA, 369 bp, Arabidopsis thaliana columbia
cccacgcgtccggatagattcatctttcaatctttttttatcttaaaacaaaactttgtgtgaagagaaagatggagatagaatcaaagttcaagagaatatgtgtgttttgtggaagtagtgctggtaataaagtcagttacaaagatgctgctatcgaactcggaaccgaactggtatcgagaaatatcgatcttgtctatggtggagggagcattggtttaatgggtttgatttctcaagctgttttcaatggaggtcgccatgtcattggggttatccccaagacactaatgccaagagagataacaggagagacagtgggagaagtgaaggcagtagcagacatgcaccaaaggaaagctgaaa

SEQ ID NO: 103563 - DNA, 280 bp, Arabidopsis thaliana columbia
aagcaaactttgctctcggttcacttggaggtgatcctcttaaaacaaccggaattgttgaacttggcggggcttctgctcaggtgacatttgtgtctagtgagccaatgcctcctgagttctcacgtacaatatcatttggaaatgtcacatacaatctctacagtcacagcttccttcattttgggcagaatgctgcacatgataagttatggggttcacttctctcaagagaccataattcagctgtggaacctacacgggaaaaaatcttcctcga

SEQ ID NO: 103564 - DNA, 355 bp, Arabidopsis thaliana columbia
caggggaccttctgcagcattttttgactgtcatatttgataggctgggcaagggagagtcatcaaatgatgattttgagttgaacataatcattcaggaatcaattagaaattcagctgataccatgttgttaagcagtcctgatgcattggtggtatctatttccagtgaagggtgtttggacagagacaaagatgacaagggcgacgtaaaatccctttcttcacctcgtgaaagcagcgttaacaattatgcgatagattgccttgaatctctcaaattcacatacaaggtgccgtggccgcttgagcttattgcgaacagcgagggcattaagaagtataaccaggtgat

SEQ ID NO: 103565 - DNA, 319 bp, Arabidopsis thaliana columbia
gagatagagaagtacccttataggtctcataaacttcatcactttcctcctgtcgattcctatcctcggtggtggaatatggcttagcagccgagctaactcaagcgattgcctcagattcctccagtggccactcattatcatcggaatatcaatcatggtcatatctttagccggaatcgccggaacttgttaccataacaagttcctcatgtggctttacctttttcatcatgttctttgtaatcgctgctcttatatgattcataatcttcgcttacgtatttactgatataggctcatgccggtttgtgatgaa

SEQ ID NO: 103566 - DNA, 380 bp, Arabidopsis thaliana columbia
  unsure (1)..(380): unsure at all n locations
acgcgtccgctctctctctctctttctctgactctctccttgatgcctcgtgactgcaaccaaagcaatttaaaaccgccgcacttctcatgagtcttcttcctcatcatcatcatcatcaccgttaactgtaatttatcttctccgatcttcattctccgccatgcgctcgccgcatgctttccgtaacggcgaatctccgactttacgggaccatactcacttccactcaaccgtcacagctcagaaactccgtcgattcaactccttaatcctcctcctccgtctcgcttctttctccttctctctcgcttccgccgtctttatgctcaccaattcncgcggctccgcttctcctcactggtacgatttcgacgctt

SEQ ID NO: 103567 - DNA, 221 bp, Arabidopsis thaliana columbia
ccacgcgtccggtatctgtgttggttctacttatctcgcttttttatggttccatattctcgtatggggttctctgttccatttagtaagtgcaccatgagggttctgaacaattatgccatatgatgtcaagagtcccgagtttcatgtccattgcatgtatttagtaatgaatctgtgtgtcttaactgaaaatgaggaaggcctatgagtcctaaggt

SEQ ID NO: 103568 - DNA, 361 bp, Arabidopsis thaliana columbia
gaagattcttgtctctttgataaattctcggagtaggaggaatctctgactccttcgggcgagttgagctatgtggagttcggttgccaatttgaaggagaatttgaacaagattgcgcacgatgtgcatgacgacgacgaagatgatgatgaagatctcaccatttatgggtccaccaatggcggcactgatcggaggaattctaatggctttaggtattcgaggtctccaatggccaatggtttcgaatcgcctgttaatcctgagattgagagatataaagcagagatcaacaagcttcaaaaatcagaatcagaaatcaaagctctttcagtaaattatgcggctctactaaaagag

SEQ ID NO: 103569 - DNA, 366 bp, Arabidopsis thaliana columbia
gcgtccgcttttaaccaaaaaaatcaaacaaaattaccataagtttattacttcatgaagtaaataagatatgatctttggttttttaatggctataaatgttttcttatcctcttatcttatcaacaacatcttaacatagagactaatcaacattacaaacaattttacttcaagaaaccaaaacatgagccaatcatcacacaaccacattaaaccaaaacaaaacaaaataaaactccttttcttctctgcaaattgccatctgtttttcctatagacccattgtcctcctctcatttctctctttccccatttaatcttattttcaaaagaaaaaaaaatcacatctctatatcaccacac

SEQ ID NO: 103570 - DNA, 387 bp, Arabidopsis thaliana columbia
ctggttattctcagaatcttggatctggctatcctggaagttcagtgagtggtggcgcagaaggaggctctcagatttctttgagttctcgccatccatcaattacaggtgctcctcaagagactgacattggtggtggatacagatctcatttatctacagctgctagtcattacggaacacaatatggctctgtgtatggatcaacttctcttagcagctctcagcctttaagcaccaatggtttaggttcatcagttttggataaccgctcgggatatgtccctactttacctgattcaccaaagtttgcatctggaagctatttgtctccctcgagccatggttatggtcaaaagacggacgatttgtattccgataagctgt

SEQ ID NO: 103571 - DNA, 357 bp, Arabidopsis thaliana columbia
gcaagatctcgtcaattctctcttcctgactacgttgtctttgtcatttctgaataccgcaaagtcttacggaaaatgtacgatttgggtgctcgacgtgtccttgtgactggaacaggaccaatgggttgcgtcccggccgagctggcgcaacgtatccgcaacggcgagtgtgctaccgaactccaacgagccgcgtcactattcaacccacaactaattcaaatgataacagacctcaacaacgaagttggatcttcggccttcattgccgctaatactcaacaaatgcacatggacttcattagcgacccacaagcatatggattcgtcacgtcgaaggtggcttgttgtgga

SEQ ID NO: 103572 - DNA, 343 bp, Arabidopsis thaliana columbia
cccacgcgtccgcccacgcgtccgaggttttcgtgagagctgatctcaatgtacctctcgatgataatcagactatcactgacgataccagaatccgtgccgccattccaacgatcaagtatttgattgaaaatggtgctaaagttatcctctccactcatctggtaatattattcccacacactccttacggtttgattcctccatcacctgaactaaagttgaacactttgatctttcagggaaggccaaagggagtcaccccaaagtttagtttggctcctcttgtccctaggctctccgagcttcttggtattgaggtcacgaaagctgatgattgtat

SEQ ID NO: 103573 - DNA, 99 bp, Arabidopsis thaliana columbia
aaaatctaatgattatatagttaccatttatattcttacgagcaggagaagacgttagggcgtctctgtatttgatcattgtttgtaatgctttggtct

SEQ ID NO: 103574 - DNA, 394 bp, Arabidopsis thaliana columbia
gggtcgagcacgcgtccgagaagacatttttatttagatttccctctgatcctctcttttagatttcgaatcgagaccagatctgcgtgaagatgatagagaagtgtataggagcgcatcggtttcggagattacagagattcatgcgtcaagggaaagtgacgattctttgtctcgttctcaccgtcatcgtcttaaggtggcacaatcggagccggtaagtttggtacgccggagaaagatatcgaggagatccgtgagcatttcttctacacgcgtaaacgcggcgagcctcaccgtgtcctcgtcgaggtctcttccaaaacgacgtcgtccgaagacggaggaaatggtggtaacagctacgagaccttcgatatcaacaagctattcg

SEQ ID NO: 103575 - DNA, 398 bp, Arabidopsis thaliana columbia
aagcctgggaattttcgttacctccttcgttcttctctgatctcgaattcaataccaaattcttcaatctcccgaatctgattttcttatcactatccctggataacaaaagcccccaaagtaaaaacccaattgcgattccctcgtaaaccaatctagggttttcgcgagttcgtctctgagcttgtttgtttgtgatcgtgtgagaatgtctcggtgttatccgtttccaccacctggttatgtttggaaagaaagtctgatcgaatcgatcaagggggcataggaggaagtgaagaaagatagaaaacacaagaggaatgaaaaagatagaaacgatagggataatgaggcggggaggagcaggaagcatcggcataagagacggcggaaagatg

SEQ ID NO: 103576 - DNA, 283 bp, Arabidopsis thaliana columbia
gggcaaaaactagaaaaaaaattgatggatttttttatatggctacaaaagaagattgttggatacgtaatcgaaaatgacgttatccttcaagacttgttcgtcgtcttctcctcgattaacaccaaaatccatcgccggagcaggagacgatgcttctcaattcttccatcacaagacaagttacagagcacacacaaccacactcttcttcatcctcgtttctctttctctctttggtttcatctctctttagtattcccccaacacgatttatcgagct

SEQ ID NO: 103577 - DNA, 406 bp, Arabidopsis thaliana columbia
aatgacattggtaaaggcatagaaaaaagaaaaaaaaaactgttcttcatcatcatcgtctctcccaagaaaaaccatgaaaatgaagaagaaaggaaaagtttatccatctcctcctcctcctcctcaatcttcatcatcttcttcttcttcgaaccatctcaacgaagaagatgatgattctctctctgtgttgaagcttcttccagcgacgattttggttcttgtttctgttctctcctctgaagaaagagaggttcttgcttacttaatcacaagaggaaccaccatttccgatagaggaaactcttcttcaaagaataagacgaagaagaagagcaacaaatctagcaaaaatcacaagccaccagttttcgattgtgagtgtttcgattgttacactaac

SEQ ID NO: 103578 - DNA, 200 bp, Arabidopsis thaliana columbia
accacgcgtccggagactttataacgaaatgtcaacacccatcttctcgattcatcaatttctctaaggttcttcgttttcgttgttgtgaggaattttgcgccgatgtcggcggagagttgtttcggaagctcgggtggataaagcagcagcaaaggagtggctactcatggtggtagctatgttcattataatgtcta

SEQ ID NO: 103579 - DNA, 356 bp, Arabidopsis thaliana columbia
agttctgcataagcacacagtggtattaatgcaaaggctgacaaagaagaatctgcaaagaaacagagtggctctgctataccagaggttcttggactatgacagtcaggtggttgtagctgttctaaacaagacgaagattcctcgattgttataccaacaaaatatagcatagaagatatcctctctgaagaatctgcagtccagggaacagagacttctagtctcaccgcgtctttgactcaactcgttgagaatcacaggaaagaaaaggaatctctactcggacacagagttctcacttctccttctatagcttcttcgacaagcgaatcatctgctacatcagagactgt

SEQ ID NO: 103580 - DNA, 265 bp, Arabidopsis thaliana columbia
gttctagatcgcgagcggccgccctttttttttttttttagcatagaagatagccaaataggtttaaaaagaacaccaaattgatgtttgttttcacaaaaaggaaaaatttagacataacataacacattgagaaaagtacacaagttctattgaaaaagaatagacatgaagagctatacaaaccaaaaggcgaagaagaagaatgagaagaaaaaacaattagctcatcttaggaaaatgaaaccacaccctccaagcatca

SEQ ID NO: 103581 - DNA, 341 bp, Arabidopsis thaliana columbia
ggcagttacttatgcgtacagctggaaaaacgcctccggtttttctcagaccataaagaattggtttgggggacacagccataattcaccttctcttttcatagtggcaattcttatctacttatccccgaacatgctttctgcgttgctgtttttgtttccattcattcggcgctatcttgaaaggtctgactataagataatgatgctgatgatgtggtggtctcagcctcgtctgtatataggaaggggtatgcatgagagcgctttgtcacttttcaagtacacaatgtcttggatcgttctgctgatttcaaagctggcattcagttattacgctg

SEQ ID NO: 103582 - DNA, 241 bp, Arabidopsis thaliana columbia
tgaatctgaaaagatacgtcgacttgcagactttttatttggaagcatccttaaagtaaaggcgccacttctagcttacaacagtttcgtggaagctatttatgtcttaaacgactgccatgcccacactggccatagtaatccagattctagacaatcaagaacaaaggatcaagttttttctatcagagggaatgatcaaagggctacgtctaagagaatgcagatctacgttactttg

SEQ ID NO: 103583 - DNA, 307 bp, Arabidopsis thaliana columbia
agaaaaaatcaaattcagaggcaaggaatatcttatcccgcaccgctccatcagtattctccctgactgcaaaaccgttgtttataacaccggggagatcatctctcatcatacttcaagaaacttcatgaaatcgaaaaaagcgaataagaactttgatttcaaagtgttcaccgagtcagtgccaagtaagatcaagggtgactcttttatacccgttgaactctacggcttgaccaaagatgagtctgattacggatggtacacaacaagctttaaaatagatgacaatgacctctctaagaag

SEQ ID NO: 103584 - DNA, 385 bp, Arabidopsis thaliana columbia
accaaccacgcgtccgacttttctcaccatctcaatctccagaccaaaagaaacaaaaaatggattctttttcatattcttcgatgaaatccatgttgattcaagctcgtggctcgttgaactcgcgtttgtcggagtttgagccactggttctgctattggctccgcttgtctctctgtttctcgctcagattatcggatctgtgtttggcgttgttcacgagaaaggcctcaaagcttgtcttattgggtttatcatgggactcctcaaaatgaatcctggagttcagaattacattgatgctgagaaacaacaggttgttgaccaattacaatctggtagcagctctaagaaaaagaataagactgaagtattgccagtaaa

SEQ ID NO: 103585 - DNA, 339 bp, Arabidopsis thaliana columbia
gatgaatccgcgacgatgttgaagttaagttacgttccgttgttagaggatccgaagaggcaaacgtatattttggatgatgaagatgttttaggatatttaatggaaggtgatagtaatcaccggacgaatgttatgcatgtggaagttgttattgagcaagtttcgggagacgatcgaagaagtggaattgcgaatgatgcggtgttggttaatggtgagaatgatttgagtgatggacttgcgtatatggataattatcacatgttttttgatgatgtacaagtagatgacgatgttgtgaatgttgaatgggaagatgggattggtttgagttta

SEQ ID NO: 103586 - DNA, 412 bp, Arabidopsis thaliana columbia
acttcccagctctacactttcgctgatcttgatatcggtctgccgaaaacagtagaaaacatggagaagaaggttgaagcactgattgagccaccaccaccaccagaagctatggatatatctgctattcacaacctgcttccgccgaatatcgcagttccttcaggatggaaaccaggaatgccagtcgaattgcctagagatttaccattgccacctcctggatggaaaccaggcgacccagttgtgttaccgccactggagtcaattgctgcacctagagcagaggatcatcaacatatgagaccttctcagggactccacagaccgcctgatgtcatacaggtccgagctgttcaacttgacattttggaggatgatgatagcagtgattacagcagcgatgatgcaa

SEQ ID NO: 103587 - DNA, 360 bp, Arabidopsis thaliana columbia
agctcgactcgtcgtcggcggcggtgtaaaaatagtcggagctatggcgatgcaggccggagttggcttatccaggatctttctcttagccggagcaggttacactggtacgatcatgatgaagaatggaaaattgtcggatttgttgggtgaattgcagagtttggtgaagggaatggagaaatctggagaagggtctgagggagattctgatgtttctgatgctatagctgcacaggttcgccggttggctatggagattcgacagctagcttcgcagcaacacataacggtcatgaatggagtttctggtgactctcttgttttttcagcaaacctacaagcccttgctgttcctgc

SEQ ID NO: 103588 - DNA, 418 bp, Arabidopsis thaliana columbia
agcagaaccgtcgttgattgaagaacattccgatcatcagccatcatctgaggggatgaagaacgaagaatgttttctgattgatcacctccaattaggattgactgctcttcagaacttgcttacaaagtatccagatctggcttcagtgttttcgtctaaggagagattgttacctctctttgaatgtttttctgtggccattgcatcaaaaacagatattccaaaactctgcctcaatgtcctctctcggttaacagcttatgctccttgcttggagacgatggtatctgatggatctagtcttcttctcctcttacaaatgcttcattctgcaccttcttttcgcgagggtgctctccatgttctttatgctttggcaagcacaccagaacttgcttgggctgctgcaaaacat

SEQ ID NO: 103589 - DNA, 248 bp, Arabidopsis thaliana columbia
gtaatcttagctaaacgctacatgataaactggacccgaacgcccgagcttatcggaacacgagttttcatagtcatgatgaccggttttctcttggctacggtttactggaaagtagatgactctcctagaggcgtccaagaaaggttaagcttcttctcctttgcaatggccacaatgttttacagttgcgcggatggcttacccgcttttatccaagaaagatagattttcttaagagaaaccgc

SEQ ID NO: 103590 - DNA, 214 bp, Arabidopsis thaliana columbia
accacacgtctgcggacgcgtgggcggacgcgtgggcggacgcgtgggatgaagctcaccttcagagctcgtgccttctcaacacaagcataagagaagcttgaagcttcaggttgtacactcactgtgttgccgggaagaaagaaatgggttaagccatctgttgcaaagaaccaagcacgagcagatgaatactttgccaacaagagagctg

SEQ ID NO: 103591 - DNA, 245 bp, Arabidopsis thaliana columbia
cagaacgcgtgggctactggatcctcgtatgatctgacctcagagaataccatgacaagtgtagagaattttcagaatcagcagattgatgatattgctgcagatcgttctggtagtgctgatgatagtttagttgagtctgaggatagatgattggatgtcagggctttcttcttgcacttcaggcatacacgaaaagccgaccagatttattcagaatggatacttggatacagttggtgctg

SEQ ID NO: 103592 - DNA, 355 bp, Arabidopsis thaliana columbia
atgaagactctcccagccttgctaccactgagctcttgtcaatgctctttcaggcttgcggtgctaaatactccatcaaggatgatctgcttgatgagactgatgtcgatgatgttgtcgtttcccttgttaatcttgctagagccggggaactcgaagattatcagagttccagaaagaaggaactcaagaacttcaaagaaaatcttgtttccttctggaataatctcattatcgagtgccaaaacggaccattgtttgatagagtcttgttcgacaagtgcatggactacattatcgcactgtcatgtactccacccagagtttaccgtcaaactgccacgctaatgggcct

SEQ ID NO: 103593 - DNA, 195 bp, Arabidopsis thaliana columbia
gcatttttggttggtgtaatccattggaattgaaaccgtttcttgagaatttcaaagagttttcgaagatgagtgattcgagaaggtttcttcttgctgtggaagatgctgtgagagagattggtgagcatgttgagaagtttttggtttatggatacgttaacttcagcaatcgccaggacgctgcaggagcga

SEQ ID NO: 103594 - DNA, 231 bp, Arabidopsis thaliana columbia
cccacgcgaccgaccacgcgtccgtaaaagcacaacagtcaagagtctggatctgaatgatgatcttcacttgttctttttttcttttaattaatattttccggcatgttagagcaagattgacttggttttgctgaataatacaaacttgtgatttttgtttgaagtatactcaatcttcgtttatccatcgctagtaaaagacgactatgttcatagtctgtgtttatt

SEQ ID NO: 103595 - DNA, 410 bp, Arabidopsis thaliana columbia
cagacgcgtgggctcgattctttcttacaatctctctgtctctctctgcttccttttctactgtcttctttcttcttctctagcttttgaattttcaatattgatttctcccatggcgagtagcagttgcagcagatctatctctgtttcaaattctgattctctcggtgttttttgtttgagctagggctaaattagtttccttcttgggtttttattcgtaatccgattcaaagtttgtatctttgggagggatgggtaagaggcaaatatcacaagatgaagtaggtccgcccataaaaccaagagctggtttacgaagggaacaagctggaagaggttcttacagaggtagttagttactttgtatctcatcgaaaacgaatcacaagaagcttcttttttttttt

SEQ ID NO: 103596 - DNA, 162 bp, Arabidopsis thaliana columbia
cccacgcgtccgcggacgcgtgggcggacgcgtgggctgagaggcgttatgcgccccggatctcgaatcggcgccgctttaacacatggagactttcctaatcacagcggagtcggtcaacgagggacacgctgacaagctttgcgaccagatctctgatgc

SEQ ID NO: 103597 - DNA, 171 bp, Arabidopsis thaliana columbia
cccacgcgtccgcttttcagctctctccatcgtcgtcgtatctgtgactctcgtgatcatcgcctgaaaaaaatttgagataatggccagaaagttcttcgtcggaggcaactggaaatgtaacggaactgctgaggaggtgaagaagattgtgaacactcttaatgaagc

SEQ ID NO: 103598 - DNA, 345 bp, Arabidopsis thaliana columbia
cacacgcgtccgagaaattcaaaaaacaacatggatgatcatgaaacccctcttttgtccaaggacttatcatcatcatcatcatcatcatcatcatcatcatctgtggtggtttcatctttgaaatggatattgaaagttgtaatgtctgtgatttttgtgacttgggttgtgttccttatgatgtatcctggatcactcggtgatcaaatcctcacaaactggagagcaatctcctccaacactctctttggcctcacaggaagcatgttcttaattttcagtggtccgattcttgtcatccccatcttggcttctctctatctgataatctcaagggaagag

SEQ ID NO: 103599 - DNA, 395 bp, Arabidopsis thaliana columbia
ctcccgcactatctacttcttgctcctccgtcatggctttctcaacatcaaacgcgcttcgttaccatcatcctcaaatttctctcaggaactctcttcgcgctcccaaatcgccttcttttgtcaggcttcccctcggaaaggtgttacagagcaggattgtgatacgtgctgcttcgtctgcggctggtaatccacagtctgatgctgactttaatccgtatgaggttcttggtgttaaccctatagagggatttgacaagatcaagcaaacttatggaaggaaacttaaagatgctcagaggagcggtgatgaagccactgctgctctagtaagttacgttacctctctctttctttggagtcctgtaagtgattttttttttttttttttt

SEQ ID NO: 103600 - DNA, 418 bp, Arabidopsis thaliana columbia
caaacacaaaaatactgctgaggaaaagcaatccacacgaatccaatcaaagttttcattttttccccaaaagtttgggatttggattccgtgccgaaccggaaaagaatcaactcccttcaatttaagggtttggggttccggttgggccccaacaaatgaagtgttaagaaaatcctcctccggttgggtctgtttcagatggaagacaatgataagtctccccctaaggattactataagattctagaagttgattacgacgcaactgaggaattgatcagactcaattatcggaagcttgcattgaagtggcatcctgataagcacaaaggcgatagtgcagctacagaaaaatttcaagagattaatgaagcttataatgtgctgatggaccctgctaaacgttttgagtatg

SEQ ID NO: 103601 - DNA, 269 bp, Arabidopsis thaliana columbia
aggaaatttactccataaagttgcctggggacccgaaacttggcgaaggcaaacctgagaatcaaaaccacgccattgtgtttactcgcggaaatgctatccaaactattgatatgaatcaggataattattttgaagaagccttaaagatgagaaatcttttggaggaatttgaccgggaccatggaattcgaccacctactattctggagttagggaacatgtctttactggaagtgtctcctccttggcatctttcatgtccaatc

SEQ ID NO: 103602 - DNA, 385 bp, Arabidopsis thaliana columbia
  unsure (1)..(385): unsure at all n locations
cagacgcgtgggcggacgcgtgggggagtttccgataaccgctatccgggagatcaaaattctgaagaagctgcatcatgaaaatgtcatccatttgaaagagattgttacttctccaggtaataaggaactcttatcttagcttgtaattgctttagaaattttgtcaaaaggggtgttaagtttgatatgtagagttttgtgactgtttttgtctttaaaaggtcgagatanggatgatcaaggaaagccagataataacaaatacaagggtggaatctacatggtctttgagtacatggatcatgacttgactggacttgctgatcgtcctggactgagatttacggttcctcagataaagtgttacatgaagcaactgctg

SEQ ID NO: 103603 - DNA, 345 bp, Arabidopsis thaliana columbia
  unsure (1)..(345): unsure at all n locations
cagacgcgtgggcggacgcgtgggcggacgcgtgggcggacgcgtgggctactctcactgtaatcccttagatcttcttttcaaatttcaatggcgtccggtgatgttgagtatcggtgcttcgttggaggtctagcatgggccactgatgacagagctcttgagactgccttcgctcaatacggcgacgttattgattccaaggtctgttacacgccgagatcggactccgagtgatatcgatgatctcatcctcgacggatctgttccgatcntgtgtntctctgttacttgattcgattactctgttactattctcgttctttgttactactactactacta

SEQ ID NO: 103604 - DNA, 421 bp, Arabidopsis thaliana columbia
cccacgcgtccgaagatcttctcttttcattttttttttttttttttttttgttcgtttaatctctctctacgattctcgctcactgttcatcgaatccgtcattggatcgattcgaatttggtgtgtgttttctttccaatacctctgattagagatttcagcagatctgaacggaggagcgtcagatcggaatcgtccgtcggtggtttggtaaaaaaaaaaatggaggaagctttagaaatggcgagagccaaggatacaaaagagcgcatggctgctgttgaaaggctgcatcaacttctcgaagcttctaggaagagtttgagtcctgcggaagtgacgtcacttgttgattcttgtttggatctccttaaggatagtaattttagagtctctcaaggtgctcttcaagctcttgc

SEQ ID NO: 103605 - DNA, 396 bp, Arabidopsis thaliana columbia
ggaatcccttggaaacgagatataaataccctatttgctctcatctttacactcatagcaaaaaacatcttgttttctctgccaatctcaatttctctcccaaccagaaaattctctcactctctctcgatttcgcggaaatggatttccacagccttttgagaagggatcttcaatttctctgcaagaggaacaaaatcccagctaatatgaccaatatcgccatggctgatgctctcaaatctcttgagattgttgatggtcttgatgaatacatgaatcaatctgaatccagtgctccgcattctccaaccagtgtagcaaagctgccaccaagcactgcaactagaacaactcgacggaagaacacaacaaaagctgagcctcagccatcat

SEQ ID NO: 103606 - DNA, 391 bp, Arabidopsis thaliana columbia
ctctgttgaaaaagtgaagaaggcccgatatagagagagagtgtgtgtcgttgacgaaggaggatgaaggaagaggatgtgagctcgcagaacgtaaaccctagaagtaatcggaacagtgtagcctcagcttctgcttccgcctctgctactcccgttgataggttccgacgacgtgctagatcgccttctcctcctcaaactgctgctgctagctctgcaggggcatcatctccagctgttctggtaaacgctggcagtgttgactggacaggtcatggactggcattatcagtgcgttcgtgtagaacatgggatagaggagatttacttcgacgtcttgccactttcaagccttcaaattggcttgggaagcccaaaacagctagtt

SEQ ID NO: 103607 - DNA, 420 bp, Arabidopsis thaliana columbia
ggcgaattcctcaatctagtctccaatgtgttgaagcttaaacgcggtcatatattggagcttcttggttactgtaacgagtttggtcaaaggttacttgtgtatgagtactgtcctaatggatcacttcaagatgcactacatttggatcgcaagttgcacaagaagctcacttggaatgtacgtataaatattgcattaggagcttcaaaggcattgcagtttcttcatgaggtatgtcaaccgccggttgttcaccagaatttcaagtcttccaaggttcttcttgatggaaagctctcagtacgtgttgcagacagcggtttggcttatatgttaccaccacgcccaacgagtcagatggcgggttatgccgctcctgaggttgagtatggaagctacacttgtcagcgacgtatt

SEQ ID NO: 103608 - DNA, 421 bp, Arabidopsis thaliana columbia
gaggagactgtgtctgtgctgacgtggatgcttcccattggtttagaaggtcaatccaaactcaccacgacgtcgtcgtttaatcgtttagtggaactgttgagaaatggtgatcaaaacgctgcgtttttgataaaagagcttcttgagcttaacgtaactcacgttcacgcgttaacaaagatcaatggcgtccaagaagcgttcatgaaatcgattaatcgcgattctacatgcgtcaactcgttaatatcaatccaccatatgatcttgacaaatcaagaaaccgtatcaaggtttcttgaattggatcttgtgaatataacagtggagatgctagtggattcagaaaacagcgtttgcgagaaagcgttaacggtattaaacgtgatttgtgaaactaaagaaggaagagagaaag

SEQ ID NO: 103609 - DNA, 427 bp, Arabidopsis thaliana columbia
cggacgcgtgggtttttagaccaagctcaggctatcatctctccgttaattagggttttcttctctatctcgatttcaataccattgttgatccgctgagctagggttgttcgatcccgataattgtgtcgcttagctctgatctctgttcatcgaatttggttaatttgttttgattggttaagatacattggaaagcgatgccaccgaaggttgtgaagaggggaggcgccgcgagaagaggtgggaggcttacgagatcggcgctcaaggcgcagaatcctcacgtggaatcttcccatgacgaatctgttaatatcggtgagctctcaggctccgatgcactggaagccaaggaggtgactccggaggttgataaaactgttgaggaagagaatccattagatgtgccgaagtcatcggattc

SEQ ID NO: 103610 - DNA, 344 bp, Arabidopsis thaliana columbia
gaatcatatgcctttcttttcgctatctctctctctctctctctccctttaacccaaacccatctctcaaagacttgacctttctctctctctatctctaatttatttatcgtttcgcgtgtcgccttctctctttctctcattctctctctctctttcccttcgtatctctctctcgtgaggccgtgccctagaagaagaagaagaagaagcccctttctccgggacttcaatccctaacttccgtcgccggatttctcgtccttgattatcggaggactctttaacaactttattccgatttcagatttccagatttgtaagctgctttctcctttctgggt

SEQ ID NO: 103611 - DNA, 403 bp, Arabidopsis thaliana columbia
aagaagatgtcttacaaaccctaatttctctcacgccttcagaaccagccctgttcttattgtattcaatgtggtgattcgattcaaggcattggagctgctaaaatggctgctgttgatttgatctaacgtcttgagcttacaaattttctttctttgggattcaatttcaggctgcgaaagtgtttcatgaagctaacccaccaaatctgagcttagtataagctaaagattcaaactttgatgaagcttttcaattggggaagtataagggacgatgaggtttgatggataggagagtttcttggttacatttgaaatgagtcggtctccatcgttttctgtgaagcctgagctaagtataaagcctgatcctgagtcattgaaacgatggattcatgca

SEQ ID NO: 103612 - DNA, 436 bp, Arabidopsis thaliana columbia
cttctcttgaaaccctagtcttgtatctctgtaaattgtctcatcgattcgagggctttccaaagattcagtcttttgtctgtgtcgtggttatttctgtttaattgtatgtttgttttgatgcctgtgatggtattaaatatactttgagagctttgtctctaggaaaacaaaacaaatctgaggcatttagaatcttctttttttctttggttatgaaatccagtttgaagtttggatgtgaataggtttattttttctagtttttattacaagtttagtgtgtgtgcaagtgatgataaaaagacagggacatcagattctcctttgggagaagtataatgatgattaagtctagatgggaatctctctgatgcaccttttaaattgttaatgatgtttgttttgtgccggtgatgtatatctattgatgtgt

SEQ ID NO: 103613 - DNA, 393 bp, Arabidopsis thaliana columbia
tgattatcaaaaactgttggttagtaacagaaattgttgcaaatgtaacatattatataagctttctttcactttggtgcattctctctaaataatggcctctattgatgcagtatctgattcttagttttgaaatggtttttgcataaattattgttctaatgcatttttgttttatctccagcatttccaagatcattgatcgttatgaaatacaacatgctgatgaacttagagccttagtaagtaattagctaagaacgtcattctaatattcttctggatgcggtttttggtgttatgaaggatagaagcgctgttcaagccggagaaacctcaatgttttgaactcgtaacaccgaacttaattctctagagttacagttattgtgt

SEQ ID NO: 103614 - DNA, 405 bp, Arabidopsis thaliana columbia
gtgatattatcttggaacttagaaatgagctgatggaaaagtccaataaactgagtgaaatggagtccaagctaaatggtgctatggaagaggtatccaactcgctgatcaaattggaaaccactcacaaacttctcgataaatcgcacacgaattgtgcccatttggtgaactgcttacatgaagcaagacaagaagcccagacccatctttgtgctgctgatcgtagagcttctcagtatactgcacttcgtgcatcagctgtgaagatgcgaggtctctttgaaagattccggagctctgtctgtgctggtagtgggattgctgattttgctgactccttgcgaactttggctcaagctttagccaactccgttaatgaaaatgaagatgatggtactactg

SEQ ID NO: 103615 - DNA, 366 bp, Arabidopsis thaliana columbia
cagatccaaatcttcctacttaaccaaaacaacgaagcccataaagcctgatagtaatcctggaaacctcactaatatgatgaagaagctaatggaaatgaagaaatctaattccaagagcaagagggtcgagcttgtgattcccgaggaactgaagaaaattgatactggcaaaggaggagggaagagtacattgggaacattgcagaggaagctattcgggaaggagaaggtgaaggcattgacagaggttaagagtacaatgtctcttgctctcaacctccagagagtagtatgattttggtagaaccatctggagccatgatccacgattgagttgaataagagaagagtgttgttatatgt

SEQ ID NO: 103616 - DNA, 99 bp, Arabidopsis thaliana columbia
cacacctgaaagaaagacgttcagctttctctttccaaaatcaaaagctctccgatcagtttctccggcttaggaaattaattgaaggaaggtgatgag

SEQ ID NO: 103617 - DNA, 333 bp, Arabidopsis thaliana columbia
tgttattttaaatttcttctttgtttcatgtcggactcaagagctatccatcgcctcactgtctctcaccggaatctacggttgtccaggaagaactcttctgtgtttgtttgacttgagctaatcagaaaggtgaaattgagacaatggagggtgaagttgctactaatggagtgattctcaagcataatggtgtaaaagatagttctttagaaacttgttggccatagaagaagaaaccggttgaggcaacgagtcttagcagtggttcatcagacatacaggaagagattagtgtggaatgtcctaagcgagtggctaatcaaagacgga

SEQ ID NO: 103618 - DNA, 120 bp, Arabidopsis thaliana columbia
catgtagaacctaatttttgtcaagttgcgtgtggacatagcctaacagttgcacttacaacatcgggccacgtctatactatgggcagtcctgtttatggtcagcttggaaacccacat

SEQ ID NO: 103619 - DNA, 378 bp, Arabidopsis thaliana columbia
aaaccgttgaaaaaagcagctcggacgtcaccaatgtgaaaaaggatggctcagctaaattgcatgaagatatccagaacattttctctcagaatcagccatcctctgttcttaaaccacctgcaactaccactggtgacattcaaaatggaatgaacaagaccgcttcagcgacaaatggaatattccgtggaacacaagcagcaagtagcggtggtaacgcactccaatatgagtttgggaagcctaagggttctctttccagaagcatgcatgatgagttgggtacttcttctcaggacgctgcaaaagctgttccctattcttttggaggggaaactgcaaatctctccaaacgaccatctcactcactgggaa

SEQ ID NO: 103620 - DNA, 318 bp, Arabidopsis thaliana columbia
cagacgcgtgggcggacgcgtgggcggacgcgtgggcggacgcgtgggtggaaacacaccagtttcggaaaatgggcgaagctcgtttgggaaaaagagcactagttattcttactcggacactgcaagcatatccattgatgatcaatctgatggagagaaactttcgggatgtttaccttctacttctagttttaagagtgagttggtggattctatgtctcacgttactcctgaagccaacaaagtgtctcatgacttgaatgttcaggaatcagttagtagcagcaatgtagatggccagacatcattaagttc

SEQ ID NO: 103621 - DNA, 220 bp, Arabidopsis thaliana columbia
aaaaaaaccattttttctcttttgttattgacttaaagaaagactatcaacgaataattatccttttttgagtttttcccatttcgtcgtcgtctccatttcatcgtcttctcgctgttctgctatattccgtttcgttggatgaggagaagaacacagtgaaagaagttgtgaaatcgagagagtttgtttcatgggcaattcatgtcgtggttctttt

SEQ ID NO: 103622 - DNA, 358 bp, Arabidopsis thaliana columbia
cccacgcgtccggtaatcccttagatcttcttttcaaatttcaatggcgtccggtgatgttgagtatcggtgcttcgttggaggtctagcatgggccactgatgacagagctcttgagactgccttcgctcaatacggcgacgttattgattccaaggtctgttacacgccgagatcggactccgagtgatatcgatgatctcatcctcgacggatctgttccgatcttgtgtttctctgttacttgattcgattactctgttactattctcgttctttgttactactactactactactgttacttgtattttcccaaatcggtacgttcatcttcctgcttctgtgagcccggaga

SEQ ID NO: 103623 - DNA, 171 bp, Arabidopsis thaliana columbia
gcgtccggaaaaaattcgatcactcctgttaacgaccacgatttaaatgccatggaactagagctgcaagataagaagcctccacgtcactgtatcaacactgaagctaacactacctaccaggagcctacccgatgatcatagaagctgcagaaccggtttttcggggcc

SEQ ID NO: 103624 - DNA, 384 bp, Arabidopsis thaliana columbia
ggaaaggtgaaagaatagctttgtgtgtaactaaagggtttaaagatttgttgcagataggtaatcaagctagacctgatatttttgatcttactgttgcgaaaccgtcgaatctttatgaggaggttatagaggttgatgaaagagttgtgcttgcgttggaagatgatgatgatgatgaagggtcgttgattaaaggagtgtctggggagtttcttagagttgtgaagccgtttgatggagaaggtttgaaacctttgttgaagggtttgcttgataaagggataagttgtttggctgttgttttgatgcattcgtatacttatccgaagcatgagatggatgtggagaagttggctttagagatgggttttagacatgttt

SEQ ID NO: 103625 - DNA, 279 bp, Arabidopsis thaliana columbia
actgattacattgactttgaatacttttagcaactgactatataaatgactaaaattcttcaaacaatttatgtataccctttttgttgttgtctttacatttctagagaattttatttgatcataactggttttattcgaccaaaaaaaaaaaaaaaaaaaaaaaaaaaaaaaaaaaaaaaaaaaaaaaaaaaaaaaaaaaaaaaaaaaaaaaaaaaaaaaaaaaaaaaaaaaaaaaaaaaaaaaaaaaaaaaaaaaagggggggccgcccaaaaggt

SEQ ID NO: 103626 - DNA, 396 bp, Arabidopsis thaliana columbia
ctctcacccctaggttcttaagtcatacccattttcaaggacaccttagaaagtttcgagttttctattaggtgtattgatcttgaagccttaaagtttgtgtctttttgttaatttgaataaagtttgatgggaggagggaattccaaagaagagtcgtcatcaccatcttcatcatcatgggcttctcatcaaagttatcctcaatatggacctgatagctacaactatcctcctccacccacttatgctcccgctccatctcctgctcctgctcctgctccggtgcctgctccatctccggcttccagttatggccctcagtatagtcaagagggttatgcatcacagcctaataatcctccaccacccacttatgctcccgctccatctccg

SEQ ID NO: 103627 - DNA, 386 bp, Arabidopsis thaliana columbia
cggacgcgtgggctttggcccaccttacgagtggcaagtgtacaatacgctcaatagctgttatggaattcctgctgtacatcataagggtcgtcaaggagatttttacattctggtcatggacatgcttgggcctagcctttgggatgtttggaattctttggctcaatcgatgtctccaaacatggtagcatgcattgcagtggaggcgatatctattcttgaaaaactgcatatgaaggggtttgtgcatggagatgtgaaaccagaaaactttttgcttggtcagcctggaacagcagacgagaagaaactataccttatcgatcttggtctagcatcaagatggaaagattcacactctggccagcatgttgaatatgatc

SEQ ID NO: 103628 - DNA, 383 bp, Arabidopsis thaliana columbia
gtgtcataaccacaatcacttaccggatcttctctccctcgtatttgaagccacacaacatgaacattagggtgagaagagatcgagagaagaatagtttgatcatcttgtgagaaaaataatggctgcttcagtgatgctatcttcggtgacattgaaaccagctggtttcacggtggagaagacggcggctagaggattaccgtcgctcacaagagctcgtccctccttcaaaattgtcgccagtggcgtcaagaagatcaagaccgacaagcccttcggaattaacggcagcatggacttgagggacggcgtcgacgcctccggcagaaagggcaagggatacggtgtttacaagtacgtcgacaagtatggagctaacg

SEQ ID NO: 103629 - DNA, 237 bp, Arabidopsis thaliana columbia
caccttgtatacaagacaaattcttgctgggttgaattatctccacgataaaggctttgttcacagggacattaaatgtgcaaatatgttggtggacgctaatggcaccgtcaaagttgcagattttggattggcagaggcgtcaaagttcaacgacattatgtcttgcaagggaacattattttggatggctccggaggttattaaccgaaaggatagtgatggcaatggaactcc

SEQ ID NO: 103630 - DNA, 109 bp, Arabidopsis thaliana columbia
aaatcttttagctaaaagatttgggtattaggtgaagatatataaagcgttaacttggtgccacacactaataattgttatatacttcaaagtagtacccaaatctttt

SEQ ID NO: 103631 - DNA, 369 bp, Arabidopsis thaliana columbia
gttagttttgtcttcaaattctggagctttgaagctagatcatcaagttatcgaaatctttgttaggattttaggtagagaatctcagtactctgttgcagctaagttgctcgataaaattcctctacaagaatatctcctcgatgttcgggcttacacgacgatcttacatgcgtattcacggactgggaagtatgaaaaggctatcgatttgtttgagaggatgaaagagatgggtccttcacctactttggtgacttacaatgtgattctcgatgttttcgggaaaatgggtcgatcttggcggaaaattctaggggttttagatgaaatgagaagcaaaggattgaagtttgatgagtttacttg

SEQ ID NO: 103632 - DNA, 351 bp, Arabidopsis thaliana columbia
gtatatgtctgtttattgaagtttcagctgaggaatcagttacgaaatgggaagcagaggtaatcgtgtgggagaaagatggaatgagatggattgtgatgagaaatcgagtgtgattcaggaagagatcaaaagggtttgtaaacttccatcaaacagtgtttatgcagttcatcgtctcaaggttctcaacaaaatcaacgaccttttatctgtccaaagaacattgtctcaagagaaggagttggaattgctattcacacagctctccttgtaaaatccagattttgatgtataaggaactaatgtaatataactttttactcgagattgcttgttgattaatgacat

SEQ ID NO: 103633 - DNA, 406 bp, Arabidopsis thaliana columbia
  unsure (1)..(406): unsure at all n locations
accacgcgtccgaataaatgttggtactcatcatacatatataactaactcacctttttggtgtgtagataaatatatctaactaactccattacatattccagtcatttgcttataaattataaccgtcacacttaccaattcagtcacttaaccaaacatgtctgaaaaggggttgataaaaaaagaagaccacatgtttcaagaggagaagagaaagacaaactatggagcaattggcttggcttgcttcatttcttgtttctttgcattccaattcatgaaaatcgtaacaacacaaccttcaacaacaacaacatcatccattgccgttatcgatagcccaatgtcctcncataagctatctgatangagagaaatatggagagttatcccaccatctacc

SEQ ID NO: 103634 - DNA, 376 bp, Arabidopsis thaliana columbia
aaagctatcaaactccagtcaatggcgatgatgacgacgacgacgacaacattcttccatccactacttcctgctaacacttacaaatccggagctgtagcttcttcctttgtctcagttcctcgttcgtcgtctctccaatttcgctcacttgtgtcagattctacgtcgatttgtggtccaagtaagttcaccgaaaaaaacagaagagtatcggttaccgtttccgccgccgcaacaactgaacctctcaccgtcctcgttaccggtgccggtggaagaacagaaattgaaggagaggtcggagcagttcgtggcaaggggtttagtgaggaccaaggagagtaaggagaagatcaatggagaggatgaagta

SEQ ID NO: 103635 - DNA, 381 bp, Arabidopsis thaliana columbia
gaagtaatcacagagaaagagaagatgtctgagaaaaagggaaggaaagaggaagtgattaccagagagtacaccattaacctccacagacgccttcacaaatgcacctttaagaagaaggcaccgaaagccatcaaggaaatcaggaagttcgcagagaaagctatggggactaaggacgttagggtagacgtgaaattgaacaagcaaatctggagcaagggaatcagaggtccaccaaggaggatcagggttcgtgttgcacgtaagagaaacgacgatgaagatgcgaaggaagagttcttctcccttgtcactgttgctgaaatccctgcagaaagaccactgaagaagaagtgaagagagaaaaagagtctgatg

SEQ ID NO: 103636 - DNA, 311 bp, Arabidopsis thaliana columbia
gtgatccctctagctaagtaccgtaaggcgatatgcgggtctcagctctcagttggtatgagatttggaatgatgtttgaaactgaagattccgggaaacgaaggtacatgggaactattgttggaatcagcgatttggatccgttgagatggcctggttctaagtggcgtaaccttcaggtagaatgggatgagcctggatgtaatgatccatgggaagagtttgtgggatgcgtaaggtgcataaggatattgtcgccaactgaggtccagcagatgagtgaagaagggatgaagcttttgaacagcgc

SEQ ID NO: 103637 - DNA, 323 bp, Arabidopsis thaliana columbia
cactcatgtcgctcacgttgtctcagggttgcaacattttgtagagaaattgggttcatatgcatgatattctgcaatcgtatgaagacttaggagcgagactcttccttcatcttgttctcttgtcagactttcacatctttcttcactataggcatatataactagagacatgttgcgttttttgtaacaatcaggagattggttgtttacacaatcggaaacgaagaggacaattgagtgggctttgtgtcgatgtatgtggaatgtctgtcatccacatgagcactcattgatgtgtttgagtagctctctttctttgt

SEQ ID NO: 103638 - DNA, 266 bp, Arabidopsis thaliana columbia
tgggattcatataatcgcactctcctctcgttcctcatcctcatcgccttgaagctctctcatcttcttcttcttcttcttcttcttctccggatctcgcttctccgtcaacgactccgatcaacctaccaggataactttgtgttgagaagatgtctagtgcatccaagatgaaatcgagagacaagaaggtcatgaatgattcacagaagacacctagtatagcgtctggatccatgggtggaagtagtgttgtggttggtggt

SEQ ID NO: 103639 - DNA, 420 bp, Arabidopsis thaliana columbia
  unsure (1)..(420): unsure at all n locations
ggaaacatttccaaggacattgctggggatattttttctattggctgtgtcctggcagaactttatttgatgaagccgctattcaactcagtgtctttggctacttatttagaaggtggtgacttacctgaactgatcaaagaacttcctcctcctactcaggtaattgtcgaagcatgtattgaacaagattggagaaggaggccctcagcaaagagtcttttggactctccgtatttctcagctacagtgaggtcagctcacttgtttgctgctccacttcaacttttggccaaaggtcaaacacgcttgtgttatgcagcaagttttgccaaacagggagtcttganagtaatgggaacatttgtggcagagatgtgtgctgtgtactgtttgccaactggtcacacacctttatct

SEQ ID NO: 103640 - DNA, 351 bp, Arabidopsis thaliana columbia
cccacgcgtccgcccacgcgtccggcgccgctttgtctctgtcgcaatctcaaccatatggagaaagacatggcaatgatgggagacaaactgatactgagaggcttgaaattttatggtttccatggagctattcctgaagagaagacgcttggccagatgtttatgcttgacatcgatgcttggatgtgtctcaaaaaggctggtctatcagacaacttagctgattctgtcagctatgtcgacatttacaacgtggcaaaggaagttgtagaagggtcatcaagaaaccttctggagagagttgcaggacttatagcttccaaaactctggaaatatcccctcggata

SEQ ID NO: 103641 - DNA, 346 bp, Arabidopsis thaliana columbia
cccacgcgtccgcccacgcgtccgcggacgcgtgggttctactccgatcgatcaattgaagattgaaatggaagctaattcaggcggaggaggaggagctgaaggcggaagagcggtaaccggagggataaggatagggtgaagagacggtctgagagaaggaagagtagtgattctgaagatgacgttgaagaagaggatgagagggataaacgcagagtgaatgagaaggagagagggcatcgagaacatgagagagatagaggcaaagataggaaaagggatagagagagggaagagaggaaggataaagaaagagaaagggagaaggatagagagaggagag

SEQ ID NO: 103642 - DNA, 382 bp, Arabidopsis thaliana columbia
gacatttcgccattagatcctcttttttttcttcgtaggtcgaacgaaattttgtgtttcgttgaggagaaaattgagccgtgtttgtgttgagatgtctatgatcgatgagccgttgtacccaatcgccgtacttatagacgagttaaaaaacgatgatattcagctaagattgaattccatcagaaggctttctacgatcgctcgtgctcttggggaagagaggactagaaaggaattgatccctttccttagcgaaaacaatgacgatgatgatgaggttttattagcaatggctgaagaattgggtgtgtttattccttatgttggtggtgttgagtatgcacatgttcttcttccacctttggaaactctttcgact

SEQ ID NO: 103643 - DNA, 415 bp, Arabidopsis thaliana columbia
agattccagaatatcacgtacttacttggtggtatcagaaatctacgatttttctggtgagggttttgaggtgtggagctagggcttttgctgctagatagttgatttttcaattttccgcagcagaaatgggaaatgcgtcggagaatttcgatattgaagatctcatgtcttatggagacgatttgatcaacttattgaatgttaagaatggttttgatattatatctcaaagttctgagcagttcaaagctctcaattttgcttgccatgaggatttcaatcagatacaaggctctattgaagattgtaagacgaaactctatgcttgtaagaagaaaactgaggaagcatattcagatattgcggctgaagatgaaattgaacgtcttcagaaagagcttgacgaagagat

SEQ ID NO: 103644 - DNA, 370 bp, Arabidopsis thaliana columbia
gtgaatcgttggttgtgtgaggtgctgcagcgtgatgtttcagacattgatctcaccattgatttgggatatggttattatctgcctgaagagttgttcgtgagtgagacactagtcaatctgaaattaaaaagtgcatttaatattgattggtggcctggagctgaaggcacttccttaccaatgcttaaaagtctttgtgtttacggtgtgagggtttttttgtgatgatgagcttcaggagcttcttccttgtttccctgtgcttgaagaattacaaatgtctaatatgcagtggcttgattctgatgaaaccgtgtcaagtgcaaccctcacaacgctccatattactgggatccgctctgaaaat

SEQ ID NO: 103645 - DNA, 398 bp, Arabidopsis thaliana columbia
caaatacctatgtcaccgccgtcggcaaccgccggtgacatcaaccaccgtgaagtagacccgacgatctggcgcgcttgtgctggagcctccgtccagatccctgtccttcactctagggtttactactttccacaaggtcacgttgagcactgttgccctctcctctctactcttccttcctccacctcgccggttccatgtatcatcacttcaattcagttgctcgccgatccggtcaccgacgaggtctttgctcaccttattcttcaaccgatgacgcagcagcagtttactccgactaattattcacgattcggcagattcgatggcgatgttgatgataacaacaaagtgactaccttcgccaaaattctcacgccttctgatgcctaaca

SEQ ID NO: 103646 - DNA, 422 bp, Arabidopsis thaliana columbia
aagagagcccttcggaagagagcttcatatattaaggctaattcagagacaattacaatggcttcacttcgtcgacttctagaggaagatcttaaattagagaaggagtctcttgatctatttaagaagttcattaacaaagaattggatgaagtactacaacttcctgatgctcctaaatgttcgactgagtctattgtgaaaaatgtgaagaaaaaggtcaagagcacaccatctaagatggtaagcagtgaatacaattctgattcagatactgaggggaatgtggacaacgaggaggtagctgtaaagaagacaatggcccgaaaagttaaattatcaaaaccagagatgatgggaaaacggaaaagtgaaaatggtaaacaagtatctggaagaaagaaagcaaaacatacagaaat

SEQ ID NO: 103647 - DNA, 242 bp, Arabidopsis thaliana columbia
attttccgctcaattcgatcttacatgttaacaatggttggtctaactccagctgaggatcgttcagagattgcctttttcgacgtcgagacgacaattccgttccgagttggtcaggggtacgcgattctggagtttggatcgattctggtttgccccaagaagcttgtggagctgagaaactactctgttctggttcgtcctgctaatctcagcctcagcacgcctcggtccgtgaagtg

SEQ ID NO: 103648 - DNA, 301 bp, Arabidopsis thaliana columbia
ctggaggtgaattttgatttttttggccgatcggatttgagtttttgaatctctgattgctgagaaaatgccggcgttttacggaggaaagcttacgaccttcgaggacgatgagaaggagagcgagtatggttacgttcgtaaggtttcaggtcctgttgttgttgtcaatattcgcttaaggataccgtgatagagcttgaattccaggggatcaagaaatcttacaccatgcttcagagctggcctgtacgtacgcctaggccagttgcatcaaagcttgctgccgatactcctctac

SEQ ID NO: 103649 - DNA, 371 bp, Arabidopsis thaliana columbia
atttgaataatttgattggtaggcttttggttgatacaagagaaagagattgttttgatatggaaggtggtcgtggtggtggagatggcaatttcttaccaaactctaactttggtgtattctctgactccgctatggatatggatttcatggatgaactcttgtttgatggatgttggcttgagacaactgatggtaagagcttgaagcagaccatgggacaacaagtatccgattctactaccatgaatgacaacaacaacaactcgtacctttacggttatcaatatgctgagaacctttcacaagatcatatctccaacgaagaaacagggagaaagtttcctccaataccaccgggctttctcaag

SEQ ID NO: 103650 - DNA, 333 bp, Arabidopsis thaliana columbia
cgccgctcctcccctgcagacgacaccaaatccacgagatcagacgctcttcagctcttcaacgcctctccttccgacggctctaagaaacagaaacaacatcaacaaccaccaaagtacacttcctcacacacttcctctgagtttctctacttaggtactttagtaaactctcgaagcaatggtttagagcagttacaagaggaggttgttgaccttaaaggtgagctctttatgcttcgtctccagaaatcggcaaggaatgagttcaaatctagcgactttcgtcgtatgaagaaacaagttgctcggatgttgacggttaaaagagag

SEQ ID NO: 103651 - DNA, 379 bp, Arabidopsis thaliana columbia
gaagatgtttacgtaatccatggacggtgggtgttggttttcttgctcaatatatgatcaagccaattctaggttttctcattgcaatgactcttaagctttcggcacctcttgcgactggccttatcctagtctcatgctgccctggaggacaggcgtcaaacgttgctacttacatttccaaggggaatgtagcgctctctgtactcatgacaacgtgttcaaccattggggctattataatgactcctcttcttactaagcttcttgctggtcagcttgttcccgttgacgctgctggacttgctcttagtacgttccaagtagtgttggttcctaccataattggagttctggcaaatgagttctttcctaaatt

SEQ ID NO: 103652 - DNA, 100 bp, Arabidopsis thaliana columbia
aaaagttttaatctaaattacgtatcaaattccgagcaagatgactattcttgttgaacattttgttcctgattcaagagtggatgaaaagaaagtgata

SEQ ID NO: 103653 - DNA, 297 bp, Arabidopsis thaliana columbia
aaagttctctcctttcctttctaaaggaagaagaaaggctttatctctcaaaaccctcatccacaaaatcccctttaatccgctaatcagagggtttttctgtttttgtgttgcttcgttactacggttacattcttctcttccccttttgatttcaaagaaccctcttgataccttaagaagaggcaatttgaagttttcttcacagatccgtcttagctctttctagagaatggcggatttgataccattttatctgaatattgtggcgtttctatgtactgttggagctattgc

SEQ ID NO: 103654 - DNA, 263 bp, Arabidopsis thaliana columbia
aaaaaatacagaaagtgaaaaagataaaaacttttttcttttctcttcttcagtttcttcttctttttgttttccttcctcgttctttcatgtcttccttgtgccattgatgagtccgtcaagactaaatcgagagtagtgcaagacttttttctcacactgtttctaaaaccgcgtgagaaatcttcgtcctcctcagatctctaccttttcccttaaattttcccgcattttctctctcttccaagcttctccaagcgtac

SEQ ID NO: 103655 - DNA, 182 bp, Arabidopsis thaliana columbia
aattaaagaaggaaaagcacgacctttgtcgacttccttctgttaatcatggctgctccggaggatgaatcttccgctcagtctcaatcatcaggtgtcacggcggttcctatgcctcctcgttcctcttccccttcctctcctggggatcactacctagctcagtgcatcctccgcctcag

SEQ ID NO: 103656 - DNA, 288 bp, Arabidopsis thaliana columbia
caacattactctcaccgctacaccttcctctgatttccgtttcagaagctcgccaaccgttactccaaccgcatgtggaatctcagtttcgttgtcgcgtacaagaacaagattagggtttagtgcccatcctgcaatgtaaatcaagtgcctagcactttcgatcgctttgtaaacatcttcccatagattccttgcattaaaacgaacatcatcagcccttggatgaaatgtggccctgtggtgtgcatcttgatagagtacgactctgcagttcgatctttgagg

SEQ ID NO: 103657 - DNA, 339 bp, Arabidopsis thaliana columbia
atttctagcagagacagagatttgcagaagagacaacaatataaagagtttaaacactaacaaagaccacaaaggagctcttctctccggcaaaatctccgttaacctaatctggtacggcaaattcaaaccatctcaaagagcaatcatctcagacttcattaactcactcacacacacttcacctacgtccaaaactctccagcaaccatctgttgccacgtggtggaaaaccacagaaaaatactacaaactcgcaacacccaacaaaaactcatcacctctgtctctaactctcgggaaacaaatcatcgacgagtcttgctctctatgaaaatc

SEQ ID NO: 103658 - DNA, 393 bp, Arabidopsis thaliana columbia
tcttaaagcaactacacaagtcttgaaattttctcatattttctatttactatataaacttttaatcaaatcaagattaactatggctgaggagtacaagaacaacgttcccgagcacgagacaccaacggtcgcaacagaggaatcaccagcgacgacaacagaggttacggatcgtggattgtttgatttcttggggaagaaggaagaggaagtgaaacctcaagagacaacgacgctcgagtctgagttcgatcataaggctcagatctctgaaccggagttagctgcggagcacgaggaagatgaggagaacaagcctagtgtcatcgaaaagcttcaccgatccaacagctcttcttcctcttcgagcgatgaagaaggtgaggaaaa

SEQ ID NO: 103659 - DNA, 418 bp, Arabidopsis thaliana columbia
cacgcgtaaatatgcctgtctttgatcttttggagaggatgatggttaacaaatttggttttaagcatggagttgttctgaggtttttcactcgaactatttatgtcgcatttacattgttcattggagtgagtttccccttctttggagaccttctaggcttctttggaggatttggttttgcacctacttctttcttcctcccaagtataatgtggcttatcatcaagaaaccaaggagattcagcgtcacctggttcgtcaattggatctccattatcgtaggagtgttcataatgttagcgtcaacaattggagggttgaggaacatcattgcagattcttctacttatagtttctacgcttaatattgaatagatcttgtacactaaagcatgaatcattggatcatctaaat

SEQ ID NO: 103660 - DNA, 390 bp, Arabidopsis thaliana columbia
cttccttttggttgtaataatcctaagcttctcactactagcttcttcttctgaaatgaaagtggggttggaggattacaattttccagtggatccaactccgacgacaaaagcttcgataaaaccaggtcctattgagcatggaactcctctcaatccttatattcctaagcctccttctccttcttcgtctcctcctccacagcaatcccaagacggtggataacaccaaatcttttctctgatttatttgccccgtgaatgtgatctacgcactgtttgtagttataattcccacgttttttttcttctttctttatctctcttttgtactaacattgtcttgtcgtcgctacgttaattaatttcctttatctgccagctcgtgtg

SEQ ID NO: 103661 - DNA, 190 bp, Arabidopsis thaliana columbia
cctcctgtgcaggcagttccatcttttcctagctcattcccacatttgttccctggcaaggacaatctccgctgcttgattccttgtgctattgaccaggatccttattttagaatgactcgtgatgtcgcaccccggttaggctatagcaagcccgccctgattgagtcaacattttttcctgcgttgc

SEQ ID NO: 103662 - DNA, 395 bp, Arabidopsis thaliana columbia
ttttcctcttttcctcgaaattcattcttctttgactgtttccaatacgtttaagaactttttttaaatttattatgtgtcttgataatagagccatagaaaaaaaattgtttgtttaatgtcattttctttttgagtaaagaaactttcttctttgcaacttgaaaattttcgatttcgagagcgaaggaagagagagagagagggagagatcaaaaaaatttgtgaaaaaagagatttattttagggttttgttgattttctttgttcattttgccgtcgtctctttctctttctcttgtgaagaaaaagaagaaaaatgaaacttctgggtttggtcttcttgctgtttaatctgtttatgttttcgttttctcggaaacttttaaccgaga

SEQ ID NO: 103663 - DNA, 352 bp, Arabidopsis thaliana columbia
acactagatatcataatgtctgctagcgagaactttgagcagttgggtgcaaagctgaggatgtgggcagaatcatcatttgtgtatcttgataagctggtctcaagtctacgagaagaggagggaagtgttccttttcaatttcataacttgacagttcttttggaagacaaaaggttgtctgatgctgttttccagtcaactagtgttgaaatcattgttgatgggttcatagtggatagcttagaagtggatatagaagaagtgaatgttggtcatcaggaacctgaagaagaatcggaaaacagtggtgaaatcagtcttgaagctgtctacgaagaagatgataatg

SEQ ID NO: 103664 - DNA, 381 bp, Arabidopsis thaliana columbia
acgcgtccgaattaatgaaaaaaatgggaccgagttggaaaagaacaaaacgaaactcgtcgtcttctaccacttaaatatttttcagtagctccaactaaaataaaataaatgagaagaacaaaaattcagttgttaaaatcaaagtagtgtctctaccgtgatttttatttttttctatatactgtttaaacctcagtttttttgttgttgttataagatccttgtcattttttgtcgtgattagatgtaatttgtataattttagtaactcttcagtttttttttgttttaaaaatagattttctctctctctgtcttcctgcaatctatcgccggccgattcaataatttcgctttactctgccaaaaaagtttgtt

SEQ ID NO: 103665 - DNA, 323 bp, Arabidopsis thaliana columbia
aaaacgtcacgtcctctgtttctaacactgtttgatagacagctttctggaaatctgtcaaagaacaatacaccatccggtcttccttcttatgcaagtgatccttgataagagtcatggtgcgcctgagaaaccatccagacatctttttggcaagtctttgcatggcctttcggccagtggctagttctctctttgttgccgtgtgtcactgaccatgttctactgggtcagaaaactgcttcttgaagtatgtcccactcactaaaaggcctggcacaggccagtccataacacaccacagttccttcatgttgttctga

SEQ ID NO: 103666 - DNA, 405 bp, Arabidopsis thaliana columbia
acctcactctctctcgcgtcagtcgttactgctgcaacaaatctgtatttgatttctccattaacaacgaatctaaatggccgctgcttttgcttccagattaacccgaggaggacgttcattgcttggaggtcttaacaatggtggttcgatgaattcttctaatggaatgatgaatgaaagtatcctctctcagcagcagcagagaaggacatttattcagatggggactgttctcaaagtcgtggacaattcaggtgcgaagaaagtgatgtgtattcaagctctaaaggggaaaaaaggagctagacttggagatactatagttgcttcagtgaaagaagcgatgccaaacggtaaagtgaagaaaggagcggttgtgtatggtgtggttgttcgtgctgc

SEQ ID NO: 103667 - DNA, 118 bp, Arabidopsis thaliana columbia
ttcttcttaggctttatcttagtagtaccttcttcatccccaagaaaacttatgaacttattgctgtttcttgttatatttgatatgctagttataaaatgcatctatggctttttat

SEQ ID NO: 103668 - DNA, 404 bp, Arabidopsis thaliana columbia
  unsure (1)..(404): unsure at all n locations
caagctgaggcatacaattgaagtcattaataaccacatatctgcggcttcaacaactgctggagacttacctcttataaaccctgcagctggaaatgtatgttttgccagtggtacagccggatggtccttcacattacaatcttttgctaaaatgtatgccaagcttcatggtgtggccatggacgtggataagtttgcatctcgactttggggagatgtatattatcactctgatactagggtattcaagagaagtcctccagtaggtggtggagaaagagcatttgttcagtttattctggagcccctatacaagatatacagccaagtgataggtgaacataagaagagtgtagagaccacccttgcagaattangagtgactctgagtaatagtgcat

SEQ ID NO: 103669 - DNA, 360 bp, Arabidopsis thaliana columbia
aggacgcatgggtaagaactcagaatcagatattgttattgatgagactttgatacatgactctgtgaaagatttcgaagatactgcatacatatatggggatgctaatgaatttggttgctttaattctgaagttatcgatatgatgaagatcacagaagcagatactgcaatcggggagactttggtagatgagtctatgaaagagatccaggataaagaaggtaaagatgaagatgctgatgaatctagttgctttgtttcagaacttagcgatatgattaagaactcatctgcaagtgatgctattgaggataaagatgctactggtgaagagacactacatgataaagctgaaga

SEQ ID NO: 103670 - DNA, 400 bp, Arabidopsis thaliana columbia
acagagatctatccatctctgtatgaagctgaagaacaatgggtgatggtaacctcaagaaaagcaagctgtcatggcccaaaacgttggtcaagaaatggctcaacatcaagagcaaatcagaagattttcacgcagacgacttggacagaggtgaaggtggtggagattggaggaacaatgtcattgaaagagaggaagcatgctctgtccgtaaaagcaaaactgagactcggagcaaaaggaacagcggaagagccagacgaaacaaactcgatgtcgattcaccgcttgatcatcttaaggtttttactgccacatggaatgtcgccggcaaatctccgccgagttatttaaatctcgacgattggcttcacacttctcctccttccgacattta

SEQ ID NO: 103671 - DNA, 321 bp, Arabidopsis thaliana columbia
caagaagttaacacgaaaacgctcgtttctcggtggagaagccgcggttgtaatcgacatcgacgccggaactgtgccgacgaccgcagcgaactgtcaatctcaccgtgtaaatttcaaatctttcgatatgccgcctccagagatttcgaaaagggttttagactcgaagcttgaaacttgcaaattcgcagtcttgaagctaagtgcggttaaaacgacgagaatgaagaactataagcaactgcgtactctgcttatgttgaaagaaatatctcgacgtggtgctgatcgagactttcttaaagatccggagaatag

SEQ ID NO: 103672 - DNA, 396 bp, Arabidopsis thaliana columbia
  unsure (1)..(396): unsure at all n locations
agtcatgaaaatgtgtgagaaggttgtggattcaaacggagaatctgttcctttatctgaagaaaagattgcaagtatctctgatgtcatagagggatttgcttcagaggctcttangactctctgcttagtttacacggatcttgatgaagctcccagaggggatcttcctaatggtggctacacattggtagcagttgttggaatcaaggacccggttcggcctggtgttagggaagccgttcagacttgtcaagctgctggaatcactgttcgtatggtcactggtgataacattagcactgccaaagcgattgcaaaggaatgtggtatacttacagcaggaggtgtagctatagaaggttcagacttccgtaatttgcctccacatgaaat

SEQ ID NO: 103673 - DNA, 396 bp, Arabidopsis thaliana columbia
  unsure (1)..(396): unsure at all n locations
aagaacgtcatggtttgtgatcttattcattctactgattgtgaagggtttgggcgttggaaggcgaagattcagcacgaatttccagcttctattcagaatcataaagggtcttgtgttcctcacatttgtggcaattctcataactttcctcgcacttcctctgataacaatcaaagacttattcatctgcatgcttgccttcatgccaactggatggggaatgcttctcattgcacaagcgtgtaagcctctgattcaacagctanggatatggtcatcagttangacgctagctcgaagctacgagatcgtgatgggcttgcttctgttcacaccagttgcgtttttggcctggtttccttttgtgtctgagttccagacaagaatgctctt

SEQ ID NO: 103674 - DNA, 163 bp, Arabidopsis thaliana columbia
attgtttcatatttgatatcgtttttgtgccaagctcatcacatgatgatgtttttgtaaatatttcgcaacttgtccatagcgctcgtgatggttacaaggtttgcattttcgcatatcgacaaacacgatctggaaaaacttatacaatgatggatatgcc

SEQ ID NO: 103675 - DNA, 410 bp, Arabidopsis thaliana columbia
acggacgcgtgggtttcgctttctccgtacacttggccttccttctagcgatcaaaccctaggtcccgccattgttggtcccagacttcaatcgaagctccaatttcactaatttcaggtgttgtttattctctggaagttggcgatacaatggattctactgctgcaaccaaacgtgttgttgacccacttactgttgggagtgcgtttgtcaatcagtactactacattttctgtaacatgcctgagcatctgccccggttttatcaagagatcagtagagttggccgtgttggacaggacggagtcatgcgtgatttctccacttttcaaggtataagtgaggagcttaagagactgacttatggagattgcaactcggctgagataaccagttatgatactcaaga

SEQ ID NO: 103676 - DNA, 373 bp, Arabidopsis thaliana columbia
gaaatttggattctcagaaagtaaagcttcaagcttaagagttgaactcttcaagacttatggaagtactctcgctggtcttagggcgttaggtcatgatgttcatcctgatgaatatcacagtttcgtgcacggaaggttaccgtatgggtcgatcgaaccaaacaacaagctacgtaaccttctcaacaaaatcaaacagagaaaaattatatttacgaattcggacaagtttcttgaggaccttcaccgcatgattcttggtttagaagattgtttcgaagagatgatttgttttgagacaatgaacccaaatttattcgggtcaacaacccgacccgatgaatacccggttgttctcaagccttcgttg

SEQ ID NO: 103677 - DNA, 412 bp, Arabidopsis thaliana columbia
acttctttctctatggctaaactctgaaacgttttcagagccgtaacaatggctttggttcattacatgaatgtttcacgtagcacttttcctttgagtagatcttcaaagattaatttgagctcatcttttgcttctttgccacttcagtttcataaaaacattaagagattagaatcctctgttccaccatcagcttcagcttcagcttcaccggcgtttcctattgatgttgagtatctccggcgagagttctccggccatggagccactttcgaagatattggtgagacatgtattgctagactaaaactggacaatgggagttcagcgaatgtgatgttgacacgtgggatgataacatcgtacaaagtccgagtgtggcacggtggcaaagtggagcttctccaca

SEQ ID NO: 103678 - DNA, 405 bp, Arabidopsis thaliana columbia
aaaaaaatctcaaatctggcaaaaaatggcgacgattccaatggatatcgtcaacgacatattcctccgattaccagcaaaaactctagttcgttgccgtgctctctctaagccatgttatcatctaatcaacgatccagatttcatcgaatctcatcttcatcgcgttcttcaaaccggtgatcatctcatgattcttctcagaggagctcttcgtctctactctgtagatctcgattcacttgattccgtctccgacgttgagcatccgatgaaacgtggtggtccgaccgaagtttttggttcttccaacggtttaatcgggttatcgaattctccaactgatttagcggtttttaatccttcgactcgacagattcatcgattacctccttcgtctatcga

SEQ ID NO: 103679 - DNA, 376 bp, Arabidopsis thaliana columbia
atccagctaaacagccccttactgtttgtttatcaaacctgtcgaacgaataggtcttcagaaacgaggacgaagcattatcaaaatctatatttggtggcagtatgaatacatacaagaccagagtcagtcagtttggccagatggaacgtgtaatgcagtgttcggtcccttccttcatccctagaaaccgaacaagactggtgatgtcagataatgccgtcgatgggatagtatcatggtatcaatgggacgtaaatgaaggggatgtttttcatgctgaagattttctcttagcgttgcccagtacacacatcgccgatctacttgctactcaatttagatcactgatggcccgtgaacgatacatgattga

SEQ ID NO: 103680 - DNA, 372 bp, Arabidopsis thaliana columbia
atccactaaaactaaaaattgaagaaaaaacatgagtctcaccaccgacgaaatcgaagtgagagatttcgtggtgaaccaaaagaatggagtgaaaggactcgtcgactttctaaccctaaccacacttccttctccatacattcaacctcctcaagaacgcttcacttccgacaagatcctcctcggatcacctgtcccggtcattgacgtgtccaattggaatgaaccgcacgtggctagagagatctgccatgcagcgtcaaagctcggcttgtttcagatagtgaaccacgggatagctccggctgagttcaagggtgtgattgctgcggcgcgtgggtttttcgagttgccggcggaggagagaag

SEQ ID NO: 103681 - DNA, 382 bp, Arabidopsis thaliana columbia
gcggctcttctttggatcaaaggcgaagtcaaggcggagaaagaaaagagagggtcgtgagatatggttgagacgagacgtagctcttccgcttccaagcgtttctgtgcttcttcttcttcccctgaagcatcttcttctcaaaggcctaacaagcgatctaaggttaagatcgatgccgctgcttcttctctcgaacctgcgacggcggaaccggctggttcttcatcagcgagcgaagttccgatcgagaatcaaggacctgcttcggatcctggatcggaatctggagagccggaacttggatcttctgatccacaggctatggatgcggagaagcctgttgttacaactgatgtccctgtgatggagaactctcctg

SEQ ID NO: 103682 - DNA, 159 bp, Arabidopsis thaliana columbia
aagaagattctcagaccctgatggcttcaccattggatccttattcaaacaaactccagttctcacacaatcgacatctcatttctcctcttccgccgactcctccggccgtggtcgtggacgcggttccggtgaatatggaggatttcccgccgctgg

SEQ ID NO: 103683 - DNA, 413 bp, Arabidopsis thaliana columbia
cttcctctgttgtactttccttcttactttctcagcgtgagccatcatgggaccagaatctaaaggacgagcatggtttagtaaaatctacaacaagttggaaaatttgcttgttgaggttgactctttcacttctcagagcacgctttgtttgaaatcaagtgaacctccgagattcgaatatgttagaggtgaatcaaaggaagttgcagaggaccattcttctaatgtacaaggacgtcatgatcgtgttgcttcaccgcgaagtgaaagtccttctgatccaccgtcacatcagaactttgacattccaggacatgttttggttgagaaacgagttcaaggcgatattttgaaagagaatgtagttcaaagagatagttttgaggataattcatcagcttcctcttcgt

SEQ ID NO: 103684 - DNA, 160 bp, Arabidopsis thaliana columbia
aacgctgcaattctccagtctcaccatctccatgataaatgtgtcttcacgcctcctcataacagatacaatgaatgatgtcttacgttgcaaacttggtcatcaagagttttgaccgtgcttccgtggtgtatgtggaagatgtggtggatatgtctcg

SEQ ID NO: 103685 - DNA, 385 bp, Arabidopsis thaliana columbia
cggacgcgtgggcggacgcgtgggcggacgcgtgggcggacgcgtggggtgaagttgaaagcatcgatatccaaagtaacgagcatagtgcttatgtcacatttaaagaaactcaaggagcagagactgctgtgctcttatctggagcgagtattgccgatcaatcagtcatcattgagttggctcccaactacagtccaccagcagcccctcatgctgaaacacagagcagcggtgcagaatctgttgtccagaaggcagaagatgttgtgagcagcatgttagcaaagggtttcattcttgggaaagatgctgtcggcaaagcaaaagcttttgatgagaaacatggtttcacctcaaccgccaccgcaggagttgcttcact

SEQ ID NO: 103686 - DNA, 381 bp, Arabidopsis thaliana columbia
tccatcgttctatcattttctcctttccttcacctcaagatctcaaaaacacaaaaagagaaatcaatcaaaaccttagggttttctactaatttatctgtgtgatgttaagagaatcatcatcatcttcgtcgtcatgggaggagtaacttcatcaatcgctgcaaaattcgtttttttcccgccatcaccaccgtcttatggatttgtttccgacgttgaccgattatacataacagaagtacctcgccgtgatgatgtagatgtattgaagctaaagactcgtcgtggtaacgagattgtagctatttatattaaacatcctaaagctaatggtacgcttttgtattcacatggtaacgctgctgatttgggtcaaat

SEQ ID NO: 103687 - DNA, 376 bp, Arabidopsis thaliana columbia
acaaatcttaaacgttttactttgtgctgcactactcaacctcaatggccgcctcaacaatggctctctcctcccctgccttcgccggtaaggccgtcaagctttcccccgcggcatctgaagtccttggaagcggccgtgtgacaatgaggaagactgttgccaagccaaagggcccatcaggcagcccatggtatggatctgaccgtgtcaagtacttgggtccattctctggcgaatcaccgagctaccttaccggagagttccccggagactacggatgggacaccgccggactttcagctgaccccgagacattcgcaaggaaccgtgaactagaagttatccacagcatgtgggccatgctcagagccct

SEQ ID NO: 103688 - DNA, 373 bp, Arabidopsis thaliana columbia
gactagttctagatcgcgagcggccgctcgcgcggacgcgtgggctcagccctaagagagaagaaatacgctctgctctgcgccttttctacaagaaattcaccaaaaaagcttgaatatttatcggaatcagagcttgggtttttaatcctggtaaagccatgtcacatatggtgtttcagagcgttgtcgctcccaaacccttatctcctctcaaaccctgtttacctatccctcgtccactcgttactctgccttgtaagctccgtcgtggcttcgttagagcttcttcgtcctcgtttcttgtcgatgattcagtttcaggactcgagcgttgcttacagttaccttctggagtttgagtaggcacatc

SEQ ID NO: 103689 - DNA, 217 bp, Arabidopsis thaliana columbia
tgttggtgtcatgccctggggacaattaatgaaacgccaaatggaacgggtttcttttgctacactctgacatcaatgtctcacgcacgtgggacaaaccagcacatggacctttgtatggctacgatttctggtaccaatctcggttcacgacaatgatcagcacttcttggggtgcatctaaacccgtctccgaaggtttcaatctccagcatgt

SEQ ID NO: 103690 - DNA, 213 bp, Arabidopsis thaliana columbia
gggtcaatatggattgaccaaatctcggccatgccaatggataatcaacaaggacatggttttaggaacaatcttttcaaaatgatggccgaatataaaacccggtttcatcgggttcccaggtggttgttttgtcaagggtgaatggttaattaatgccttccgctggaaaaaaaccttaggaccttggaaaaaaaaaccgggcaattttgg

SEQ ID NO: 103691 - DNA, 377 bp, Arabidopsis thaliana columbia
gaacaatgaaaaatttaaccagtttcgtaattgttatcttactacaaagcttattgtttcatgtatatggtcgtcatcaaagttcttcgaagaacattttagtagattcatctccatttccttctgatttcctctttggtacagcttcttccgcttaccagtatgaaggtgcgttcttgactgatggaaaaagtttgaacaattgggatgtctttacgcataaaaatcctgggaaaatacttgacaagaacaatgcagatagagctgtggaccaatataatcgatttttggttattttcttatgataattatttctttctatttttgttcttgtcaacttcttttatcatattatattctcatattatttgatgttg

SEQ ID NO: 103692 - DNA, 278 bp, Arabidopsis thaliana columbia
caaaaacttgtgctaagactacttcaaaagagttctggcttcagtgtgagggcatagtgcaagacttagatgatagacgtcaagagcttcctccgggcgtgctcaagcagcttcacactcggatgctttttatccttagcagatgtaccagattacgtcaatttcataaggaaagttgggggcatgaggaagatgctgtacaactacgtcagtcaggagtcctgcattctgccgataaaagagaccccactggagaagttagggacgggaaaggttca

SEQ ID NO: 103693 - DNA, 197 bp, Arabidopsis thaliana columbia
atagacctgaagatcctaactcagccaatgtgtggcttggacgctggcacgcagttgcaggtttgggctcctggtccattggtggttaagaatctgggaccaaaatctcagacatcgaagcgaagttttcacgcagtccacgcggaaaggggaaaacttaacagaggtgtcaggaaacgatccggtgtttcaactac

SEQ ID NO: 103694 - DNA, 120 bp, Arabidopsis thaliana columbia
cattttcactgtccttttgaatcagcatcacaatcagaagcctgatagatggtgagatccacgccggtgagaaactctcacacttccaccgccgatctgctttcctggacggtaactcct

SEQ ID NO: 103695 - DNA, 380 bp, Arabidopsis thaliana columbia
cttggatttttcatcccccttctccccgggaacaagaacaacaacaacacagaaaaactcaaaaccatcgcgaacatcgaagaatcatctctcaacaattctcctttttggttcttttaggataattctttggactgatgatttaaggggaaacgctgagtgtaacacatacaacagttcaaactcgtgaacacaaaaaagatatggtttgtagggggtttttggtgtttgttgaagttactcaactttctcctggctgttgctggacttggtatgattggttatggtatctatttattcgttgagtacaagagagttaccgataattctgttacattcgatttgactaatggagatcaaagttacgtttcgtttgggag

SEQ ID NO: 103696 - DNA, 347 bp, Arabidopsis thaliana columbia
cggatcactagttctgtattttgaagggttttcttgggaaagaagaaaacaaagctaagaatgaggaattcaacaaccatcatgatgataatgatgattgtgatgatggtggatgattgggttggagcagcggacaataatccggtgtacagtccatgttcagatacacaaataagcaaaggagatggtttcaccattggtattgccatctctagcaaagaagctttttttcttgaccaagtccagctttctccctgtgatactcgtctcggtttagctgcgaaaatggcgcagcttgcgctttttagacctaaggttgacgagatctctcttctctccatcgacac

SEQ ID NO: 103697 - DNA, 210 bp, Arabidopsis thaliana columbia
ggatacccgaatccatcctccaatctcgacttttaagacctccctccatcaaaacactcttgtattgtatgtatggctttcaaagtttctctcgtttcctcaaagtttgtatttttaagagaagtgtgtgtgtagacaatcgatgttttattggcttgtccttttttctggacatgtgaatgctgaccacaagtctaaatctggtggata

SEQ ID NO: 103698 - DNA, 378 bp, Arabidopsis thaliana columbia
aggaataacatattggcagctaaaaagaaatgggaagaagctggttttacaatgtcaagaatgactgatattcacggtaatgaagaaacaaacgaggaagaagaagatatctgggaggaggatgatggcaaggttaaaactgattcagtcaagaacgtggctcatgtgatgagaactcagcagagtgagaattcatctttaccatcatcaggtgaagcaaagaagtctacatcagaagctaggtccaataaagtgtcgaacactaaaaaagttggaagcagtggaaactctcttagagacaagctaatttctgaagcgcctgtgatgaattggggatcacagttgactaattgggaatcaactacggaagttcgagct

SEQ ID NO: 103699 - DNA, 173 bp, Arabidopsis thaliana columbia
cacgaactttcactagacgacgacgacgatctaaagtcacagtcaactcactcacaaagacgactcctttattaaattattccaaactcctttcttcatcatcatcatcatcatcattcataaccacttaggcacagatgcgattttcttctccgtcttcattgtgctcttca

SEQ ID NO: 103700 - DNA, 316 bp, Arabidopsis thaliana columbia
attattttggccgtgagcttctccatttccatttccatcgccatcggactctctcctcttacaaacttttcatttttgttagctctcatctctacgtcgaattgctttttctcttcttctccgattcgaaaatgaggacaatcgtttcgcgtttgattcgttatcaatcgtctctttcccagatacggtttgtttctgcctctggtggcgggaggtatctctcgacagactctaacaaaattgatgagcccttcaatgtggaagaagctgagactgtacatgtgcctccacctcctactgagaagctgcttgtcct

SEQ ID NO: 103701 - DNA, 315 bp, Arabidopsis thaliana columbia
cacaaaagcttttctctagacctcgtaggattgttgaaaaataccctgctggtgaagatggtgaccttaagaagaagcatatggtgtgccttaactggcttctctctgacaagccactggacttacaaactcaactcgcacttgggtttttggatcatctaatgcttgggactcctgcctccccattgagaaaaatcttattggaaagcggtttaggagaagctcttgttaatagtgggatggaagatgaacttctccagccccaattcagtatacgtttgaaaggtgtttccgatgataatgtccacaaagttg

SEQ ID NO: 103702 - DNA, 202 bp, Arabidopsis thaliana columbia
aaaaggggttgataaaaaaagaagaccacatgtttcaagaggagaagagaaagacaaactatggagcaattggcttggcttgcttcatttcttgtttctttgcattccaattcatgaaaatcgtaacaacacaaccttcaacaacaacaacatcatccattgccgttatcgatagcccaatgtcctcccaaaagctatctga

SEQ ID NO: 103703 - DNA, 277 bp, Arabidopsis thaliana columbia
accacgcgtccgcccacgcgtccgccttcttcttcttccaccgtctccgccacgaaccagagaaagctcaacaatggcgtcaatcctctcaaagaagcagaagaagaacgaaaaatacaccttgaaagagctcaaatcattaggtcatgacttactcacttctcgatctcacatcaataaccttcctctccttctcaccttcgtctcaccagaatctccgccgcagttcgtcgttgaatcactcctctcactccaatcctttttcactcctctactc

SEQ ID NO: 103704 - DNA, 189 bp, Arabidopsis thaliana columbia
gattcttgaacagcacgatcgtcaacgatttcacggactacgcggatccacgtttcgagttagttggggatacggtaccaaactggatcaccatcaaccagctatatacagtgcctaccacaggatatggaatgggagcaaatgcacccggtcgatgttctcccactattgacattagatatcccggcg

SEQ ID NO: 103705 - DNA, 347 bp, Arabidopsis thaliana columbia
attggaagtggacatggaagccacgaagagaagagttttgttttccaaaaacaggttacactaaaagcaggagagaatcatcttgtaatgcttggtgttctcacaggattcccagacagtggatcttacatggagcatagatacaccggtcctcgtggtatttccatcttaggattgacttctggaacacttgatctcactgagagcagcaaatggggaaacaagatcggtatggaatgtgaaaaacttggaatccacactgaggaaggtttaaagaaggtcgaatggaaaaaattcaccggaaaggcaccaggacttacatggtaccagacatactttgatgcacc

SEQ ID NO: 103706 - DNA, 327 bp, Arabidopsis thaliana columbia
cccacgcgtccgcgcatgtgcgttatatcgcctagaacttaaagtaggaaatggaaagaagagtcctaagggaaagatttcaaaagaccctctggctgatctgcagaagaagatgggacagtttaaagtggcttcagacaaaccctctcctccaaccaaaggtcgtaaggagtgaagttagctattggtaatctaactcaagactcctgcaacaatagctccaagttgtctccagcattctacaaaagagccatcgccacctctgttttctttgtttttttctttctgactgtattatgaagagatacgatctttgatgtgttgtgt

SEQ ID NO: 103707 - DNA, 191 bp, Arabidopsis thaliana columbia
tgcaactttgaattaggtgcattaccatgaaatatatagagactgcttctagttcgttattagttagaattcagagccatgtccgtcaagagtctcattcatgacatgagaggagagcttgggagtatatccagaaagggattcgatgtcagattcgggtatggtagattcaggtctcaacgtgttgttca

SEQ ID NO: 103708 - DNA, 204 bp, Arabidopsis thaliana columbia
gtggttctcaactataggaagcaaaagaacgattatgaagacaggttgaagattgagaaggcggaagcagatgagaggaagacaatgagggagttggaaagggagatggagggaattgaggacgaggatgaggaggttgaggaaggtacaggtgagacaaatccttacttacagatggcgatgcagttcatgaagtcaggtgca

SEQ ID NO: 103709 - DNA, 357 bp, Arabidopsis thaliana columbia
  unsure (1)..(357): unsure at all n locations
atttgccacatcctttagtcgcaaagaaacaggcttcgtctgagttattttcggtccccattgatacncctcctgagttggtcttcaagtgtaagagtgcacccaaaatgcttgtcatattgaaccctaagtcangacatggacgatctatcaaagttttccataatgtcgtggaaccaattttcaagctggccggaattaagatggaggttgtcaaaacaactaaagcaggtcatgcgagagaattggcttccactgtcgacattaacttatgctctgacggaattatttgtgttggaggggatggaatcatcaatgaggttcttaatggtctgcttactcgaagcaatccgaaag

SEQ ID NO: 103710 - DNA, 217 bp, Arabidopsis thaliana columbia
ctataacgcgtgatgagatacctaaaagaagcaaaagaagttcggtagttgaaacataaattttagtgctcaaacaaagtaaactcaaaggaaacagctcctgatcagatttagggctctatgagtaggttttaagtctacaaagataacttcttctttccctatttttactatttaaagaatttttatttttattttcgttttaaggacatttttt

SEQ ID NO: 103711 - DNA, 124 bp, Arabidopsis thaliana columbia
gtgaagagcaagcagacgagaaacatggtgactctgtcttcctatctgttatcatcgcctccgctatgcaaatcgcgattctcggtaagaagtctcgtctcaggaattgatttcatctctttct

SEQ ID NO: 103712 - DNA, 188 bp, Arabidopsis thaliana columbia
cccaccaaagcctggagacatttcatatgaccaattcgttcgtgagagcaagggaatactagaatcactgagaagaagagcaaggatgatgactgatggattcaacagctgcaaaaacgtcgtctgtaatttcacagaaggtgctatgtattcattccctcaaataaagttgccgtcgatcgcaatcc

SEQ ID NO: 103713 - DNA, 375 bp, Arabidopsis thaliana columbia
accacgcgtccgctctctctctctctctcgccgccttcctctcaccctcttcgcatagcttcactttcgccgatggctctacctaaccagcaaaccgtggattaccctagcttcaagctcgttatcgttggcgatggaggcacagggaagaccacatttgtaaagagacatcttactggagagtttgagaagaagtatgaacccactattggtgttgaggttcatcctcttgatttcttcactaactgtggcaagatccgtttctactgttgggatactgctggccaagagaaatttggtggtcttagggatggttactacatccatggacaatgtgctatcatcatgtttgatgtcacagcacgactgacatac

SEQ ID NO: 103714 - DNA, 354 bp, Arabidopsis thaliana columbia
aaaacatctttaagagtcctcatggcgatgtctttatcaggagctgttctcagtggcatgggttcttctttccacaacgtaggagcaaagcagagtggtgttggtaccgtcagagttggccggaagagtgagctcgtcgtcgttgctcagcgcaagaagtcgttgatatacgccgttaaaagtgacggcaacatcctcgatgacctcaacgaagccacgtgagtctatattcttttcttttaacaaattttctcgtgactaaggctatcttcatgtgtactcgcaaaaactgcgactgaggaagctaagaaagctttggattatgtgactgagaaaggaaaagaagccggaaac

SEQ ID NO: 103715 - DNA, 386 bp, Arabidopsis thaliana columbia
attgtggttaacggctctgctcaagtccaaattgtgtaaacaatttctcttcctaataattttccaagactttggatcaccctaacttcttcgtttcgtttcaatcaaatggcacatttctctgctagacttaagcttctctcaagcaacgatggattatcttttggtgtagattcgagagaccaatttcggcagagcctttacatggccggtggtggatctcctttggttccaatacgcatgagccgactaaagttttgtgctagaatcttctcatcttactcttttccttataagagaaagaaaattagggatctcgataacaccgagaaaaatcttgatattgacgaagacaacgatgagtgggattttgatggagacgatga

SEQ ID NO: 103716 - DNA, 154 bp, Arabidopsis thaliana columbia
aaaagcctaaaaagccgaccttttttctttctttctctcctctacctctcagcttctgctggatctctccagcagacacgatcttgttcggagagattcgtacgggaccgatctatcaaggcttcaagggcaaacagaaatggaccacgacaag

SEQ ID NO: 103717 - DNA, 201 bp, Arabidopsis thaliana columbia
accacacgtctgatgtgacccttattcttatcctgagtcctctgctcggttctcgccggagaaaaaacactgacaagagggttttcgaaaaggacgatgagaagttctaaaaacaccgatctaattgacactaatacggatatcgctcccaatttctctccccatggttcttcctccgaatgcgattttggtttcactttc

SEQ ID NO: 103718 - DNA, 386 bp, Arabidopsis thaliana columbia
aataaacagagctaaaatgtttcctctaatctccttttctccaacttctcttgatttcaccttcttcgccattatcatctcaggtttcgttttcatcatcactcgatggaattccaattcaaagaaacgtttaaaccttcctccaggtccgccaggttggccggtggtcggaaacttattccagttcgcgcgctcaggtaaaccgtttttcgaatacgcagaggatctcaagaaaacgtatggcccgatttttacactgagaatggggactcgaacaatgatcatcctctccgacgcaactctagtccacgaagctttgatccaacgcggagctctcttcgcttcacgacccgccgagaatccgacccgaacaatcttcagctgca

SEQ ID NO: 103719 - DNA, 409 bp, Arabidopsis thaliana columbia
acaacaacaaatcttaaacgttttactttgtgctgcactactcaacctcaatggccgcctcaacaatggctctctcctcccctgccttcgccggtaaggccgtcaagctttcccccgcggcatctgaagtccttggaagcggccgtgtgacaatgaggaagactgttgccaagccaaagggcccatcaggcagcccatggtacggatctgaccgtgtcaagtacttgggtccattctctggcgaatcatcgagctaccttaccggagagttccccggagactacggatgggacaccgccggactttcagctgaccccgagacattcgcaaggaaccgtgaactagaagttatccacagcaggtgggccatgctcggagccctaagctgcgtcttcactgagcttttggc

SEQ ID NO: 103720 - DNA, 231 bp, Arabidopsis thaliana columbia
cagcaggacacattatccgatttgatcaataagcttccagagccgaggaagcttgatttgcttgaagctcttgctgagatctcaccacacacaacaactctgatagcatccgagatgcttcccccaatatttgagctcttaaagaaatacatgcctgccaggaacactgtggaaaaatcagactccagatatgttgagtgcttattatacgtgtttcatcatatggcgcac

SEQ ID NO: 103721 - DNA, 389 bp, Arabidopsis thaliana columbia
caactacagagcttgcaccattccttatagattcccttccgataatctcaagaaagccactcctactgaaatctcctggatcaacgtcttcgccaattccattccttctttcaagttcctctctctctactttgacctcatttagatactgctcatgggtcgaatcaagttttgattttgaaaccaaaaattgcttcttttaggctcatattccaatagtctgcttgattaattgcaaattctgtcaaaactcatgaaacttttagcccttaagctattgatagtgtagttgctagttgttgctttgactttcctctgtgtttacttaacatcacgagattgtttctggaagcttataggaaacagatggaatcctaattttaacaata

SEQ ID NO: 103722 - DNA, 322 bp, Arabidopsis thaliana columbia
ttaaggcagagaaaaaacaaagacaaataatctcaatttgctttcttctccatcttcttctaattttcttcaagttttatcaatggctggtgttactggaatcttaaagcttgaagcttggagcatcttgtgaagaagattaactagtttcttgtatttttcttttctggggttttgagtttttttttctcttccttattaccggaagtaatggcatgtcggagtatgatcgcttttagtttagatcctgaaagaaaacaaagtggaggacttaggacaaaacaagctggaagaggatcttgccgtggaagttagtctttgt

SEQ ID NO: 103723 - DNA, 387 bp, Arabidopsis thaliana columbia
  unsure (1)..(387): unsure at all n locations
agaaaattcaacggcgaagagaccaagagaacgatcacagatcaccgttggatcagtcgtcgtcgtcctaatctaacggccaggagactcttctccgatatcttgtgcttctttcccgttacgacttcgtcggaccccaaaacctaatccttaatctcccattcttcaccatggttaccagaagaaggtcgaagaagaagaagaagacgaaaaggaagaaacagagtagcaaggaaaaagaaaagtatcaaactttcataaaccttccttgtgatctcttacaactggtaatttctcgtctcccgttgaaagataacatccgtgcttctgctgtctgcaaaacatggcacgaagcttgtgtntctcttcgagtgatacatacatctc

SEQ ID NO: 103724 - DNA, 190 bp, Arabidopsis thaliana columbia
tctagttggatcattcatgatctcaatagcactgataataatcggattttctgcagacattgggtatctgttatgagattcaacggaacattgcgctactttcacaggcacactaaccacggcagctgttgtctttatcattgggttctggttgttcgatcgaacaaccaatatcgtagaagtacctgct

SEQ ID NO: 103725 - DNA, 404 bp, Arabidopsis thaliana columbia
  unsure (1)..(404): unsure at all n locations
cggacgcgtgggatcagacaattcatcgagaactctaaaaaaggcaccttctacaggaggatgtcgagttgaaggatacatgcgtgtgaagaaggttccaggcaatttaatggtttcagctcgctcgggatctcattcctttgattcttctcagatgaatatgtcacatgttgttaaccatctatcctttgggcggaggattatgcctcagaaattttcggagtttaagcgcttgtcaccttatctcggcctaagccacgaccgtttagacggccggtccttcataaaccaacgagatctcggcccaaacgttaccattgagcattatcttcanatagtaaagactgaggtagtgaaaagcaatggacaggcattggttgaggcgtatgagtacacagcacata

SEQ ID NO: 103726 - DNA, 312 bp, Arabidopsis thaliana columbia
cccacgcgtccgctcagtctctccatttcccggagcaaaaatagctctccgaccatgaagtttggatctttaccatccaaatcccttctcttccgcctctcttcttcctccacaacccaatctcaccgtcgaataattatccttttcatcactaacattcattcctctccattctccaccagaaccacctccggctccaatttcgtctccggatccagccattctcgctctcgacgtcctcagcacgactaagagtcgcgatccgttagggtttcggtctggtgggacttcctgagctgtaacttatctgta

SEQ ID NO: 103727 - DNA, 410 bp, Arabidopsis thaliana columbia
gttgaccgtctcaataaagatcataatcatgaccttgaaccagggaagaagaatgacgctggtatgaaaaagataccggacgatgggacaggaggattggattctgttgatcttattgaactaaacgacttcggcaacaaccatatcaagaaaactcgagaaaacaggattggtaaagaatggtatccgctgcttctcgattatttccagtctagacaaaccgaagacatgggattcttttacgctgtcgaattggatgtcaataatggaagttgcatgagcattttctgggcggatagccgagcaagatttgcttgcagtcagtttggtgattccgttgttttcgatacttcatacagaaaaggaagctactctgttccgtttgctactatcatcggttttaaccatca

SEQ ID NO: 103728 - DNA, 368 bp, Arabidopsis thaliana columbia
gtttacctaattcaggtccaccaagtaaggcagtcgtctggagagaaagaacgtttattgacctagaggctgatactgataccaatagtagtcatgaagccgtcattcatcaaaatcacttggattcaagtttaacttctcaccaacagcgccccttgtatccatatattcgtccagattctgctgtctcctggaaccatttgcactcttcttggcaaaatcctagctttggattccctcagaaagttgcttcagctcagagatatccggttctaaacatgtctgatacactgattggtaatgctcagaagcaagggtatcttggagatagattgcagtttgaaagcaattctagatttgactcaggg

SEQ ID NO: 103729 - DNA, 382 bp, Arabidopsis thaliana columbia
ctgtcacggaggacacggggaatcaacgcggcggagagtgatggaagagctttcaagcctaaccgtgagtcagcgcgagcaatttctggtggagaacgatgtgttcgggatctataattacttcgacgccagcgacgtttctactcaaaaatacatgatggagattcagcgagataagcaattggattatctgatgaaaggcttaaggcagcttggtccgcagttttcttccttagatgctaatcgaccttggctttgttactggattcttcattcaatagctttgcttggggagactgtggatgatgaattagaaagcaatgccattgacttccttggacgctgccagggctctgaaggtggatacggtggtggtcctggc

SEQ ID NO: 103730 - DNA, 341 bp, Arabidopsis thaliana columbia
accacgcgtccggcacagtggccagtgtgggaatttttgctggacgagagagcagaaccctactgcgatttatcgactactaggagaagaagaagaagaagacgatgcggagattcggggctgggaacagatccgtttccaagctcgtactcaccatttgtgtagctatcctgttcataccatctctatcgtatggagcttcacaagggaaccggaagacggcgaagtcttctgtgttttccttgttcaatcttagggataaaagcagattttggagcgagtctgtttttcgtactgattttgatgatttggagtcttccgttcactcgaagtctggtgtg

SEQ ID NO: 103731 - DNA, 384 bp, Arabidopsis thaliana columbia
aacactttggttcatcaattgtttcaaaagaaactcaactaactgactcaaaagaaaatcaaataagcccccaaaatattttgagaatcatgctaaagatggagattaacggtggggtcgctacacctactgcttccgccgtcgccaaggtgacagaaaccaccactcccgttaactctccttctcccacttcttcacctccgccgcctccttcgccgcaacagccgccacaaccaccggttgtactaagcccttgtgcggcttgcaagattttgcggcggcggtgcgccgataaatgtgttttggcaccgtactttcctcctacggacccggcgaagttcacaatcgctcaccgtgtctttggagctagcaacattattaagt

SEQ ID NO: 103732 - DNA, 298 bp, Arabidopsis thaliana columbia
cccacgcgtccgcgcaacattgttctttaacattttgcttcgcagcactcttgctagtaaaagagtgttggaagaatacaagctcagccgcgaggcttttgagtgggtcattggtgagattgaatcaaggtttttacaatcgctagtggccccaggggaaatgatcggttgtgttgctgctcaataattgaagaggactttgaatttgtgaggtcctacgatgaaatgccagatgaagatgtttccccagataagatatctccgtggctacttcgtatagagttgaatcgcgagatga

SEQ ID NO: 103733 - DNA, 330 bp, Arabidopsis thaliana columbia
ctgatggtaattccgacttatgtaacggatcagtgtacaaggaaaaagagaatggaaagtgtggcagccaaatcaatggttattatgaatcatgtaaaccttgtaatggttctgatttgcatgataatttagctgaaagttccgatcggttcggggagctatcgattaatggaaacaagataagtattaagtctagcaaaatgagccataaagctgaggcacgttgcggaattagtgatgaatccaggaaaaataagaagtacaccatagcaagaatatcgggaacccattccataagtgtggattttcgactttctagaggcattgcac

SEQ ID NO: 103734 - DNA, 313 bp, Arabidopsis thaliana columbia
attccattgaacaccagagtgcacattgtttaccccatcttctgtcactctctgaggttcgaggcgcaaaatctgaggacacgcaaacccatgcttaccgtatgtacttcatgggtccaaacaatttcagggaaccttggcatctgccctactctcctcctggtgcaatcatagagatagtgtacgaagatgcttttaacagctttattaatgaaataaactctaccgcagcatatgattggtgggaagggtctgtgcacagcattctttcagttcttgcaaatccttgtgcctggtcgtggaaacaatggcg

SEQ ID NO: 103735 - DNA, 147 bp, Arabidopsis thaliana columbia
aagacgcgtggggtgaataattgcaattgtatttctgtagcttttttttaaatgatctttttcacacgtgtgagactagtataaatgttgctaattttcgtttccagtataaaaaggtacattgcttttaccttcactttttaaccc

SEQ ID NO: 103736 - DNA, 192 bp, Arabidopsis thaliana columbia
ctctccctcccatgtttatcctgcgctgacttcccctcacccgtcatctccgccggtttgatctggaattagatttggacattgttgcttgatccatatcagagaaggaagttggtgatcggatgattgcacggttgcaacagttgacgaaatttgacaacttgcagtgacagcaacgtgctttaaagaact

SEQ ID NO: 103737 - DNA, 401 bp, Arabidopsis thaliana columbia
acaggcgtgctggtggtgaaaaagtgtacaacgtgtttgataaccagcttcctgcggctctgaagagactccaatttgacaagcagctagcgatggacaacatccggaagctggtcactgaggctgatggttaccagcctcacttgattgctcctgagcaaggttaccgtcgtctcattgagtcttctattgtctccatcagaggccctgctgaagcatctgttgacaccgtatgaactctttactttcatctctaaaaagatgtatcaaaaacctaacacaaaacaataagcttctctctccgtttttttttttttctatggttaaatattaggttcatgctatcttaaaggatctggttcacaagtctgtgaatgaaactgtggaactaaaacaatacc

SEQ ID NO: 103738 - DNA, 395 bp, Arabidopsis thaliana columbia
tccagagctaacgttgctttcttcccactccaaatggctcttgtgctctcagaacacacacagatataataaactcttaacgaagaagaagactttttcttttcttgagcaagctctgagaaactcacagagagggacagagagagaaatatttcattcgctactctctttaataccgccattgatgcaacctccttcgcgttaactgtcaaaatactccccaactgacaaaaattaaattcctttttttctctctcgattttaaaagctctaaaaggaacgagttgattaagtcggtcggttctggttatcactgaatttcattcaactcggtttattccggtttaagtgtgattttcccggctaatggatctgacccaaggtttcagagctag

SEQ ID NO: 103739 - DNA, 219 bp, Arabidopsis thaliana columbia
ttcccgggctcttattcattagatcacacacaaaagtaacttttgtttcgttcgctctctgtcatacacacaaaaaaatggcggaacttgagaatccaagtgtaatgtcgaagctgatagcattcgtagcttcattgctagagcgagttgctgagtcaaacgatatgagccgacgagtcgcgactcagtcagagatagtttcggtgtatcatggactga

SEQ ID NO: 103740 - DNA, 394 bp, Arabidopsis thaliana columbia
cccacgcgtccgcttagatttcatgggttggtaagaatcaatcaatttgggaggtggagtatagtacaagtacttcaatttgcattgaaccctcacattgaatcatctgatttgcagaaaaaggagatctctttatgtaaaagtctctgagaattttggtttaaagagaggattttacggagatgggtttgttggaatcggtgaaatcaatcaactgggaacatgaatcatctccggtttatcaggattttcgagttcttcctctcttcgctgtgttcttcccttcgattcgatttctcctcgatagattcgtcttcgagaaattggcaaaatatttgatctatggaaaacatagacaggatatgggagatgacacaaccgagagaaagaagaa

SEQ ID NO: 103741 - DNA, 218 bp, Arabidopsis thaliana columbia
tgcctactgagacatccattgatcatagcccgattgtggtgaacaatgctgctagtgccaccgatgttgatgacagacaagcaaatgagacactaatgattttaccttttgcaaagaagtcaccgttttggaagatgtatgagacacaggaggtatgcaaaatagcaccacagagtccagatttcagcccgctgttcgaggctaaagaagaactccgc

SEQ ID NO: 103742 - DNA, 411 bp, Arabidopsis thaliana columbia
catgcattggatgcctgaagctcttaagatgcctgagcgtgagctgattgatcatgctggtttagactctgttgtctatctccggatttactggctcgggcttaagatttttgctccaatagcaatgcttgcttgggcagttcttgtaccggttaattggacaaacaacgagttggagttggctaagcattttaagaatgtgacttcaagtgatattgacaaactaacaatttcgaatatcccagaaggttcaaataggttttgggctcatatcataatggcttatgcctttacaatctggacttgttatatgctgatgaaggagtatgagacagttgctaacatgaggcttcagtttcttgcctcagaaggccgtcgacctgaccagttcactgttcttgttaggaatgt

SEQ ID NO: 103743 - DNA, 277 bp, Arabidopsis thaliana columbia
catggacatgaagcacaaggagtcggagttgacagagagacgttctagaggattgctcacgaaagccgagacacaagctaaatacggatggtgatttgccgctattgtttttctcaatttgtgaaatttgcaacagattttctgtaactcagagtgtaatttttttcttttactattttccaagatccaagctttgaatgtaatactcatttccgtgaatgaatctaatctcagcagaatgctttgacccggaagctgattatagagttttgttgca

SEQ ID NO: 103744 - DNA, 378 bp, Arabidopsis thaliana columbia
cccacgcgtccggccttgagagaaacttacgtgtgtaagaagctagaagctaagcaaaggctggaggatctcaagcgagattgtgaccctgagctaaagaaagatattgaggagttaatggagatatctaccgaaaacgagaggttacaggaggagattaaactttctggcgagctcaaagaggcaaagagtgcgatgcaagaaatttatgatgaagaaagttcatacaaaagcttggtgggttcactcactgtggaattagatggagtgcagagagaaaacagagaattgaagggaaaggagaaggagagacaagaagctgaagaaggagaatgggtagaagcgagtcgtaaagttgatgatttttctgctgagaaa

SEQ ID NO: 103745 - DNA, 191 bp, Arabidopsis thaliana columbia
gagttatactaaagaaacttgaaggagaggaggttctgagtgagatagaagaaggaagagagagagagatgggtaagagtagtaacatagtttttgatcggattaaagaagaacggcagatgtggagctttttcaggatttttcagagggcagatctatcctctgactgcatgagagcgcttccttacagc

SEQ ID NO: 103746 - DNA, 263 bp, Arabidopsis thaliana columbia
cacacacgtccgcccgtactgtcagcaggccatcttcaacgctactcaaaatccctgctgacgagcttgtgcaacttacagctaacgaccttcctctatccagcgatagcgtctcagaatctgttcagtgcgagaaacctttagagctgttgacagactctccgatatcacagttttataatgttgatttggaaagacagctgaaaccttgggtacctgatgaagatgttccagactgttcagatctggagaatgtgtttgat

SEQ ID NO: 103747 - DNA, 228 bp, Arabidopsis thaliana columbia
cgtgactcctttcttgttgaacgcacgaagaaatggttagatagcactacatctcacgtaaataagctgctgtgtgagacatttcctcatattcttattcacccagccggcaaaattcgatggggatttctagcagcaatacgtggactgctctctaagagctcttgctcgttgaagggtgctagattagtgatgttggaatgcgtatgtactctggctgttgatgac

SEQ ID NO: 103748 - DNA, 152 bp, Arabidopsis thaliana columbia
caataacaaagatttcagctttcaggatgctgatcttctcaaaccagatattcttgctccaggctctttaatatggtctgcctggtctgcaaatggaacagactaggctaactatatcggccaatgatttgcactaatttctggcaaaagca

SEQ ID NO: 103749 - DNA, 257 bp, Arabidopsis thaliana columbia
gacaaaaagcaatgcaggagtcgctttgcaacagctttcaaatgtcgcgtaggtgaatttgtaagtgatgtcctgctagttccagaaaagtgccagtttttccacaaagagcggatggaggtgtgtgagaatcaccagcactggcacacggtagtcaaagaggcatgtctgactcagggaatgaccttatatagctactgcatgctgctcccatgtggggtagaccagttccatggcactgaatatgtgtgctgccc

SEQ ID NO: 103750 - DNA, 375 bp, Arabidopsis thaliana columbia
aagaaaactctcgtctgttaaagctttcctctgtttaccttcggagtcaatcttgattccgatgggactcgaatcgggttttggagcgtttgggtgaagacatggagaaactaatgactgaatcaggtttgaaaccagttgttattgattcgaatcaagatttatctcgtgtatattgtgggatctgctctaatattggtgatgacgattatgatggtgatgctgttgttgttgatggtgatttgatctccacgcctttttgttctcacaagttctgcaaagcttgttggagcaagtatcttaagaaaaatttcttctctgtggagaaaaaccacactgcaatctcttgtcctgatcgagattgtcgagctgctg

SEQ ID NO: 103751 - DNA, 314 bp, Arabidopsis thaliana columbia
atttgctcctacgaccaatgggctttgctgcacattttttccacatggtggagtcattgccacaaggacaatagatggccacgtccagttccggacagctcctagggtcctgtcctcactgaagcacttatgccggcaagcccttcgaagtttcctaataacttaccaagtcctagcactgccaatccccaagaaaatgaaagagttcctcacatacaggactttttaatcaacaccacatcttgtgcttcattgtagcagggtaaatcgtcctgtcaaacggagttgctggaataatgggccaaacatctggt

SEQ ID NO: 103752 - DNA, 170 bp, Arabidopsis thaliana columbia
acacttaacagtctttcttcagctgagtgaaccaaaactatttaataattgttattcttttgacaagtcttctcttttttgttcaaagtcttcaacttttttttacgatagagaactttttctctgtgtgtccactagaagcagcaactacaagagcttgaaaaaggtgg

SEQ ID NO: 103753 - DNA, 391 bp, Arabidopsis thaliana columbia
agcggacgcgtgggcggacgcgtgggcaaaacgttaaactgtgtgagacttcggagataaaatttcccagaaagcgtgaaaggttaaccggaagaaaatgccgtcacaagatgatgttcaaaatcttccaatcgatatcaccttctctcgtctcggagtgatcggttacttggaggtcaaaaaggtgtatgagattctcctgaagacaactccggaaagccgcaacatctttggtcgactttcgggtgcttctggtgtttgggaagcaattgttcgtgcgtttgaaaaagatcacatttatcttggggaggcagctcagataataattcagaatgttaattacgaaatcccttatttgaaaaagcaagtgcaaaaggttcagcaacaaatg

SEQ ID NO: 103754 - DNA, 347 bp, Arabidopsis thaliana columbia
aggtaaactgacgacgatacaagctctctcaccaacggcgacagtatctttgccggcggcgggagcgcttctgcttaatctgtagctcaaactaaaaattctctgggtattactcatggtgatttggaataacgatgatgatgattttttggagattgataactttcaatcttctccacggtcatctccaatacatgcaatgcagtgtacggtcgaaaatctagctggtgtagccgtgacaactagttctttgagctctcctactgagacaactgatttagttcagatgggcttctcagacgaggtttttgctacattgtttgacatgggatttcctgttgagatga

SEQ ID NO: 103755 - DNA, 315 bp, Arabidopsis thaliana columbia
atgaaatccagcacccaatatgcctagcaaacaagaatggtgcaagcacgccatctccatcgaaggaaaaaagtatctggggtacttatgccagaggagcagtttatgcgttacagagcagcaaaaagaatctcaaacagggcattattggttacctcagtggctcaaatggactagatagctccgggcttagctcatcagctgctgttggtgtggcatacctgctagctctagagaatgcaaacgaattgactgtatccccaacagaaaatatcgaatatgacaggcttattgagaatgggtatctgggtctgc

SEQ ID NO: 103756 - DNA, 218 bp, Arabidopsis thaliana columbia
cgtccgagttaatgactttattacagttgatcaggtctctgagaataggaaatggcaattcgcttgacgcatctgcgaaaacctcttgcttattctcggtcctttgatgtctgcattccgtttttccggtcaatctcgtcctttgaagcggttgaaaatgcgataaaatgtgctgttgaaacaaaggagtatcttagaatccccgaacttgctgtttc

SEQ ID NO: 103757 - DNA, 363 bp, Arabidopsis thaliana columbia
agatatcgaagtttgagctaagaatccaatttagggttaactttgccggattctcaagcaatctccgagagagacagtgaggtttcgatggcgaggaacgggattgggagttcaggagggaagaagaatggggctgggcagtttttcttagcgacgctgcttctttggcttgtctccgtcgtgtttgagattgctttcaatctccggacggagcttctctgggtgatttgcggtggatgcttctttcaattgatgaattgggttgttcgttcatggatttctcgtgaccctatatttgttaatacctctgtctcgcttttgcactcaatcatcacctccgcatcagtggttttcatacttctc

SEQ ID NO: 103758 - DNA, 247 bp, Arabidopsis thaliana columbia
cacgcgtccgaaaaaaattcattaattgctgaaactctctctctctctagtctctatctctcttcttcatccttgagctctgttagattctctctaactctaccatcgtttcatttcttaattctctgttttcttgttcctccagagtgatagatctggcagagaacaatgtcggaattagccaattaggtcgccgagataaaaacatggaagcgaggatgaagaagtatagcagagaagtgagtcc

SEQ ID NO: 103759 - DNA, 270 bp, Arabidopsis thaliana columbia
gcgtccgcatcaacagacgctaaaacgatgacgaaaatagccgaggcatcgtttgataccgtggagtattggagaattgtggatgttcttcatagaaagattgggaaagatgaaagagagataaagaattggagagaagcgtacaaggcaatggtgttgttggagttcttactaatgcatggacctattcatttacctcatgattttctttatgagttggatcattttcgattcctctccactttccaatacgttgacaataatgggttt

SEQ ID NO: 103760 - DNA, 320 bp, Arabidopsis thaliana columbia
accacgcgtccgagagtatcttatccctaatgatgttgtggatgttgatggtggtattaaagcggtaagaccaccaataattcagccccctccgggaagaaaactacctcttattgactttccaggatcatcgtgggatttccttacgtattttgctccaagtaaaacagttaagcggcagagttcctcctcttctgataatacctctgataaagaggaagttgaaacggaagagacgcgaggtatgtttgtccagttgggggatacggctcatgaggcatgcccattcgctacaaacgaggctgactcctccagtacag

SEQ ID NO: 103761 - DNA, 102 bp, Arabidopsis thaliana columbia
gcgtccgcagatacaacgaccgttttgaccctgactagtttggtcggaggcttctgtgtgaattggggtaagatcgcatcagatctgttgaatcccaacatt

SEQ ID NO: 103762 - DNA, 279 bp, Arabidopsis thaliana columbia
gggggtttgatctttgttgtgaaatcgagagataagctttggtaaaccatgggtggtcgttacgatcggaacacattcgacgaacaagacgaagtcaatccttttgctaatcctgggagtgttcctgctgcttcgaattccagactatcgcctttgcctcccgaacctgctggttttggttatggtcgtactgttgacattcctcttgacagaccagggtctggtgcacaggatttgaaaaagaaagagaaggagctccaagccaaagaagctgaccta

SEQ ID NO: 103763 - DNA, 283 bp, Arabidopsis thaliana columbia
aaagagtggaagctgctaaaagaaaatcttgctttaatccgttggcaatatgctgtggcgtgtttgtttatgaagattgtcgtagcaaagaagagacggatgagcagcaaggggatagggaagaagctctgttttgcacgttgtgcaatgctgaggtccgtaagtttagcaagcattgtcgaagttgcgacaaatgtgtagattgtttcgatcatcattgccggtggcttaacaattgtgttggtcgcaagaattataggacttttatatcgctgatggctgt

SEQ ID NO: 103764 - DNA, 342 bp, Arabidopsis thaliana columbia
tcaaaagcttattttatcaactccggctctttaagattctctctctctctctctccttcaccatctcagagattgctccactatctcatacatttggtgaccagaacaacttatctcttgagtggttcaacctctatctctctctctttctgccatgaaaatgcaaagccaaatgtaatagttagagagggagaaaccaagaactgaaagaccatgacttccaacagaagcaacctcctgttctcattagtcctcttccactttctttttgtccccacacaactccaagctcttaacactgatggtgttcttctgcttactttcaaatactccatcctcact

SEQ ID NO: 103765 - DNA, 287 bp, Arabidopsis thaliana columbia
aaatttctcttaagatttaagaactaatatcttgtagcttcttatgatttcaccagttctaatttcttgtgactcaagccaaaacctttgttacctttttttgatgcttggctttaacgatgatatcacgagccctcttagtgctcagatcttcgatttctgcgatccacaactctttcaagaaacctttaatcaatcctctgaagtcacctctacttcaaacattcttgagaaatcaggaagcttccattccaacactaacaccaccacaacaactgagaacagta

SEQ ID NO: 103766 - DNA, 202 bp, Arabidopsis thaliana columbia
agcacacgcgtccgcccacgcgtccggtggacgatgaagacttgacagaataacaaattaaggatgaaatcaggaaaatcagagaggcatatgctgatgacgaagaatttccagatgaagtagagactcccattgatgttcctgcaagaagacgttttgcaaagtagaggggtcttaaatccttcagaacctcctcgtggga

SEQ ID NO: 103767 - DNA, 285 bp, Arabidopsis thaliana columbia
gacttaccatgatggggaacactacaacagtgtgcgttccaaggaagatgcttgtggaggaccagccaggcctgttgtaatagaggctgatgctaaagtttcagcagcatctaaacaagcgaaagctacagagagcaagtccaaaaataaagctgataagtgtcatgtgaatgctggagctagcaaagttgtcatgtctggtagttgttgtgacaatactgagaaagctgaacaggttctattacaagttaatggtgatgtggatgctgcgatagaattcctgat

SEQ ID NO: 103768 - DNA, 244 bp, Arabidopsis thaliana columbia
aagatcctatgtctatccgtaaatggactaatctttagacacacagagaatataatgagtttgaaaataaagtttctgcttctgcttgtcttgtatcatcatgttgattctgcctctatcgtcaagtttcttcctggttttgaagggcctcttcctttcgaacttgaaaccgggtacattggtattggtgaagacgagaatgtgcaatttttctactagttcatcaaatctgaaaacaatccaa

SEQ ID NO: 103769 - DNA, 314 bp, Arabidopsis thaliana columbia
tgtctccattgccttatagttcttggcctctgatactattgttagtattgtggtgcatggtagctagattatcaaacggagcttccaacaatgtaaaggttggaatcatttcaaaggtggaagatgctacgaatttccatatctattatggacagacctttaaagtcatcaaaaacgccattgatggcaagagctatctccttagtcagaacacttctagaatggcggttcggacaaagtattgtacttccaggataaagtcttatgtgattccacttctaaattacgcattagacactcaatcttctcaagga

SEQ ID NO: 103770 - DNA, 149 bp, Arabidopsis thaliana columbia
cccacgcgtcaggagatttaatacaaacgaaagagaaactagaaagatatggcaggactcatcaacaggatcggcgacgcactccacattggaggaggcaacaaggaatgtgagcacaagaaggaagaggaatacaagaaacacgttga

SEQ ID NO: 103771 - DNA, 232 bp, Arabidopsis thaliana columbia
agacaacagagagagatgttttgtagcttatccatttccagatttgtctcgaggaagacaataacatcatcatctcttctctctcgcagtttcagattccttctctccgttgattctcctcctcacatccctcttctacgcgcttcttccaacaccctaatcccttcgtcttccttctcccgccgtatttgggactcctgcagcggtggcagcggatgtggcggcggatatg

SEQ ID NO: 103772 - DNA, 402 bp, Arabidopsis thaliana columbia
cggacgcgtgggcggacgcgtgggtttcgattagctcaagcctcaaggtgaagcttgaagcccatcaatggcggatgggtagcttctggtctccttgaagatgaatcggatttcagctatttctactcttgtcactcctctccctcttcttccgtcgtgctcctttgttccgacacgacggtgttatcctcgcagagctactccttattccaggcgaatcaatctcaagcctctcacttctcgcattgttctcctcacgcgccgtcgtcagcttggtcagatcgtggaggaggtagaagccgctaagaaacggtatgggaggctcaacacaattgtgatgaactcagttctcgaagcttgcgttcactgtggaaatattgatttggctcttcggatgttcca

SEQ ID NO: 103773 - DNA, 361 bp, Arabidopsis thaliana columbia
aaacgattgagagtaggattgaagctactttcctttaatcatttctaattttgcaaactaatttcttcactttcatctttgatctctctggaaaaataactaatttgagttgttggaattaacttgttgaatttttctctgcaaattgtttggaataaggtaacgtttcctctatgtccacaattttgtgtgttattccaataattgattgtttttctctctttctcaattgttcatcgttgatatcgagaatgcatgaagatctataggaaatagttttacattcgcgtagattcggattgcaattgtgtaaattcggattgcgatttttgcttcatgcattaactcttgatcgatagtt

SEQ ID NO: 103774 - DNA, 349 bp, Arabidopsis thaliana columbia
gtatgctgctttgctcgttgtttctcttgtatgttacttggcaacattcgtcttctctgggtttctcttccactggtttactccatctggacatgattgtggactcaacaccttcttcattatcatgactttgatatttgtattcgtctttgccattgtagttttgcatcctactgtaagttttgactgaaaccttatatttctcttatctgagatcttatttgattcccaatttcaggctcactgaagtcaaattaacctattcttttgcaggtcggtggaagcattttaccagcatcggttatatctctgtactgcatgtacctctgttacagtggacttgcaagtg

SEQ ID NO: 103775 - DNA, 191 bp, Arabidopsis thaliana columbia
aggggaggagggtctccatacagaagaaaagaactcagtgaaatcacaccaactaagcttacgaaaacgtcacaagcacaggaagcacaattcaagcaccctgatagttccatgtttgagaatggggtgagagatagatggcataaaaagggagctgctgatagagatggtgccttgttgatggatatgga

SEQ ID NO: 103776 - DNA, 389 bp, Arabidopsis thaliana columbia
cagatacaaagactgtagttgatttgataaagacacattttgaggataaaagatcaagtagcgagcctccacagataccagtgtttcctgttccttctcatgaagagacgcggttttcttgctttgttgagtcagaggcagctgggtctgcagtaatgatcagctataagatgcctgtaagtgatctgaagacagtgaaagattatagggatatgcttgcagaatcaatgtttctacatgctctaaaccagagactcttcaaaatatctcgtaggaaggaccctccattttttgcgtgttctgttgctgctgatgtcctggtgagccctttgaaggcctatataatgagttcgtcttgtaaagagaaaggaactcttgcatccctagag

SEQ ID NO: 103777 - DNA, 381 bp, Arabidopsis thaliana columbia
gaaagagcaatattgtagcgcctcagaaacatcctctaacaaatttgtgcaatgagttggctgatgagcagagtgtagagcacagcagagtaacctctggagggattatagcacctaaaaaaacctgcattgctctttcaaatgaatcctcaacagaaagaccaaaggataatgtagaagcaagtgaaagtgaacctttagcacctgatagtggagctgtaacggtgtcagagaaattatcagccgatgagccaactgaaaaaaacaatgaaggccttaaagatgttaaatttctctgggatttaaatattccttgtgatgtagaagatgaagcgtctcgaagagatgaagagggagaaatcacagagtctattgccccta

SEQ ID NO: 103778 - DNA, 378 bp, Arabidopsis thaliana columbia
cgccgacggagacacaaaatcgattgaaaatttcgacgccacaaaatcgattggaagtcttagctaggaatcgagaatgctatagctaaaagttgattgatcttcatattcgaaatttacacagcaggagcttccagcttgcaaaccaattcttacgcctggttgggtgatttcaactcttgttttgtggcccttgtcacggcttcgaatctacacaatgatgcctggtgcttaaactttttattgcatactctggtttaatcactcactataccaatatatatgctaataattgtggttctaatcactaatcaatgaaatgctgtttctaaagttgcgtacttggtttagatcctattgtggttcagtttgggagag

SEQ ID NO: 103779 - DNA, 383 bp, Arabidopsis thaliana columbia
gtgaagaattgaaggaacttgaaatgcatctcagcttccataggaagcaaacgagaactgtttactgctgagatgcatttgaagaacacaatcaaacaagctacagtgagcttcttggacagtgaagaattgaaggaacttgaaagttgccttgaggaggtaagaaatgtcatgcagaaaagtgaagaagagtatagagatacaaaaacatgaaagaagaaaagacttgtcactatcatcatagattagcatttggtttctgggtgttgtaaaattaaatcatttctgttgtttggtttatgggtgttgtaaaattaatcatttttgttgtttgggttaaagacattgttgagatgataacttaatgtttctttttttgcgat

SEQ ID NO: 103780 - DNA, 246 bp, Arabidopsis thaliana columbia
accacacgtccgcggacgcgtgggctgtgaggtatgagtgtgggactgaaagttagcgcgttcttacatccaacgcttgcgttatcctcgagagatgtctctctctcttcctcatcatcttctctctatcgtggtcgggaaattctccgaccaggctccgggagacggtggtgtaaatcccgaagaaccgaaccaatattggctgttgtagagtcaagtcgagtaccggaacttgattcttcttca

SEQ ID NO: 103781 - DNA, 380 bp, Arabidopsis thaliana columbia
cccacgcgtccgcccacgcgtccgcccacgcgtccgcggacgcgtgggtttgattcgtccaccagatggccgggaacgattgggtaaacagttacttagaggcgattctcgacgtcggtcagggtcttgacgatgctcgctcttctccatcacttcttcttagggagagaggtcgattcactcccagccgttactttgttgaggaagttatcactggttacgatgagactgatcttcatagatcctgggttaaggctgttgctacgaggagtccacaagagaggaacacgaggttagagaatatgtgttggaggatctggaatcttgctcgtcaaaagaagcagcatgaggaaaaagaagcacagaggctggctaagcgc

SEQ ID NO: 103782 - DNA, 305 bp, Arabidopsis thaliana columbia
atttaacactgatgtgcaaaattatggaaacatcgagtacatgagatgcactccagagaatggcttctttcccgacttgtccaccgttggcaggacagatataattttcttctgttccccaaataaccctacgggtgctgctgccacgagagagcaactaacgcagttagttgagtttgcaaagaagaacggttctataatagtgtatgattccgcctatgcaatgtacatgtctgatgataacccacgatccatcttcgaaatccctggagcaaaggaggtcgctatggagacagcttcgttca

SEQ ID NO: 103783 - DNA, 170 bp, Arabidopsis thaliana columbia
atcagagctatttttatggctatttcagcaacaaggcctcgtgcagatgtggcttattgtatccatgctcttgctatgcggttatcaagaacacataactgggcggttgcactgaaaactcttattgttattcaccgtgccttgagagaagtggaccagacatttcatga

SEQ ID NO: 103784 - DNA, 393 bp, Arabidopsis thaliana columbia
gtgacacaagcagcagtatcatcgtcgtcatcactcactagcaaagctcgagcttcttccttcttcttcaatggtcgctctcttccttctctgaacccgatctctccgtttctgttcctccccacaagtagatccttcgctctcgtcgtcaagagcactctcggaaggaatggagacaaatctttacttaggatgactttaagtggggatagctcggaaactgtagagatgacttcaactgatatgattttcgagccgattttggagcatggagttttccggtttgattgttctgttgaccataggaaggctgcttttcctagtgtttcatttaagaacagcaaagaccgggaagttcctattgtgagtcacattgttccagcatatattcct

SEQ ID NO: 103785 - DNA, 376 bp, Arabidopsis thaliana columbia
aagacacgtgggctgctgaatcagagaccagtgtaaactttctcatcaacagtaacaaaccgcagaggtcattgaactccaatctccgtcatcaaagccggaatccctctatagaatctgataaagcggttggagttgttgacaaactagagttatctagaaacatcgaagacaaggcaaagattctggagagacttttgtctgattcaaggagactgtcaagtctccggattagcctaacagatctgaaaagaaagctggagatgaatgagaaacaaagaagattcagcaacgctgatttggttatagtgaagagacagttgaaagaaatggaagaagctgtctcgcagctggaaaacacaaacgagattctttc

SEQ ID NO: 103786 - DNA, 373 bp, Arabidopsis thaliana columbia
tcggttgacatctacaacgcacctagtggctcgttaagggttatgaccgcaaacaatgactgtactgtccggctatttgatgccacaaactttgccttgctcaacagatttgcctttcactggtctgtaaataacatctccaccagtccagatggtaagctagtggctgttctaggagacagtcctgagtgcttactagcagataccggatctggaaaagtgatccacggactcgaaggccatctcgactactcgttttcatcagcatggcacccaaacggtcaaatcttagccacgggtaaccaagacacaacctgtagactatgggacgtaaggaacctgtctcaatcactcaaagtcttgaaaggaaaca

SEQ ID NO: 103787 - DNA, 379 bp, Arabidopsis thaliana columbia
ggtggtttcaatgaggttgccacagctgaagggctcgccgaagcattgatgatgttttctcctccttcaggccaagctcaaccaagtaacgatctgaaaagacactgtatcctaatcacagccagcaatcctcacatattgccaacacctgtatatcgtccacgattgcaaaatgtggaacggaatgagaatggtgatgcgcaagctgagagtcgattatcagatgctgagacagtggcttcatattttgctaagtgttctgtttctttgtctgttgtatgtccaaagcagcttccaacaattagagcactatacaatgcgggaaagcccaatcaacaaagtgcggacttgtcaattgacacggctaagaacacattct

SEQ ID NO: 103788 - DNA, 367 bp, Arabidopsis thaliana columbia
accacgcgtccgcccacgcgtccgaaaaaatctagtgttcggctccaacaagctccaagaacaaggggggccccgttaataacacggcttaacaagccttctctgagtccgagctgtagcatcaagctttattctgggttaaagcctcaatctgcaagctttttggcaagtgggtatcagaatttgaacaaggagttctatggaagagtttataagagtctgcaatctgggactgggaaagcgagcaggtcacgggtaaagatgatgccaataggaacaccgagagtaccctacagaaaccgagaagaagggacttggcaatgggttgatatatggaatgccctttatcgagagcgtgtaatcttca

SEQ ID NO: 103789 - DNA, 155 bp, Arabidopsis thaliana columbia
acattttaagttccaaaagaagtcgggaattcccctggttcaattagaactgtcgaatggcttcataatgataatacaatcttaagctcttgcacagataccggtgacattaggttatgggacataagaagtgacaagattgttcatacattaga

SEQ ID NO: 103790 - DNA, 180 bp, Arabidopsis thaliana columbia
ccgatgatggacgtgttgttggcagcttatggagatgaaaacgcagagcataagatcagcaggaaccacatcaaagcatttttcgtggagcttttctttgcgggtactgatacctcggcgcaatcaatacagtggacaatgggagagatcattaacaaccccaacattcttaaaagattg

SEQ ID NO: 103791 - DNA, 284 bp, Arabidopsis thaliana columbia
ggtatccagaatttgaaaatgagacggctacaacgagatgatataaaggtatgtaactgaactgccacgagactaatttgttgtaattgattatccctggcggtatcttttcattttaatggctatcaataatcaaccatgggatatcaatctgctaccacaggttagaactgatggcacatgctataaaggacattatggggcttttatattaatatgtgtcttaaaaatttgattcatcctttggtgcctaatgtttttgcaagctaagcactgggattcct

SEQ ID NO: 103792 - DNA, 317 bp, Arabidopsis thaliana columbia
gcgtccgatttaacgttgtagttagtattaacaacgttgccgcggaatcttcaacctgtttgagtatttacaaatatggtggagctccggcagttttccgatctcccaattgccctctctggaatctccagaatcgccgatccttctcctcccccgccagtcgttgccatacggcggcgattcaagggcggcggaaataccaggaggatcgtcttctctgtgcccttgatcttcgcattccctttcccggtatgcatcgttgccttgggatcgccaaagagaatcaactgttttttttttagtccccaagataagat

SEQ ID NO: 103793 - DNA, 239 bp, Arabidopsis thaliana columbia
gcgtccgaactaattgtttatgatgatttggtaatcataaaaacttgcggtgctaccaaaatcttcgagtgcatcaatgggattgttgctgcggtgggttggaataagctaagatccatcaaatatacccgtgggtcgtttttccgagccgatttgcagacatacccgcatcagcgaccttgtgacgataacagatgtgttaggctcgtccctaaatcagagttctcttggaggaattc

SEQ ID NO: 103794 - DNA, 254 bp, Arabidopsis thaliana columbia
cagacttctctgatttcgaaataatttgtcgatatttcaatttcctcgtcgtctaggttttggaggaatctcgttctgggatttgtctacgtacttgtgtttgatcctattttttatcctggcttgtgtgagttcacacgtgcgacatcggctgttcagcgactttattgcaccgttctacttcgttttcaagattcgatcatcgtgatctttagtaacgtttttggggaagattttttttgctgggttttgct

SEQ ID NO: 103795 - DNA, 421 bp, Arabidopsis thaliana columbia
accacgcgtccgcccacgcgtccgcccacgcgtccgcccacgcgtccgcttcatcagttccagtcaccaggcaaatgaggtattaccagctgaaggagataatgagatgatgatggtgccattgggggaggagaagtttatggtaatgaatgaaacaagaaggaaacttggaagttttcagatatgttcagtttgtacttgttgtggtggtgctaaaggtctttgcttgccttctccttgttgctatgctattaactgcaatatccctaatagaccctttggttactgttctttcactcccaaaacttgcaattgctttggttgccatatctgagatcttctacttcattgtaatttgggagagaaacaagtgaatctaaatcttgattcatcttcaagtgtgaaagggaggaaaaaaaga

SEQ ID NO: 103796 - DNA, 354 bp, Arabidopsis thaliana columbia
gggtgcttatgattcttagacgagaagcacatgaggcagtgttctacaagcagagagaagacctacaggaatgggagaagaagttaacactggaagaagataggttgtctgaagttaaaagaagcattaaccatagagaagaaagagttatggaaaatgaaagaaccatcgagaagaaagagaagatccttgaaaatttacagcagaagatttctgttgccaagtccgaattaacagagaaagaagaatctataaagattaagctaaatgacatttctttgaaggaaaaagtgagttatctaggtgcaactttttttgcttccggtaccttctggcttagatattaattttgtg

SEQ ID NO: 103797 - DNA, 342 bp, Arabidopsis thaliana columbia
ggtccagcacgcgtccggaccaaattgcccctgttatacatgagtggacatatgatgctatgtgccatgatttactgaacatggaaggaaacaaatatgtacatgtgattccaagcaaatcaggcggacaaccagagaagaaagatgtgctcttagaggaacatgatcctatttggctagagcttcgacatgcacatatagcagatgctagtgaaagattgcatgacaagatgaccaatttcttatcgaaaaacaaagctgctcagcttcagggtaagagagatggagctgagctttctacaagagatttgcagaagatggttcaagcattgccacagtaca

SEQ ID NO: 103798 - DNA, 128 bp, Arabidopsis thaliana columbia
ttcttaggtcgaactcggtacccccaacacttgctcaccacttcatgactcgctcttctctcccttctttttcaactaaaggtgttaagttgcagcagaacgatgttcaaagaactgctgctgctttg

SEQ ID NO: 103799 - DNA, 212 bp, Arabidopsis thaliana columbia
atcacaaagccacaatcatttctctcttctctatctctctggttttgaatcggcgacgactgagtcaactcggtgttgttactggtttcgtcgtatgtgttgtaactgattaagttgatggatccgagtgggatgatgaacgaaggaggaccgtttaatctagcggagatctggcagtttccgttgaacggagtttcaaccgccggagattc

SEQ ID NO: 103800 - DNA, 221 bp, Arabidopsis thaliana columbia
tcctcagttctctacatcaaatctatgataaacaatgacagacatttccagtctctttagaaaccgaattctcaaggaccaacctgactatggtttaactgtgagagttatatcaactctttgttggtgtcgttggctctacgccaaatgcaaacggcggtctccatcgttgccgcctggaccttggtgccttcccattatcggaaaccttccattcctcc

SEQ ID NO: 103801 - DNA, 288 bp, Arabidopsis thaliana columbia
tgggctcttatcaatgagattgggagggacaattcgatcgactgtttgatccgttgctcgaggtctgattatgtttctattgcttccttgaaccggaatttccgttctttggtaaagagtggagagatttatagattaaggcgacaaaacgggtttgttgaacattgggtttacttctcttggcagctcttggaatgggttgcgtttgatcctgttgagagaaggtggatgcagttgccaactatgccttccagtgttaccttcatgtgtgcagataaggagtctctg

SEQ ID NO: 103802 - DNA, 384 bp, Arabidopsis thaliana columbia
accacgcgtccgctagatcgcgagcggccgcccttttttttttttttttatgaaacatatgttgtgtattgtactattcatattcatttatcacattacaatcatcaaccaaaccaaaaacacaaacataacaacaagggacaagaagaacaaacattgatccatacctaaagtttcataattcgaacatcaaaaacatattttttaattatcataagtacgactctcatctctcagatcaaacaactcatcatcatcatcatccttaacgtctgaccctaacaccgtcgactataactcctccatcctttctgtttttccagctgaagcatgcgaagtaatcagtggatacgcttgttctgctgatatttaccctgaagtcaa

SEQ ID NO: 103803 - DNA, 423 bp, Arabidopsis thaliana columbia
attttagttgccgagttatgacgaagacgtcaaagaaatggaaggccaatccaaggaagagtatattggatcattgagaaggtaaaaattaactaattaagcaatcaattataccaaattgattaatcatagttttataattaacttacaatatatcggtgtagaaaaagtagtggattttctcgcggtgtatcaaaatacagaggcgttgcaaggtagatagaatttcaatatgatacgtagaactactctaatatacataagttgttgaatcatgatgaatttgcaggcatcaccataatgggagatgggaagctagaattggaagggtgtttggtaataaatatctatatcttggaacatacggtatttcattccattatccttactttatagtaatatttttatgaaatgtgtaaattc

SEQ ID NO: 103804 - DNA, 345 bp, Arabidopsis thaliana columbia
  unsure (1)..(345): unsure at all n locations
tgcaagtcattcatctctatgcacanatggcgaaagagaacagtagtcatagccttgcaagaagcaanagagaaaagagactcacttggattccttgtgtaagtggactttgcatattgtcttatgttcttggatcttggcaaaccaacactgtcccaacttcttcctctgaggcttactcaagaatgggatgtgatgaaacatcaacaaccactcgggctcagactactcagactcaaacaaatccttcttctgacgatacttcttcctctttgtcttcctcagaaccagttgagttagatttcgaaagccatcacaaactcgagctgaagattacgaatcaaa

SEQ ID NO: 103805 - DNA, 263 bp, Arabidopsis thaliana columbia
cccacgcgtccgcccacgcgtccgcggacgcgtgggtggcaataaaattgttattgatacaaacaatacaagagcttatttaattcattaaatcgaaaagatttattgatcagattctcaagtgttgcaagcgttccttgttacctttttcgcttttgcagttctttcttacttgccttgcttttctctcgttcatgtattacttgatgcaagtcttgaaactttcccgatattggaccaaactctttttcattcatgccttt

SEQ ID NO: 103806 - DNA, 301 bp, Arabidopsis thaliana columbia
agagcgtcttcataaacgcccttcgtcttcttccctgcaaatctattttctagatctttctttcttccgcgaaacgacaatgagagagtgcatttcgatccacattggtcaggctggtattcaagtcggaaatgcttgctgggagctttactgtcttgaacatggcattcagcctgatggccagatgcctggtgacaagactgttggtggaggtgatgatgctttcaacaccttcttcagtgaaaccggtgcaggtaagcacgtcccacgtgctgtctttgttgatcttgagccaactgtg

SEQ ID NO: 103807 - DNA, 317 bp, Arabidopsis thaliana columbia
cccacgcgtccggacgaagaagtttctgaatcaatggctcaagcagcgagattaagcctgagaatgcagaaagagctaaagcttctcctctccgatccacctcacggcgcttcgtttccacatctctcttccgccgccaatggctccggcgatttctccactttctccaccatcgatgctcaaatcgaaggtcctgaagatactgtatatgctaatggaatcttcaatttgaagattcaaatccctgagagatatccatttcagccaccaattgtgtcgttcgctacaccgatttatcacccaaacatcgataacag

SEQ ID NO: 103808 - DNA, 284 bp, Arabidopsis thaliana columbia
gcgtccgaataagatcgccattaaaacccttttttctctctctgtcggggactctgcaaatcgtatggaaaaaaaagttatgagctacgaaagcttcattttcatttctcttcatatagcgtaaagtctgagtctttcttcccgatgttatgacttaatcggtgtttatgaagctgtagttatggagctgaagtgggtttcttgtcggaaacaatctctgttcttgatctcttgtctggctctgctttgtctcgcgtccttggatactatatcatgtgaatcaa

SEQ ID NO: 103809 - DNA, 273 bp, Arabidopsis thaliana columbia
ataatctgaaactgtaacatcaaaatttacgtttctccgtcagcgtcacgctgaagcttcgatactccataaaccccaggacgcgtatttctgaaaaatctccactcgctctcttctgaatcttcaatcacttggggttgtgtcactgaatctgcatcaatggcgattccatattcctcactcttttctgcttttgactttagctctagcttcttcttcacgaaatgccgttgttgtaaaaaagtgatttcaccacaagtcaatgtagctcct

SEQ ID NO: 103810 - DNA, 323 bp, Arabidopsis thaliana columbia
aaagaggaccaaatcaaacgattctcagtgaaatagaacatatgcctgaagctccacgtcaacgtatctctcatcaccgtcgagctcgctctgaaaccttcttctccggcgaatcaatcgacgatctcctcttattcgatccttccgatatcgatttctcttctctagacttcctcaacgctccaccaccaccagaacaatcacaacaacaaccgcaagcttctcccatgtccgttgattcggaagaaacctcgacgtggatatggtggtggtggtggtggtggtggacgtagaggatctagccatggaagtctcttggttcg

SEQ ID NO: 103811 - DNA, 309 bp, Arabidopsis thaliana columbia
gagcctctgaagtgggaattaaaacagaagccgggcttgagtcctcctcgtggtggttttgatcctgatgatccaaatcaacaaatcgtcgctgaagatatatttgacgaatatggagggttccttgagggcagcatcccaatagaaatactgaagagtatgtcgtcggataagaaaagaagatccaaaaagaacaataggtacaagaagcattcatctcggactgttgaggaaactgatgaatcttcaacaggctcagaagatattacagagaagaggggatcaaagaagcgcaagaaacttaagaag

SEQ ID NO: 103812 - DNA, 298 bp, Arabidopsis thaliana columbia
acaataaaagcttttttcgcgttttccaccgcaaccagcgtcaccttcaaccgccggagccgccgcaaggaaggctcatcatccgccgtggcgtaaggctttttcttcttctctttctcccttttctacgatttcgcggtcggtcgcttcctcgtaatctcgtgtgtttattccgggaaaatctcgatgggaaacaagttaaaatttgagattgagaatcaagcaactaatttcttcgcaagctgataaatccatgagctgattagcaagtttatataacgacattcatcgttgttgt

SEQ ID NO: 103813 - DNA, 396 bp, Arabidopsis thaliana columbia
acatcatcgacaagtgggtcccggagtgagcaatcaagtgatcagactggaaattcatcaggatgggacattctcaggtcaatttctaaggcaactagttatcatgtttcaactcctaattttgagagaatctggtgggacaaaggtggtgatcttcgaagacctgtctcaatatggaggcctgttccacgtcctggttttgcaatattgggtgatagcataactgaaggattggagccacctgcactgggaatactcttcaaagcagatgactctgagattgctgcaaaacctgtacagttcaataaagtcgcacatattgtggggaaaggtttcgatgaagttttctgctggtttcctgttgcacctcctggttatgtttccctaggatgtgtt

SEQ ID NO: 103814 - DNA, 329 bp, Arabidopsis thaliana columbia
aggagttcttccgttcctgggatcaggttagctggtgttaccaatacggtgcattcttatgatattctcactaggaagtggacaaggcttaaaccggctggtgagcctccgtctcctagggctgctcacgccgcagctgcagttggcaccatggtcgtttttcagggtggcattggaccggcggggcattctactgatgatctttacgttcttgacatgactaatgataagttcaagtggcacagggtggtggttcaaggggatggtcgaggccctcgctatggccatgttatggatttagtttctcagaggtatcttgttacagtcac

SEQ ID NO: 103815 - DNA, 218 bp, Arabidopsis thaliana columbia
cccacgcgaccgaaccagttgagcgcaaacaagtagagaagccaattgagcgcaaaagaccaacaaagcttcatgttgatttacctgataaagaaacatgttcagataagcatagagttgcaagaactgtaatatttggtgggcttgctaatgctgagatggcagaggtagtccatagtcgagtcaaagagattggcactgtgtgctctgtcagatat

SEQ ID NO: 103816 - DNA, 327 bp, Arabidopsis thaliana columbia
gactaagtgaacacagctgcaaagatcaactatttacatggaggaaacctaacgacaagggagaatttgaggaggttgagatcacagtgctcaattactataaagagcgtaacattgaagtgcgttattcaggtgacttcccttgcatcaatgttggtaagccgaagcgtcccacttacttccccattgagttctgtaatcttgtgtctctacagcgatacacagaatcgcttaccaattttcagagggctgccctaattgaaaagtctaggcagaagccacctgaaaggatggcctcgctaaccaaaggtctgaaggacagcaatt

SEQ ID NO: 103817 - DNA, 188 bp, Arabidopsis thaliana columbia
aattttctctctctgtattttctgagatttgagagagtctcctctctcgtctctctcgatatcgctcctcatgatccgattttttatataatttataaaaaatttatgtgataattacaggatacacgttagttgtgtgtatattgatagagacaataaccattggaatctgaccatggatctctttt

SEQ ID NO: 103818 - DNA, 302 bp, Arabidopsis thaliana columbia
cgaagcccaagccctaaaggccgatatggaggtcgtagcagggacctcccgaccagtcttttggttcgcaatctacgccatgattgcaggcaacaagatctcatgaagtcctttggacaatttggtcctgtcaaggacatttacctgccaagggattattataccgggtgagcatgttttgtaaataggacaaccaacacttgatttttacctatgttctgattagaacatatccctattttcacatcttctttcttgatttgtttactacgtttatctgcctttcctttttctttcggtca

SEQ ID NO: 103819 - DNA, 243 bp, Arabidopsis thaliana columbia
aagaaagtcatcgtcactcccagaaagaaagaaactcaaaggttacaatggcgaagctaaggcctagacagttggaactgagcaagactgttccttccaagttgggttttgatggagaagaagacgcttgggtctttgttaaaaagcagaaaatcttcaatgtcttgccttctcttccacatcctcaacaacagcatttcactttggagaaacctgcaatatctcctcaattagaagctgggt

SEQ ID NO: 103820 - DNA, 366 bp, Arabidopsis thaliana columbia
ggtagatgcgtcgatcactatgtgcagtaataagttaattgattggaaaattaagtacgagaatactgttagtgagcaaaaagctgttacagagaagatagcggcaatggaggacaagttaaagcaagcttcaaccacaggagatggcttgagagctgagttctcccgtgttttggatgaaacggagaagataatcacagagaaagctgcaaagcttgcgactttggagcagcaattggcctctacgcgtgcggaattaaataaaagtgcgttgaaggtggaccaatgttcgtcagaagcagaagacgtgaggcttcaaatgtcgctcctgaatgagaaatatgaatctgtgaaatccgcatctga

SEQ ID NO: 103821 - DNA, 367 bp, Arabidopsis thaliana columbia
aaacgttttactttgtgctgcactactcaacctcaatggccgcctcaacaatggctctctcctcccctgccttcgccggtaaggccgtcaagctttcccccgcggcatctgaagtccttggaagcggccgtgtgacaatgaggaagactgttgccaagccaaagggcccatcaggcagcccatggtacggatctgaccgtgtcaagtacttgggtccattctctggcgaatcaccgagctaccttaccggagagttccccggagactacggatgggacaccgccggactttcagctgaccccgagacattcgcaaggaacctagcaccaatctcttcgtctccgggcttagtaagcgcaccacttct

SEQ ID NO: 103822 - DNA, 281 bp, Arabidopsis thaliana columbia
gtatggttagttgtaatagtatgggtaacggtggggtggagttcatgcacagggaggttcgttgtggagaagaacaacctccgagtgacttcgccggagtccatcagaggagtctatgaatgtgccctcggaaattttggcgtccctcaatacggcggaagcatgtccggtgcggtggtttatcctaaaactaatcaggaagcttgcaagaactttgacgattttgagatttctttcagatccatagtcactggattgcccacattcgttcttgtggatcg

SEQ ID NO: 103823 - DNA, 341 bp, Arabidopsis thaliana columbia
gcgtgggcggacgcttgggcggacgcatgcgtaaattttgagagatctcttttgcatagcttgactcatcattgctctttccggtgagaattgtgatctaaacgttcaggctttctcgctggaggaccgtcggggtgattgtaccattgttggtctgggctgcctgctcaatataatcgagggcccttagaatggggtcgtgtttaacggcagagagcaggagccctataccgggctctccttgctctcctgctttgaatgtgaggaagatgaagaactctaagaagcgacctggttctaagaactcttcctttgattaccggatagaagaaccgttgaat

SEQ ID NO: 103824 - DNA, 368 bp, Arabidopsis thaliana columbia
attttaaatatcaaattcattagtcgatatgtagcaggtggtccctctaaacgctcaagttatattaaaccttctggattcatatttacttttaaatatttgtgactttttttccttcggtattaatttagcgcaatgtgaaagcaaaatttaagagttaaaatacattaaagtttggataataaatggagcatgagaattgcagataccactcgctgcaccacacgcagttccggaccaactactccctcttcatgcccttgtatgactacatctacggcacaatggatgaaagcacggatacgttgtacgagaaaactctagaaagaggagatgatatagtggacgtggtgcacgtaactcacctg

SEQ ID NO: 103825 - DNA, 312 bp, Arabidopsis thaliana columbia
tacaaagaaacagagatgggtttggttacagaggaggtgagagctaaggcagagatgtacaccggagatgagatatgtagagagaagacaaagtgtttcctcaaggaaatatctatgcccaatggtttattaccattgaaggatatataacaggttgggtatgacagagagtcacgtgttgtatggctgaagcagaagaagagcatcactcacaagttcacagagatagataagcttgtctcctatggaaccgaagtcacagcttttatagtcccagaaaaacctgccaatgatgaacctgccaaagaggaa

SEQ ID NO: 103826 - DNA, 362 bp, Arabidopsis thaliana columbia
gtccgaccacgcgatccgaacaatggatgcttcggtggtgagattttcccaatcgccggcaagagtgccaccggaatttgaaccagatatggagaagattaaacggaggctgctcaagtacggtgttgatccaacccccaaaatcctgaacaatctccgaaagaaagaaattcaaaaacacaaccgtagaaccaagcgcgaaaccgagtccgatgcggaggtgtatacggaggcgcacaaacaatcaatggaggaagaagctcgttttcaaacccttagacgggaatacaagcaattcacgacgtcaatttctggaaaaaggggcagcgatgttggtttgatggttgggaatccatgggaag

SEQ ID NO: 103827 - DNA, 233 bp, Arabidopsis thaliana columbia
gctcctctttgtggaacgaatgaattttggattcaacgttctttgggttctctacgcacaaatccgccatggaaacagatcaacatcaagaaatttgcaacgatggtggtttgttgtgtgaatcgaaggaagtttctgtcagcaagcacaagtccgacgctgtggaagaaagtgaggatactattacaagtggaaaccaagaagtttctcctgccaatggaccaacacttcca

SEQ ID NO: 103828 - DNA, 393 bp, Arabidopsis thaliana columbia
aggacgcgtgggctttgttgaaaaaacaggctaagaggtatcaagctctttcagggaagatcgatgatctatgtagaagaatgcagagtagtgatccgtgcgatgctacattaggacctgagttcaggacgcaaagacaaaacgagtttctgctcgagtgtttcagacttcagcaacgggcatcggagacagggcagaagctagtttcattgcagacggaaatcaccaggagtaatcaaggagatcagttaagccaagccaagatgaacacagggaggtcattggatttgatcaagaacaacttgaaagaagttcagagaaacttggagatttggctggctagaattattggagatcttgaacgtatacttgctagagacggcgcttcacgtg

SEQ ID NO: 103829 - DNA, 354 bp, Arabidopsis thaliana columbia
accacgcgtccgcggacgcgtgggcgaatctaataacgctgacagattccggagagacttccggaacatcaactgggtccgcgtaccattggtttactgggattactctgccatgaacgtcttgactttggagtatgtaccatgtgttaagatcaacaacttggacaccttagctgcacggggttttaaccgttctacaatctcatcacgggccattgaagcttatcgtacacagagactctaaaccggcgtctttcatgcggatacgcacccaggaaaccttgcaattcatgtagatgaatcagtcatctactatgacttcggcatgatcggagagatcaggccatttactcg

SEQ ID NO: 103830 - DNA, 377 bp, Arabidopsis thaliana columbia
agatgattctgataacctcaccgacgttgacatatctccgtcaccgtctccacagttcccaaatcaaatcgccacaaattcgccgccattttcttcggagtagagaaatctccacagtcgatcgctgctacaatccatggcagtctacgaatcgtttcaaattacgaacacgagacagttccttcttatgctgtgctcgccggaaaccggagacggcgacggtagaggttgaagatgattctataaggagaattgttcggtatcgtctatggactagtgaagctgtgtatatactatggctctttcttctcccttacgctcctggagatccagtttgggcaattagttcagagacagtgaattctcgtttgggactt

SEQ ID NO: 103831 - DNA, 402 bp, Arabidopsis thaliana columbia
atccaagtagcagttgttcggaggctatctacatgtctcagccactcgtattattctccaatctataaaaattcaaattttcaatctccctttcttaagattaaaagtggcaaagttgagattttgatcgtcttcttcctctggaaatttcaatcgaaactatatcttcagagatgcagaatctgtgaaattgtagaaacgaatttcacatttttttttgaagaaatgacgacgcagatatttcagttgccgttaaagtactgtgcttcgagtttttcttccaccggccaacggaattacggtgcttcttcttcgccgtctccgattgtaatttgtaagagtaatggaatttccgatggtctttgggtgaagcggaggaagaacaatcggagatttggtagt

SEQ ID NO: 103832 - DNA, 153 bp, Arabidopsis thaliana columbia
aggagagacgagacagagagtttttattttcgttaccggaaaattttgatctccgatggcttcttctcctgaatctgctcctccaacaaactccacctcttctccatctccaccgtctaataccaattcaaccacctcttctccgccggctcc

SEQ ID NO: 103833 - DNA, 411 bp, Arabidopsis thaliana columbia
gcaaataaaagacagcgattgccatatagtcctgctgaattggctgccacagaggtgagggctatggagtgtattaggcagttacttctcagatctgcagaagcccttttcctactacaacttctttctcaacatcatgttgctagattagttcaggagcttgatgcaaatctaaagcaagctttagttcagttgacattccatcagctagtttgttctgaagagggtgaccaaattgcaacaaggctcatatctgccgtgatggagtattatactggctcagatggcaggggaacagttgacgatattagcccgcgactacgtgaaggttgcccaagttacttcaaggagtctgattacaaattctacttagctgttgaacgccttgagagagctgctttaacctcagat

SEQ ID NO: 103834 - DNA, 380 bp, Arabidopsis thaliana columbia
attcagcataactcaaacacaatggtactcgcaaccaactctgactccgacgagcatttgcattccacttttgcttctagatatgtccgtgctgttgttcccaggttcaagatgcctgaccattgcatgcccaaagatgctgcttatcaagtgatcaatgatgagttgatgcttgatggtaatcccaggcttaacctagcctcctttgtcaccacttggatggaacctgagtgtgacaaactcatcatggattctgtcaataagaactatgttgatatggatgaatatcctgtcaccactgagctccagaaccggtgtgtaaatatgatagcaaacttgttccatgctcccgttggagaagacgaggctgctattgggtg

SEQ ID NO: 103835 - DNA, 402 bp, Arabidopsis thaliana columbia
accacgcgtccgcaacaatggcaacggcttctcctccatttatctcaactctcagcttcactcactcttctttcaaaacttcttcttcttcttcattttctccgaagcttcttcgacccctcttaagcttttccgtcaaagcttccagaaagcaagtagagatagtgtttgatcctgatgagaggcttaataagataggtgatgatgttgacaaagaagctcctttgtccaggcttaagctcttctcaccttgcaagatcaatgttttcttgaggatcaccggaaagcgagaagatgggtttcatgatttagcctctttgtttcatgtgattagcttaggagacactattaaattctcattgtcaccatcaaagtctaaagatcgtttgtctactaacgttc

SEQ ID NO: 103836 - DNA, 225 bp, Arabidopsis thaliana columbia
gaccgactttggctgggacaaggcatcaaatctactctacgtggaccaaccggtaggcaccggcttcagttacacatcggaccacagcgatcttcgtcatgacgaggatggtgtcagtaatgacctttatgacttcttacaggcgtttttcatagagcatccacaatttgtgaagactgagttgtacattaccggtgaatcctacgctggacattacattccggc

SEQ ID NO: 103837 - DNA, 242 bp, Arabidopsis thaliana columbia
acgcgtaggcggacgcgtgggcggacgcgtgggttttttttttaaaaagatagtaaaaactacgaacatcattttacagtagactatagtctatatcgtcgaaatcggatatggtcaatttttagttcgtgtataatttgacctattttccctcgttttcaacaaaaacgacgtcgtacgaacgaaccctaaaatctcgagcagcagagccaaagctagatttgattccctctcttcgattt

SEQ ID NO: 103838 - DNA, 229 bp, Arabidopsis thaliana columbia
gtgagtttgggattactcctcgtgttaggactgtctctgccgatttcagtagaaatttccctaagtacaggaagcaattcagtgcattcttgaatacaccgcttggtggaagttttgctactattttcttcctttggtttgctctctctggatggctgttccgagttataataatcgccacttgggttcttccaattgctggccctcttctcattggtgcagtcgccaa

SEQ ID NO: 103839 - DNA, 377 bp, Arabidopsis thaliana columbia
accacgcgtccgtatttggttctccattgtcgctaatgtctctattgctgctatgaacttcagtctcatgctcaattccgttggcttctaccaaatctcgaagctgagcatgattcctgtggtatgtgtaatggaatggattctacatagcaagagatactcaagagaagtgaaaatatctgttgtggttgttgttgttggtgttggtatttgtactgtgactgatgttaaagttaatgccaaaggttttatctgtgcttgtgttgcgattttctcgtcatccttgcagcaaattttaataggttctctacagaagaaatattcaattgggtcctttgagttgttgagtaaaacagcgccgattcaagctttttcgc

SEQ ID NO: 103840 - DNA, 154 bp, Arabidopsis thaliana columbia
aatcggatcggggatttccctaaatcgtaaaattaggttttgttcttcatttctacacctaacttaattttatcattatcatattcattaacgtttgaatctaactttgattcgcttcactcctcgatttttgcaaatccgttaataaaggatc

SEQ ID NO: 103841 - DNA, 383 bp, Arabidopsis thaliana columbia
cctccgtcgccgtcgtgtcgggttttctccgtatcccgtcaattcaaaagtctcaaaacccttcctttctcttttctcgacccaagaaatctttggtgagacccatttcagcttcaagctcagagttgccggaaaatgttcggaatttctggaaatggctcagagaccaaggagtcgtatccgggaagtctgtggcagaacctgcggtggtaccggaaggtttgggacttgtagccaggcgtgatattggaagaaacgaggtcgtattggagattcccaagcgattgtggataaacccagagacagtgactgcttccaagattggacctttatgcggcggattaaagccgtgggtttcagtagctctgtttttgatcagagag

SEQ ID NO: 103842 - DNA, 279 bp, Arabidopsis thaliana columbia
cactaactctctctctctctctcttcttcacacacacagagacatcatcctcttcacacccttttcttttgcacaatcgcattcactatctcttctctctcttttgtgtcacatccttctcttctcttctaagttctaatcttgtactatcttgttctaccatggcttcttctgaaacaagaatgaacagggcaggataaaaagaagaagccatagcaaatggagtgaagttgagagcacttcaagcgagtcttatgcagatgaagtcaagcacatctt

SEQ ID NO: 103843 - DNA, 380 bp, Arabidopsis thaliana columbia
gagctggacaacgaaaatagcgacgatagctacaaactttgaaggtatgaaaacagtagatgaagctgacgtgggcatctcctgttttatctcccagctccctggcttccgtggaatcctcaaacaaagatacgcagactttattgttaatgaagtagatatggatggtaatgtggttcatttgacatccttggacttgcctcctgagatggctgtgaaggaggaggataaagcgaaaagttgtgataatgtaccccaaaattatacttctgcagttgagtctttcaaatctatttccagtgttactgatgcagagcgtttggaaatattgatcaatcaagtcacctcaggaactgatggtgaagtcttaccagttgttc

SEQ ID NO: 103844 - DNA, 341 bp, Arabidopsis thaliana columbia
cacgtacgtttaactctttatttaggttataggaagtagagggcatgtacaatctagtgatcgaacaaaccttctacgacacatgcacacacacacacacacaacgtatagctaaatctttatcattgctttcttatattaaggttttggcttttgtaagaaggtttcttacatatgagattcatatagtgtttgattcttaaggaactgttctgttgagtaataagaaagttgtgtattgaaatagagttgcatttgttaattttgtatagtgatgaatccctgtaatttgtgaaactcatttttatcatacatcatcaaactaagggtttataattata

SEQ ID NO: 103845 - DNA, 223 bp, Arabidopsis thaliana columbia
ggaccttcctcattcctcctcttagctttagccactttttaaccctagtttttcccgccgccaccatcccccatggcttccgaggcgaatcagcttcagcaagcgcaactcgcgatggttctcggctccgattccgcgcccttcgagacgctaatctctcacctcatgtcttcttccaacgagcaacgttcctccgccgagtctcttttcaatctcgctaaac

SEQ ID NO: 103846 - DNA, 340 bp, Arabidopsis thaliana columbia
cacacgcgtccgaatattatgatgattactatatatgcagctattggtacaactttgattcaaacatgtggagtgctgtgtacaaacgcacatatggtaaagactacaaattaaaagctggctatgattctgatgttcgccttggctgggcatctctctgggtaaatcatcaacctttagttttcttttctctcttctctcatcagcgtaatctttttactcgcttaagcccgaatccgagtcatacgagtaagatgctatagcatatagaacattcattcaccacacaattgtacctaatgatgcatctaccatctaataatatctaacggacaccatc

SEQ ID NO: 103847 - DNA, 237 bp, Arabidopsis thaliana columbia
cccacacgtccgcggccatgagacctgcgacggagcttgcggtgaggatcggccgagagctgctaaaagtttccggaagctctcgagctgctcggatatggagtccattgattgaacagagtcttcacggtctcggttttcgtcactcaataagcccttcgcttgtggctcgagtcatagacccgtttctgctgaatcatcagtctcttgctctcggtttcttcaattgggctgctc

SEQ ID NO: 103848 - DNA, 211 bp, Arabidopsis thaliana columbia
attttggagaagaacaaataacaaagataaatggtaacgtagaggagctgttgctgctgctgcatccacaatatcgaaacaccgaccacacccttcacttccatcactacctcgccatttcaatcccaatttcaatcacacaatcatcctaacagggtttagatatcaagttagggcgatacacggaataactactgatcctgtcattaca

SEQ ID NO: 103849 - DNA, 373 bp, Arabidopsis thaliana columbia
  unsure (1)..(373): unsure at all n locations
taactctaggaacagcttacttcttgggactgagacggacttataggctcgctctgaagatccagcgtcggcttgttactccgaaacatcccaaaatccgtcaatttcttcatcggaggactcgtaaaatcttcgatgtggcgatttcggttcacaagaacatacaagaaagagacatagaagttggtaggaatctcggaaattggattcttcgttggctcgataagatgaaaccagcagctcagatccgtactcggccagaactaccacacaacagcaattccaacatggacaaggcaaagagactaacggaattgtcncgtcncaaatcgcacacgaacacgacgcagactccacaaaaccgtgaatccga

SEQ ID NO: 103850 - DNA, 173 bp, Arabidopsis thaliana columbia
aagagaagatggatctgttgagcagtttaccagacgaggttcgttgtcttatattgtcctttcttaccacaaaggagtctgcttccacatctgttctgtctaagaagtggcgtaatctgtttgcacttgtccctaatcttgactttgatgactctgagtttcttcatccggaa

SEQ ID NO: 103851 - DNA, 208 bp, Arabidopsis thaliana columbia
accctggaaaagatatcacattgcaggtattactggagagagacatggagggaaggaccgaggtgggacctgtggacgcgccaagatatcctaagactaaagaagaaggttggtggctagtcgttggagaagccaagacgaagcagttgatggccatcaagagaatctccctgcaacggaaggcgcatgtgaagctggagtttgcagt

SEQ ID NO: 103852 - DNA, 226 bp, Arabidopsis thaliana columbia
aatttatgctaatgctataatgcatgctggaacgacagttgacacttttctcagggagaatttggattggctaagcacggccaccaattgggccaagtttagtgctacagcaggattacgtgttattcataggggtcacttgcaacagggcacgtcactgatggccccatacttgcctcagggcggagcaggtggtggcgggagtccttactccgaagggggtgct

SEQ ID NO: 103853 - DNA, 383 bp, Arabidopsis thaliana columbia
gagaaatacaactgccgatcaattctcatatatacatagacgtgctttaactctgatgggttgtactgtgagggagaagcatgttagaccaaaccggaagaccagatccgtgaaacccgaattcgatccgtgttgtttgctcgacaggacggctctatcgaaatcgattgttgaatcgagtcttaagcatcttgtttatcatccgggtcttctcgattcgtgtccagagtcaaaccctagtggcagttttgaggataataatggttggggttattgtacggaggagcaattagaggatattttgttgaaacatttggagtatttatacaatgaagcgatttcgaagcttgtgggttctggttatgatgaggatgtggcgttga

SEQ ID NO: 103854 - DNA, 349 bp, Arabidopsis thaliana columbia
cagacgcgtgggctcacagatcactctagggctcctgacagaaaaaccaaataccttttcctctttcgatttttgtggaatttcaaatctttctttcctcaatctttcagaatgatcttttcctgtgaagttcttgattttaaatcaccctttcttcagtactagcttatctcttcgtcaattttctctaccgacattcaatgactctccctattcggaaaaatcaagtcaaagcattaaaaatggttagaggaaagatagagatgaagaacatagaatacgcaacgagtagacaagtgactttctcaaaaagaagaagtggtttgttgaagaaagcttatgagctctc

SEQ ID NO: 103855 - DNA, 391 bp, Arabidopsis thaliana columbia
acacctacgtagaccggtacgtgacgagatggagaggttcgtcgttagcgcggagctacttaaccatccggttttcatcggtttactaaaccgatctgctcaagagtatggttacgagcaaaaaggagttctacaaatcccttgccatgtccttgtcttcgaacgaatcatggaatcgcttcgtcttggacttccggtaccgattgatgttcaggatctaatcggtgacgggactatttgaagaagaagcttttattggaaggaatcttggtagttagagaagtttttttttcttctagatctggttgtttttgttcagatactactgagtcatcatacttcgtcgtcgtgtcgatgtaaataggtatataatttttccaggatccaaaag

SEQ ID NO: 103856 - DNA, 204 bp, Arabidopsis thaliana columbia
agcttctcgaattgctacagtctttgcttcgttgcgggaattcccagcagtacgataccgagctgcaatgtcacttgatgcatcgacaatgacaactttgcgcgatttaattccaacaaagcttgcagctggaatctggaattgtctggcagaacataagcagtcgattgaaaattttcctcaaactgaaacatgcgagctact

SEQ ID NO: 103857 - DNA, 175 bp, Arabidopsis thaliana columbia
cccacgcgaccgcacacgcgtccgcggacgcgtggggatcatgtcactaatttagtgagacagaacagtagaatcattttacctatagtgtttcccgctttggagaaaaacggtagcagccattggaatcaggctgtgaagaacttgacagagaatgttctcaaggttttgtccg

SEQ ID NO: 103858 - DNA, 370 bp, Arabidopsis thaliana columbia
gataaagcattatttggagaaaaagaatggtatttttttagtcctagggatagaaaatatccaaacgggtcaagacctaaccgggttgccggatcgggttattggaaagctacgggtacggataaaataatctcgacggaaggacaaagagttggtattaaaaaagctttggtgttttacatcggaaaagctcctaaaggtactaaaaccaattggatcatgcatgagtatcgtctcattgaaccttctcgtagaaacggaagcactaaggtaacaaataaaatctaaacattaataaatactatatcttatattttcttcttgtagtgttttgaatgacctataattaatattcttgttaattttcttt

SEQ ID NO: 103859 - DNA, 386 bp, Arabidopsis thaliana columbia
accacgcgtccgcgccgtaagattccggaatttcgccgcttaattgattgctgaaggtgataatcttctgaagttttcttctgtagcacaaatacggcggcaattcaccggagaatctgttcgtcgagacatcgaattcagagatttctgagaatttcccgagattccttggtaacgtccccgtgaaactgttgttgaagattttgaattcaacgagattaggattcaaagctacgacatctggtaatcctccggtgaagaaattatcattgagattgaaagagataagttgcagagcagcgatcttttccggtagttcaccggttagattattctgcgagacatcaaaattcctcaattcggttaaatttccgatactctccggt

SEQ ID NO: 103860 - DNA, 171 bp, Arabidopsis thaliana columbia
gtccgaagatgaaacgaaattagtctctagtcgtatgtctgacgattgggacgatatcgtgctgacaaaagaagaaaaagatgtgaggcttcatatgaagattgatgcaatgatcacatcagaacggtccatgggctatgcttattctcaccagttatggagaaacagtcc

SEQ ID NO: 103861 - DNA, 213 bp, Arabidopsis thaliana columbia
caagaatggattgagtatttgtgttgattttgaagaattttgaagtaatatggcaaggtacaccttatatatgctgaaaatggttaaacccataccaacctattgagcccaataattggcctcaccattttgctggtcaaacctatgttccaccctataatctaagattgacacgccccaccactagcatatgctcatcttcttgcctctgtt

SEQ ID NO: 103862 - DNA, 199 bp, Arabidopsis thaliana columbia
gctgactcatgaggcactcgcccaacagttgttcgaggaaattccgataccaagaaatttcgcccacagagatttagattgagtctatctgaaatgtgggataaatttcgtattttgcgtgatgtttcacggagtttagataatcagtggcgcactggcgcgtgatgcgttttcttctacacttttggctcaatcgttt

SEQ ID NO: 103863 - DNA, 171 bp, Arabidopsis thaliana columbia
atttaatctctctctctctctcagacatagacacagctaagcttcgcatctgaaaggagtttcatgtcctaaggaccatattataacctctctatcgctctctaagtatcagcaaaaaaacagtgatttatagagagagaaaaaaactatggctcacataaagatctaaca

SEQ ID NO: 103864 - DNA, 263 bp, Arabidopsis thaliana columbia
agaagactcagaatcttcatcctcaaaccctagattccttaacgaaatggcgatggagatctcggtagatctgataaaccaactcaaggtctcgcttcgaaaggaggccaagctcacctccgtcgacgattgctcggactcatccttccccagccttcccacatccgaggaggctatcgcagaacttgatgcttcagctccctaccttcgttgccgaaactgcaaaggaaaacttttacgaggaatccagtctctgatctgtg

SEQ ID NO: 103865 - DNA, 396 bp, Arabidopsis thaliana columbia
agaaaatggtgaacattagagtacaaaaagctccggaatctccgaggacgatggaggtgggagaaatagacacaagagcaccgttccaatcggtgaaagctgcggtgagcttgttcggagaagttgcagtctcaaagcaaagaagtactccaaggcgatctcgactctcctctgagagcgtttgcgacaaggaaacacagctaatgctggtccacaaggaattcatgaagatcaagcaaaagcttgacaacgctgagagcacaagatctcgtgctctagacgatctctcaaaggcgaagaagacaatggaggatcttagcaacaaacttgagactgtcaacaagtctaagcaatcagctattgacaccaaagaaactgtccaacagcgggaagaac

SEQ ID NO: 103866 - DNA, 406 bp, Arabidopsis thaliana columbia
gggctcaattcaagctcaaaaacgggcatcagaggtccctttatgcaggatgaaagctggaaagatgattttttgaatcctttggagcgaagagttatgaattggcattttgctcacacagaatatggttgtgctgctgtcctcaaggaagtttcgcttcctcactggaatcaagatgagttttatggcgggtttggagggcctcatgctatgattaagggtggttatagccgagttgttgagtcgcttgcagaaggactggacattcacttaaacaaaatagtttcagatgtatcttatgtctctgatgtatctgccatggataacagcaagcataaagtcagagttagtacatcaaatggctgtgagtatcttggagatgctgttctggtaactgttccacttg

SEQ ID NO: 103867 - DNA, 131 bp, Arabidopsis thaliana columbia
gcatgattgagggatggaactgtcttgtgtaaccttttaaatcagcttaatcctgtgtcaatgagaatgggaggcagctttgatcctgccattgtaaaaattgagcggtttctgactgctatggatgaaat

SEQ ID NO: 103868 - DNA, 191 bp, Arabidopsis thaliana columbia
attcctctcatttgtttcttcttcttcctcagctcctttgattttgaatcttgatctgtgaggaaggctcattgaaatatcatcacaagacgtgaatttgaggcgaacccatttggattctagcgttcaaatgtttgaagcaataatctcccagaagagtaaggcgggaatctcaaacttcggaatgggtg

SEQ ID NO: 103869 - DNA, 206 bp, Arabidopsis thaliana columbia
accgtctctcccgtcctcgccacgacctctaacaccatgagtactgatctacttttacagtcatcttctaaactatcacacaaccaggactacatcttccatggatgaagacaccatgtgagaccttactacttcgaattcaattctcacgtgaatagacgattgactgcgagaacaattgtggatttgtttgccgatgaatttaa

SEQ ID NO: 103870 - DNA, 414 bp, Arabidopsis thaliana columbia
accacgcgtccgcggacgcgtgggggagatcggaagctaacacgggaagatttagccggaagaaatggcttcgttaggtttcaacctcggcttcaccttctccaatgcacaaattcagcagcatcgaaaagtttccggaggtggaagagctcgcgtaatctcctgtaacagctcttcttcttcttcttctcaagcatcatctcctcaggggatttctgcagtgacgcctcttgagatagagctcgagttcttcggtccgaagccgggtagcgacgggtcatatccggtagataaagcaaaggctgtgagtggagataagcttctcagaagcattatgcaggataacaaaattgaactctacgctgcttacgggaaagtgatgaactgtggtggtggaggaagctgtggaacttg

SEQ ID NO: 103871 - DNA, 405 bp, Arabidopsis thaliana columbia
gcgtccggttaggcattatcagcctctggcttgggctaaatggtgcaggaggctgcctcggcttgtggctacgatgcatagaatgagagatttcgacatggagatcactttccatttcgagagttctgttatacctttcatttctagagtggcgccttcggatacttataagatttgggagaggggtgcgaatcttagagcggatatgacactggctgggtttgatggtttcaggattcaaagatcggatcagactatactttttcttggagatgggtcagaggatggtaaagttccttccggttctcgtcttatgatatcacataaggataaggagatcatgaatgctctagacggtgctggagctgccgcatcataagaagaagttcgtcaagaagtggctgc

SEQ ID NO: 103872 - DNA, 336 bp, Arabidopsis thaliana columbia
agactgcctataggtgtgctgttgttctccgtgatttgattatgccgtacctcctccgccgtatgaaggccgatgtaaacgcacatcttacaaaaaagactgaacacgttctcttttgcagtctcactgtggagcagcgatctacctacagggcattccttgcaagctccgaagtagaacagatttttgatggcaacaggaattcgctttatgggattgatgtgatgcgtaagatatgcaaccagcctgatctacttgagagagaacattctcaccagaacccagattatggaaacccagaacgcagtgggaagatgaaggttgttgcagaagtgc

SEQ ID NO: 103873 - DNA, 337 bp, Arabidopsis thaliana columbia
cggacgcgtgggcggacgcgtgggcggacgcgtgggttttagtttcaacttttcagttatccacacacatacacacatacgcttccctgaatttggtgacgttagtcttcttccttccttctcactctttgtttcgccgtgaaaatgagctctgatagatagaagcgacagagagaaacttgaagcagatgtcgtctttcttcaaatccttcgcgggaaatcccagggaagctgctgcaatggcgatggttcaatcttcatcttacagagttttgtcaggtaaaagttgttcaaatttaaggagaaacacgccgttggattcttttcgtgccaaggg

SEQ ID NO: 103874 - DNA, 437 bp, Arabidopsis thaliana columbia
aaatagagctcttcttctgtgttttccgtgtcttttccattttgcaggcctgagactgtctcgcatacatcatttacaatgcctgtagtgattcaaccactggattattgtaaagcattggacaaagtcccaagatcactctgcttatacaaatgaacaccatagacattgaaagaaagaagagtagctcactaacctttgcttttcatggagaatgctcctacaacgtgtttgcttttgatttctactatgacctgcaaaagagaaaccgagcaaaattcaactctagaattcaaccagcatataactttgttagcttcaatgagtattcgatgtttaacctgagattttttgttgatgtacacttttacatgcttccaccgcagaacacctggaaagtccatgagtcaattcatcaatctcgtgatatgagttca

SEQ ID NO: 103875 - DNA, 298 bp, Arabidopsis thaliana columbia
ggagccacggtggagttgactccgcttaaaccccctccgtcgccaccggcgttcttcaatttcaaaccccaatccaccacccatggatcgatcttccctcctccttctcctctttaccaccaccaccatctctatattcttcttcgatctaaccaccgccgatgaatcgccgatgattttccctcttagctactcttccttaccaccgcgaccgcgagtcgaggattttcgccgccgtcaccttcatcaatctcagctccctaacgctcacatgagactctacgatgacctcctctcc

SEQ ID NO: 103876 - DNA, 281 bp, Arabidopsis thaliana columbia
gctgtagaacacaaacagaacaaacaaaaaatcaattgaagagtctctcagtcgttaggggaagcaaatagagaaatggctagctttactgcctccgcttccaccgtctccgccgctcgtccggctctccttctcaagcctaccgtcgccatctctgctcctgttcttggtaaaaaagccttccttgatctttctcagatctcatcttttagtagaaattcattctggttatgtgcaaagtgaagaagatctttgtttgcttatatttgttgagtggtttt

SEQ ID NO: 103877 - DNA, 246 bp, Arabidopsis thaliana columbia
cgcgtccagtttctgagtgcttatttcttggggggttatgcggatgaaggacgacgaatgaagggaaagtctaaagctgtggttgcagctgcgaaatcttggattgtcggaactccgcttggaattatcattaggtcagcttcatcaggtcacattccggcatatagctttgtgttggtgacaatgggaagtactgctgttttacttataggatggatagcattgttattcagtgtgcttcctaca

SEQ ID NO: 103878 - DNA, 303 bp, Arabidopsis thaliana columbia
atgggaacgatctggagaaatatatatatttcaatattttaaatagcttttggagcatattggagcaaataagcatttggagcttgtggagcactgctctgacccaggattgctctcacttggtttgcttcatatatattttggtcttaccatgttttctttttcttttcttatcatcgtctcattttgatgctggggctatgtcgaaagctgtttgagtggaggttctttgtctatagcagtaaattttgatcctttatttatttcgtttcctttttattctcatgtgcagtttcccctttt

SEQ ID NO: 103879 - DNA, 313 bp, Arabidopsis thaliana columbia
agaatgttcagctcaaggcatctcaaatatttcttgggcattatccaaaattggaggtgaattgctatatttgacagacatggatagggttgcagaagttgccacatcaaaggtgggtgagttcaattctcagaatgttgctaatattgctggggcgtttgcttccatgcggcattctgctccagaactctttgctgagttgtcaaagagggcatctacgattatcaatacctttaagggtcaagagattgctcaactattgtggtcatttgcctcactttatgagccagctgatcctttgcttgaatctttg

SEQ ID NO: 103880 - DNA, 297 bp, Arabidopsis thaliana columbia
accacgcgtccggcgctcgataatggctgcttccgatgattcctctcactatttcaccgagtttaccttgtctgagattgtagacatggagaatctgtataaggagctcggtgaccaatctctccacaaagatttctgtcaaactgttgcctctacttttagttgttctgtgaatcggaatggcaaatcctctataacctggaaacaggtacagatttggttccaggagatactgaagcatcaaagccaaccaaaatccaaaactttgccatctccccctttgcagattcatgactt

SEQ ID NO: 103881 - DNA, 287 bp, Arabidopsis thaliana columbia
accacgcgtccgatcactgttttttagattggagaacgctgagcacagccttggaggttcttcctccgaacacagcaacctgacgagcttagacttgggcgtgtctcacagcgaccatgaaattctggcagaggtactaagatgtacttcgaagatcagtaaacagtggggtggtgctccttatgccatgtattatgaatcaattaccggaaggccaattatctcatcggatgaaatcgttcctcgcttagttaacatccttgagtcgggatattctacgaccatag

SEQ ID NO: 103882 - DNA, 261 bp, Arabidopsis thaliana columbia
agatcgatttcgactgtaagtgaacattgaatgccgcgaagattactcaaatcgccggacacaagtttttcagtggattccattggcagagaactcgagagaaagagacacagagagagagagagatctaacaagagtcaaagtttctgacgttttcgcattcgttttgagatcgagttctgtttttggtggcgtgtgagatgaattcttaagaaggaagaagaagaggaaggaaagatgcgtagagagatctcgtttttg

SEQ ID NO: 103883 - DNA, 301 bp, Arabidopsis thaliana columbia
caagcttaaatccttcaattttcagcttctgtttgttaaatttcaggtttttgttgtttttgagctaattgaagaccctatttgatcttaagaagcaatcagcttttagtttaagcatctagaaacttgaattttgcgaacctttttggtatttttcaaaatttagtctctctgtagaactttggttttgtgtccgatgatcgttgattggtttctcagggtttaagttggtgttgaaatatttaactttctatttatggtctctacatgttttctgtttaattctattagaaacatgtga

SEQ ID NO: 103884 - DNA, 196 bp, Arabidopsis thaliana columbia
ccagagtatctctcaactggtcaatcctctgagaaaacagatgtttttggcttcgggattcttcgtcttgagcttgtaaccggagaaagagcttttgagtttggtaaagcggctaaccacgaaacgtgtgatgcttgattgggttaaaaagattcatcaagagaagaaacttgagctacttgtggataaagagttg

SEQ ID NO: 103885 - DNA, 133 bp, Arabidopsis thaliana columbia
cttttacatatgaagaatcgtgctatctacaatggtcactaagaagaacaattgcagacagtgtccgacgaaggagatcattgggttcaatttgtgactcctgcagcaagggccttatcaatggactttgggt

SEQ ID NO: 103886 - DNA, 281 bp, Arabidopsis thaliana columbia
aagggaaatgagtattgggaatcagaattgcctcaacatttcgagagaagttcaagcgacacgtttataagagccaaatacagtgagaagagatgggtttcaccgggagcgattcaaccggctcctatagttagccagctaagctgcaaagttagtcacttggtagagagtggatataaacctgaaactccaaagaaagctagaactctttcacttgacgaagagatccttcttcatcatgttcttcaagtaacacctccagaaacgagaactcgtgcggg

SEQ ID NO: 103887 - DNA, 261 bp, Arabidopsis thaliana columbia
aacgtacagcgatcacatacatcgatgaaagcggagactggcatcggagcagtaaaggagctcctgagcagatcattgaactctgcaatctccaaggagagactaaaagaaaagcacacgaagttatcgatggttttgctgaacgtgggcttcgttctcttggtgttgctcaacagactgtgcctgagaagactaaggaaagtgatggtagtccatgggagttcgttggtctgttgccactctttgaccccccaagacatg

SEQ ID NO: 103888 - DNA, 328 bp, Arabidopsis thaliana columbia
atttgtccgtactctcctctctgtccatgatgattatgtccagaattacgtggttaaaaacaacttgttgaaaccgatcatagatgtcttcattgccaatggaacccggtacaatctgctgaactctgcagtcttggatctgcttgagcacatacgcaagggaaatgcaactctgttgctcaaatacatagttgatacgttctgggaccagttggccccatttcagtgcttgacctccatccaggctttcaaggttaagtatgaacagtgtttagaaagtgccggaccaaaaagcacttctgatgcggttgatccaagaagaagagtt

SEQ ID NO: 103889 - DNA, 150 bp, Arabidopsis thaliana columbia
acttcttatctggttcaaaaaatccttcagatgggtcaatgaacctccttgtgacttttgtggtaacaaaaccatacgccatgggatgggaaacccacttacctcggagcttgcttatggggcaaatcgagttgaaatatatcgctgtac

SEQ ID NO: 103890 - DNA, 99 bp, Arabidopsis thaliana columbia
actactactgtatatggttctccaggaagcacacctcttcatttagcagctagaagtggatctatagattgtgtcagaaagttgcttgcgtggggtgct

SEQ ID NO: 103891 - DNA, 188 bp, Arabidopsis thaliana columbia
atcaaaccacgtgattcagataacttcaccgtctaaaactctgttcgtttcgctggtcctttacgtagagactcgattagcaccaatgctaaattcgaaatcggaagccctaaacgcgtcgagattaagtttgagcaaggcgtagttgggacgcctcagctaagggattctattgagataccggaata

SEQ ID NO: 103892 - DNA, 266 bp, Arabidopsis thaliana columbia
aaaaaccgagagttgcaattaatgcgactaatggaccatccaaatgtggtttccttgaagcattgtttcttctctacaacgactagagatgagctcttcctcaatctcgttatggagtatgtaccagagacattgtaccgggttttgaagcactatactagttcaaaccagcggatgcctatcttctatgtcaaactttacagatagcaaatcgtcagaggcttggcttatatccatactgctcctggtgtctgccacagagatgt

SEQ ID NO: 103893 - DNA, 266 bp, Arabidopsis thaliana columbia
acacaaatatcttgtccgatttcgttgttcacgtattacaacccgattcttaaacgtgggttggggaagttcatgtccagcatcagagctgttggtgtacagggacttgtggttcccgatgttcctcttgaggaaactgagatgctgagaaaagaagccctcaacaacgacattgagctggtcctactcactacaccaaccacaccaacagagcgaatgaagctaattgttgatgcgtcagaaggatttatttaccttgtgagctc

SEQ ID NO: 103894 - DNA, 171 bp, Arabidopsis thaliana columbia
gggaatttgaataggatggaagaaatgtatgaagtgattaaagatcaggttggtgtaaacagtggtcctttggtcagagctatgatctgtgcatattgtaagaaatgctgttgaggatagagtccaaaagattgaagatttattgagtcttctctctggggaggaatatct

SEQ ID NO: 103895 - DNA, 226 bp, Arabidopsis thaliana columbia
aaaaaaccgagagttgcaattaatgcgactaatggaccatccaaatgtggtttccttgaagcattgtttcttctctacaacgactagagatgagctcttcctcaatctcgttatggagtatgtaccagagacattgtaccgggttttgaggcactagactagttcaaaccagcggatgcctatcttcgatgtcaaactttacacataccagatcttcagaggcttg

SEQ ID NO: 103896 - DNA, 402 bp, Arabidopsis thaliana columbia
gtctggatgaggtttatggctacaagacagcttgtgtggaacaaaaactataatgttaagccaagggagataagcaaagcgcaggatagactgactgaccttctccaggacgtttatgcaagttatccagagtacagagaacttttgcggatgataatgtctactgtaggtcgaggaggtgaaggagatgtcgggcaacgaatccgtgacgaaattctagtcatccagcggaaaaatgactgcaagggtggaattatggaggaatggcatcagaagttgcataacaacactagtccagatgatgttgtcatctgtcaggcattgatggattatatcaaaagtgactttgacttaagtgtttactgggaagacttgaacgataatggcataaccaaagagcga

SEQ ID NO: 103897 - DNA, 167 bp, Arabidopsis thaliana columbia
gtctctcttctctgcttcgccctctcatttcctgtgagataaaggcggagtctctctccagttattttgctcatccatcgattcttagagttcaaaatggttgatcaagttcagcagcacgcagcggttggcaccctgcaaatagatctgaggcggcccaatctaac

SEQ ID NO: 103898 - DNA, 308 bp, Arabidopsis thaliana columbia
attgatggcggcaccagaaacaatattccgggggtgggaagtgatgcaaatgatttagatccacgtattcagtcaaggatgccccataatgcattcattagatcaaatttccctcaaacatcctggaatgttaatcctggccagcagattgaaaaagagccgaaaaaagaagaacaatttagtcgtaggatatcggctcaaagtcctcgtttgtcggcaggtggtccaccgcagtccccactttcatcgaagtctggtgagttttctggtggttcaatggggacccactatggagcagttgcagcagc

SEQ ID NO: 103899 - DNA, 161 bp, Arabidopsis thaliana columbia
aacacgcgtccgtcttagctgttttttcatcttttatctctgtttttaaaatcatttggctctttcgaagggtttcgagtcattttgagttctttgggcttcctcccaaatttctccacgagctcgactcctttcgtatcgtcattctcatttttttgcca

SEQ ID NO: 103900 - DNA, 167 bp, Arabidopsis thaliana columbia
attgatgaattcatgaatgtttatcggctattagcttcagcaaaaaaggctccaggtacatttgttctggaggaactggtcaaattgttaacatatgggatctgcaaagaaagctttgtattaagaagttgaaaggtcatacaagtacaataactggtgtgatgtac

SEQ ID NO: 103901 - DNA, 325 bp, Arabidopsis thaliana columbia
accacgcgtccgggccaacttgcactgactacatcatctccttaaactgcgatgatgtctctcgaggaagcaatacctatatcggaaagcttagatctaactttcgggggaccaagttcactgtctatgacgctcagccgaagaatcctggaactcaggttaccagaatccgttcaagcagacttctcagtttgaaacatgtgagcccgagaattccatctggcaactatcctgtagcagatatctcatatgagcttaacgtcttgggttccagaggaccgaggaggatgcagtgtgtcatggatgccatcgctgcatcagctgt

SEQ ID NO: 103902 - DNA, 367 bp, Arabidopsis thaliana columbia
gaagaagcaaaaagagtcatattcgttgaaaacatcattcactcttctctgcgtctccttctttcacccgaaattgtctctgacaccgttttgattcaaccatggctaatgctgcgtcaggaatggcagtccatgatgactgcaagctaagatttctggaactgaaggcgaaaaggacacaccgtttcattgtctacaagattgaggagaagcagaagcaagtgattgttgagaaagttggtgaacctattctaacttacgaggactttgcagcaagtcttccagctgacgaatgccgatacgccatttatgatttcgaccttgtcactgcagagaattgccacaagagcaagattttcttcattgc

SEQ ID NO: 103903 - DNA, 284 bp, Arabidopsis thaliana columbia
aataagagctataaaagaggatagaaccaacatttgaatttttttcttctatctctctccccaagatatatagcacacgaaaatgacgataccatcaattggctatgtctttttccttatcttcatctctattacaattgtttcgagttcaccagatcatggagaagttgaggacgagatgcagtttaactacgagaagaaaggagagaaggggccagagaactggggaagactaaagccagagtgggcaatgtgtggaaaaggcaacatgcagtctccgattg

SEQ ID NO: 103904 - DNA, 397 bp, Arabidopsis thaliana columbia
gacgtgtcaaatcaatctactgttctctctcctatctgggcaaaaatctcagacaaacctgcaaaattagggtatttgaggatatggattatgatcggtacaagttatttgttggtggtattgcgaaagagacaagtgaagaagctctgaagcagtattttagcagatatggagctgtgttggaagctgttgtagctaaagagaaagtcactggaaaacctagaggttttgggtttgttcgctttgctaatgattgtgatgttgttaaagctcttagagacactcacttcattctcggtaaacccgttgatgtgagaaaggcgattaggaaacatgaactataccaacagccgtttagcatgcagtttttggagagaaaagtgcaacagatgaatgg

SEQ ID NO: 103905 - DNA, 219 bp, Arabidopsis thaliana columbia
caggtttggatcaattatgtactgtcaattgcaagtgatatcaccatcgctagaaatccgattcgtctccttcaggttttctttcatcacatgtggcataccatttgttgtatcgttttgtttctgcatgtgatgtatctcactgttcacatctcgtttgtttttgctgtgaaacaggtttctcttgtcttgtgggctatatcctatgttgggacttta

SEQ ID NO: 103906 - DNA, 260 bp, Arabidopsis thaliana columbia
cacacgcgtccgtttggcgacttgtaaaggtgacgagtttgtttgtgaagagaacgagccattcacatgtaaccaaactaaacttttcaacagtggcaatttcgaaaaaggcttcatcttcggtgttgcatctaccgccttccacctggtaagcagaagatgcaacaccgaagatgaacgcggtagatgccgtggacttaacgtttgggatagcttcactcaccgattcccagacaaacgtggagctgatttgggaaatg

SEQ ID NO: 103907 - DNA, 127 bp, Arabidopsis thaliana columbia
aaacaatgatttctctatgaacttcggcgactccgccgtcttatcttatgctcgacaagaatcctcacttcgacaaaggttgttctgtgggcgatatgggatctactgtatgtttcgaaggagattg

SEQ ID NO: 103908 - DNA, 193 bp, Arabidopsis thaliana columbia
atcatcttaaaggctttaggctctaaaagaaaaaatagaaaaaaaaaagcgacctaaagccatgtcgaaagcttagtaaatttctccatataaaatcataaccccttaagaaaacaaggaaatatcagagaagagattgtttaaatattatataaaaaaactatttttctgagaaagaaattttttgaaaaac

SEQ ID NO: 103909 - DNA, 190 bp, Arabidopsis thaliana columbia
ttggggactaaaatggaagatctatggaagagagcgacctcgtttgctgtcgaagcacttgatgaatttctccagataacatcataatcaccttcaacaacattggtcaatctcgtcaccgattgcgcaaatatttccaaagagttcgctctctctgcttctaagatttctggttcgatcaatgtctccg

SEQ ID NO: 103910 - DNA, 281 bp, Arabidopsis thaliana columbia
cagctatgaagatcgctggccctgttcggaaaaagcttaaacttaaaactgtctttagcatactgggacctatgcttagtcctgctagagtttcttatgctgtcgttggtgtataccacaacgatctggttgttaacatggcacaggcactgcaacgatttggaatgaaaagagcactggtggttcattcatgtggtctagacgaaatgagtcggttaggaagaggactagtttatgatgtacctccggaaaagatcgatgaattctcattcgacccattg

SEQ ID NO: 103911 - DNA, 363 bp, Arabidopsis thaliana columbia
aatcgatctgggttcattggattcattacacaaaccggagagacatgtcggagaaagagcaccctcggctaattctacacaatttcctgtcgccggcagaatgcaaggttgtcccttttttgcttaattttgtgtctaatcatgtgggtttggttaattttgaggtaaaaacaggaacttgagcttatacacaagagtagcagtacaattgggtacagaccaaatgtcttctccactactctctctcacctcattgccactaattctcctcacctcatcatcccttttgtctccattagagagaggttgaaagagaagatagaggaaacatttgggtgtgagtatgagctttttattgaattc

SEQ ID NO: 103912 - DNA, 392 bp, Arabidopsis thaliana columbia
aggacgcgtgggggagcgtatcagtaaaataatccgagagaagaagcaagaaagggatatcaagaggaagcagatatattatttgaaaattgaagaagaaaggattaggaagctgcaggaagaagaggaagctcgcaagcagcagcagtctccgcaaatgtttccgatggttccgtcgattccccctgctaacaacatcagcaagctatgcaaggacacatggggattagaccaatgggtatgaccaacaacgggatgcagcatgcgatgcaacaaccagaaaccggtcttggaggaaacgtggggcttagaggaggaaagcaagatggagcagatggacaaggaaaagatgatggcaagtgaaaaggatccaaagaagctttgttttgttg

SEQ ID NO: 103913 - DNA, 240 bp, Arabidopsis thaliana columbia
agtggtgagagaatgtacctttgtgatcttgttttgttgttgttatgtacctttggacttatgaatcttatatctgatccttttcttaaatgccaaatggttgttatgatgatgcacttcgttagccctttggtttttatattcgtacaatgacgtggtgagagaatgtagctttgtgatcatgtattgttgttgatatgtacctttggacttatgaatcatatatcagatccctttctt

SEQ ID NO: 103914 - DNA, 176 bp, Arabidopsis thaliana columbia
agaatctatacgacgatgccgtcgaggctcagatcatcctcttcacttcatccacgtactctgctcctttctctcttagtacaccttttctattccttaggtcaccggcgtcagattaattcacacattgcctctcctcggacgtgcgatctcgtctccggcagatgggttttcaa

SEQ ID NO: 103915 - DNA, 379 bp, Arabidopsis thaliana columbia
aaaatcgataaaaaccaaaaaggaagaaaaacaacaacagggcttctagtagtagtagtagtagtaccactcatctcaatttcaacctccttcatattcctttctttttttttgcctttcttcttaattaaaatcttgtttttttttgttgtaaatgaaaagaaaaaaaaaatcgaaacttgaggattctacagcgaatcgcgtgcttatatccgcaggctggttgcatgattatcatatcccccagattttttttttgaggaaccacttgtgttgagaaggaatcgaaagaacctttacgaggaagctttgactcgaaatctctctgaagaagaagaggagagacgaaactgttggcttagtttccgacgccgggaac

SEQ ID NO: 103916 - DNA, 395 bp, Arabidopsis thaliana columbia
acgaatgggaaattgtctctcagcttcgacacttcccaccgaaccaaatgctcccaaatcagtggaggagggtgtgaaagtcttcacggtggcagatctgaagaaagcgactaatgatttcggaaaccagatggaactaggagagagcttgggatacatcaatcccaaaacgttatctccggccaagaaaggtgttggcatggccgtcgcggtcaagaaaatttacttagccaatgaacaagcttttcaagattggcttgttgacgtacagtttctacgacataactctcatccaagcttggtgaagctaattggctactgttatgatcgtgatatgttgtttattgtttctgaatactttccaaatggaagcttaggaagttacatcagtagag

SEQ ID NO: 103917 - DNA, 328 bp, Arabidopsis thaliana columbia
accacacgtcggcccacacgatggttgcacgcttgttcatgcactatcttgtgtgtatgttgattcctttgggtcacgctatgtgagatacagagacactgcaaggttaagacttgttcatccgcttcgtcgataaaggatctgtctagatttgggtgtgacaaagctttctgatgttgtcattgaggaacttgaaaacgctgaacatattgataccttagacagcatacggtcaatatcactcactgctgtcagaatgaagttgcacagcgagacgtttcaagctgctttatggacggtgagccgtcaggccaccaccgtggatgac

SEQ ID NO: 103918 - DNA, 297 bp, Arabidopsis thaliana columbia
gtctccgacgaagagaagctgacacttctggtttcgtcaatttctactgggataaagctctctactacctttttgctcagagaaaatggtttgattttcgaggatgataaaggcttcaggttgttgtagaggtgtttttgccagccttggtgctggtcatggattttatcgcttcttgttatttattatctggttatcaagcttccaagatgtagctgcgcatgataagcttaatgagcatagtagcagatccacaacctctgaattggcaaatccacctggtattggagtatctgg

SEQ ID NO: 103919 - DNA, 357 bp, Arabidopsis thaliana columbia
actttcttctcagactaatgagctctatcagttggccgctgtagcattttgtttacttgtcgcttggtgtagtgacaagctcggtctaagtctggagttgggttcctttgcggcaggagtgatgatctcaacaactgatctcgctcagcatactcttgaacaggtggaacccatccgcaatttttttgcagcactgttccttgctagtatcggcatgttgatacatatgcacttcttgtggaaccatgttgacattctgctagcagctgtgttactggtgatagtgataaagacggtggtagttgctatcgttgttaaagtctttggatacaataacaaaactgcagtacttgttgg

SEQ ID NO: 103920 - DNA, 398 bp, Arabidopsis thaliana columbia
gagatcttctctcttttatcttacgactctcacttcttatctcaaatctacttcaagatgtcttattccctggacagaatttggtggaatctatttacttgagattcaccgtatagttcgacctggaggtttttgggttctttctggtccacctgtgaactataatagacgatggcgtggatggaacacaaccatggaagatcagaaatctgactacaacaagcttcagtcacttctaacctccatgtgtttcaaaaagtacgctcaaaaagatgacatagccgtgtggcagaaactctcagacaaatcttgctatgacaaaatcgctaagaacatggaagcttaccctcccaaatgtgacgacagtatagaacctgattctgcttggtacactccac

SEQ ID NO: 103921 - DNA, 335 bp, Arabidopsis thaliana columbia
acaggtcctagtggagatacttataaaggtcagtgggtgatgaacctgaaacatggacatggaatcaagcgtttcgcgaatggagatgtgtatgatggtgaatggaggaggggtttgcaagaagcccaaggaaagtatcagtggagagatgggagctattacatgggggaatggaagaacgctacgatctgtggcaaaggtacttttatttggacggatgggaatagatacgacggattttgggatgacggttttcctagaggaaacggtactttcaaatgggctgatgggagtttctacgttggtcattggtctaatgatccggaagagatgaa

SEQ ID NO: 103922 - DNA, 424 bp, Arabidopsis thaliana columbia
  unsure (1)..(424): unsure at all n locations
tggatctgttagaaatggttatgaggatcctcttgcactctctcccacggttgtgcgattttattcgcttagatcgcataactatgttcatgttttgaggtttagatctactgtttatatggttagatgcagtcctcggattgtcgctgttggcctcggttcgcagatatattgttttgatgcgctaactcttgaaaacaaattcagtgtcctctcgtatcctgtacctcagcttggaaaccaagggatatctggggttaatgttggatatggtccaatggctgtcggngctagatggttagcgtatgcttccaatagtcccttgtcttctagtataggtcgtctgagccctcagaatgttactcctcctggtgtcagtccatctacctcgccaaataatggtaatccggtggcaagatacgct

SEQ ID NO: 103923 - DNA, 239 bp, Arabidopsis thaliana columbia
ccacgcgtccgcacagacactgatcaatggatgtcttatattcttctaattggcttcatcaagagagcattgatgagatgaggcagaatctacagagcactctgttcgaactagagacactgaaaatggaagctaatgagaaatcaagaacacacagagaagaagtgaaccaacttctcaatctcctcaaattcactcagcaagaaagagacgaagctagacaacagttatctcaattc

SEQ ID NO: 103924 - DNA, 320 bp, Arabidopsis thaliana columbia
caaatccttccagcggataaagtggttcctgttccttcatctattgatcctatcgttgcagcatcaatcatgctcaagggtatgactgcacagtttctccttcgccgttgcttcaaggtcgaacctgggcacacaatccttgttcatgctgcagctggtggagttgggtctctgttgtgtcaatgggcaaatgcgcttggagccactgtgattggaactgtctcgaccaatgagaaagcggctcaagccaaagaagatggatgccaccatgttattatgtacaagaacgaggattttgtttcgcgagtcaatgacattac

SEQ ID NO: 103925 - DNA, 271 bp, Arabidopsis thaliana columbia
cggttttcttatggaatgtttggttgatttgagaaagaatcttatgaaacgaggattgaatcttcttattagaagtggtaaaccagaagagattcttccttctcttgctaaagattttggagctcgtacagtttttgcgcataaagaaacgtgtagtgaggaggtagacgttgaaagacttgtgaatcaaggtttgaaaagggttggaaatagtactaagcttgagctcatttggggaagtaccatgtatcacaaagatgatcatcctttt

SEQ ID NO: 103926 - DNA, 228 bp, Arabidopsis thaliana columbia
aggatgcgtgggcggacgcgtgggcggacgcgtgggcaaatgtcaaatgggttgttgaatcttcacgtgtcctcgtttctcctcttatctcatctaacttgtttctttagttttgttcaactcaagcacatccgagaaagtcatagtctttgaacatcaaattgccttttgtttgtcaaatgacttacgttcttgatctttttcttgtagggtttttttctctgcact

SEQ ID NO: 103927 - DNA, 133 bp, Arabidopsis thaliana columbia
agtgcgtgaaggaattagagatgtttatggtggaaaggaatattacgaagtgcttaagaggtctaatacacctcacatgttttgcaaaaaccttactgcttctgatagatgcacccatggtggtttctctgtt

SEQ ID NO: 103928 - DNA, 358 bp, Arabidopsis thaliana columbia
gctgtcaatagttttctgatctcaaaggattctccggtggttgaaccaactagaattcatagcggaagctacggtggtggaagacgtgagggaggaggaggatacggtggtggtgaaggaggaggttacggaggaagcggtggtggtggaggatggtaattcctttaattaggtttgggattaccaatgaatgttctctctctcgcttgttatgcttctacttggttttgtgtgttctctattttgttctggttctgctttagatttgatgtaacagttcgtgattaggtattttggtatctggaaacgtaatgttaagtcacttgtcattctctaaataacagatttcttcggagat

SEQ ID NO: 103929 - DNA, 210 bp, Arabidopsis thaliana columbia
aagaatgatttcagttgaaaccaaagtcgtctttttgtaacttgtaaacactgtggaaggctaagttaatgattgtaatcttacttaataaatgaaattcttgattataaaaaaaaaaaaaaaaaaaaaaaaaaaaaaaaaaaaaaataaaaaaaacaaaaaaaaaggacaataaaaaaaaattaacaaaaaaaaaaaaaaagaaggaat

SEQ ID NO: 103930 - DNA, 393 bp, Arabidopsis thaliana columbia
gggtaagggattgatgacaatttgtggaactgaagaaactaggttagattgtttttcttatggggttagagagaggttctggaagaagaataatagaaaatatctagcagactcgggccaggattaccgcaagcacgtttatcttcccgatgatattctggaaatgtgtttgatgaggcttcctttgaccagcttattgaatgcacaccttgtttgcaagaaatggcaatccatggccaacactcagcggtttctccagatgagacgagaaggctcctttcaaacaccgtggttgtttctgtttgctgctcttaaagatggatgctcctctggtgatattcacgggtatgatgtttctcaggacaaatggcataggattgaaactgatctact

SEQ ID NO: 103931 - DNA, 246 bp, Arabidopsis thaliana columbia
aggtcgcgtgggctgttatagaagcaaccactcttgctattatcggaagaccgtttgaggttgtgtactatccgacagctagcacttcagagttttgtgtcaaggcattacatgctcgagctgccatgcggattccgtggtgctcatgtatgaggtttaagatggcttttgagacagaggattcgtctcggataaattggtttatggggactgtttcagctgtaaatgtctctgatcctatccgtt

SEQ ID NO: 103932 - DNA, 361 bp, Arabidopsis thaliana columbia
aacagaggaaaaaaaacaaaaagctctacggtatttctctcaaacccttaacgacgagagccgtcgctaatcgacgacgtaattcttaggtcgaacggaaaactccgccgctacgtttagtcgaagagatgacttctacttccgctgcgaagatctcaatgtttggtgccaaatctggattcgttatccctaaaaacaaactatctggatcattgatcccaatttttcaacgtggaaacaaaaccctaggaagtgccgattcagacactggacctccgtcgaagctggggaagaaaagaaagactaaatgggctcctgatttgtcacaagatattgcagtcaagaaatgtcgatttttagc

SEQ ID NO: 103933 - DNA, 368 bp, Arabidopsis thaliana columbia
gacgtgctctccaagagtgatcctatggttgttgtatatcaaagagaaaaagatgcaacactttcagaagttttccgcagtgaagttgttttgaactctttagctccgaaatggattaagaaatttatagtcgcttatcatttcgagactgtgcagacattggtgtttcgtgtgtatgatgttgacaccaagtttcaaaattcaagagaggagatgcttaagcttgacgaacagcagtttcttggtgaggcaagatgtgcattgtctgagataatcacaatatcaactaggacgagcacattacaactcaagcgcaaagatggctttgctccacaggctcagcctcacgacggaaagcttagcatcca

SEQ ID NO: 103934 - DNA, 408 bp, Arabidopsis thaliana columbia
gttacctttatttttggtccgtacgaggaaaaatctaggagacagagctatttgttcgaaagatgcaacttttaaatagctgttgtggaaaaggatttgatgggaagaagaaagaaaaggaagagccatcttggagggtattttcactgaaggaacttcatgcagccaccaacagtttcaattacgataacaaactcggtgaaggtcgatttggtagtgtctattggggtcagctatgggatggctcacaaattgcagtcaagaggttgaaggaatggagtaatagagaagagatagattttgctgtggaagtcgagattcttgctcgtattcgtcacaagaatttgttgagtgttcgtggctactgtgctgaaggacaagaacgtcttcttgtgtacgagtacatgc

SEQ ID NO: 103935 - DNA, 315 bp, Arabidopsis thaliana columbia
tggaattataactgtcttggctatgatgacaagattgtggatggtttctatgacctgtgtggagtaatgaatgaatcttccttaaaaagaatacctcccttagttgatcttcaggggacacttgtgtcagatggtgtaacttgggatgctgttctagtgaacagcagcaaagattctaatctgttgagacttgaacaaatggctcttgatattgcagcaaaatcaaagtcagcgtcttcttcagggtttgtgaacagtgaattggtaaggcaactggcagttttagttgctgattacatgggtggaccagttttg

SEQ ID NO: 103936 - DNA, 228 bp, Arabidopsis thaliana columbia
cacacgcgtccgcgggtggacatatgcaggactcgaaaagccaccatcagatttggttgaccttcttgtccaggcagacttgtatgacatggcattcactgttgttttgaaattttggaggggctccgctttgaaaagggagctggaaaagatatttgagaatatggcaattaaatgttgccctgccaaaggaactctgtggtcatcgtgagtgactgttccttagtt

SEQ ID NO: 103937 - DNA, 412 bp, Arabidopsis thaliana columbia
aacacgcgtccgctctgttcgtcgtttgtttttccggtggagaaaaatggtgatggaaattgtgaaaccaaacacatgcattagaggatgttgcaccagtgaatcgatccctcttcatctcccttcttcttccttcactcttctctccccaatcgctaaaggatcagagagtgttgtttatgaagcgattctcgatggccgaagagtagcagcgaagaagcctatcttgtctacttccgatgaccttgacaagttccacaggaatttgcagctctcatgcaatctcaatcatcctggtgtggctaagttactagcagcacatgcgaagcctccaaattacatgtttttctttgacttctacgagtctgggactttagctgagaagttacacgtcgaggagtggtctccgagt

SEQ ID NO: 103938 - DNA, 131 bp, Arabidopsis thaliana columbia
aacacgcgtcagatctgttcgtggttcgtcttcctcgtcgtcatcggtggtgatggaaattggtgttccatgcatatgcataagaggatgttgcaccagtgagtctatacctcttcatctcacttcatctt

SEQ ID NO: 103939 - DNA, 409 bp, Arabidopsis thaliana columbia
aacaaagcaggtgtagccctgaatgttcccctgtgcctagtccaagaatgacaagccctggtcctagctctagaatacagagtggtgctgttacacctcttcatcctcgagctggagggtcaactactgggtctcctactagaagacttgatgataacagacagcaaagccatcgtctgcctctcccgccgttattaatctctaatacttgtccgttttcacccacatattcagcagcgacatctccgtctgtcccccgaagtccggcaagggcagaggctacggttagccctggatcgcgatggaaaaaagggagattgctggggatgggaagttttggacatgtgtatcttggctttaacagtgaaagtggggagatgtgtgccatgaaagacgttactctatgctc

SEQ ID NO: 103940 - DNA, 394 bp, Arabidopsis thaliana columbia
catgtaccagtcgcatcaaagcaagttttggtgaagaagaagagacgaggtcttcctcttactgtggtggtgacattttcgctaaatagaaagtctccgatatgtcgcagagatggagtagaaagaagagtagacttccattagcgggtctcctctttattctcgttgtcacctttatgattctcttcaacgagcgtagcattcagcagatccatcactacgccgcgagtcacactcaaaatctccgagaaccttccacgttcgatttcgtcaagcctaatgttcctcggattaactacttgggagctcatgacgttttggatagattcagcatatgcaactcgacgaaagagtacagtgggaagaaaatcggatgggttgacccgtttgaaga

SEQ ID NO: 103941 - DNA, 156 bp, Arabidopsis thaliana columbia
accacgcgtccgttctactggaatggagaatcaatgtgttttggctggttctccgcaaaggatttcaggctttgatggaatgtcctcccatggtcagccttcctatgctaatccccatttgcaagatagagccttccctttagacccaaattgggt

SEQ ID NO: 103942 - DNA, 369 bp, Arabidopsis thaliana columbia
catctctgccacacccgatctgaaattctccagttttgagttacgtagacctttacaagtcttagtattgagtatcactgtttattgtttagagtttatgtgttttgaatggatttatctgcttctgtcgccaaaaagctttagcctttattttttagacatggagttctccatggtttcgtatgttaagaattatgagtttaggccaaaattttttacatttttcttagaattcactgcaggactgttatggtcatggcgatggaaaccttgagagaaaggttctaccaagtatggtcctgatggtgtttactatgaaggatccactcctaaaacggtcaagtgaacgacactagtttggagactatg

SEQ ID NO: 103943 - DNA, 361 bp, Arabidopsis thaliana columbia
accacgcgtccgaaaacatatacttttccgacaaaacatggaagatgttaatcaggacaagaagaaagtacctccaatgtctgaaccagaaagatccacaccgattaaggtaacaatatcaagaatctttatcttaaacttgaaccaactttttgaaacatcaacactacaccatgttcttgactttagtttattgaaatcttgataagtcgaatcttgtgtttaaaatgtattttttaagtaatttagagctatgtcccctcgagtccaccttctggtgagcacaaggctttgcatttttgttacagactacaggaggacagtatcgtttctgcaagtcatgtgttgaacgaagtagttg

SEQ ID NO: 103944 - DNA, 394 bp, Arabidopsis thaliana columbia
atcaattcgtttagttcatctttggaagattctcttccgattaagttttggtttttgttacaggagaggattatcaaaccattacatagggaaatcgaaatcgtttgggaatttaatggaagcgagtaacacaaacgatttggtgaaagtggagagtccattgaacaagagaagaagattgcttattgctaataagctaagaagaagatcgtccttgtcttctttcagcatctacactaaaattaaccctaattctatgccgttgcttgcattgcaagaatctgacaacgaggatcataaactcaatgatgatgatgatgatgatgatagtagcagtgatgatgaaactagtaagctgaaagagaagaggatgaagatgacgaaccatagagat

SEQ ID NO: 103945 - DNA, 308 bp, Arabidopsis thaliana columbia
accacgcgtcggttgacgcgtgtgttctgacaactgggattacctcataatatgcgcagtttcttctgcttcttcgtcctcgtccctgtactaactcttgccccattggttttctccgagatcttcttagaggggcatttcgaacgtggatgggaaagtacgtgggtcttgtctgattggtgcagagacgacggcaatgctggcaccgttaggcacactgccggtaattgggacggcgatcgtgaccatacaggtattcatacttagcatgatgccaagcattatgcgatttctgcatagattcctga

SEQ ID NO: 103946 - DNA, 416 bp, Arabidopsis thaliana columbia
aggacgcgtgggcggacgcgtgggcggacgcgtgggcggacgcgtggggtgatgttgagtatcggtgcttcgttggaggtctagcatgggccactgatgacagagctcttgagactgccttcgctcaatacggcgacgttattgattccaaggtctgttacacgccgagatcggactccgagtgatatcgatgatctcatcctcgacggatctgttccgatcttgtgtttctctgttacttgattcgattactctgttactattctcgttctttgttactactactactactactgttacttgtattttcccaaatcggtacgttcatcttcctgcttctgtgagcccggagatcgatcggatttttttgtattttgtatatttgttgtacatctaaatgcttttgttcagttttg

SEQ ID NO: 103947 - DNA, 376 bp, Arabidopsis thaliana columbia
ggaatcttctttgccttctaaagagagagcttttaagtcgaggaatgatgagccttctcagcgtgtggcttttaaatcgaggaatgatgatccttcgcaacgtgtggcttttaaatcgaggaatgatgagccttctcaccgtgtggcttttacatcgcggaacgatgagtcttctcaacgtgatcgacctctttacagtgcagattgggcttgtccgaaatgcgactttgtaaactttgccagaaatgaaagatgccgagagtgcaatgaactcgctgacagacgacctgttgctgctgttgtcaaggaaggtgactggctatgtcctgagtgtagtttcttaaacttcacaagaaaccagagctgtctgaaatgc

SEQ ID NO: 103948 - DNA, 399 bp, Arabidopsis thaliana columbia
cttataacataataatcctctaagttctcctctctattgaaaacccagaacaaaagttgagaacttttcagatttcagatgggcaagacgaaactgttgactggtgggtcaagcaaaactcatggtaatggtagtagctacagagatcctctgttgcagaatcaggaggataaaccgaaagcgaatggaagcgagaatggtttgaatgatcttgagcatggtgtacttgaggcggcaaatgttggatttggcagagtcattgcgttggcaaagcccgatgcgggaaaattagtgattggcaccattgctttgttgataggttcaacaactaatctccttgttccaaagtttggtgggatgattatagacattgtatccagagatgtcaagacgcctgag

SEQ ID NO: 103949 - DNA, 406 bp, Arabidopsis thaliana columbia
atctagacaagtatgcacattcgctcaagttgatagttaacgcgtcaatctctgggaaaacaaataacattgacgtttgctttcaccggaatttgtcgcgtggaattggaatgtgccctcatagtcgatgggagaaagcctctaaaggttcatgggttcagacaatgtcacccttcgaccataaaatccttgatgttagagtacctagctctaacaaggtctcattggaagtgtctgctgtagaagaattatttatgcatcgcatagtattcttactccttggtgctgtattactggcttcggcttctacactgagccaatctttagcgttttactacagtagtgcaatggctgttggtattatccttgtcgtgctgcttgttctctttcagggaatgaagcttct

SEQ ID NO: 103950 - DNA, 260 bp, Arabidopsis thaliana columbia
acatccgaagccatcaaacatatatccatagaagcttcatcgatatggggaatcaagcagctgctgcagcattcttccttttcgctttagccgtcttctccaacttggcgctctcagcttcatcacttgtcagtggcaagatctcttgccttgactgccaccgcgatttcgacttctcaggcattaaggtcctccttaaatgcgactgagagatgagggatctaaccgcggtggcagctgcagacggatggttccggtca

SEQ ID NO: 103951 - DNA, 405 bp, Arabidopsis thaliana columbia
accacgcgtccgatttatacaatatttatattttagttttgtatcctggcctgagaattgctggtcacgtagaaaatccctcagagatctgtaaacaaagtagaatagttgtccattagcgttttatcagtcctacggcaaggaagcttaatccgtcattcctcattgcctcttccatttttttaatgtttttatatgatcttgaaggtgtggtgctaggcagtcaggagatctagactcttctaatgaagaagcacttgacggaatacttggatttgggaaagctaattcttccatgatttcccagctggcctcatcagggagagtgaaaaagatatttgctcattgcttagatggaagaaatggaggtggtatatttgctattggacgtgttgtgcaaccaaa

SEQ ID NO: 103952 - DNA, 385 bp, Arabidopsis thaliana columbia
gatttgactcgtgagcatcaccagttttttctttatcagatgcttcgtgctttgaagtatatgcatacagctaatgtttaccatcgtgatcttaaacccaagaacatactggcaaatgcaaactgcaagttgaaagtctgtgactttggacttgcaagagtgtcgtttaatgatacacctacgacagtcttttggacggattatgttgccacaagatggtacagggcacctgagctctgtggatcattctgttctaagtatactccagcaattgacatttggagcattggctgcatcttcgctgaggtattaacagggaagcctttgtttccaggaaaaagtgttgtccatcagttagacttgattaccgatcttcttggcacac

SEQ ID NO: 103953 - DNA, 307 bp, Arabidopsis thaliana columbia
gtgataagctctgaagcaaacacacaggtcaaaatcgaggtaaagcatcggtggctccattgatcgaaccaattccacaatccatccttgggaatctcattggttgccactttagtcgtcaaatgattcgtaagctctgttcttcactctctcgctcaatcaccctctccaacatcttcatcttcatccccagctcctttcctcaatcattccgtcactcatccgctcactcgtatgctcccttgaaaacgaccgtgacccatatcgcaggaaatactacatcgtcccctatctaatctcccatcaa

SEQ ID NO: 103954 - DNA, 398 bp, Arabidopsis thaliana columbia
ttttcttctctgttgtttcgtgccctgagaaaccttgaagcagccatggctcccaaatcgaaagaaaaccccaaaacctcgactccagcaatcgaagatctcttcacttccctccacaaacatatcaaggatactaaatatgaagaagccgtcaaggtcgctgatcaagttttgtcgattgtacctaccgatgaggatgcgatccgatgcaaagttgtggctctgataaaagacgataagttcgatgattatctaatcaaagacgttaagatcaatggtgctctctccgtcattaactcgtttccaatcgatctaggttttcacaaggtatagtaattttgctaagatttgaaagttttttggggtctaatggatgtttctcttgataggcgtattgt

SEQ ID NO: 103955 - DNA, 308 bp, Arabidopsis thaliana columbia
aaattatagagatttaagagccatcgatgtgtgtgtgatcttcaatgggtttatgcttagctcaattggctgtaacatgtttgttcctagtaccttttgttctgtctcaagttacagagtttgtaagtatagattgtggttgctcaagtaactacacagacccaagaactggactaggatgggtttcagattcagagatcatcaaacagggcaagccagtaactttggccaataccaattggaactcgatgcaataccgtaagagaagagatttcccaactgacaataagaagtattgttacagactc

SEQ ID NO: 103956 - DNA, 155 bp, Arabidopsis thaliana columbia
ctcgaacccgaaagaaaaacaaaaatggctgccatagcttctactctctctctttcttcaggcagacctcaaagacttttcgattcttccttccatgggtcagccatctccgcagctcgtaactccatcggtctcaaagtacgatctttctccgt

SEQ ID NO: 103957 - DNA, 184 bp, Arabidopsis thaliana columbia
cggacgcgtgggcggacgcgtggggtcgatatcggcggtgacgatgcggcggcgttaccattctcatcgggaacaacagggttaccaaaaggagttgttttgacacacaagagcttaatcacaagcgttgcacaacaagtagatggagataacccaaatctttacctcaaatcaaacgacgtca

SEQ ID NO: 103958 - DNA, 316 bp, Arabidopsis thaliana columbia
cgtgaatagagagatcactgtacttactgggttctgatcgttgctggctccactgagtccaagagtaatggtgaaggtggatttgaagaacaagccatggcaacaggaccaaccattgcacaatagatcgcatccggagataccaccagtagcagacgtcaaggctggagagtttttccgggtagaaatgattgatgcagtgggaggtgttaacatagacaatgactctgcacgcgacatcagtaacctactcctaagtactactcatcacctaagtgggccgattacggttgtacatgacgaaggtgttgcagct

SEQ ID NO: 103959 - DNA, 378 bp, Arabidopsis thaliana columbia
gcttctctgggtttagtttttaaccaatgtgcactagaaaaaaagttaatctttaggatatgttcttttagtttcatgatgaaaaattgaagcttcatagtataatgatccttaaagcctgggatctgtgtttgtgaaccatctgggtttgtggaaagttcgtagctttcgaggatttatctattggctaaaaagatggattcttcttactcctttgccttggggacaagtagttctattttgccaaaactcagtttcaggaatgtagagaacagattttatggtgagaagaacaacaacaatggtttgtgtaaacgttttggatcagatttgggctccaagaagtttaggaatcaaaagttcaagcacggtgttgtt

SEQ ID NO: 103960 - DNA, 112 bp, Arabidopsis thaliana columbia
cagacacgtgggctccaccaactttttcttgttcattcgctcgccaccacagaaaaatggtaaacctaactttgtcccctcaactcactgattgaactgcttgattttcgat

SEQ ID NO: 103961 - DNA, 295 bp, Arabidopsis thaliana columbia
cctttctatggggaggatgcgtcgtggaatcaatcgtcctctatgaacagtgatcttgacttcctacctgaacgaagtgtctcagcaacggagacttcagctgaggttcgacacggaattgcaatcaaatgtggcgctaaggtggagtacaaaccaagtttacgttcgaggacaggtttgcggttcacagttgaggcttggatttctactcaaaaaattggagaagggattggcaaagcgataacagaacacctgcatcaggctgctgaagcttctatagaggatttaccatgat

SEQ ID NO: 103962 - DNA, 381 bp, Arabidopsis thaliana columbia
accacgcgtccggggaatgcaagcttggtgattgcttttaatatgttagaagatctggttgtgaaaatggatagatcatctatcgttagcagccatgggaagatttttgatcagtgcttagttgcccttgatattcgacgtctaaatccagcagcaattcagaacattgatgatgctgagagaagtgtaactagcgcaatggttgctctcacaaagaagctaacggagtccgagttcagacctctctttattaggagtattgattgggcagagtcagatgttgttgacggatcagggagtgaaaacaagagcatcgaccgagctatatctttctatggtctggtggatcgactctgtgagagtcacaggtccatctttgta

SEQ ID NO: 103963 - DNA, 404 bp, Arabidopsis thaliana columbia
cccacacgtccgcggacgcgtgggatacttttactagttttagacttaataaatgcgatcgccctttttttagtatgttgaacctcattgctttcctccgccgtcgtctccgccgtccccggaaagccagaatctccgtcaaccaccaccacctctcagttgattcttctcctgagactcatcatcatcaaaatggcttttcatcggcagccgccatccacccaaacccggacaaaaccatcacagtggccacctttaacgctgctatgttctccatggctcccgccgtccctagcaacaagggcttgccattccggtccaagtctacggttgaccgccccaagagcattctcaagcccatgaacgccgccgcatctcctactcacgactctagaaagcaacag

SEQ ID NO: 103964 - DNA, 293 bp, Arabidopsis thaliana columbia
accacgcgtccgagagtgtgttgttggccatgggatgcacggcctccaagctcgacagtgaggatgctgtccgtcgctgcaaggagcggcgccgtcttatgaaggacgccgtctacgctcgtcaccatctcgccgccgctcactctgactactgccgctcccttcgtctcactggctctgccctctcctccttcgccgccggcgagcccctctccgtctccgagaatactcccgctgtttttctcggcccttcctcaattcaggacgcgccacgtgtcccttcttcccattcc

SEQ ID NO: 103965 - DNA, 356 bp, Arabidopsis thaliana columbia
gtcagattctctctctatctatctctctcaatctccatctgcccatatttcttgctgtcaacaaattcattcagcaatctcctttttccccatcaacaacaaacaaaaaataaagtcctttcacaacaattatatttagaacaaattcaccaaaaacccttccacaaaaaacctctcttcttcaacaatgtcgtctcgaaaccaaagatcaagaatcacctctagtttcttcgtctccttcttcactagaaccattcttcttcttctcattcttcttcttggtttctgcaatggagcaagaacaaacacgaacgtcttcaactcgaaaccacacaagaagcacaacgacgccgttt

SEQ ID NO: 103966 - DNA, 379 bp, Arabidopsis thaliana columbia
cggacgcgtgggttgcaacctagggggctcgcagagactttatgtggttcaccattgtatatggccccagagatcatgcaactccagaagtatgatgcaaaggcagatctctggagtgttggtgctattttatttcaacttgtgacaggcagaaccccttttacaggaaacagccaaattcagttgctccaaaacattataagatcaaccgaattacattttccaggggactgtagagatttaagcttggactgcatagacctgtgtcagaagttactgcgccgtaatccagtggaacgtttgacatttgaagagttctttaatcaccctttcctttcggacaggcagtcatatgatttctccaggagtagattggggt

SEQ ID NO: 103967 - DNA, 336 bp, Arabidopsis thaliana columbia
accacgcgtccgggaaggagcaaagtagaggatttaacaatggcgtctctttctctcagttctgctcatttctcttcaacttcttcttcatctccctccgccgccgtctctccttctccgtcattccccgtcggacttctcgctccttctccacttccaattctcagattaggtgttcgataaatgagccgttgaaggtgatgatttcgggtgcaccggcttcaggaaaaggcactcaatgtgagctcattgttcacaagtttggtttggtgcacatatcaacaggggatctattgagagcagaggtgtcatctgggacagatattggaaagagag

SEQ ID NO: 103968 - DNA, 263 bp, Arabidopsis thaliana columbia
gtaaaatcagtgttcttccgagagtttgttcttcctagcatacaatgttttacaaacgccattgacgaccacgacaggagccaagcctcagtttttgacaactcgagtatctctgagaaaaagctccttggtcgcttcaacacttgtctttccctattatcgacctacgcagtaaataagattacttattgctatcttttagctgatgcaatctcgcgcattgtcgcgcctgagaagttactacaagagatcatcggtatttc

SEQ ID NO: 103969 - DNA, 242 bp, Arabidopsis thaliana columbia
gcttgaaacaatggagtaccggaaaatcaaagatgaggacgatcatgacgttgcttctgatatcgagagtgtgaaaggaaaatctcataccgttgcttcgagtaacattgcaatggctactctgggtgttggatccagtgaacggatcaactggaaacgaaagggtgtagtaacatgtgcactgacgattctgacgagttctcaagcgatacgtatcgtgtggtcgaaacgagctgggaagt

SEQ ID NO: 103970 - DNA, 167 bp, Arabidopsis thaliana columbia
ttcccaggggattagggttaaaagaaccatttttattctcgtcgcgcaacaacaaatccagatcgaaaaaggaagaagagatcgaaatggcgttgaaaagggtttacagtgaaatcagagggaacaaggtgacggaccttccaggctatatcaaatcgactttttca

SEQ ID NO: 103971 - DNA, 280 bp, Arabidopsis thaliana columbia
atcaatatcaaaaacaatcagatttcttctaccaaacgattaattgccttttgggatacgattcagggcttcttttggggcctctgtttgatttaacaccttgtttgctgcaaaccaatatatcaaaggaaacgatggtgtcggacaatgagatgggtctggtattagctgtgtcgtccagcgtcttcataggttccagcttcattttgaataacaaaggtctcaaacacgctgctgctaatggcacccgctctggtttcggacgttatacatatttgtt

SEQ ID NO: 103972 - DNA, 272 bp, Arabidopsis thaliana columbia
cggacgcgtccgcccacgcgtccgtcggtctgttattcctggtataacaaagctactacggtacacacctggattacggaagctaacaattcacactgtgaaatgcagcagcatatcggtcggtatctttaccatgaaacctcttttactctccttcacatatatgatcatagtaactatgacaaaatagtgtttatccaggaaccatgatgaagttttttgacactctttttgtatacaagttattagtttgcatgatgaaatccattttt

SEQ ID NO: 103973 - DNA, 399 bp, Arabidopsis thaliana columbia
aggacgcgtgggtggatatttaaaagaacgggccgtcaccttttcttgaaggatgaagaagagggaaaaccaccattgcttcgacgcatggtggaagataccgatgattgtcatttcatatctgcactgcgagccttcaaaaggcgggtggcttattcaaatgtgggccatgatcacgttgttggctggaagacggcatccattagacgtgacagtgaattgcctaagtgggaagattctctgaatgagaagtatcctcatattgtttacgaagaactctgcaaggcatgtgatatggaggacataccagaaggcgagaatcattcagacgacatagaagaagaaatgatcaaaggcctctcctctgtctcatgggaaaaagttgatgttagctttcac

SEQ ID NO: 103974 - DNA, 372 bp, Arabidopsis thaliana columbia
accacgcgtccgaattatctggatctgcatatggtagtttagactctcctaagctaacttttcggaaaggtgtgaatctaagagctggtttcaacaaaattgcgatactaagcattgctgttggtctcccgaatgtgggtccacattttgagacatggaatgctggagttttgggtccagtttcattgaacggtctcaatgggggacggagagatctatcatggcagaaatggacttataaggttggtcttaaaggagagtctctgctccagctggagattcgccattggctgtagacatgggaagcatgggaaaaggtcaaatatggataaatgggcagagcctgggacgtcactggcctgcatataaagc

SEQ ID NO: 103975 - DNA, 133 bp, Arabidopsis thaliana columbia
tatttccgtaaattgggtgctgttcggaataagcaggatgatcctgaaggaaacagatgggcaaagagcttgaaaggacagacaggtgttaaggttttcatgtctaagaaatcggtttcaaagatgatgatta

SEQ ID NO: 103976 - DNA, 226 bp, Arabidopsis thaliana columbia
accacgcgtccggttggacaacaacggacccatctacttttctcattcgaggaaaaacttatcttgatgaccagaagaaggtcaaggcaaagggtacactgatggaaatggtagctgcagactggctaaaatctgacaagcgggaagatgatttggggtcccgtccaggaagcatagttcagaaatatgcagcaaaaggtggaccagagttctttttcatcgtgaa

SEQ ID NO: 103977 - DNA, 327 bp, Arabidopsis thaliana columbia
attgttatttctctctctctctccttgtagatggaacttaagggcgttacttgtttgcttctttctttggttttgcttaattcgtgtgtggaatgtgttttgggggatggatctgtggtgggtcctgcgaggtttagagacgatgattgtaggtggggccggaggaggtttggggcacggtggtggtgttggtggagggcatggaggaggcgtcggcattgggattggaattggaataggtgttggggtaggtggaggctctggtcaaggttccggcagcggaagcggtagtggtggcggcggcggtcgccattaatcaaagctctt

SEQ ID NO: 103978 - DNA, 150 bp, Arabidopsis thaliana columbia
aagaaacgagacagcgatcaactatcagagaagtgcgctctctcttactctcatcgattttccagaagagcagccatctccacattacagagttcgttcacaatcccaggttatcattttccagagtttgaaggtgtgttcctgtccctg

SEQ ID NO: 103979 - DNA, 280 bp, Arabidopsis thaliana columbia
gactccggcggagatgaagagtgtgttgcgtattgcggcggcgatattctggctttggctgtttatcgtgttaggtgtgattgggagtgggaatgtgagagatacagacgatgagatctcgttactcgaaagtcaattggtggtgacatctccgtcgcagcttcttatggtgcctctcactttgattcaggctgctgcctccaaaggagctgtgtgcctgtatggaacactacctggttatcagctacaccctgggtctggatcaagagctaagcggtgg

SEQ ID NO: 103980 - DNA, 343 bp, Arabidopsis thaliana columbia
cgaaaactggaagctgagtgtgccgacgccgttgccggattctttatacataagcggcggcgatgaagcgaatccggaggatctgtattcgtctccggtctctgtacgtatcgcttgggtgattttactcacgctttgtaaaatcgacggtaaagctcagccgtataaagacgttgctttgtcttatctcttcctcgctaacaatctccaatacgtcgtcgttaaagtccgatcgtcgactctgaaggttcttctcggagacgattgggtgtttaggcatgaagagaaggtgaagctgtatgctgataagtttgagaagcttgcgtgggggaaagtgctggat

SEQ ID NO: 103981 - DNA, 399 bp, Arabidopsis thaliana columbia
aactaacaaatctgattcttctttccttgtaaataaagatatggatctgttactaaaacaaagtcgctttattcagatctgaagaagaagaagaagaagaaacatagttgaagtctctgttaagatgtcttcaacaacaacagattctacagaattgcaaaatctgatcaaactgtttcaaaattgccaaactcatcctcgtcaacattttcctgcaaaatcttcagctgtattactttgtctataccaagaacaaagagaagacaaaaacgagctacgcgtaatcttaaccaaacgatctactactctctcttctcatcctggggaagtagcattgcctggaggaaaaagagagcaagaggataaagatgatatagctactgcgttgagagaagctcg

SEQ ID NO: 103982 - DNA, 362 bp, Arabidopsis thaliana columbia
agcaactgttacaaactgaaccaagacgcacaagcgagtctcgtgggtcatgctcgaatcaaaagtcagttaatggctaatgcttctgcaaaacgttattatcggggatttgttccggagcctctggttggtatctgttacccggccactgaaataccgagttggttctgccaccaaagactaggacgttcactagaaatcccattgcctccgcactggtgtgatattaactttgttggacttgcgttatctgtagttgtctcattcaaggactatgaagacagtgcgaaacgtttctcggtaaagtgttgtggcaacttcgagaacaaagacagttccttcacgagatttgatttcactct

SEQ ID NO: 103983 - DNA, 382 bp, Arabidopsis thaliana columbia
gtgaatacgttgtctgttggtggagcaagttctaccacaccgtcaaaatccacgaaatctgctactaccaattccagtgtacaatctcagtcacatagggcatctcttttggatactatcttacaaggggagcttccatgcgaccttgtgaagtcgaattctacatataatgttctggcactgttacgtgtattatagggtttaaatcagctttgccctcgtttaagagcccaaactctttccgatcgttttgcaaagggtaaaattacaagtctagatgatctgagtacaactgctgctaaggttcctcttgatgaatttgtcaatagcaaacttacacccaaattggctcgacaaatccaggatgcgcttgctttgtgca

SEQ ID NO: 103984 - DNA, 375 bp, Arabidopsis thaliana columbia
aggacgcgtgggcggacgcgtgggcggacgcgtgggtgttgaccatacgtgtgggcatcccaatggtgcacacactccttcccctacaactaatcatttaatgggttcagtccctaaagttggaggcttcccaccattaggtgctcacggtccatttcagccaacaccagctcctcttacaacatctcttgcaggatggatgcctaatccatcggtacaacaccctactgtttccgctgggcctatcggcttaggtgcccccaacagtgctgtgtctatgttaaagcgtgagcgtcccaggagtcctccaactaatagcctatcaatggattatcagacggcagattctgaaagtgtgttgaagagaccagacct

SEQ ID NO: 103985 - DNA, 369 bp, Arabidopsis thaliana columbia
tttattgctttttctctcactctctgacctgaaatctcctactgagatttttgaagtgtattcaacaatggcggatccaccacatttctctctgtttcagcaaaaatttcgtaccggagacaaaccatttctcactcttgatgctgacttcttaatgaatcacacgaaagtgttactaaaatcggatgcttcagacaaagtttggaaagtgaaactggacggcggtaggctctccgaaggctgggaagagttcgcctgcgaccagaaattcagagacggtgacgttttggttttcaaacatcatggagacgaggtctttcatgtagctgtggtgtccccatctgtttccggcgacatacgtaacgcatc

SEQ ID NO: 103986 - DNA, 134 bp, Arabidopsis thaliana columbia
  unsure (1)..(134): unsure at all n locations
ntccgcaacaaaaccatccgatctggtaggaacattttaaacatctgttttttttctaagatcactctatatactcaatcaatatgatatacacatatgtgtccattttattaagcatgttggagatctttgtt

SEQ ID NO: 103987 - DNA, 254 bp, Arabidopsis thaliana columbia
cggacgcgtgggttcaatctcgtcggttgtcttcttgaagcagctactttgccgactcagttctacacagccttgctttacacagtgagcactgtactattggtgatccagactatttactacgattacatctacaaactttgtagacatacacgtaccaagatttgtcaaaaggatgaggaagatgaagagaagagaccattgagaacaccaaagacgatgggatctgctatttccatcccatcaggatctta

SEQ ID NO: 103988 - DNA, 148 bp, Arabidopsis thaliana columbia
accctctcagattttttctacacgctgatcaaaatccacaatccaattttcataaaaacatcatctttcgttgaatcttctttacacgctctgtttttcatcaatggcgtcaatgaagctttctattgtcatacctacacacatcaat

SEQ ID NO: 103989 - DNA, 350 bp, Arabidopsis thaliana columbia
ggcgaaaacgaagaatcacacggcgcacaatcagtctgccaaggcgcataagaacggaatcaagaagccaaggagacaccgtcacacaccaaccagaggaatggatcctaaattcctaagaaaccagaggtatgcaaggaagcacaacgtcaagagtggcgagaatgctggtgtcgaagagtagatcttttgatcgtctgattgacagtttaagttttttttatgaatttcacttgtttagacaaaggaaccaatgttctacaatcagggattatgtctatccagattctcttatatattttgcatgttacttgatttgatgcaattctttcacttgttcgtttatgttc

SEQ ID NO: 103990 - DNA, 406 bp, Arabidopsis thaliana columbia
cggacgcgtgggcggacgcgtgggtttcctctcccaacattgctaaagaaatgcatgttggtcatcttagatcaactatcattggtgacactctagctcgcatgctcgagtactcaaaggttgaagttcttcgcagaaaccatgttggtgactggggaacacagtttgggatgctaattgagtttctctttgagaaatttcctgatacagagagtgtgaccgagacagctattggagatcttcaggtgttttacagagaatcaaaattgaaatttgatttgaatcctgagtttaaggaaaaagcacaacaggctgtggtccgtcttcagggtggagatcctgtttaccgccaggcatgggctaagatttgcgaaatcagccgaaacgagtttgccaaggtttacaa

SEQ ID NO: 103991 - DNA, 383 bp, Arabidopsis thaliana columbia
atggtataacactgcttattcacttgagaagataaccaaattcaccattcaggagtggatgcagtcagcccctgatgtaaacctgcttctaccaacacctaatgtcttcattcctacggatttttcattaaaggatttaaaggataaggatatctttcctgttttgctgagaaagacatcatactcaagattgtggtataagcctgacacaaagttcttcaaaccaaaggcatacgttaagatggattttaactgcccccttgcagtcagctctcccgacgctgcggttctttcagatatttttgtttggttgctagtggactatttgaatgaatatgcttattatgctcaggctgctggtcttgactatggattaagtcttt

SEQ ID NO: 103992 - DNA, 379 bp, Arabidopsis thaliana columbia
cttctcacaaagaacaacaacaaccaaaaaaaaaagatatcattattttcttcttctcttctttcttcttcaaggaaccctccaagagaacatacacagagaaacctaattccttgtctgctcataacttcacaagtagctttacctttgtcttaatgctgggttcttctttgtcctcctgtctcttcttcttcttcttctactacttcctctgagacacaaaacagaggagataacagagtggagattttcaagaattggtaatgagaagaatcttaaagttccaaagtttttcagagtcaacaaccttctgaggccagagttaagaagacaaagaagtagaagaagaagatgtcggcgaagcttttgtataacttgt

SEQ ID NO: 103993 - DNA, 147 bp, Arabidopsis thaliana columbia
cgaatcacgaatccgggcatcaacggatcatcaagaagctacttaaagaagatattccaatgatgatatggaatccttatggacgattgattgccaggagccccgaagctcaaaacccttttccgcatctaaaatgagtcctcttca

SEQ ID NO: 103994 - DNA, 365 bp, Arabidopsis thaliana columbia
ctcatggtgaaagcaccaaaccaaggttgcccagaattaattctgctgagtccatggagttatgggctagccaacagaagggaaataagctctatcttgttttgattagtcttcatggtctcatacgtggtgaaaacatggagctcggccgcgactctgacaccggtggacaggttaaatatgttgtggaacttgcacgtgcactgggttcaatgccaggagtttatagggttgacttgcttactagacaagtgtcttcaccagatgttgactatagttatggtgaacctacggaaatgctgactcctagagattctgaagatttctcggatgagatgggggagagtagcggtgcttatattgtg

SEQ ID NO: 103995 - DNA, 381 bp, Arabidopsis thaliana columbia
cccacgcgtccggaaaagagtaaaaaagcacatggcctcattaccattggggcctcagcctcatgctcttgctccgccgctgcagcttcacgacggcgacgctttgaaacgccgtcctgaattggattctgataaggaaatgtctgcaactgttattgagggaaatgacgctgttactggtcatatcatttccactactattggaggcaaaaacggcgaaccaaagcagaccattagttacatggctgagcgggttgttggaacaggttcattcgggattgtttttcaggcgaaatgcttggaaactggagaatcagtagccattaaaaaggtcttgcaagatcgacgctataaaaaccgtgagttgcaactaatgcgacc

SEQ ID NO: 103996 - DNA, 378 bp, Arabidopsis thaliana columbia
gccggtgagacagaataagagagaatttcaaatatcgaagaaatttgggatcttgctgagcagtacaagtaattggattttgaaaatcagtctcactggattcgccgtccgttcgccgtttaaaaatgtctagccgccatgacaaagagaaaggcgtcaatgttcaagtcctcctccgatgcaggccatttagcgatgatgaattgagaagcaatgcgcctcaggttctcacttgtaatgatttgcaaagagaagttgctgtttcccaaaacatcgctgggaagcatattgatagggttttcacttttgataaggtgtttggaccatcagcacaacagaaggatttgtatgatcaagccgttgttccaattgtgaatg

SEQ ID NO: 103997 - DNA, 394 bp, Arabidopsis thaliana columbia
ggagagacgagagctcgtcgaaccagatctctttctctttcttctctctaattttgatttttttgaattttcttctgcaaagcaaaatcgcagaagtcgtcgtgtgtccgcgttgcatcgaaccacttgttcgattctctttcgtcatcctctcttatatcatcagcaacaacaacccttgtttcaaatttcttcatttccgccggatttataatcgcagattgattctgatcgatagagatagggttattcaaggagagacctcgattgacttcaattgtcttcctgattcgatagataagatttagggttagcttgacgttgacgttgatataggggaatggagacggacaatgggaaggggttgatactagctgtagcgtcaagtgttttc

SEQ ID NO: 103998 - DNA, 412 bp, Arabidopsis thaliana columbia
ctgaatctctctctcttctgcgtctcgccaaatttatttcccgattcaatttgtagggtttctgcagaagaaggaaaccaccattaaaccctaagtacgtcacctttcaagctccttcttctgtaggttttttctgttcttctgattcatgtttacaaagttttttttatgtctcttctaacttcttctccttctcgccgcgtaatcagtccttattgttcttcataatcgcagtaccaatcgcaatcgttttcttcctctctcgatctgttcctcggacgagaaaactggacaacaaacctatgccgtcgacgccgctggctaacggtggtacgcctcctatgggtggcggagagagaacgacggttacaacttccacggtggcggatgataagcctggagtttcgatgat

SEQ ID NO: 103999 - DNA, 263 bp, Arabidopsis thaliana columbia
aggacctttgatccttaagtttttggtttactgtcctgagaaagtagtgtttctgaaatcagttgatgcatcagagatattagattctgaggataagttgtatgagttacttaaggaggtagttgaagagataggtgatactaatgttgttcaagttattaccaaatgtgaagatcattacgcagctgctgggaaaaagttgatggatgtgtatccttctctatactgggttccttgtgctgcacattgcatagacaagatgc

SEQ ID NO: 104000 - DNA, 425 bp, Arabidopsis thaliana columbia
aagagattctagagaagatcgagaacggcgaattctccgatggagcgcttcgtaattttcaggtgattcgtttggagaaagagttagtttcacaattggcgacgaggcttggtgaaatctccggtttggtggagactcggatcggtggtggaggcgttgttcttgatctcggagatttgaaatggttagtggaacatccggcggcaaacggtggagctgtggtggagatgaggaagcttctggagagatataaaggaaggttatgtttcattggtacagctacttgtgagacttatcttcgatgtcaagtttattatccatcaatggagaatgattgggatcttcaagctattccgatcgccgccaaatcttctcttccggcgatattcccaaggcttgggagcaataacaataacaacgctatg

SEQ ID NO: 104001 - DNA, 322 bp, Arabidopsis thaliana columbia
cacacgcgtccgggcgaatccttttttttctcttttcttcatttccttttgcttcatttcgaatcaaattcaattttatatgtgagattttcattcttattcatatgagtttttgttagatttcttccagttggtgaatcgtggtactcatttcttctcatgtgccatggatattgaaattagggtttttttttacgtctagagtcaattgggtttgtgatttattggggtttactcgaaattgccgttattgggtttcttaaagtcttcgtcttttgatgttcttcatcagttcaaatttacgatttttgtgagggttttg

SEQ ID NO: 104002 - DNA, 334 bp, Arabidopsis thaliana columbia
gtttttcttctccgacgctacaatcggtgtctgtttccgaagttgttcgttccattagagcttcagatttcgtcgtttggtaatttcaagttagagctacttaatcttttgatctgtcaaaccaatttctcagataaattcactctagggtttgtgaagaacgatgatatgatcacatttcacaatgcaaacggtgctaagcttatagtaaattaatggtggcttgatgcttaattgaaaagtcggaaacttttttattcttctttattgtttgagattcatttcaatggttgacatgtatgccaagtgtttgttaaaatgtctaaaagaaaac

SEQ ID NO: 104003 - DNA, 373 bp, Arabidopsis thaliana columbia
tgttttacactcgattgtcttttcaaataggtggccaagctgtatgaaagacgtgtggatacctgtgcaaattacccagaatactggattcgttatgtgacaaacatggaatcaactggcagtgccgaccttgcagaaaatgcccgtgctcgagcatctcaagtctttgtcacaaaacaaccagagattcacctatttgctgctcgattaaaagagcagcatggagatatagctggtgctatagctgcatatcaattagtgcactctgaaatttctcctggacttcttgaagcagtagtcaagcatgcaaatatggaataccgactaggtaagctggatgatgctttctctttgtatgagcaagtgattgctg

SEQ ID NO: 104004 - DNA, 381 bp, Arabidopsis thaliana columbia
gagagattggaccgtgagagggcacagagggaggcagagatggaaaaagcccatcagagggagaaagacgagagacaatgacagcacagcagaactgaaagagaaagggaaagattggtggctagacaggcggtacagatggctacaacggaagcacgcgaaagagcagccacggaagctcatgcgacagttcaaagagctgctgttggaaacgctaccgatgcccgagagcgcgccgaaagagcagcagttcaaagagcgcatgctgaagcacgtgaaacggcagctgcaagggcaagagataacgcggcgaaagctgcggcagaagctatagaaaaggctgagaaagctgcagcagaagctaaagaaagggcgaatgct

SEQ ID NO: 104005 - DNA, 134 bp, Arabidopsis thaliana columbia
gaagtttgatttatttagacagatgagttagaaaaagcatggtcggtatagatttgttcaaatgtgtaatgatgataatggtgttggttgtcacgtgtggtgaagctgtttctggagcgaagttcgatgagctt

SEQ ID NO: 104006 - DNA, 170 bp, Arabidopsis thaliana columbia
cccacgcgtctggtcgacttctctttgctgtcgtgaaaccttaatactttggattacgacgaacgtaacttgatctttacaaacttagtagtaggaccgttatatttactcttttggtgagactagtctccattatcctgtgtttcttgacatggaatcaaggagtcttt

SEQ ID NO: 104007 - DNA, 262 bp, Arabidopsis thaliana columbia
cccacgcgtccgatacaacgctagaacaatcccaatttctcctcgtcagagatttcaaagtaaaaccctagaactaaccattatatatattataatacaaatatattcatctctccctctccctgtgtcttactctgtcatctcttcgaactgatctgacatttttgactctgcttctcatctcatcttctcccaaggtagagatggcacttgaatcaaatgctccagtggtggactcagtcactagtggcaattcttttgt

SEQ ID NO: 104008 - DNA, 285 bp, Arabidopsis thaliana columbia
cacgaagcttcaataatagtgttgctgatcagcacgcggttcaagagactgttgcacgagttaagccatcgatcaatgagaccacgaccaaggaggagaaatccttctttaatttggataacgagaatggcgtagaggatactccaagactgatagatacgaaggacaacgtttttagaatgtccaatccaaaatccaagtaccctgtactgcagctagatttaaagctgatatcagatttggtcatcatcattgttgctgctacttgtggtggaattgcctttg

SEQ ID NO: 104009 - DNA, 398 bp, Arabidopsis thaliana columbia
agaagaaaaaaaattggaagaaactagcataatgactaataaaacgtttgagtcattgtcattatctgataacacttataaatctatcaaggagatgggttttgcacgcatgactcagatacaagctaaagcaattccaccattgatgatgggagaagatgtacttggagctgccaggaccggttctggtaaaaccttagcttttcttattcctgctgttgagcttctttaccgtgttaagtttactcctcgcaatggaactggtgttcttgttatttgcccaacaagagagcttgctattcagtcttatggagtggcaaaagaacttcttaagtatcattcacagactgtgggaaaagttattggcggtgagaaaagaaagacagaagctgagattc

SEQ ID NO: 104010 - DNA, 388 bp, Arabidopsis thaliana columbia
caagaagacaaaaacacagagagagaaagagagagaaatggcgacgacaacaacagaagcaacgaagacatcatcgaccaatggagaagatcagaagcagtctcagaatcttcgacatcaagaagttggtcacaagagtctcttacagagcgatgatctctaccaggtctgtttttttgttttactcaaaaactctgcttttcaattcaatttcagcaatctaaatctcaattaagaaaatcaacacagtatatactggagacaagtgtgtatcctagagaaccagaatcaatgaaggaactcagggaagtgacagcaaaacattcatggaacataatgaccacatcagctgatgaaggacagttcttaaacatgcttatcaagctcg

SEQ ID NO: 104011 - DNA, 418 bp, Arabidopsis thaliana columbia
caaatcttaaacgttttactttgtgctgcactactcaacctcaatggccgcctcaacaatggctctctcctcccctgccttcgccggtaaggccgtcaagctttcccccgcggcatctgaagtccttggaagcggccgtgtgacaatgaggaagactgttgccaagccaaagggcccatcaggcagcccatggtacggatctgaccgtgtcaagtacttgggtccattctctggcgaatcaccgagctaccttaccggagagttccccggagactacggatgggacaccgccggactttcagctgaccccgagacattcgcaaggaaccgtgaactagaagttatccacagcaggtgggccatgctcggagccctaagctgcgtcttccctgagcttttggctagaaacggagtcaag

SEQ ID NO: 104012 - DNA, 393 bp, Arabidopsis thaliana columbia
gtttcaggatttcttctcaagaagtatctagtgatgttaccgttcatgtaggagaagcttcgttttcactgcacaagtttccactcatgtcaaaatgtgggtttatcaagaaacttgtgtcggaatcaagcaaagattcagattccactgttatcaagataccagatattccaggaggctctgaagcatttgagctagcggctaagttctgctacggcattaactttgatatgagcacagagaacattgccatgttgcgatgtgcagcggagtatctagagatgacagaggaacactctgtggaaaatctcgttgtaagagccgaagcttacttgaatgaagtagctctcaagagcttatcgagttcgatcacagtcttgcacaaatcagaga

SEQ ID NO: 104013 - DNA, 327 bp, Arabidopsis thaliana columbia
gcccgacgtttggtgcctcgttgattaagagagtgttgaatgattttgtcccagatgagttttgccctgacccagttcctgatgctgtactgaaatctcttgaatccgaggaagaagctgagaagagtatcatcacaagctatccaggcactgcaccttctccagtgtactgtccaccttcacggacgtcactctccaccatcattgcaaacgttggacagccgcatgcgccgcagttaagcacaatcaggtcctcacttatacgataagcgtacacaatcgatgacgatcttgatgagctgagttcagcgttggctgttgttgttc

SEQ ID NO: 104014 - DNA, 414 bp, Arabidopsis thaliana columbia
  unsure (1)..(414): unsure at all n locations
cccacgcgtccgcccacgcgtccgtaagagcgtctcaatttcagtgtttcatcgaatatgctgagggtttcgacaatctgagattcttctccttgtgttcatgtccaaaggagattcctttcttcattctccttaccttcttaacaaacccttctctcttattatctaattcgcttttgtagctctatacgcaattagcaaatttggagaaatctcgattatagcaattttcttcagtctccatgtacttttcctctgtattactctaattcaaatgtataagatgtgccatgaacctaccaacatctcttcatcggagtctgattttacattccttgaggaagaccatctcnccttgacgtcacggcggagtttattgctatcgagtgaaagagtctctcaacgtatcgctgc

SEQ ID NO: 104015 - DNA, 290 bp, Arabidopsis thaliana columbia
cccacgcgtccgatcaatcaatcggaaaaaggagataggtttcgcgaaaatggcggcgaaaaaggatagtgtgccaccggaatacgatgtgaatgctaagtgggacgcatgtctcgatctcactgtccgccgcttcgtttactcttccctcggcggcgcatttgccggtcgtctgttcttcaggagtcctgttacaagatgggcatcgattgctttaggtgctggaattggtattggctctgcatattcagattgtactcgtgcttttgattcagcttcttcatcttcag

SEQ ID NO: 104016 - DNA, 324 bp, Arabidopsis thaliana columbia
cggacgcgtggggcaattccggatcctttttatggacttgaaaatgaagcgatcacagatattgccgattccggaagggactactacactttctggttcttcactaaattccaatgtcaaaggttattgaatcaatacgtgcatttgaatttccgtgccatcaactactctgcacaagtgtttgtaaatggccacaagacagagcttcccaaagggatgtttcgcagacatacacttgacgtcactgatattctccatcctgagagcaatttacttgctcttattgttcatcccccagatcatcctgggactatacctcccgag

SEQ ID NO: 104017 - DNA, 269 bp, Arabidopsis thaliana columbia
cgtcatccaattctttacaaagagctagatacacacaaactttaacagttatacttatgaaatgaactcatgaattgattatcatcaattctaaactttgtatttattgtttcaacttcagaccacatgaagtcatggagattcatcatcaactcttagtctctctcctcttcgtcctccttcccctatgctcctcccaagaaaacaccagaagcttggccattgatgtcaatggtcgagtcgaaacttctcctatctccgagaaacta

SEQ ID NO: 104018 - DNA, 265 bp, Arabidopsis thaliana columbia
gataatgaagcgtccgttttccatcatacactgggaagcacttgcattgttgctgatagggattagtataaatcacctgcgttctcttcctgaaggagctacaactgtggctgttccaactgctaacggtgcatacatatgtacctttatctttgttactgtcccatctttggcatctgtctacaactagtatgctctaaagagtcactatgacacatgcatttatctccagaacttatttctttatggttatggtgcgatattc

SEQ ID NO: 104019 - DNA, 424 bp, Arabidopsis thaliana columbia
cccacgcgtccgcccacgcgtccggcacggatgggcaaaacaaacaggatgtggagacagctatctccatggtggaagctctagctgtgaagttaactcagaatgaaggtgaattgattcaggagaagtttgaagtgaagaaactaggaaacttcctcaagcagacttcagaagatgcaaagaaactggtaaatcaagaaaagtcattctcttgtgctgagatcgaaactgcaagggccgttgtgctgagacttggagaggcttttgaagaacaagaacggatttctgaagcttctagagctcaggggccggatgtggagaaattggttgaggaagttcaagaggctaggcaaatcaaacggatgcatcacccaacaaaggtactacatcaattcattgcactttaacttcataatttgatgtg

SEQ ID NO: 104020 - DNA, 415 bp, Arabidopsis thaliana columbia
ggtgttcccatggtgaggagcgggcttcatgataattgggatgatgcagagggttattatagctatcagtttggcgagttacttgatggtagatatgaagtcattgcgactcatggaaaaggtgtcttctctactgtggttcgtgctaaagacttgaaagctggaccagctgaacctgaagaggtggcaataaaaattatccgtaacaatgagacgatgcataaagctggaaagattgaggttcaaatattgaagaagctggcatgcgctgaccgagaagacatgcgccactgtgttcgatttctttcaagctttaagtaccgtaatcacctttgcttggtgtttgagtcgctccatttgaatcttcgtgaggtcttgaagaagtttggtcgcaacattggtctccaactctctg

SEQ ID NO: 104021 - DNA, 408 bp, Arabidopsis thaliana columbia
ggaaaattaccagacaagagttcttctttcttctctctgcctgcttctttttcctctcttttctctctctctctctttctttgtgaaaatctagaagaagagaaagctacaaaaatctcaacatcgagtcttgttgggatgtgaaacacatgattttcgaggagtagagagagacagagagaaattaagggaaagagctcacttgtgtgacttgttctgtaagagttttggctacagagcaaccatgctaacttgcgccttctcccaaaatcttatccactaatctcggtaaggaaagtgatgttggcaaaatggtgaagaaaggaagttggttttctgctatcaaaaaggtttttactccacattccaaagagaagctagccaatcaggaaccagagagaaagagtg

SEQ ID NO: 104022 - DNA, 273 bp, Arabidopsis thaliana columbia
gatttctctcctctgctctccaattccatcttcccatggcgatttcggctccagccgcttgttcttcctcctctagaattctctgttcctactcctctccttctccttctctctgtcgcgccatttccagctctggtaaactcaaaaccctaactctctcttcctcagatccatcactcttgaggtctctctccttaagtcgactcaacgccggagctcctgagttcgttcctggtcgaactactcctccgctgcctcaacctccgaggatga

SEQ ID NO: 104023 - DNA, 411 bp, Arabidopsis thaliana columbia
cccacgcgtccgctttctctgtgtctccttcaaatcttcatctctctctccatctctcttcctcctcctcctcctctcaccattttcactctcagatgctggttccatcggagtaaactacggccgaatctccgacgaactcccctccgcattcaaagtactccaactactaaaatcccaaggaatcacgcgagtcaaaatcttcgacgcagacccatcagttctcaaagcattatccggatctggaatcaaagtcaccgtagatctccccaacgagttactcttctccgccgccaaaagaacttccttcgccgtctcatgggtcaaacgcaacgtagcagcttatcatccttcaacacagatcgaatcaatagctgttggtaacgacgtcttcgttgatacacacaacac

SEQ ID NO: 104024 - DNA, 398 bp, Arabidopsis thaliana columbia
cccacgcgtccggtttccagcttcttcttcttcttcacagctttctcgatatttttgagagtttttaaccaaattagacatttttaatcaatttttttttgtgttgagcaagacgaaaagagtctaatccaatcatgggatgtgtacccagaattgaatttggttgttcaagccaaagccttactctttcatggaacttaagagcatggaatttgtgtagattgaacacaatctcccatttccagaaacttccttatcctttggtagcttctactcgaaaacattacaagaacagtttgcttttgaagagatttttagttggtgttggcactgaggaatcatcactgtcagaagatttactagatgaatctctttctcgacctctcactagtgatgag

SEQ ID NO: 104025 - DNA, 403 bp, Arabidopsis thaliana columbia
cccacgcgtccgatctcagctcgaatttctgggctactgaagtttaatctaggtgtgcgcttcgttgaagaaattttgaaatttgcagagaaatttgcggagaaagcggaaagattagatttatccatcgtttatcccagtaaaaagctttgatttttccacatgtcttttttccccccttttttcgtattaaaagccctagatatatatatcaaaattgaaaattatctgaaatcgatttcgtgggtttcagttccggttcggttctctttcttaaaatattgatttctgtcactttccgcgatgaaaagttttcgaattttgcttcttttggctccaaagtttttatctttcaaatattttaaatctgggtacttttttgttttggctccttctttgtgaa

SEQ ID NO: 104026 - DNA, 411 bp, Arabidopsis thaliana columbia
aggatcttgataatgatgatgaagatgatgatgatgatgatggaggtcgtgaagctgttacagagggaagggttgagaaatacattggtgtaaaagtgaaggtctcgttcactggtcaaggggaaacacaattaatgaaacaattgtctggaggccaaaagactgttgttgcactcgcgttaatctttgcaatccagcgatgtgatcctgcaccattctatctttttgatgagattgatgcagcacttgatccacagtaccgaaccgctgtgggaaacttgattcgtcgtcttgctgatgattatggcacgcagttcatcaccacaactttccgtcccgagcttgtgagagtcgcggataagatatatggagtatttcataagaacagagtgagtattgtgaatgttatct

SEQ ID NO: 104027 - DNA, 409 bp, Arabidopsis thaliana columbia
gttcccgtcttatcgtgtacagtttaggagctcaagttccgaagattgagaaaactgtaagttgtctttcttatgaattatcgatgtttaggtttctcttgtttgtgctacttgggattgagttcttaatatctttgtgttgaattgatgtacaaaacccttttctaggcttcaacactatctaaatgttgatcgaatagttaactataaattgcaggaaagagattatgaagataaggctgagacaaaacccagtttctctcctaaacatgatgatgatgatgatgatattatggagtctgatgttgaactcgacaactctgatgtagttgaaccagacaatgagcctcctcagccgatgggagaccctactgctgaagtgaccgatgaaaatagggatgatgctcag

SEQ ID NO: 104028 - DNA, 247 bp, Arabidopsis thaliana columbia
atctttctttctctcctctctatctttctctcacactcatgggtcttccaacagatttcaaagagcttcagattccaggttacgtactaaaaacactttacgtcatcggtttctttagagacatggtcgatgctctttgtccttacatcggtctaccaagttttcttgagcacaacgagacctctcgatccgacccgacccgactcgctctctccacgtcagcaactcttgccaacgagttaatccc

SEQ ID NO: 104029 - DNA, 423 bp, Arabidopsis thaliana columbia
caagaatcgagaactgaaagatttgtcatttgtctctcaaatatctgtagagagagagagagatgagttcgtctctacctctgaggctacttcttcctcttacaacttctctgatttctcctcctcctcctcctccagattctttccatgctccttcgtcgttcagatcgataaaccctaatttcaaacgccgattgtcttcttcttcctgttgttcttcccagtcgcagcttttctctgggagatgcagatcctattcgcggtgtgttaccatgtgcttaccagaacacatgagaaatcaagagaacacagaaatcttgacagataaagatgaccacattgaatgtgtgcttgaatcggatgaagattctggcctcaggattccgactcaagcacaggctatcgttgaaggatctggttcag

SEQ ID NO: 104030 - DNA, 297 bp, Arabidopsis thaliana columbia
ggaaacgagtgacgttgttgtccagccctacaactcactgttgacgctgaagcggcttacgttaaatgctgattgtgttgttgttcttgacaacactgcattgaacagaattgctgtggagcgtctacatttgactaatcctacttttgctcagaccaattctttggtgtcaactgtgatgtctgctagcacaacaacgttgcgttatcctggatacatgaataatgacttggttggcttgcttgcatctttgatcccaactccaaggtgtcacttcctcatgactggatatacacc

SEQ ID NO: 104031 - DNA, 402 bp, Arabidopsis thaliana columbia
caacaacaaatcttaaacgttttactttgtgctgcactactcaacctcaatggccgcctcaacaatggctctctcctcccctgccttcgccggtaaggccgtcaagctttcccccgcggcatctgaagtccttggaagcggccgtgtgacaatgaggaagactgttgccaagccaaagggcccatcaggcagcccatggtacggatctgaccgtgtcaagtacttgggtccattctctggcgaatcaccgagctaccttaccggagagttccccggagactacggatgggacaccgccggactttcagctgaccccgagacattcgcaaggaaccgtgaactagaagttatccacagcaggtgggccatgctcggagccctaagctgcgtcttccctgagct

SEQ ID NO: 104032 - DNA, 369 bp, Arabidopsis thaliana columbia
cccacgcgtccggctgaaatgaaatcagagcaagagactctggtccacctaggcaatgaaagtatgccccttttcgtcatggatgtgataatcccctgtcagaagttgtcacttcatatatttgaaccacgatatcgactaatggcgacaagaataatggaaggaaatcatcggatgggaatggtatcacttgattcggcgacaggttctccagtggatgttgcttgcgaagttgaaatcacagactgtgatccactcacggatggacgttttgtcctgaagctggaaagccatataacgtgccgcattgtaaaatcttgggatcaagatggatatcgtgttgcacacgttgaatgggtgaaagatata

SEQ ID NO: 104033 - DNA, 228 bp, Arabidopsis thaliana columbia
ggtgtgttgtcctctgacacggcgaccccactaatgcctcacagaaacgttcataaagatccaatgttgctacttacttcagtagtggatacttcacaacgacctgtgtttatgtcgtactaagacctttgtgtgtgacgcttttcgaactttttgtgatcatattcctctgatgttcattcatgatccctcgagtaccttgaagagtcctatttatttgaatttcca

SEQ ID NO: 104034 - DNA, 205 bp, Arabidopsis thaliana columbia
cccacgcgtccgcggacgcgtgggccgctttcttcaccattcatgatcatagattcgtgacctgagaagacactcagtatgagtaagcttcagagtgaggctgttagagaagtcatttcgactatcaagggaaaatctgaggaaaagaatcgtaactttgttgagacagtggatcttcatattggtctgaataactatgatccac

SEQ ID NO: 104035 - DNA, 407 bp, Arabidopsis thaliana columbia
cggacgcgtgggtccgagtcttatccaaagcaaaatcatattttgcttaaatatcttcttctccggctctgtctctgtctctcttcttcccgcggagctttcagtttttgtttggtaacatcgtttctctttctcactaactctgatatcatattatcaatttttccttttcaacacccaaaatcacaatctttcagctttattctgtttttccttgcttgagaattgtgttcgattcatgtctacgaactgaaatcacaaattttgccaacgttttatgattcctggttccgtatttttttttttgtaatcaatagttagctcatttcgaataatcaaactcaattttattgttcatgatttgttatctgggataaaagagagtaatgtgctaattatgtatactc

SEQ ID NO: 104036 - DNA, 358 bp, Arabidopsis thaliana columbia
cccacgcgtccggaagaagatccgcgagaccgtgtacggcaatatgttgaccatcgaacaagccagggatgagaagttgaacgccgtcgagaagaatggaatcgttggatgaagaatgcttaatgagaaggaggcgatgagatcggagaagcgtcgggagagaggaggtgttggggagagatcggctacgagaaattgagagtcggagacgtaccgattggatgcggatagtaaaagcgtagaacggaagacaatgagtcatgtctatatcaagtagcatggaatcagtgggggcgacgagagtgagagactcatctgagagtagatcgaggagaagatcggatgtgatgatggcatt

SEQ ID NO: 104037 - DNA, 425 bp, Arabidopsis thaliana columbia
cccacgcgtccgattagttttgttcaaacaaattttggtcgtctccactcattgagtttagagaaatctcccagaatcatcaaaaggtctttactttgagattgtcactatgaattgcgcaatcacagaggatgatttgatctctccttacctcatcatcttcaaatcgctcttactcatcccaatctctcactatctcatcttcttcttcctcacaatcttacttttcctctacttcttcctagagattcattttcctaaagcagatcctatctctcttaccttcaatccaaactctgacttctgcaagtttattgtctccaagtgtcgtctccttcatggacgatactttcctacgttctggctttcaagccctcatcttcaaacagctttccttaccctttttggaaagtctcctcctttct

SEQ ID NO: 104038 - DNA, 418 bp, Arabidopsis thaliana columbia
cccacgcgtccgcaactttccagtttcttaccattcatcaacaaccacatcatcagtacacagagactaatcaagaaaagccagcatcttcggagttggtgggagagagacagatatggagaggagaaagattgtgatgtgtggtgttttatttcttcttggtttattatcagctgttactgccttcgtcgctgaagctactcgaatcaagagatctcaggtcacggttaccgtttcggattcaatcacaaaatgcacttatccaagaagtccagctttcaatctcggcttcacttcagctcgcttgctgatgatggctcagataatactcagtgtctcaagcggttgtttctgttgtacaaaaggtcctgctccttcaaagtccaattggattaccgccttaatctgctttgttgtt

SEQ ID NO: 104039 - DNA, 218 bp, Arabidopsis thaliana columbia
tcttctcgcatcaccgtagtcggagttgtctactgtgacacgtgttcaaacaacactttctcaagacaaagctatttcttacaaggtgtggaagttcatgtgacatgtatattcaaagcaagttcaccaaaaacagcagaggaagtgaacatatcagtaaacagaacaacacacagaagtggcgtgtacaagctcgagatccctcacgtacatggcat

SEQ ID NO: 104040 - DNA, 425 bp, Arabidopsis thaliana columbia
ggttttgcgattggtaacggtttaaccaacccggagatccaatatggtgcgtatggggattatgcactgcaaatgaagttgatttcagagtctgaccacgagagcctcaagcaagattacgttgagtgtcaaaatataaccaaaaaatgcagtaatttcaataaaaagctctttcttctttattttcgttagatacatattgttcgagttaaaagataagaaacttatattttgttaatatcaggtcttggtggtggtttagtttgtgattctgctgttgaagtttgcaccagtatcttcaacaagatagtggcaaaaaaaagtggcctaaatgtaagcataaaaaaccttaaactgattgtgttttctcaataaaatttcttttgtttacgagatttcctcgatttgtttgaagtattatgaca

SEQ ID NO: 104041 - DNA, 428 bp, Arabidopsis thaliana columbia
gcaaaagtagaaagaaaatgggatgctgcttcagcgccggaaaagtcacagctccaccagtcgccgccgctcaaattcctccacccctcgaagaagaatccgtcaaagaagtcgttgttcaatcagtctctgtctccgtccccatacccatctccgtccctgtcccagtccccgacctcgttccttccgcaccaacagtctcagattcagaagctcaagttcctcttcctctctcacctccagctccggagatctctcacagcaagtccgacatttgcagtgtctctgtctctcgccgtaacaggcctgacagagtcctcagatctccggcagaacgacattctcctcaggggaagcagctccgtcctaggttagtccgagagagacagtctcgtcaaccaaaccctactcacaaccggcgaaatgtg

SEQ ID NO: 104042 - DNA, 386 bp, Arabidopsis thaliana columbia
actctgagtacacgacgttgcgtaagagttcgccgattctccgaaaacccgttgaccactgtcatggcttcacgttctgcttctaggcttcgttctctcgcatctgcctgttctggaggtgctgaagacggtggtggaacctctaatggctccctatcagcctctgctactgcaactgaagatgatgaattggctataggcactggatatcgtctgcctccacctgagatcagagatattgtagatgctccaccagtcccggctttatcattttcaccacatagggataagatattgtttctcaagcggagagcattgcctccgctcgcagatttagctagaccagaggagaagcttgctggtgttcgaattgatggatactgcaa

SEQ ID NO: 104043 - DNA, 437 bp, Arabidopsis thaliana columbia
caagtgggtcgggtcaaaccatggttgattcgggttctgaatttactcacttagtcgacgtggcgtatgataaagtcaaagaagaaatagtgaggcttgtgggatcaagattaaagaaaggttacgtgtacggttcgacagctgacatgtgttttgatggtaaccattcgatggagatcggacggttgataggcgatcttgtgtttgagtttgggagaggtgttgagatactcgttgagaaacaaagccttttggttaacgtaggaggtgggattcactgtgttggaatcggacggtcaagcatgcttggtgcagctagtaatataatcgggaacgttcatcagcaaaatctttgggttgagtttgatgtgaccaataggagagttggttttagtaaagctgagtgtagattattgccgtgagtaggtgaatattct

SEQ ID NO: 104044 - DNA, 328 bp, Arabidopsis thaliana columbia
aaaactcagaagaaagtggagtgatcatataacgacaatgaagaatctctttaacttgttccttatgtttttctttgcaatgccagattctttcactcgtccgatgaatccaaccaatttcagcgagagttgcgaagacgggagtggagaaaccggttcaagctttggcatagggttcgatttggttcttgattttggtttataccggaatagctgccccgaagcagagtctatcgtctactcgtgggtggaaaccacggtgttagaggatccaagaatggctgcttctcttctccgtcttcatttccacgactgttttgtcaatgga

SEQ ID NO: 104045 - DNA, 140 bp, Arabidopsis thaliana columbia
ggcgatggcgttatcacgactttcttcacgatccaacactttcctaaagcctgcgattaccgccttgccctcctcgatctgccgtcatgtttcgacacactcatcagcgatgacagtcgaaaccgccgtccctttcacat

SEQ ID NO: 104046 - DNA, 444 bp, Arabidopsis thaliana columbia
  unsure (1)..(444): unsure at all n locations
ggaatgttgatgttattgggaagcctgatttcgcgtatcagagaggatcgtctccgatggcttctacgcttcatggtgcttcgattcttcttagattgtcaggaacttgggattggtttgttagtattactgttgatgattatcctctcgttactcaagatgagcttcttcatattatgtcacatttgcctaaggacttgaattttgtgaaccacactagctacattggttggaaagagtccaggaagttgaagccagttattgttgatccagggctctatcttgtggagaaaaccgatatgtttttcgcttcgcagaaacgagagttgcctaaggctttcaagttattctcaggtccatctttctccatcttaagccggaatttcatggagcactgtgtcttangcactgacaacttcnctcggactctactcatgtacttgt

SEQ ID NO: 104047 - DNA, 277 bp, Arabidopsis thaliana columbia
ttaaagagaaccgtttggaccagatcagcttgcctcttgttcatacgtcttccatggcttccggtgatgttcttcctagattcttcactgtcttcctctcccattgcagctccgagtccatggtgataccaatgtcttactacaatcttttaccacgtccgttgcccaatactgcgattctcatcggaactggtggaagattttggtaagtagcaatgaccagcacgcaggagcaagtgtattttgaacaaggctggggaaatttcgttgctgataa

SEQ ID NO: 104048 - DNA, 390 bp, Arabidopsis thaliana columbia
gacatgttccgctgccgcctttcggatcattgggtatcggtggccaaggaatgagagaagttgatagagataatttcagaatcttgttgggaagcagacatggaaacgactaagactcagaggttagaattgtgcgagttggctggtttagaccatgaagtagtgttcaagaccagaaacagattggtgattaaggatatagccggaaataaatcggctgctgacgaaaatgcgtcttactcttcattggtcgactcctctggcttctgatttgacgcattgtcctggagtcagtttttgtctcttgttcttcgtagtacacttatatgtgctacattattatccatcatacttctagttttgctagggtttggtaatattcgtaaatat

SEQ ID NO: 104049 - DNA, 392 bp, Arabidopsis thaliana columbia
ctaaatttcagtacctgcaactcctttttctcaactttccgatcatatttctcaatcggagaaactgattcgacgaacatcatgagtcgctacgatagccggaccggcgattccacctcgtaccgtgaccgtcgaagtgactcagggtttggtgggacttcatcatatggaagctcaggtagtcatacatctagcaaaaaggataacgatggcaatgaatctccaaggaagctagatttagatggtttgactccttttgagaagaatttttatgtcgagtctcccgctgtggcggctatgacagacacagaagtagaggaatatcgaaagctaagggaaattactgttgaaggcaaagatattcgaaaacctgtcaagagttttcgtgatgt

SEQ ID NO: 104050 - DNA, 263 bp, Arabidopsis thaliana columbia
tttaattcttcgatctaaagctctcttcttcttcttcaaacggagctctcttcttcttcatcaacctttgttcttcgatctctgtcttttttttttttatctcttcttcgattgtaagaaaagtttcagctcaaagaaatctgggttaaagtgtgtttgaaattgtggatcgattcagagattcacgataccaataggtacttgtgaatttctaagtttttgggtttttatctttccccttgttgtatatgatgtgttagaat

SEQ ID NO: 104051 - DNA, 414 bp, Arabidopsis thaliana columbia
cccacgcgtccgcgctttgacaatgcagtttgaaggagagaagaaaaacgtatccgaagttgcagacgtaaccctcaagcaagaagatgaacaacaagaacgtagatcttattcgacgccgtttagggaagagagagacacctttggcccgatccaagttccttccgataaattatggggagcacagacgcagagatcgcttcagaacttcgagattggtggtgaccgcgagcgaatgcccgaaccaatcgtccgagcttttggtgtcttgaagaaatgtgctgccaaggttaacatggagtatggtcttgatccaatgattggggaagccataatggaagctgcacaagaagtagcagaaggaaagctcaatgatcatttccctcttgttgtatggcaaactggtagtgggac

SEQ ID NO: 104052 - DNA, 372 bp, Arabidopsis thaliana columbia
gtgatctcgattttgcaatatctgacgtttactgtgcatgattgttcactgctccgccgtcaatttagattgataaagtttgatacttgtgttgcaatcattgtggaattcaaactcaatgtcactttccgcttttgagcattgttgtctgttttcgcgtatccaaaatctgactagtatctagtgtttttattatattttcgtgtcccttacttttggcttatccttatctggtttctctgttttattttaattttcgtttggataattaagaccaaaatagtcggtaatgtatcgctatagctaggaataattttatcatcaattagtgtgttaatccggcttaatggtttctaagtcatcacatagtgt

SEQ ID NO: 104053 - DNA, 371 bp, Arabidopsis thaliana columbia
ccgtaacatcatggagaatccagcttggtacactcaatacactccttatcaagctgagatctctcaaggtcgtctcgaatcgctcctcaatttccagaccgtgatcacagatctcacgggtcttcctatgtccaatgcgtcgcttctggatgaaggcactgctgctgcggaggcaatggccatgtgtaacaacattcttaagggtaaaaagaagacctttgtcattgctagtaactgtcaccctcagactattgatgtttgtaagactagagctgatgggtttgatttgaaagttgtcacctctgatcttaaggatatagattacagctctggtgatgtttgtggggttcttgttcagtatcctggtactg

SEQ ID NO: 104054 - DNA, 244 bp, Arabidopsis thaliana columbia
ttcccttgctgctgccatctttgtgccgttctacgctggattcgacattgctaggtatctgtggggatacactatctcgagaagggatgctgcttcgcttgagttggtcgattggatcatgaagcggcctgagtgggatataatgaggggaaaagatcatttccttgttgcgggtatgataacgtgggattttaggagattgtctgaagacgaaactgattggggcaacaagcttcacttctta

SEQ ID NO: 104055 - DNA, 284 bp, Arabidopsis thaliana columbia
aaggacgcgtgggcaaccatcaatgatggcccacgctgtttgatgctaaaatgtcccgacccttcttgtcctgctgctattggtcgagatatgatcgataagttggcttctaaggaagacaaggagaagtattagagatattttcttagatcttatgtcgaagtcaacagagagatgaagtggggtcctgccccaggatgtgaacatgcaattgattttgctggtgggaccgaaagttatgatgtttcgtgcttgtgttcgcataacttttgctggaattgcac

SEQ ID NO: 104056 - DNA, 353 bp, Arabidopsis thaliana columbia
ccggttttgaagtgatatgggaaaaggatctggccaaggactcgccggtcccatggtacttacctcttgacaaaaatcatttctcactcagtagcttccgccttacagctgttggacgattcataaccaaaaacatggtcaagatccttgaatacataagacttgcacctcaaggaagccaaagggtctcaaatttcctggagcatgctgcggaaggattagtcgacggtggaaggagagagattttcacgccaatgtatttcttcttggcccggaagccagagtaagcggatgagagatggcgatggtcatcgtaggtcgaatgaagtgacacaatttctcaatttgcagtc

SEQ ID NO: 104057 - DNA, 268 bp, Arabidopsis thaliana columbia
ccacgcgtacggatactttcatttgagatgtacgaaggagtttcgtgagaagatcatgacggattacttcacttacttagcgaaatcagcggagaagataatgagccatcgcgagaatctcaagatctagacttataaccaagaccggtctaaatgggaatctgctagcttcgagcatcacacgacctttgagacgttagctgttgagccagacctaaagaagactttgattgacgatcttgatgctttctctaaaggaaaagacttc

SEQ ID NO: 104058 - DNA, 423 bp, Arabidopsis thaliana columbia
aagtcattcgaaaatagagtatgcaaatgttcagaactcaatcgcggcaacctcaagttcttctaagatttctgattctcataaacccagaaacagctcccgcgaagctaaatgttctcctgttgagtcggtgtcttcctcacctatgaggctttccaacccggagaaacgtatatctgtgagtaaaaagaaagaagaatcttatgatgctaacgtctttgcagcaggtagtttgaaaaaattctcagatggtgaaggtgaagatgatggtgggagtgatagatcgcagagtcagatgaaggataaacatggatcccatgagtcttctgtgcttgatatttgggataataaaggatctttgaaagcgaaagagcgcgctgatccttctctcgatgccaattttgaaaatggtggccacaagac

SEQ ID NO: 104059 - DNA, 271 bp, Arabidopsis thaliana columbia
ttccttcgttccgatttgagtctattgctgacggtctaccagagacagacatggatgccacgcaggacatcacagctctttgcgagtccatcatgaataactgtctcgctccgttcagagagcatctccagcggatgaacgctggagataatgttccgccggtaagctgtattgtgtctcacggttgtatgagctttactcttgatgttgcggaggagcttggagtcccggaggttcttttttggacaagcagtggctgtgggttcctggc

SEQ ID NO: 104060 - DNA, 425 bp, Arabidopsis thaliana columbia
cacacgcgtccgcccacgcgtccgcaaaattgttcttcttcggcaagattcctcgattttctccgtgttctgtaatttccgatagattttgacaactctctttgattgtttccctttagctttttatttttatctgcctttttttttttttgttgttgttccggttctattcgtttccttttgttaccttgtttttggttttgatctcaaatcctgctctgctctactatcttcaattcgattcttcatccgaacgaagaagacacaaattggagcttcactggacgttgatgataaagcatgaatcacggagggaacactcaggccgtagcaccaatggaccctaattccattgagaatcgatatggtgttgatggaagccaaacacagaaatattcatatcaatactcaactgggtctgaaag

SEQ ID NO: 104061 - DNA, 233 bp, Arabidopsis thaliana columbia
tttgtttttgatttgcttaacacagaaatatctacaatgaaactgattaaacatccaaatgtggttgaaatcattgacgttatggctagcaaaacgaagatctatatcgttcttgagcttgtcaatggaggtgaactcattgagaaaatcgcgcaacaagggacgcttaaggaggatgaagctcggagatattttcagcaactcatcaatgctgtggattactgccacagtcc

SEQ ID NO: 104062 - DNA, 407 bp, Arabidopsis thaliana columbia
catctcactcttctgaagcactcaaagagtaaagtttctctgcatttcagcttctctctctcttctctctgtagaaatggcgggtcggatccaatcccaccagctaccaaatggactctacgtatcgggaaagcttgagcaaccaaaagagcgaccaccgacaatggcggctcgagctgtgccttacaccggaggcgacatcaagaaatccggcgagctcggaaggatgttcgacatctccgtcgtcgattcagcttcttttcaaggaccaccgccgttaatcgtcggtggtaatagcagcggaggtacgtcaaggcttcaggcgccgccacgtgtctccggttcttcttcaaaccctaacagtggatccgttcgatctggtcccaactctggttcggttaagaaat

SEQ ID NO: 104063 - DNA, 100 bp, Arabidopsis thaliana columbia
agtcaaaccaaaccattcgtgtgagcttccatatgggccgaaattcatagggttttgagatgattgcaggcccattatttattacagatggcaattttct

SEQ ID NO: 104064 - DNA, 412 bp, Arabidopsis thaliana columbia
cacctcctttatcgagagcttcagttttagagcaacaatgtctctatttctgaagcccttcctcttcctatacgacaccactcttagtcttctcttacttctgttcaatggatggagtcttgaggatacagcagcagcccaaaagaggcgtgaagcagacaaaaatgctgcagaaactgaatggatccaactccaatacttgtggaccaaaacaaggagtgttgtactacttcccgttttcaagggtttggtggttatgtgtttggttctatccattatagtgttcttcgagagtttttacatgaactttgtgatactcttcgtcaagttatttaaacgtaaaccccataaagtgtacaaatgggaggccatgcaagaagatgttgaggttggacccgataactacccaatg

SEQ ID NO: 104065 - DNA, 431 bp, Arabidopsis thaliana columbia
ccacgcgaccgcagacgcgtccgcccacgcgtccgcccacgcgtccgcccacgcgtccgcccacgcgtccgcaagaccttgcgctagaagaacagtttcggctttgttttgttcaattctcacctcaccccggacagagtccaaaacaacggtttatttcttgcgtttgtcgggaaatcagagttgagtataataaacacccttcacgacattctttgcttgtccaccttggtatctgaaattgggggactcttattataaaagatatgatgatttgttactctccaattacaacatgttctacgaatgctatcagtatcaagaggcatttaggctctcgcctctacggcgttgtggctcacggatcatctaaattctcctgctacagtcttttatcaggactttcaagaagacattataccggttttcgt

SEQ ID NO: 104066 - DNA, 127 bp, Arabidopsis thaliana columbia
gataaattatgccatatatctgagcgattttggagcatcgccgaagctaatgaggaattggaggtttctgtatatcggataacacttgttgttctctcgctcgattcatcccaaagcaagattcttg

SEQ ID NO: 104067 - DNA, 209 bp, Arabidopsis thaliana columbia
aaataaatcaatgtgctagcttaaagatgcagatgcaccattcaatcatagtctcgcttgaagttagtcagctgatgatgcttacaactacaacatttcagaaaatgactacgtgtctgaagtcactcatcttcttacaagattcaggtcttgccatcctctctctaatgttccatcgagggagttctgaggatgcagctgatagctct

SEQ ID NO: 104068 - DNA, 299 bp, Arabidopsis thaliana columbia
gctcaaccggctccggtgacggcagtatcagatggtccgaagaagactgttgcgaggccgtaggctaggaagcttgccagacaacacaatgctgatattgaaacccttgctggaactggaccattcggtaggattacggcttctgatgtggagacagcggttggcattgctccgtccaaatcctccatcgcaccaacgcctcctcctccacctccggtgaccgctatagcaaccaccactaaattgccacctctggtacgtgaatcaagcattgttccgttcacaacagtgcaaactgc

SEQ ID NO: 104069 - DNA, 380 bp, Arabidopsis thaliana columbia
gaaaattattaacaaggtaaatctctaaccaatatgtatgcataactaaaagtctaaaactatgtgatgtatgcataactggaactatgtttttgaaccctgcgtatttagtgtctgctaaattctaccgatttgacacaatgggatagggtaaatgaataaaagtgcaaagtatagttacttatctatgacttatctggtgccattacttataattttaaataattggtagtcccacacatgaatccttatgctttcttacaccaataaccttcattttcttaaagctgacacatatttctctcttgacttctattgctaactgccaattgcttctttgctacaattctaaatatgcttaaaatggtatcacttttctc

SEQ ID NO: 104070 - DNA, 429 bp, Arabidopsis thaliana columbia
ccacgcgaccgcagacgcgtgggttttttaaaagagtaataagaaaaacaattatctttgaactctctctatctctctctctctctctgcgatctatgcctgaagtggaagtggataacagcaacgagaagccatctgagattaacagtttccatcacatgatcataagtagtagtaaaaatgtgttgaaaatgggagaagttgaggtgagcaagaagaggaaatttcagacagatcaatctgatgagttatcgttattacctctgtcaaaacacacttgttttgccaatgttgcttgttcagagaatacaaatggtaactcggagattgatacagagtattcaatgtcttcttatgtgaactcaacaacttctatggagtgtaacaatgatatagagatgaaagaggaatcatcctggatcatgcggt

SEQ ID NO: 104071 - DNA, 321 bp, Arabidopsis thaliana columbia
ccacgcgaccgtgattttgctagtacaaaaactctcatagttgtacagtttctacttatggggtttgctgagactaaaaggtatatggattttgtctctccgggatcacaagccaaagaaggatcgtttttctttggacttgaagcagcactcgaggggctcgagcctggatatcccggaggaccgcttttaaacccattaggccttgctaaggatgttcaaaatgctcatgactggaagcttaaggagatcaagaacggtcgtctagcgatgatggcgatgctcgggttctttgttcaagcctctgtgactcacactggc

SEQ ID NO: 104072 - DNA, 392 bp, Arabidopsis thaliana columbia
cagccacaaagtaaagactccactgtcgtcttccgtagtgatgcttctttctgcaatcgcttctcagacccttctctcatcaaaccctaatctagacttctccaattctattccaaaccctagaccttctaatccctcccttaagctcctcaatgcctcttcttcttcctcctcctcgtcgtcgtcttctatatttacacgcggtctccgttacgtaaaccacactgtatctaatgaagaatcagaacccggaggaggagagaccatggttgcttctgcttccgctatagcttccgcgattcgtggagcttcaacaactcctgtagagttcacacagatgattgagaaagaccatctcaagactaagattagcttgccaagtcctgattttc

SEQ ID NO: 104073 - DNA, 239 bp, Arabidopsis thaliana columbia
cacgcgtccgcaagaagaagctgtctgcgctgcagagtcaggagtataagggaggtgatgaatccaagctagacaagactaaaacttccataaccagactgcaatcactcatcattgtttcttcagaagctgttttaaccacgtctaatgccattctccgcctccgggacactgaccttgtccctcagcttgttgaactctgccacggattaatgtacatgtggaagtcaatgcacgag

SEQ ID NO: 104074 - DNA, 218 bp, Arabidopsis thaliana columbia
cacgtttctaagcgtcgcaagattcgttgaggcactactccgccggagattctcctccgctggtctctccttacaaaccctatccatcgactccgaaaccaccatacagttctggggagcaccaccgtcttcatcatcggtaaatacagaagaaccgtcgctcctcctcctccatggttttgggccttccgctgtatggcaatggagccatcaggtca

SEQ ID NO: 104075 - DNA, 274 bp, Arabidopsis thaliana columbia
gcggtggccatttccttttagatctctttgcaaagtttcgatatttcatcttttgcaaagaactacctgtggtaagttcccaaattcataagaaactttttattggtttcatgtaaaacaaaatgtttattgttttgatatatacaggtgttgaaggcttttgtgcatggagatgggaacttgttgaacaactatcctgagctacaaaaagctcttgtttgggtctatttccattctaatgtcaatgagttcaacaaagtcgagtgttggggtc

SEQ ID NO: 104076 - DNA, 193 bp, Arabidopsis thaliana columbia
attacctcgttctaccgtgtatttggtcatgacccgacaggatttggttgcctgttgattaaaaaatcagttatgggaagccttcagagtcaatcagggaaaactggatcaggtataatgaagatcacgcctgaatatccgttatatctcactgattcagtacatggtcttgacggattggttggttttgaag

SEQ ID NO: 104077 - DNA, 386 bp, Arabidopsis thaliana columbia
accacgcgtccgatcaatacaagttggctgggaatactcaagctttaaagatggcaacagggatggctgattacttttatggccgtgttcaaaatgtgataaagaagtacagtgttgaacgacattggctatcactaaacgaagagactggtggcatgaatgatgttctttatcagctatacagcatcactagagattccaagtatttgtttctcgcacatctctttgacaagccttgctttctcggagtcctcgcaattcaggccgatgatattagtggattccacgctaatacacatattcccatcgtcgttggatcccaacaacggtatgaaatcactggtgatctactccataaggaaatcccgatgttctttatggacata

SEQ ID NO: 104078 - DNA, 228 bp, Arabidopsis thaliana columbia
cgggaactctcacccaagggaatttcatctccgattttttttttttgggtgttgttcgcatctctgtgtaataaaaagagtaaaaccaaaaccctagaagaaaaatctccatctttttttattccgccattgggagatcgatcactgagaaggatgagtatggagatggagttgtttgtcactccagagaaggagaggcaacatccttcagtgagcgttgagaaaact

SEQ ID NO: 104079 - DNA, 213 bp, Arabidopsis thaliana columbia
cataaagagacaccacaactttctttcttcatcagtcacttctatcaacgccaaatttgcagactttcccaggaccaaaattatattaaaaaaaagttccttttttctgatcaaattgtgaaattcgcttgcttgctttcttcacagtcaattaattctctaacaaaacattcttcgatcgttcgttttcatcgtctatgcttctctgatcag

SEQ ID NO: 104080 - DNA, 443 bp, Arabidopsis thaliana columbia
aaggaaacaaaaaatggcttctctttggctgaagttaatctccataagtctaatatacctcaatgttatcgctaaatcaactccgcatcaagaaagcgaattcgaatgtgtctctatagacaaacaatctgcactacaacatcctctaatgaagaatcatcgcatacagactagaccaagtcgagagcttctatcaatactctctacgtccaatggtaacatactcagagagattgatttgaagggatcagaagaatgtccaaagggacaagtaccgattcataaacaaaaaaccaacttaaccaatagtcttattcatccccaacaaattcatagagcaggccgtatcctgaaacaaagtcgcagggataaaaagaagaaaaagaacaatcgacgtaaaaaaaataaaaataaactcatgattccttctgcattgttgtctc

SEQ ID NO: 104081 - DNA, 149 bp, Arabidopsis thaliana columbia
gtgataccaacgttattactggaaggcagtggaattttgagctggcttgaatcacaccctgctccctggtcagccctcatcattatactcagttctggtgttctagccttctgtcgcagcttctccatcttcgatgtcattcactccag

SEQ ID NO: 104082 - DNA, 217 bp, Arabidopsis thaliana columbia
atctgagtcgtcaactctggaaagggtagcagcagagtcattaacaaacaaagtccttgatagaggactaatggagtatggatgtccacattacagaacaaggtgttgcattagatctccttgctgtaatgagatctttggttgccatcactgtcattataaggcgaagaacaacataaatgtacatcagaagcagaggcatgatattcctcgccac

SEQ ID NO: 104083 - DNA, 324 bp, Arabidopsis thaliana columbia
accgaagttgagcctatcggtactggttgagattattctccggcggagacaatggaatcttccgtcgctccgtttcctcaccgacgcacgcatctgccgaatcgaaattatcgctctttgctttagcacttttgctcgagtttcgatcgggaacctcagatttctcttgccacactggcagttctctaggagctggtcttacgaacagaaattgctcaagagtctccgggagaaacttgcgaaccgccggagaatttatcaattacggaatcaagagtcaatggagtgtctggtgattcaagtggtgagaaggtggaaacaatt

SEQ ID NO: 104084 - DNA, 357 bp, Arabidopsis thaliana columbia
gtgaaagtaaataatgtcttaagagggctaaatggggattagtagatgaatatgtagaatgattagtgagattagtacacttggtaaaggtctctcttccataaccaactttatcttatgattcgaatcattttatcttcatcaagaatttgacattatagctggcttaaaattggcttctatttgttctgtctctttccccggtttatagtgccttttgtttctttctctcttttttgtttttgttttgtttttgagtataatttttcttggtagtgttgaagaaagatgaacaatttgttgtcatgtaattatcaactctcccaaatggagccactgtggggataaagttttttg

SEQ ID NO: 104085 - DNA, 250 bp, Arabidopsis thaliana columbia
cgtggacgaagcgtgagccgaagcatgagcagaagcaggcgcaggagcagaagtcccaaggcaaagtcttcacgtaggtcccctgcaaaatctacatcaagtgcatggtcctcacggcttctctcttcccctttttgtgcttcgggagtggctttcgccgaaacacacttgccatattctatggatctcttgcgggtattccttttgggacaatggtggttgtgtttgctaattgggggttcagttcctt

SEQ ID NO: 104086 - DNA, 424 bp, Arabidopsis thaliana columbia
acgcgtccgacgttatggtttagcgattggtgcaacagtggctccgtttgtccgtgtcctagtctttatctgcttacctgttgcatggccaataagcaagttgctggactttctattgggtcatcgtcgtgcagcgctttttcgaagagctgagctgaaaacacttgtggattttcatggaaatgaggctggaaagggtggggagttgactcatgacgaaacgacaatcattgcaggagctcttgaactctctgagaaaatggtcaaagatgcaatgacaccaatatcggatatctttgtgattgatatcaatgccaaactagacagagacttgatgaacttgattcttgagaaagggcatagcagagttccagtatactatgagcagccaactaacataatcggccttgttctggtgaagaac

SEQ ID NO: 104087 - DNA, 415 bp, Arabidopsis thaliana columbia
cactgcgtgcgttatacgaacttctacatcatttctcttttctctcatcgctcggtgaattcgaggatcctcgagctttttgatcggagactttttctctcatcgtcgttgtttgaattctccggctgagagatgcttgcttgacgacgaatctccaccgatcttttaccttttcgcacaacaagtaagagaaggatgtcgactccagcgaggaagagattgatgagggatttcaagaggttgcagcaagacccacctgcaggaattagtggtgctccacaagacaacaatatcatgttgtggaatgctgttatattcgggcctgatgataccccttgggatggaggtactttcaaattgtcactgcagttttcggaagattatccaaataaaccaccaacagtgcggtttgttt

SEQ ID NO: 104088 - DNA, 414 bp, Arabidopsis thaliana columbia
gtgacggcggaggctctcacctgcttcatcgcagtttagaaatgactagaggagatcgacgtagctccccgagtttcttctccggctcgaagcggagttggctagggtttcacggtggctcacggtcgccacttctattgattccgagctgatagatgatggtggctcgaggtcaatcgtgcgtatgggtttgcggctccgatcatccctgtgacggaaatcgagcggcggatcccgcagctgaggggtgatgacggctatcgtcggaggtatttcgtgctcgctttctcttttcgggagtttcagcgacggcggttcatgtgatggggttaggtcctgcggtaagatacggttcctccggcttgcgggattggtggctccggtctcgggttgttggccgtggctgtgctcgca

SEQ ID NO: 104089 - DNA, 439 bp, Arabidopsis thaliana columbia
acgcgtccgcaaatggccgaggaaaacaacgttctagtgatgtcaaaaaccctgagcgatacctcttgaatcctgaaaacccttactttgtgcaagcggtgacaaaaaggaacgacgttctgtatgtgagccgaccggtggttcagagctatcgcttgaagtttggtcccgttaagtccaccattacctatcttcttcccggggagaaaaaagaggaaggcgagaatagaatctataacgggaaaccttgtttcagtggctggtcggttctatgtcggaggcacaatctgaatatcggagactccgtggtttgtgaacttgaacgctccggtggtgtggttaccgctgtaagagtgcatttcgtcaagaaagactagaccaatcctctctagtaacaacaatatgttatttacaactttctgtaacaatgctaaatgtg

SEQ ID NO: 104090 - DNA, 421 bp, Arabidopsis thaliana columbia
atcagatgtagagaaaggcttacctccaaaaaaggagacaatactcaaagttggcatgtctcaaatgcaaaaacagtactacaaggctttactgcagaaggatcttgaagtggttaatggtggtggagaacgcaaacgtctgttgaacatagcaatgcaattgcggaaatgctgcaatcacccttatctcttccagggtgcggagcctggtcccccatatactacaggagatcaccttgtaacaaacgcaggtaagatggttctcttagataaattgctacctaagttgaaggatcgagattcaagggttctgatatttctcagatgacaaggcttttggatattctcgaggattacctaatgtatcgtggttaccagtactgccgtattgatggaaatactggtggtgacgaacgagatg

SEQ ID NO: 104091 - DNA, 420 bp, Arabidopsis thaliana columbia
acaaatcttaaacgttttactttgtgctgcactactcaacctcaatggccgcctcaacaatggctctctcctcccctgccttcgccggtaaggccgtcaagctttcccccgcggcatctgaagtccttggaagcggccgtgtgacaatgaggaagactgttgccaagccaaagggcccatcaggcagcccatggtacggatctgaccgtgtcaagtacttgggtccattctctggcgaatcaccgagctaccttaccggagagttccccggagactacggatgggacaccgccggactttcagctgaccccgagacattcgcaaggaaccgtgaactagaagttatccacagcaggtgggccatgctcggagccctaagctgcgtcttccctgagcttttggctagaaacggagtcaagt

SEQ ID NO: 104092 - DNA, 389 bp, Arabidopsis thaliana columbia
cggatgggttctcagatcacacacaaccaaccatctcctcagaagcaatcaggtaagccagcggaatccgaatgtctctacgcaccagaggtttgaatccagattccgctggcttacctgatggcttttcagatttccggatgggttctcagatcacacacaaccaaccatctcctcagaagcaatcgccgcgtcttttggctcctattcccttcgaatccgcgtatgaaggatacggttcttatacgcaattggttgatactcttttgggtattgagagtaagtcttgtagaggcaaattggttaagggagaaattggagtggttaaggatgagaacgagtctcctatggtgaggactaggagtagttctcgtgtatctaaagtttct

SEQ ID NO: 104093 - DNA, 448 bp, Arabidopsis thaliana columbia
cactactcaagtggtgtgaagaaaggcttctctaatatattgacggccacttgcagataatcatcgagatgaagaacagattccgaatttgaagtaattcctaaaccatctaacaaaagtcttgtatttatctgcacctggggctttagttatatgatgggttgctcagaagttttttgttgtccgttttgcaatccacttcgatctgattactttctccaagtataacagtgtcattggtggtgggcaatggactgtatgcctgataaaatctctgattttgcatctttgttggtgacacagtgaaaaccaataatatgtacattagtattttcttccttgtccgctgctttttacatgctaggtaaatgctgctctatttgctgaagagaaacaatgtgtcagctgccatgtttgctcctggatgggtatatgagactgcacaaca

SEQ ID NO: 104094 - DNA, 402 bp, Arabidopsis thaliana columbia
cccacgcgtcaggaaaaaaggaaaagaaagaaatctataaaaaaaaatggattttcagacaattcaagtgatgccatgggaatatgttctagcttctcaatctcttaataactatcaagagaatcatgttcgttggtctcagtctccagattctcacactttctctgttgatcttcctggtaattataattacttattttctcactttattcattaccacatattgtaaagaataaataatcttggataatcttcatttttttgtatgtgttctgttttttttgtttgttcacttcccaaccagggttaaggaaagaagaaataaaagttgagatcgaagattcgatatacttaatcatacgaacggaggcaacccctatgtcgcctccggatcagcctttg

SEQ ID NO: 104095 - DNA, 106 bp, Arabidopsis thaliana columbia
atccgtggaagcttgggttccacaccgttaaccatcattctggttatcatttaggtcacaagctacaatgatgccttcaccagaaacgattttccagaagatttcc

SEQ ID NO: 104096 - DNA, 420 bp, Arabidopsis thaliana columbia
gtttcttccaaacaaagattctttttttttttttccttctgggttttagaaacagagagtcactctaaagattttgtctcctgggttttttgggagagaaatcagtcgacgaagctaagatgagcagcaggcgatcagtgaagagatcattggttcttgatgatgatgacgatgaggatatattctacaacttcaaggtccttctacctaatggcactagtgtgaaactcacactgaaaaacccagaaccggagatctcgatgcagtcttttgtcaacttggtgaagaaggagtatgataatgcacgaaaagattgtcttttgatgtctaagaggatgaaggttgattggaactcaggcggaaagtttcatctggagtcaaatggtgggaagatgaaaggcattgttcgctttgctgcgt

SEQ ID NO: 104097 - DNA, 369 bp, Arabidopsis thaliana columbia
acccacgcgtccggcaattgcaaagaacactgagagagagagagagtgtgtgtgtgacctttgagagatggaggaaaaacgacgcgattctgctggaaccctagcttttgctggtagctctggagattctccggcatctgagccgatgccggcgccacggcgacgcggcggaggtttgaaaaggaaagcgaatgctcttgggggttctaatttcttctcttctgcgccgtcgaagaggatgttgacgcgtgagaaggcgatgcttgcttctttttctccggtacataatgggcctttaactagagctcgtcaggcgccgagtattatgccctcggcggcggatggggttaagtcggaggttttgaatgt

SEQ ID NO: 104098 - DNA, 309 bp, Arabidopsis thaliana columbia
acccacgcgtccgcgagtagcattaggttgtgtgtaaggaggcagttcaggttcctccgttggttccgagtcgacttgttccttgatgacgccttctctggagttcccggatcgcatcagtttccggaaaaaggatttcagtgaacaaggtcctagtcaacacgtttgggaaaagcgtaaattgacgcgtgccaagttgagtgaaaatttttgcaatccggaagacattgaaccagtcacatcttggctgaagggtcaacttctaggagaagaatcatttgcctctgtgtaagaagccacttcagattc

SEQ ID NO: 104099 - DNA, 434 bp, Arabidopsis thaliana columbia
cggacgcgtgggttggacaacacaaacatagacctcgttgcagaacgcgagaaggtggtgtctttaacaaggcagattgagtcacttggtactgtcaaagagaagaatttagtgatggaaaaagaaactcaggagtataaggagatgctggaggaatcagaaaagtgtcgggtgcttttagaggagcagatttcgcagcttgaaagtgattccaacgagaatattagagagctctgtagcaaggtggacattgcatatgccaagttggcagaagaggttgagaagactgcctcattggttagaaaaagtgagtctattgatctaaacgaagagcataggcaacgggagcttgatcattacaaggaaatgcttgaggagtctaccaaaactcaacttctcttgcaagagaaagttgtagatgtggaaaacgactc

SEQ ID NO: 104100 - DNA, 327 bp, Arabidopsis thaliana columbia
atccggcacgtcatcaatcatcatcatccgaaacctcagatctctaaggccgggatggtaattgcacgaggtttgttaggaatacaaacaactcttgtgaaaaatatgcaacatatggtattttccctaaccgaagcaggggctcgacttttcgttaccagattctttagacaattcatatcgatcggttgtgtaacgatactagaaggagacacgatattcatatttggggaaaatgaatctacttgtcctttgaaatctatcctcaagattcacagtcctcagttttactggaagattctcattgcaaacagagacctgaactca

SEQ ID NO: 104101 - DNA, 350 bp, Arabidopsis thaliana columbia
gtcaatattaaattcaggaggattgatgattttgagttcacacctgaatgtgcaatatttgatttacttgacattcccttatatcatggatggatagttgatcctcaggatgttgaagcagctaatgcaattggtagcaaatcgtataatgctcttatgggtgagctagttgcactggagacacagaatgtagaggctcaaggcgatcaaaatcccggagaagattctgttgattttgctgcggcaactactgcagttttaggggttccttcaccttgtctttcgaaaacaagatcttttgatgattctccacctgcggctgcagagcttcgtagaatgagaaaggggga

SEQ ID NO: 104102 - DNA, 193 bp, Arabidopsis thaliana columbia
gacaacagtattcacgtgaagcgagagattcaacttccatctacttctccggctggctttccggggagagaatctgtaactgtagtcgatctctgtagtagtgatgacgactccgacattggagaagtcgccggtggattagagaaagtaggaaacaacttcgtcggtctgaagagaggacgagatacttttg

SEQ ID NO: 104103 - DNA, 365 bp, Arabidopsis thaliana columbia
gacattagagacctcagaagaagagaagtttttgattcttcgtcgagactttactcgattttgcatcgaagaagagaggaagaagaagaagaaaaagtgaaaaatttctgggtttcgattttgggtgagagataacaaaccctaggtgttgtgtaaatcgtgatcacatatatgctttttgagtcgacgattagagaagacgaagaagagtagcaagcaaacactatgatgaacacttctaatggaatgatatcagcgccatcttcgtcgtcttcaccggcggcgaatcctcagtcgccgggaattaagacttatttcaagacgcctgaagggaagtataagcttcactacgagaaaacgcattc

SEQ ID NO: 104104 - DNA, 377 bp, Arabidopsis thaliana columbia
cggacgcgtgggcttttgtggtctctgttggatttggtttggactatcttcacgagattatcctcatcttcccgcttcttctctcctttgaatctttcttcgttgttctttcactttcttaaagaggatgtgagattgtttttggtacttagaaaatggatacaccggaaaagagtgaaacccagatcggtactccagtttctaaactcatagtcgaggattcaccactgtttagttacatatgcaatctctcaccaattatgactatcaaaccaattccaatcacttgtcctttaagctctctcaattacgcatctccaccttctgttttcacttctcctcacgctgtttctcataaagagtctcgtttcagaagt

SEQ ID NO: 104105 - DNA, 163 bp, Arabidopsis thaliana columbia
cagacgcgtgagcaagaagtcatttttctagttgcagctcaatggtgccacttcatggttctggggttttatctaatcaaccttctatctctcggggaaaaataaagcagtcggatgttcaagcatctgctgcctctgggattagttctgttgcatcgttgtt

SEQ ID NO: 104106 - DNA, 208 bp, Arabidopsis thaliana columbia
gtaaaagcagaggagaagagaagagagacggagcaatgtaccattgacatgcgaaatgtgcctctcagaattcttatcctacgcctgtttcaatttcttctccaccatgaaagttttctgattgctctttcctcataaattttgaagcttcgtagtttcatctgcattcctcgcaatgcattggcttacgagattctctgctttcttc

SEQ ID NO: 104107 - DNA, 233 bp, Arabidopsis thaliana columbia
attatcctctcatggcggataacacgagacctgtctaaaggctcttcttcttcttcgtcatcactactactactcctctctaacgttttcctcgagctgcgcggccactgaagatcgcagcgctagagcctgaatcttcttcatctcctatctcagctactaacagaacaccagaggattagagtccacacgttctaaatcgtaagtctcctcgaagccctgtctctgagaag

SEQ ID NO: 104108 - DNA, 393 bp, Arabidopsis thaliana columbia
cggacgcgtgggcggacgcgtgggcggacgcgtgggcggacgcgtgggctgagattcccgccgacatgcttctgtttcaaatatgcattccatttatcatcgagcatttcagacttcggaccacaattaagtcccttctacgctgctggttcactggggttggttgggcgcttggtttaacagacttcctcttgccaagaccagaagacaacattggtcaggacaatggaaatggtgaaccaggaaggcagaacagagcacaagtgttgcaggtcggaggacctgacagggccatggctgcgcttccagtagctgatgaccctaacagaagtcgcctccgtgctgggaatgtcaacacgggtgaggaatatgaagatgatgacgaacaatctg

SEQ ID NO: 104109 - DNA, 400 bp, Arabidopsis thaliana columbia
agctaatcctatgtttaagttctgctccaagattgaaaaccatgaatacaagggaaaaggaaaccaaagaactcgtaagaagagagcttgtgagactgctccacagccaaggaatgtgaaaaagactccaagattaggagtagagggaccagtgtatcaagttgatgaggagagaggacacactcaggtttcaaacagaaccaacaccatctcaggaaatttacagcgcttgctaccaccatcgtgctcagtctccgatcaggtggctaatgtgaaacagggcattgtagatagtctgaacactgtgagacaatgtcggactgagcttgagacaagtgaacaaaatctgcaagcctctttgctagcaattgacgccttaagggagaggatatggggaatc

SEQ ID NO: 104110 - DNA, 360 bp, Arabidopsis thaliana columbia
cggacgcgtgggcgcgagcggccgccctttttttttttttttttttttttttttttttttttttttttttttttttttttttttttttttttttttttttttttacagataaagcttagacaccaaattttacacttgaggaaattgtgctgaagttgtaaaattgaagtgcgtaccctgggaacaaagagaaaagagaagatgtggaagtcaaaattacaaatgcgaagatagatagcattccatttaaaatcggtcaaaccagtaattggtacaagaagaagtaactttgttgcctatgtgagcaccaaagcattcaacaacagataaccataacattggcaccatcaaggcgacctt

SEQ ID NO: 104111 - DNA, 398 bp, Arabidopsis thaliana columbia
cccacgcgtccgtaaaaactggaccttccgatcgctaatcaatatcaatcttagctttttttcgtcttccggttttagattttgtatcctaagctccgatactctttacgagaagcgtttttatttcaagctcagagtcaatcttagtatagggctgctaatggttttcatgtcttggatcacatcctgtggttgaaaaaggagtattctttactgattcttttgagaaagcaataaccaataaagtagaaggctctccttcgtaattgacctggaatctgtgatataagtattgaaagtaccataatttacagtttgtctctcagttcttgaaagtttagatgctgtctaatgatatatggtgtatgagtttaagttcctagactaatcaagaagac

SEQ ID NO: 104112 - DNA, 162 bp, Arabidopsis thaliana columbia
cagacgcgtgggtctcactccgtctctcaatcacttctccgatcagccatggcttctgattcgtctctcggcaacaccaacgacggtcctccttctcccggcgaaaatgtttcaggccctagcgaatacacatactcgtcccccgccgcacttcagcgtcgc

SEQ ID NO: 104113 - DNA, 343 bp, Arabidopsis thaliana columbia
tccgcagaaatcagttggagatattgagagattgattagtttcttggaaccttttggtggaattggtataattgctaggcggccagtgattctcaatagtgacttggatagtcagttgattcctagggttgatttcattaggaatctaagcggggaagacgatttcgctactggaacggtgctacgtagacttcctgccatattgagttatagtgttgagcatatgaacggccaagtagagtttctcaagtcttttgctggcttgacgagtgagcaagtgtttaagattgttcatgtgttccctaatgttatcagcactagtaaagagaggaaactgcgcccg

SEQ ID NO: 104114 - DNA, 212 bp, Arabidopsis thaliana columbia
aatggcttcctctatgctctcttccgctactatggttgcctctccggctcaggccactatggtcgctcctttcaacggacttaagtcctccgctgccttcccagccacccgcaaggctaacaacgacattacttccatcacaagcaacggcggaagagttaactgcatgcacgtgtggcctccgattggaaagaagaagtttgagactctct

SEQ ID NO: 104115 - DNA, 335 bp, Arabidopsis thaliana columbia
gataaacatactgataatagtctcataagtgagctgtacaagcaataggtctcatcaaaacaccaaacctgggacaacgcaaaagaaaagctctgcttcgattgtcaatcttgtaaagcgggtctactcgacaacgtcaaaagcgcttggaagaaagttgcaatcgttaacatcgtcttccttgtcttcctcatcattgtctactctgttggttgctgtgctttcaggaacaacaagagggatgacagttattcccgtacctacggatataagccttgaacatagtttatcgggttttacgacagagattcgttgatacattgttggagtttggt

SEQ ID NO: 104116 - DNA, 181 bp, Arabidopsis thaliana columbia
ctaaaaaaaaaggtaaaatattgattgatagcgatgagttcctgaagaacagtcgtttttcgtttctacaattagcaggactttcgataggaacctcttcatattgagagtaagctttaatctaagaagaagaaagtacaccactacaatccagcaagaaccatcaggaaaccggtgtgca

SEQ ID NO: 104117 - DNA, 376 bp, Arabidopsis thaliana columbia
ggtccacccaaacgtccgatggtttatcacatatgcgtcaatcaattgcgaaatggatatacgacatggatccttttgagccattaaagtatgaggaaccattgaagtccctgaaagctagaatagctgagaaaggatccaagtctgtcttttctccgctgatataggagtatattttgaacaaccctcattgtgttactatagtgatgcagcctgatccagaaaaagcttctctacaggaagtcgacgacaaaagtagtctagaaaatgttatagcaagtatgacagaagaggatcgtacagaactagcgcgtgccacagaggagttgagattgacgcaagagactcctgaacctcctgacgcactgaaatgcgt

SEQ ID NO: 104118 - DNA, 325 bp, Arabidopsis thaliana columbia
accacgcgtccggtccacttctttgggctaaattcagggttttgtgaagaatgggtaacagagtaatctgcatgaagaagaaagatgttgttatcagaagtggaggagatgggtccagaagcaagagagtgaatcgttcacagaggaagttgcttgctgatgaagagaatttgcatcgaagagctttgtctatggctattcatcaagctcaagtttctcagagatttgatggatccatgtctagacgaatcgggtctactagctctagaagaggaacactctctgactcattttctaataacaggcaggttcctgagtttttgga

SEQ ID NO: 104119 - DNA, 393 bp, Arabidopsis thaliana columbia
acttcctggaccaactctgtgagataagcttagccacgagatgcgatctgttggcttcgctccatgaatctagcacgatcgatgcagcgaattttacaaagagtaacattgaaaaaaaaaaaaaacacaaaaagtttcaatggccgcctccacaatggctctctcctcccctgccttcgccggaaaggctgtgaacctttcccccgcggcatctgaagtcctcggaagcggccgtgtgacaatgaggaagactgttgccaagccaaagggtccatcaggcagcccatggtacggatccgaccgagtcaagtacttgggtccattctctggcgagtcaccgagctaccttaccggagagttccccggagactacggatgggacaccgctggact

SEQ ID NO: 104120 - DNA, 384 bp, Arabidopsis thaliana columbia
cacacgcgtccgcccacgcgtccgcggctcgatccgccaagtagagtaagcagcaatgactaaaaagaagaatcctaatgttttcttggatgtatcaattggtggggatcccgttcaacggattgtcattgagctttttgctgatgttgtccccaagacagcggaaaacttccgtgccctctgcacaggtgaggcgggcgttggaaagtccactgggaagcctctacatttcaaaggatcatctttccatcgggttatcaaaggattcatggctcagggtggtgatttttccaatgggaatggcactggtggggagagcatctatggtgggaagttttcagatgagaactttagattggaccatgatggagctggagtcctttc

SEQ ID NO: 104121 - DNA, 338 bp, Arabidopsis thaliana columbia
agacgattcatctattgggaatcggtcaacgtcctcaagtttatcatagatcttagggtttctaatcagatatttgattcatcaaaatcaccaactagggtttacaaagtccatgcttttcgatcattgatcagagagctttcaagaaatatttgcaagaaaatggcaatggctccagtaataaagctggtcttaggttcagttgcctttgccattttctggatattagcagtgtttccctctgtaccattcctaccaattggtcgaaccgccggttctctgttcggtgcaatgctaatggttatcttccaagtgataaccccggaacaagcttatgc

SEQ ID NO: 104122 - DNA, 385 bp, Arabidopsis thaliana columbia
gcgaaacagccgatgaagtctcgcctgaatcttctgtacctttcaccggcgattgacttcacttcagaatcgagagatgagtaaacggaatccgaagattctgaagatttttctgtatatgttacttctcaactctctctttctcatcatctacttcgtttttcactcatcgtcgttttcaccggagcagtcacagcctcctcatatataccacgtttcagtgaataaccaatcggcgattcagaaaccgtggccgatcttaccttcttacctcccatggacgccgccgcagaggaatctaccaactggctcctgcgaaggttacttcgggaatggatttacaaagagagttgacttccttaagccgaggattggaggaggagga

SEQ ID NO: 104123 - DNA, 369 bp, Arabidopsis thaliana columbia
aaccgtcggtggtgatgatgtcgaaaagagaggcggaattgaaagagataagatcgaagacgacggagcagttacaagaggaggttgttgaccttaaaggtgagctctttatgcttcgtctccagaaatcggcaaggaatgagttcaaatctagcgactttcgtcgtatgaagaaacaagttgctcggatgttgacggttaaaagagagacggagatcaaagaagggataaagaaaatgttgtctaggaaacttgacagacaatggaagaaaagcatagtaccaagaccacctccgtctctgaagaaacttcaagcagatttagcagcttcagctgcttcttctgcttgaaaaaacccgctattgattt

SEQ ID NO: 104124 - DNA, 439 bp, Arabidopsis thaliana columbia
atggaaagctgataaaaagaatgatcgtaaacgtgaagccgaaagattttggttccatcattaaaggttaccctggtgaggatcccaagatcttagctcatttcagggatctcttggacaaaatgttcatccttgatcccgagaggagactgactgtgtcacaggcattagctcacccattcatcactggcaagtgaaaccacattgccattttccctctctgttgtatcaggaaatgctgttgtcctagatatctgtacattaaatatcttaattaccattgaaggatctaatctttgaattttctctaccttccctctgctgcctgagagagctttggttacaatgtcgacatgggtggagttctcattaccgacgattctcaggggactttactggttctctattgacatcgaccaatgcttaaagacactcctta

SEQ ID NO: 104125 - DNA, 409 bp, Arabidopsis thaliana columbia
cggacgcgtgggcgaggatcctcgagctttttgatcggagactttttctctcatcgtcgttgtttgaattctccggctgagagatgcttgcttgacgacgaatctccaccgatcttttaccttttcgcacaacaagtaagagaaggatgtcgactccagcgaggaagagattgatgagggatttcaagaggttgcagcaagacccacctgcaggaattagtggtgctccacaagacaacaatatcatgttgtggaatgctgttatattcgggcctgatgataccccttgggatggaggtactttcaaattgtcactgcagttttcggaagattatccaaataaaccaccaacagtgcggtttgtttcacggatgttccatccaaacatttatgctgatgggagtatatg

SEQ ID NO: 104126 - DNA, 131 bp, Arabidopsis thaliana columbia
aaacaaagttcatgaaataagtgttcttttaactgtttagacgcaattgccttcactctctacttcttattacaattctcaaatttggtcacttttgatttactcatttctcaaatgattcaatttcgact

SEQ ID NO: 104127 - DNA, 415 bp, Arabidopsis thaliana columbia
attttctctatctatctggatattattttttcacttggggatttggagaaacctctcctctctctatctatagccatggctgctttcacttgtacctctcgtcctccgatttctctccgctccgagaccagaatcgtatcctcatcaccatcggcttcttctctctcttctcggcggatgttcgccgtcttaccggaatcatcaggtttgagaatccgtctttctctctctccggcttcgttgacctcgattcatcaacctagggtttctcgattacgaagagccgtcgtctgtgaagctcaggaaactactaccgatagtatgttttctcactattcctttttcgattttggttattaacttgtctttgattcgtgctcgttggtggattttgagaactgattattgatttgtg

SEQ ID NO: 104128 - DNA, 147 bp, Arabidopsis thaliana columbia
accacgcgtccgcgagagagcatcgtcctcgcctcttagggtacaagaaggacgatgatctgaggaggaagaacaagatcgattcgatttgtggtcaacgatgagctccttcagtggaaataggaacatcgacaacctcctaatcca

SEQ ID NO: 104129 - DNA, 399 bp, Arabidopsis thaliana columbia
  unsure (1)..(399): unsure at all n locations
gctcctctcacttcatgctacttctaatggctttacatcttctgagctcgccagaaaaggaattaatgttccaacatcacaatgctttctgaattatgtgttactggcaatcgtctatggaagtatcatgctgtatcgaagatccgacattaaggcgaaatggtattactatttcctccttgcttttgttgatgtggaggccaattttctcgtggtgaaggcttaccaatacacttcattgacaagtgtcatgctactggattgctgggcgatcccttgcgttttggtcttgacttggttttaccttaagacaaaatacagattgatgaagatcagtggtgtttttatctgtattgttggtgtttttatggtagtcttctcagacgtccatgcanggga

SEQ ID NO: 104130 - DNA, 284 bp, Arabidopsis thaliana columbia
ggatgttcgtggaggagatgatgatgcagagtggcaaatatctcagagtccgactagtgtaattggtcattccaatggagatgaaggtcttaatcagcctatgcttgagctccaaatcaatgatcagaggtttgaggatgctgaagagatggttcatgaaagtgagaccaaagatcactagactcttcataattgtactcgaaaacatagtagttgtgttattttaacgatgaaagagttgtattatgttcaacgataaagtattatgtgcgtgatacttagct

SEQ ID NO: 104131 - DNA, 428 bp, Arabidopsis thaliana columbia
cgtagttgttgatacatcaaatatccatgtagaaacagaggaggtacgactctgtaatttagattggtctcaagaatttcgactcgtgagtgttgagttcggttgagtcaatcttagttcgtataaattcatatttctaagtgtttgtgtctcaactgaaattccttagagaagccaagagtgatctgttcgctccatcgccttagagaagccaagagtgatctgttcgctccatcgttcacttttgtctttaagcgtatgttgctagaccagacataacagcatggggacacttccaaaccacaaattatggatatttaggccaaccatggcatccgtttcaattaaggaaacattaggaggcaacagcaagctgacatgggtgatttcgtggctggacagcggcaatgacaattgacaaagacatg

SEQ ID NO: 104132 - DNA, 342 bp, Arabidopsis thaliana columbia
cgcgtccgaaagtggtgagcacggccaaaaggattttggtactgaaaaatggcatcaaaattggttcaacttcaatcaaaggcatgtcaggcttcaaagtttgtggccaagcatgggaattcgtactacaagcaattgttggagcagaacaggcaatacatctaagagcctgcaactatagagaagtgcagtgaattgtctaaacaattgctctacactcgtcttgctatcattcccgggcgctacgaaacatttaggaaagaagtagactacgcaaagaacttattgaagaacagagcgaatctgaaggtggaagatgcaagaatcgctgcattgtttggc

SEQ ID NO: 104133 - DNA, 423 bp, Arabidopsis thaliana columbia
cccacgcgtccggcgtcaccttctcatcaacaaattcaaattctcctcggtaagcatgagaattgaatctggggagaatttgaatttgttgatgagaaggtgacgcatatcgtatcccgaccaagcaaaacatgaggatggcattgtattggctcgtacagggatgcacagcaggcgactcacttgtcttccactactctggtcatggttcgcgtcaaagaaactacaacggtgatgaagttgatggctatgatgaaacactctgtcctctggattttgaaactcaggggatgattgtagacgatgagatcaacgcaaccattgtacgccctcttccacatggtgtcaagctccattcaattatcgatgcttgccatagtggtaccgttctggatttacccttcctatgcagaatgaacagag

SEQ ID NO: 104134 - DNA, 326 bp, Arabidopsis thaliana columbia
cggacgcgtgggcggacgcgtgggcggacgcgtgggcggacgcgtgggagcaaatctatatatctattacccatctcgaattcgaccgaacccatgttctaatctccttcgcaacattggaaatctattttaaaaatccgttgagatatagttatataagtagtttggtgactcaattaggtttacacacaaagacatgggatcggctggtgtagcgagttcttcttctgatgttgcgatctcagctttgcgtgagaagcatgagaaggaagtagagaatctaacattaacgacacaacctttgaatacattgaagttgtttgttg

SEQ ID NO: 104135 - DNA, 352 bp, Arabidopsis thaliana columbia
ggaaattagaagacgtggcctgacaagttgcacttattgcaatcccgagaacaatcgagactgacatacctgtgaaagacacatcttttgggtttgacactgctgtataagaggctcaacgagctattactgcagcacatgtggaagccgaaagtatagagaatggtatcggagttgtcaagcttatgggtcgctacagcgggttcataacgatgtatgccactctagcaagcacagatgtggactgctgtttgattccggagtcaccattttacctgaaaggagaacgcggactgtttgagtacatatagaaacgactcaaggagagctgtcacatggttcttgtgattgc

SEQ ID NO: 104136 - DNA, 409 bp, Arabidopsis thaliana columbia
catctatctcctccactatctcctctctgcatctgacactctatagacattgttgataaaaatgagtacaccaggctcttctagatccattccattcaaatcgaagaaacgattggtgatggattcgccgtcttcgaaatctcaaaccgggaatccaaatccgtcttctgtagcattgcctacgccggaaaaaccacttgagaacatgcttagtagatcgagaaaccgatctgtggctttatcagtgaaagaaattcgtcaagccgctggatctcgtcgcagatctgaagatccggttgcttcatctgccaaaagcaggctctttttcgattcatcatcatcttctccttcaaaacgtaaaagctctaacaaaaatgcagagaaagagaaacttccggagaagtacgag

SEQ ID NO: 104137 - DNA, 423 bp, Arabidopsis thaliana columbia
cccacgcgtccgttttgattctgcttactcccaaaaacacacatttaaacatcttagagagatgtcgatctccggagctgtgcttagtgggttgggtccttcgttcttgatcagtggaggcaagagaagcggcgttggcggtggagctatgaaagttggccggaagaatgtgatcattgcacctcagcgcaagaagtcatgggtctcagccgccgtgaaaggtgctggtaactcaccgaacgaccccaaatggcttgatgatgcctcagagaaagcttcggggtacgtgaaagagaagggaagtgaagtgggaaacgtgtctgctcaaaagggacaagagcttcaaaatcagatggagagagcaaaagactacatttttgggaaagctggtgaagcgatggactcggtggctgaaaatgcaaa

SEQ ID NO: 104138 - DNA, 389 bp, Arabidopsis thaliana columbia
acgatttcctttttccgccggaagaagaagcaaaaaaaaaagaaatcgaatctctctttcaagtgttcgatttaaagcaaaagtgtaattataatcggaagcgagatcttgagaaatggtgggatgacggcggagggagatggcgaggggaggaggagaatggaccggagggatcgccggaaccggagttctctctttcaaaagaatcactctacttgtttgctttttcaacattctcattgctctctttgttcttcgctttctctatgcttcttctctccacatctattccaataacgataatggttcctactttttattttccttttcatttttgctctctgattcatgataattcgtatctgaagcagctctgttggttttttgtt

SEQ ID NO: 104139 - DNA, 389 bp, Arabidopsis thaliana columbia
aagattttacaggcaaatcgatttcactcgaagactggttgttgtgtaattgtgttcgtcgtctcaggttttcaatatctgtctctttgagttgtattgatgggttctgaaggaccaacgggtgtgacgattcatatcacagggttcaagaagttccatggagtagctgagaatcctacagataaaatggctaacaatttgaaagaatacttgggtaagaactgtgtttccatagatgtgaatcaatcaagttgtacagtgaatgtaacggaaaggtacagagcgataaagtttagtttatgatacagactgttggtaatgcttgtagaaccattggtcttcttcatgctattgggaatattacctctgaaatcaaactctccgacgga

SEQ ID NO: 104140 - DNA, 166 bp, Arabidopsis thaliana columbia
cccacgcgtccgtttatttcctgtcactttttcttttaaatactcttcaagaaagtgatgagaagaagtccatatatacatgtgtgatatggctgtaaattagagaatgacttccaccaagattggtagaacctgtataatactaactgttctgttttgggtcaaa

SEQ ID NO: 104141 - DNA, 334 bp, Arabidopsis thaliana columbia
ctcttccacccattgttatctctgtagaagcgtgagagagatcacgcgtgttcaccgacacaatcaaaaaatggcaaacggacccaaaaaatgggttcgggccggtaaaccaataaacccaagaacaaaagcaagaatcgtgcccgaaggttcaatgggtcccaaccccgtgagaagcttatgacggagactcctcacaaggttcttgcgcttgatgtttacaatgataagatcaagcacttgcttgagcctgataccgttcaatgggctggtcggatccagtttcatcgtatcaacattaagcatgattctagacttgaaggactgatcaaga

SEQ ID NO: 104142 - DNA, 99 bp, Arabidopsis thaliana columbia
ttcacacatacgttcatatagagatagatacagagatggcgattgtaactccagttgtagctcccatcacggtaagcaacggctgttgcaagtgatgtt

SEQ ID NO: 104143 - DNA, 408 bp, Arabidopsis thaliana columbia
cccacgcgtccgcggacgcgtgggtccgagcatctggcttctctgtcgcatcttctcttccctttcccccaccgacaattctattcatctccgatcaaaaactattcctttctgatcacaatgcatgctctcaaggacaaagtctcacaaaaactctctaatctcttcgccgattctccaagccaatctgcttctcctcgttattccaactccgattctccaaaggctaggttgaattcaagtgtaggcaaatcattgtcttcgtatttctcatttgttgttcctcaatctgggaacgaggaggattctgagttatgtccacctctacccattagaacagagagctatgagtgtattgagaattgcaaatctgctaatgggcaagctaaagctggaacctttatctca

SEQ ID NO: 104144 - DNA, 133 bp, Arabidopsis thaliana columbia
cggacgcgtccgcccacgcgtccgggccggtccaaaggttatggaatcaatcacaactttggcgcttttgacagaaggatatctatcagaaaatggtccagaggggtctgtttttgtgggagacttgtctcca

SEQ ID NO: 104145 - DNA, 329 bp, Arabidopsis thaliana columbia
caacgccctgcggtacagctacctaagaggtccaggtggtcggtttaggaatccttatgatctcgggtgcagaagaaactgctagtggaattctgcctcttcttgtatgactgttaagacggcgacagaaaagaagaggcagaattcaactagcagaaaggataaagccctgcggtacagctacctaagaggtccaggtggtcggtttaggaatccttatgatctcgggtgcagaagaaactgctcggacttcttagtaaaaggttataacgaggatattgagtgtcatgaagaagacgcaacacatagatcagagggtattagcatga

SEQ ID NO: 104146 - DNA, 100 bp, Arabidopsis thaliana columbia
ttcacacatacattcatatagagatagatacagagatggcaattgtaactcaagttgtggctcccataagcgtaagcaacggatgttgcaaatgatgttg

SEQ ID NO: 104147 - DNA, 226 bp, Arabidopsis thaliana columbia
gctagcgagcggccgccctttttttttttcgttcgaaattccatccattatttacaaacacgtgcgtttatgcaagcaatcaaccatcagatttcactcacaagtgcatgcaacatacagaacgtatgaagattgaatttacagaaagataggttggcatccatgaattaacaaacaaactatgtgtgcgatcaagaaggaggaggaggatgcaatcaagattgct

SEQ ID NO: 104148 - DNA, 407 bp, Arabidopsis thaliana columbia
cacgaattgtttcttcttctccaaacacgtgttcttcaaattcgctcatattattctcgattcccacaaacagaaaaagaagatactaaaaattataaaatcccgataatagaatcatgaaattgtttccgtttatgggtgttttaattgcgtctaatcggaatctcttgccgttatcgtctgcttatcagggtaatcaaagaggcactactgatttcatggatcattgtgattgaagttttgagagttggtgaatcagcaagcttctgttacagagccttagcaacagaaagcaaacagaaaatggtcaaaactcgtgctcagcgtatcaagcggatgagtgttgtagatgcactttgcatccggtctcagatctcggtcaaatctgcccggtattgtaagacagt

SEQ ID NO: 104149 - DNA, 370 bp, Arabidopsis thaliana columbia
cggacgcgtgggtggtgaggctaaagattcatcagctcccaatgcatatggagatgatgttgaggcagaggcaaacgcatattttcatcaaatgttttctagtcatttgagtgttgacgcaatggttcaaatgctttcccgatacaaggaatctttggttccaagggaaaaattaatttttgaatgcatgattgctaatctgtttgaagaatatcggtttttccccaagtatcctgagagacagctgaaaatagcctccatactctttggttctgttataaaacaccagcttataagttcgctcactctggggatggccctgcgtctagtgttggattctttgcgtaaacctgcagattcaaaaatgttt

SEQ ID NO: 104150 - DNA, 415 bp, Arabidopsis thaliana columbia
aaaaggcgtttcagattcgatttcggaaaatgtcaaagaagcattttccagtgagatacaaaaaaaagagatttaccggtgaccgctgagatggtgcataatctggacttcacggcgaacatcttcaatgtcgtctttgtgaacaaggcggcgcgtagggattgacttgcaagcgacctgttgtttcgtctctttgtgagttacgaggtacgtgacaccaaactggccacgaccaagctcacgaccaaactcataggttctccgtacttcctccatcggccgacctaagatccgaccattctgctgagtagatgtggtggaacgagatccgcctgttccggagcctgacgatccgacggttccggaaccggatgatccgcggcgttctccggcaggtttaacatggtggactacg

SEQ ID NO: 104151 - DNA, 339 bp, Arabidopsis thaliana columbia
cgaagctggaaagagattctttacgtagtagataggccacaggtggtttcaatcttccccaacaaccagacgaaatcaaacataaatctgtaacagtcgaagaaactctcactctttaattgatcaatggcgtctcttcaaatcagtggctccgttaaattcgagccgttcgttggattcaaccggatgcgccatttccgtccgatcgccagtctcggatttcctcgttttcgacggagattcagtatcggacggtcattgttgcttcgtcgttcttcttccttctccggtgactctcgtgagtctgatgaagagagatttatcacagacgcagagaga

SEQ ID NO: 104152 - DNA, 348 bp, Arabidopsis thaliana columbia
caagttaagtacgacggtttctgaaataaagaaaacatttcttcaatcttgtgcttacggtgatatccgtggattcaaatcgatattgagaagatggtagatgcgatcacggagttcgttgtgggaaagatcggcaactatctcattgaagaagcatcaatgtttatggcagtcaaagaggatctagaagagctgaagacggagttgacgtgcatccatggttatctcaaggacgttgaagcgcgagaaagagaagatgaggtctcaaaagagtggtcaaaactggttttagatttcgcttatgacgtcgaagatgttttggacacttatcacttgaaactcgaagaa

SEQ ID NO: 104153 - DNA, 100 bp, Arabidopsis thaliana columbia
ccaatgtatctgttttcgctagttttgatgggttacaacttgctatgagattttgattttagggaacgaatttgtttatgcgaatctttccattatcgtt

SEQ ID NO: 104154 - DNA, 343 bp, Arabidopsis thaliana columbia
tacttagtctacaatgttggtgatgctatttttattagtgacttgaactcgcaggacaaggatccagtaaagtctatacatatcagcaattcaaaccctatgtgccatgcatttcagccagatgctaagggtgggcatgatctacttattgggctgaactctggggatgtctacaccgtatcactaagacagcagttgcaggatgttggtaagaagcttgttagtgctcagcattataacaaagatggttctgtaaataacagccgctgtactagtatagcttgggtgcctggaggtgatggatcctttgttgctgctcatgccgatggaaatctgtacgtat

SEQ ID NO: 104155 - DNA, 306 bp, Arabidopsis thaliana columbia
ttaatataagcggtggataagattaatcaaagacccatttaaatcagccggacacaatgtttctcgtcactttttgagctttggaacgatcttttgggtctagctcgtgctcttgaggcagagaacccatagacagttgttttgtctgtttgttggtgtcagatccaaaatcaagaggctgttatagctttgacttgggggtgatttgacacaagtgatcagaacaagattcagcgtaaataagagggtaggaatctacttggtcgcttttgcttccacctaatctggggagaatttgggatcttg

SEQ ID NO: 104156 - DNA, 285 bp, Arabidopsis thaliana columbia
gtacgttctcttcttcttctatttttgctgtgtgacaaacaaaaagaccctttttggaatttggatcctcctcctccccggttccttcggcaagtcctcaagctccgcaacggcggaaattcctcaaggtttcctccggaatttccaattggcctctccaattctcctgcgataggtgaagatatgagaaattcgaaacgtttgatcaaggcgtcgtacactcccaagaacattctcatcaccggagctgctgggttcaatgcgtctcatgtcgccaacagactc

SEQ ID NO: 104157 - DNA, 217 bp, Arabidopsis thaliana columbia
cccacgcgtccacggacgcgtgggcggacgcgtgggcggacgcgtgggctgagatggctcgtactaagcaaacagcgcgtaagtctactggaggaaaggctcctatgaagcagcttgctacaaaggctgcacgtaagtctgcaccaaccactggaggagtcaagaagccccatcgttaccgtccaggaactgttgcactacgtgaaattcgtaagta

SEQ ID NO: 104158 - DNA, 174 bp, Arabidopsis thaliana columbia
aacacaagctctcttcccaatctatacactcccaaaatggcctatacataccgttatgcgattcttcgcgttctcctctctgtcaccgtcggatttaccgcagtggccttgtagcctccggttcgacccttgaacgggaacattagtcctaatctcatttgggacgggaaattc

SEQ ID NO: 104159 - DNA, 341 bp, Arabidopsis thaliana columbia
cccacgcgtccggccagcaggctatgtaacatggatatcatatcacaagtgcaacaaatcatttgctttgcgtttcatgatagtaagcttctcatggagacatgtcaagaagctagaaatctccggaagattgttaccctcttctacctggattgagtgattcagtgtttcccacttcaaaaaactcttctttgtcttcttagtgttttgttcatcttcctcttcggagaaagacaagttccattgtaattaggaatcgtcgtttacaaatgcacaacctattctttggtctttcatttttttatttgctttataggggaatctctcgatcatttttaata

SEQ ID NO: 104160 - DNA, 153 bp, Arabidopsis thaliana columbia
taacataaccaggtttggctctacggcctttgagaggcgatttttttaggtctagccacgcaccaaacttttcgtcgcaatatttctgaccttacctttctgcttagctggtgcccttggtcggggacttcgctcgttctggagcttcttctg

SEQ ID NO: 104161 - DNA, 363 bp, Arabidopsis thaliana columbia
acggacgcgtgggcaaatcttaaacgttttactttgtgctgcactactcaacctcaatggccgcctcaacaatggctctctcctcccctgccttcgccggtaaggccgtcaagctttcccccgcggcatctgaagtccttggaagcggccgtgtgacaatgaggaagactgttgccaagccaaagggcccatcaggcagcccatggtacggatctgaccgtgtcaagtacttgggtccattctctggcgaatcaccgagctaccttaccggagagttccccggagactacggatgggacaccgccggactttcagctgaccccgagacattcgcaaggaaccgtgaactagaagttatccaca

SEQ ID NO: 104162 - DNA, 376 bp, Arabidopsis thaliana columbia
cccacgcgtccgctcttctctttctctttcaaatctcttcgccgtcggactcaattatccgttaacccgacccgttaaaaaaccttcaaagtggctccgattttgatttcaaacactaaaatatttatttacctaaaaacatgagttcactacaatgacccgtaccgaaccaaaccggagccggagctccaattccgattccgataagaattccggtaacgtcggcggaggtagaaccaccgggatgagggttattgttccgttacaaggtgtggtacaaggtcgtggtggtttattcctaggctctgtgattccttgtgctttcttctactttcttcagttttacctaaaacgaaatcgtaaaaacgacgaatca

SEQ ID NO: 104163 - DNA, 440 bp, Arabidopsis thaliana columbia
gaaatggatgctgacctgactttggagaatgatccgtctaagggcagcaaaacacatgaaggtccagcctacgctggtggactggtcttggagccaaagagaggcttatatgacaaatatgtcttgcttctggatttcaatagtctttacccttctattatacaggaatagaatatctgttttacgactataccacgatcagaagatggagttcctcgtttaccttcgagtcagacacctggaattcttccaaagttgatggaacatttggtcagtataaggaaaagcgtcaaattaaagatgaacaacgaaacaagtctcaagtactgggagcttgacattcgacagcaggcattgaagctcacagccaatagtatgtatggctgtctggggttttctaattcaagattctatgctaagcctttagcagagctcataac

SEQ ID NO: 104164 - DNA, 425 bp, Arabidopsis thaliana columbia
gaaaccggattgtctttgatcagtagtgggattttgtaatcaggatctgcaagattgtcatcatcatcagttaaatctgtatcaacccaagatgtccaatctacctcgctctctgtatcttcatcgtacgagagctctttcttgctttgcatgtcattcactttatcaactaatcttagcaagatttgatggtttagtacttcatagtccctgcatttttagacaagagaggatatatgttcaattgttcatcattttctgagtttgttttggttaatcaaaacattatagtatattttggttatacctgtatgacaaagcagcatgtagaagctgagctgaagcaagaagagcaaataaagacctgataaggtttatcatccatgcttggcgttctgtatcattcacgtatcgtaaactcgcca

SEQ ID NO: 104165 - DNA, 434 bp, Arabidopsis thaliana columbia
cggacgcgtgggcggacgcgtgggcggacgcgtgggcggacgcgtgggcggacgcgtgggaaagtttatgtcaatctagcttacaacaacttgagtggaccaatcccacaaaccggtgctttggtgaacagaggaccaactgcattcttggggaatccaagactctgtggccctccattgaaggatccttgtttgccagatacggatagttcttcaacttctcacccttttgtaccggataacaacgagcaaggtggaggagggtcaaagaaaggagaaggtttaagtaaaactgctattgttgcaattgtggtttgtgatttcattggaatctgcattgtgggatttctcttctcttgttgttacttgaagatttgtgcacgtcgtaatagtgtggatgaggaaggctatgtgttggagaaagaagggaaaga

SEQ ID NO: 104166 - DNA, 431 bp, Arabidopsis thaliana columbia
cccacgcgtccgggaaaacaaaggatcttccatgggcgatcgctgagaagatccgcaagaacaaaaacatcaaattccttgaaatcaggaatcttattcgatagtctatttgagcccttgatctggtaagctctgtctgatcttctaaagtttcgctttttaacttttggggaaatcatccacctttgtatcaagtttctggcaatttcttctctgtagttagaatcattcaataagccctttaatctcttcgacgcagctagtgttgaattacatctgggttttgtctactttgtgtcaaaaccatgcttttatgtttgattttcgcgaagtatgatttaggttcgattttagtgaaagaaagacttaacagttgtagttaactgaaactatgcgatatctgattacgttggtgttatgattttattgga

SEQ ID NO: 104167 - DNA, 433 bp, Arabidopsis thaliana columbia
gccgtctcctccgctctatccatatccaaaacagctataaagataaacttccagagcttggtgaaggagcagcaaccctagttttcaatccctaaaggtgaagtttttgttcttctttttctttgattctactcttttttcgtcacaatagcgcagtagcgatctgggttggcgtttttattgacggattttggtgggtttgggttcgtgttagattttactttcacagattcaggtatgtatttgatcttatttagctttggtaatactcaaaccaactagtatttgatcttaattaggtgacgttgatattttgtgtgttgtgggtcaatcatccactctaggttgatctgcgtctatgtttagtcctaattttgaagaatcattctaattgctgatgtttatttatgacaattttatgtcttacttcgaa

SEQ ID NO: 104168 - DNA, 329 bp, Arabidopsis thaliana columbia
cgaattcccgtttcgtgaatttctctctctctgtgtgaacaaagacgaagaagacgaagtaacactgatagaaaccctagttttttttttaaatccgtcgaggcgtaatgtcgtcggagctgcagatttcgccggcgattcacgacccgcaaggtcaagagaagcagcagcaagccgccggagtcgggattttgcttcagatcatgatgcttgtcctctcttttgtactcggtcatgtccttcgccgtcataagttctattatctacctgaagctagtgcttctcttctaattgggctgatcgttggtggtttagcgaacatctcgaac

SEQ ID NO: 104169 - DNA, 306 bp, Arabidopsis thaliana columbia
cgaaagaagatttgggtatgaccatggtggaggatatgaccgtgaaatgggtgggaggcctggttatggtgatgaaaggcctcatggtcgctttatgggtcgctatcaggactgggagggaggacgtggaggttatggtgatgcttccaacagtggaaatcctcaaagggatggattgatgtcatacaaacaatttatccaggagttggaagatgatatattgccatctgaagctgaacgcagatatcaagaatacaagtcagagtatatcacaacacaaaaacgtgccttttttaacacccacaa

SEQ ID NO: 104170 - DNA, 264 bp, Arabidopsis thaliana columbia
cgcgtccgcccacgcgtccgcggacgcgtgggcggacgcgtgggggagccagtgaaggcagatgagtagctaagtgcttcagaagctctgacgaatgaagctcagtgatcaagcagacgaaacaaatcagcagttaatggagattaaggcctctgaggattccaggatggatgagcttcgcaagctctctcaagaacgagacaaagcgtggcattctgaactcgaagcaatgcacatacagcatgccatggattccgctgctct

SEQ ID NO: 104171 - DNA, 209 bp, Arabidopsis thaliana columbia
cggacgcgtgggtttggactttctttgtcttaaccctaacatttccaaaggttttccaacaaacccgcagcgattagcatttgttctaatatctcatcaaaaccctttcaaaaggtgaaaatagattgggaataccaccttgctgtgaaaagactggagtgaagaaagggccatggacacgagacgaagacatcaacttggtttcgtac

SEQ ID NO: 104172 - DNA, 353 bp, Arabidopsis thaliana columbia
gagctttcaaaaaattgttgtacttcccaacggatctctgacgtttggtccagagccgacgacgacccagaaccgaaaccaagagctatctctttttcctcttctctctctccttctctagctgcgttcgtgcttaaacaatgatctccctgaatctatctccttccctcaatccgggtctcctctataagacccggacctgtcaacaaacgaaccgtctctctgctcttctcgtcaccaaccctaaacccttcaatcacacacacccacgagggctttcatcgattcccaatcgccagattcgtgatgtttccgcaaaatccttgctttcacacagaaatcctgaatcctca

SEQ ID NO: 104173 - DNA, 115 bp, Arabidopsis thaliana columbia
cgggtcgacatcgcgtccggccacacgtccgatttcactccctcttccgattctcctgttgttccatgcatcattaagctatggatttcaatagaaaagctcatccagattgcgt

SEQ ID NO: 104174 - DNA, 293 bp, Arabidopsis thaliana columbia
cggacgcgtgggttctctttctccttttcttctccgacgattcttctcagttctcagatctgatcgatttcttcatcagatgtttcaatctaaccattgagattgaatagtcaccagtagtagaagcttcgagatcaatttcgaatcgggatcatgtcgtgtttagccctagctctgcaaccagcaaatggatccgacattttgctccaaactagagaatggtttccaccagcaagagccttaatcgctctctcgtagtttcgtcaaatgcgtcaagcattagcgtcctcgaa

SEQ ID NO: 104175 - DNA, 177 bp, Arabidopsis thaliana columbia
ataaatgtttcttgatcggttcagtgggagccatagctatctgcgtgcctatgtcttcagctcctgtggttcctcgtgccattgagcgtggatggagtgagtcttccagtcctaatgtccgtggcccgctagctcttgtttttgatttctctcatcgtgaagcataacgcaaatccg

SEQ ID NO: 104176 - DNA, 244 bp, Arabidopsis thaliana columbia
acgcgtccggaacaacaaaccgatcgtgttacgtctctctctctctcagtctctcatcaccgacgaagatcacggctcttttctctgtttaatcggcggaatctctcttcttattttatttttcttccggtagatcgatccagctccgagatcaaccatgaatcctgaatatgactatttgttcatgcttttgctcactggtgattctggtgttggaaagtcatgcttgcctctaaggtttgct

SEQ ID NO: 104177 - DNA, 376 bp, Arabidopsis thaliana columbia
ttgatattggagggaatcggtaacgggcatggaagccactgatccaagcgcagagatcgagctctacaccattcctgctcaatccagttggttcttatgggatgatatacacgaaattgaaagacgcgagtttgcggagttcttcactgagagctcaatcactagaacccccaaagtttacaaggagtaccgagatttcattatcaataagtttagagaggacacttgtcggagactcaccttcaccagtgtccgcaagtttcttgttggcgatgtcaatttgctccagaaagtttttctcttcctcgaaaaatggggattgatcaattttagctcttccctgaagaaaaatgaccatctattgtccgtggataat

SEQ ID NO: 104178 - DNA, 440 bp, Arabidopsis thaliana columbia
gcaaatttcaagtgttatttcattcaatttcgatccgagtaaccatggagtgtggatcaatggatcggacagataaatctgtcgacgtggcgaagctcgccgagcaagccgagcgttacgaagagatggttcaattcatggaacagctcgtaagtggagctacaccggccggtgagctgaccgtagaagagaggaatcttctctcggtcgcgtacaagaacgtgattggatctcttcgtgcggcatggagaatcgtgtcttcgattgagcaaaaggaagagagcaggaagaacgaagaacacgtgtcgcttgttaaggattacagatctaaagttgagactgagctttcttcgatctgttctgggattctcaggttacttgattcgcatctaagtccttcagctactgccagtgagtctaaggttttttacctgaagatg

SEQ ID NO: 104179 - DNA, 344 bp, Arabidopsis thaliana columbia
gatggaataggacgaggaggaggatctggatcatctaacggctctggattcgggtctttatgaagaaaagaagtgttgacaacaccaacaagccgagtacaacgggcgctagggttaaagatgcctaaacgatctccttctaggcgaatgtcgacagtagggacagttgtacgggccgtctcagctccttcatccccaggtaataatggaagcataggaagtggttcaggacactttagccctggggctgggttttttacagtcacgcctgctcggcctcgacgaccgttaacctctgcagaaatcatgaggcagcaaatgaacgtgacagaacaaagtgacac

SEQ ID NO: 104180 - DNA, 411 bp, Arabidopsis thaliana columbia
acggcaaataacgaaaaccatggatccgaaaccaacctcgatgtggagctcaattgtgaagaaagatccaccttcaaagcctccggttaacgacggagctccggcagcgattctcgggatggtcggaaactgcaaatccacaaaaggaatatctattgcggttgttgacgccaacgccatcattgaaggacgtcagagcttaacaaacttcgccgacaaattcgtaactgtccctgaggttctctctgagattcgtgaccctgcttctcgccgtcgtctcgctttcatccctttcactattgataccatggaaccttctcctgaatctctaagtaaagttatcaaatttgcaagagctactggtgatttgcaatctctgtctgatgttgatctgaagttgattgctttgtc

SEQ ID NO: 104181 - DNA, 301 bp, Arabidopsis thaliana columbia
cctgttgatatcttgagaagacttctggaatccaactctccaaggtcccttctagaagattttttcacccgctttggactatgcgaagcagctgccatgtgcttgatgttagctgcccggataataaattttgaagatttaattagtaacattgttgccgataaagcagctgaggcttttgaggatccgagaattgtacgaatgccacaatttgatggcagtagtggattgtcaaatactagaacagcaactggacgtttcagcatgggtcatgttgttcaagaagccgagcccattttct

SEQ ID NO: 104182 - DNA, 246 bp, Arabidopsis thaliana columbia
cctttctcgccgctgtattcgtcctccaactcctctcaactctcacggtcgcggagatcaggtctttcactatctccaacgattctcggccagtgattctcttggagaaattcggtattattgagattggtcatgtgcccgtctctgtttcctctgtttcagtattgtctccgattctagactcgtccaacttacggttctttgttctagcagatgaatctcttcctcatgtactcctcgagctcc

SEQ ID NO: 104183 - DNA, 165 bp, Arabidopsis thaliana columbia
cgcccacgcgtccgcggacgcgtggggcggaatacactaaggttagagtaatgagccaagctccttgaaggccatgacttaacaactcagcttcggtgatccagaaagcattcgcggcacacgacgctagtgtgatcgacgcacgtaaccacgagtgggagaaat

SEQ ID NO: 104184 - DNA, 411 bp, Arabidopsis thaliana columbia
tggagtttcacgatcccgagatcatacttttttccctcctcgtacgtaacgatttttttttgtgattattaatccaaggttttttggcgtctcttttaggttttgatccctattgcgcacggtacggagcctctagaagcggtggcgatgattaccgtgttgcgtcgaggtggtgctgacgtgacggtggcgtctgttgagactcaggttggcgttgatgcttgtcatggcatcaagatggtcgctgatactcttctctctgatattaccgactctgttttcgaccttattgtgctccccggagggcttcccggtggcgagactcttaaaaactgtaaatctttagagaacatggtcaagaaacaagactctgatggccgacttaacgcagctatatgttgtgctcctgcc

SEQ ID NO: 104185 - DNA, 353 bp, Arabidopsis thaliana columbia
aacgaattttattattaaaaaaggaaaatgttattccttttttgcttctcttgacttggcgtaatcaacttcgccatcttcgtttttgtttcgatcccaatcgagttttctctcaatttgagaaatgggttcactgaaaaaggacggcgagatcggatatgagtttacggaggcgttactgtacgttaacggcgttcgtagagtcttgcctgatggattggctcatatgacacttctcgaatatctcagagatttaggattgaccggtacaaagctgggatgcggcgaaggtggttgtggggcttgcacggtgatggtgtctagttatgacaggaagtcaaagacctctgtgc

SEQ ID NO: 104186 - DNA, 260 bp, Arabidopsis thaliana columbia
aaaacccttcaaaacatttccttattctttcttcttcatctacaacaatggctggagttgcctttggttcctttgatgattcattcagcttggcttctctaagagcttacctcgctgagttcatctccactttactctttgttttcgctggtgttggctctgccattgcctacgcaaagctgacgtcggacgctgctcttgatacaccgggactagtggccatcgcggtctgtcatggttttgctctcttcgtggccgtt

SEQ ID NO: 104187 - DNA, 212 bp, Arabidopsis thaliana columbia
aaccaaacaggcacatccctcacagattccacactccaccatctctcctctcttccaaacctagtcagtctcggactccgagatggagttttgaccagcaatggtcttgagaagtttagaccacctaacaggctaagaacactcgacctccaaggttgttggcttttaaccacagatgatattgctggtctctgcaaaaggtaccctcacat

SEQ ID NO: 104188 - DNA, 118 bp, Arabidopsis thaliana columbia
ttacgaagattgagagagtagcatatcatgatgtgaaagcagtggagtatttcttgaaacaaaggtgtgaatcacagccagatattgctaaggttcgtgagtttttccatttcgcttg

SEQ ID NO: 104189 - DNA, 369 bp, Arabidopsis thaliana columbia
aacgaaggtgaggaatgtgtaaacacagtgcctccagtttgtgcagacaaagaacccgtttatgaaggtgagtcacttcttggtaaaagggttgagaaggatgttggtgattgttcttctgaagggagggctacagatgggctcacagcagaagaaggtgaactaatcaggaactttatgaagaatagtgcaagtcaattaaccttttgtggactctttcgcttgcaaaaaggcctcaaagaacgtgaactctgtgtttttttccggaacaatcatttctgcaccatgttcaagtatgaaggtgaactttatcttttggctacagatcaaggttacctgaatcagcctgatttggtttgggaaaaacta

SEQ ID NO: 104190 - DNA, 176 bp, Arabidopsis thaliana columbia
cgcggacgcgtggggacaaatcacacgagaatggatcgactttgatccttccttggcaaccttacgcgaggaatcattcattctccttaaattcacagcgagtgaagtaagtaagcatggtttcgtgagcgacccaaatgattcttccatctgaaaatgggtatagagtttgggag

SEQ ID NO: 104191 - DNA, 342 bp, Arabidopsis thaliana columbia
aggacgcgtgggtacgaattctgtatcgcaaaaacatcaaatctcgaaattgagctccttttctggaactagggattgctttccgctccttgcgctaagtctacttggtttctgattcgtacaatttgatgaaatgcgagtgctcagcgagattgcggagtcaccgttcgtgatttctcggctaagccctgattcgacggccaccggagggtttatcggcggatgggtcgggaagtgtcatgggtttcttcataacacggttttggttttagcatctattctattcgtcgcttacttagcgtacgaggcgaagaagagcttgtccaagttgtctaatcggag

SEQ ID NO: 104192 - DNA, 176 bp, Arabidopsis thaliana columbia
cggagacactttgcggagattgtcctataatgtcaggacgacacctaatgttaagattcttgagatctgtgggaggcacatgcttgaagctttggttttggctcataattctaatactggtgttgaacaatgttttcagaggtttccgtgtttgaattcgctgtcactgagttagg

SEQ ID NO: 104193 - DNA, 333 bp, Arabidopsis thaliana columbia
cccacgcgtccgcccacgcgtccgcttttttgcactgatttgtgcttcgcttacacattgctagtagattccccgatctgggttttttcttattcgtgttcatcatactaaagtttggtgcttttttgtgtttgtgtagatagagagagagatttaaggaaggaatcatggcagggggtggagctccagcagccaaagcagacgaaccacaaccacatcctcctaaagatcaacttcccaacatttcttagtgcatcaccagtcctcctccttggcctgaagctattcttcttggattccaacattagcttgtgatgcttgggacaacggtgc

SEQ ID NO: 104194 - DNA, 296 bp, Arabidopsis thaliana columbia
agtaaacatgagtttggtcgccagtttgcaactcatcctcccgccacggccgagaagcaccaagttgttgtgctcattgcaaagcccaaaacaagaacaagaactctcttctacttctcctccaatctctcttttaccaaaactaatctcttttgctcttgctatctctctaacttccttttcccctgccttagccattccttctctctcctcttctcagccactcagcactcctttcagccaatccaagttcgtccagagcggtcttctcaatggcaaaattaggccttgccctt

SEQ ID NO: 104195 - DNA, 406 bp, Arabidopsis thaliana columbia
acccacgcgtccgcatccgtgtatacaattacaatacaatggacaaggtcaaagtatttgaggctcattcggattacattaggtgtgtagctgtccatccgacccttccatatgtgctgtcatcttctgatgatatgctcataaagctttgggactgggaaaacggttgggcttgtactcagatatttgagggacattcgcactatgtgatgcaagtggtatttaatccaaaagataccaacacttttgccagtgcttcgcttgatcgtaccataaagatatggaatcttggttccccagacccaaattttacactggatgctcatcagaaaggagtcaactgtgtagattatttcacagggggtgataaaccctatctaattaccggctctgatgatcatactgc

SEQ ID NO: 104196 - DNA, 325 bp, Arabidopsis thaliana columbia
atttaaattatttgagcagccgcagcgacaggaagttttcttcaactgcgacggagcgtgaagttcacgctccggcggtactacctaagaactgatccaactttgaaaagaaaaatgttgccgaagaatgctattgagaagatccaagcaaatgtgagcaagccttgcttctggaagtctctctctccatgacaaacttggaaatctaaatccatgaggataattccggaagactttgtgagaagaacgcgtggtgcttttgtgcacagagtggtgtttagtgttcgttgggaaaactcctggcaactctggctggagcgagaga

SEQ ID NO: 104197 - DNA, 206 bp, Arabidopsis thaliana columbia
ttgatattgataaagtaccaaagcatgtgaaaaatacgggaagaaacttccaacagaacggtactgtgacgagagacttaccgtgtttgttggaagataaccaggatgcagaagtgattggcatcatcaccttagaggatgtctttgaagaacttctacaagcagaaattgtggatgaaactgatgtttacatcgatgtacataaa

SEQ ID NO: 104198 - DNA, 333 bp, Arabidopsis thaliana columbia
caaaaaagcagaattaaatttgtggtagatacttgtttttaaattcatatagctcaaaaaagttgtcatttttaatgttggttttctggtggcgatgctcttaattacccaattccgtacgatttatgatcataagtcaacttttgagatttgggtttgtgaaattttcctgaataaaattatgggtttagggtttttatgatcaatttcctgtaaagtagcgatttttttctcccggggattttggtgaggaacaggatataaagtcttggttttgttctgtttattgtgtttgtttttgggttctgatcaatgaagaagatgattgggagt

SEQ ID NO: 104199 - DNA, 353 bp, Arabidopsis thaliana columbia
acgcgtccgcccacgcgtccgcccacgcgtccgcccacgcgtccgcccacgcgtccgccttggtggcctgtcctcaaaacacaagatgacttgattggtgtggtaactacgattgcatgggtcacctcaggtcaccatgcagctgtaaactttggacagtacggatatggaggatactttcccaaccgaccaacgacaacaaggataagaatgccaacggaagatccgacagatgaagccttaaaagagttctatgagtcgccagaaaaagtgttgcttaagacatacccatcgcagaaacaggcgaccctagtgatggtcacgttggatcttttatcaacacattcacctga

SEQ ID NO: 104200 - DNA, 212 bp, Arabidopsis thaliana columbia
gccattagtgatcgcagacaggactcctctggcacatttgaattgccacttgattttgttatagacaagtgtctactgcaggaaatacatcttcaatataactttgtcagtaagctagctatcaagttgctcgaagaaggatttggcttgcaagaacatctgctagctctacgtagatatcatttcatggaactagcagactgggcagatgt

SEQ ID NO: 104201 - DNA, 374 bp, Arabidopsis thaliana columbia
gggccggcccacgcgtccaattcaagcggttctcctgttccttgtcttcgtcgttgagacgagagtacaagcgcagctagtgccgccggtgaggcaagatggtttcgtttacccaccgggtcatcgtttcgacccggatactatactaattgaggcgtattttgacccggtttgcccggacagtagagactcttggccgccactgaagcaagctcttcatcactatggatctcgcgttgcccttctcctccatctccttcctttaccctaccatgacaatgcctatgtaacatcacgggccttacacattgtgaataccgtacacgccaatgctaccttcagtttgctggaagggttcttcaagcatcagtcat

SEQ ID NO: 104202 - DNA, 183 bp, Arabidopsis thaliana columbia
cggacgcgtggggctctcttttctctccagatttcgatgcccgacgctcgagataaaaccgtacatctcttctccgttcactcaatcaaccaaagatgcgtgggattcttcacatccagggtggtcattgcggtaaccatatcggggccaagttctgggaaatggtttgcgccgagcacggca

SEQ ID NO: 104203 - DNA, 364 bp, Arabidopsis thaliana columbia
gtaaaattgaaagcattggagacaatggagagaataaacacgaaatgggtagcagcagcagcgagtatatggattcaaagctttagcggagctacatacacattcgctatctactcttcaatcctcaaatcatctcaatcttatgaccagtctactcttgatttcgtctctgtcttcaaagacatcggtggtacctttggtatcatctccggtttcctttacacggctatgacttctaagtcacgcggttttggtgggccttgggttgttgttttcgttgggttggttcagtggtttgttggattcttttttatttgggcttcggtggttgggttgattgctccgccgcctgtgccgttgatgt

SEQ ID NO: 104204 - DNA, 221 bp, Arabidopsis thaliana columbia
cccacgcgtccgatgttgttgaggtgaaatagtgatatgataaagaagtgcgagtgtacatacatgatttcggaatcagaatcacatgcaatgcagattgtgaggagatggttaagaaaaagaaagccatttgtggagatccagtgagtatttataggcactcctttgcttattcaatgttttttttttttgtgtcaacataagtttgtaaagtgggtttt

SEQ ID NO: 104205 - DNA, 372 bp, Arabidopsis thaliana columbia
gactttgttcatggaaaagatgggcttggcaaccaaaacttccctccacctaaaggaaaaccaattgaaaagtctggacctgagtttttagttgaacaagcaaagctttgccctggtgaaatcacggttgttgctttgggaccactaacaaatctcgcgttggctgttcagcttgatccagagttttcgaaaaatgtcggacaaattgttcttcttggtggagcatttgcagtaaacggaaatgtaaatccagcttcggaagctaatatttttggcgatcccgaagctgcagatattgtgttcacatgtggggccgatataattgctgtgggaatcaatgtgacccatcaagttattatgacagctgatgac

SEQ ID NO: 104206 - DNA, 366 bp, Arabidopsis thaliana columbia
ctagaaaaggcttcacgcccgatttcttttttccccagaaaaaggcttcacttccgttcgttgttcttcatcggtctgcgccgcctcgcacatcgtttcacctttctcagaatctctcttcccgtcgattagtttcctcagagtgaatccaacccagatttttcagattttaatcggaattattcgggatctaatgctcgcgtcgagtttatcgctagaaaaccctaatttcggaggatctgtcacttttattatcagaagcttgttgttgtaattacggattaggtatgtcctgatcgttattgttctttgtttgcaggttgcgatttgttgaaaaccttgatttagactatgaagtctcttaat

SEQ ID NO: 104207 - DNA, 175 bp, Arabidopsis thaliana columbia
gagatccttacgatgtatttccggtctgttttttgtcccaagaactctaactttacatatgatgggaacaggtcggagtttttgtctctatctgtcgtactgttgtacttgctgatttttactcattctcccttatcaataaatcttggcttcgtgacaaaaacaaaaggagaaa

SEQ ID NO: 104208 - DNA, 420 bp, Arabidopsis thaliana columbia
aatgctcaaatgttgagacattgcatatagtgaaaactccagaatgttcaaactttggtctgatttatgtagctgagagatgtaagctgctgaggaagcttcatattgatggttggaggactaataggataggtgatgaaggtttactttctgtagccaaacactgtttaaacttgcaagaacttgtgctgattggtgttaatgcaacacatatgagtttagcagccattgcttcaaactgtgagaaactcgaacggttagcactttgcggaagtggaacaataggcgatacagagattgcttgcatcgctaggaaatgtggagcattgaggaaattctgtattaaaggatgtcctgtttcggatcgagggattgaggcgctcgctgttggttgtcctaatctggttaaattgaaggtga

SEQ ID NO: 104209 - DNA, 220 bp, Arabidopsis thaliana columbia
agacattctttaaatgcttagatgctaactatgttgcaatggcactcatggaaaatttgcagtcgatggaattcacgcacattcggctgtttattcatacctttataacttatatagtcaaatcttgtccggcggatatgtgggagtcatggctgggagtgcttctgcacccattgtttatacactgtcagcaagctcgcagctccgcctggccagggtc

SEQ ID NO: 104210 - DNA, 184 bp, Arabidopsis thaliana columbia
agatctctctatctctaacgctattcgatgtgcgtaaattagggttcttcaggcgtcggatctgattgtatattgtgaaaatctcagatcgcagatctcttatcgaacaccgttgcgtgtcttcgtttccgtctggaggtgaagcaaagtcaggagctgtacatttccgctttcatgttctgtg

SEQ ID NO: 104211 - DNA, 236 bp, Arabidopsis thaliana columbia
cccacgcgtccgtggtggatcaacgatggttgttcaggtgggcgacgtactagatcgaggtggagaggagttgaagatactttatttcttagagaaattgaaacgagaggctgagagagctggaggtaagattctgactatgaatgggaaccatgagatcatgaatatagaaggtgactttagatatgtgactaagaaaggtttagaggaatttcagatttgggctgattggtatt

SEQ ID NO: 104212 - DNA, 314 bp, Arabidopsis thaliana columbia
cccacgcgtccgagatttttctctctctcgtcgaaagcaaaacagtcgcctttctctatcttctgctcatatcagccattgacacagttgctttgggtttccctcaaacggcgccgattgtctggttcgtcaccctaaatctctcttcatagctcctatatacgtgcctttgcgtatgtataagtgttttctcatcgctgtgagtatctatattcgccggcaaaatttctccgtccgttgagtttgatttttttctctgtaccatttagatttgaattggtgttgaactttccttgaggtgatgagtttgttgt

SEQ ID NO: 104213 - DNA, 422 bp, Arabidopsis thaliana columbia
gtctaaaaatcaaaaaggaagagaaaataaaaaagtattcaagatatttaaatgatatgagaagtttaagtgacgtagaagatgttgaaggagaccttgataaattaatgaatggcgttattaagaagaagctcaagattattcccaacgacctcatatggggaaacaattcggatgatgtgtttacagcaatggaggctgcttttatgaaacccgtaattgaagacgtcgatgagcttcttgccacgggggtagatgtgaccatctataatggacaacttgatgttatctgttcaacaagtggaactgaagcatgggttcacaaactcaggtgggaggggctagaagaattcaagaaaatggaaagagagccattattctgcgaaagtgacagagcaacaagaggctttaccaaatcatac

SEQ ID NO: 104214 - DNA, 304 bp, Arabidopsis thaliana columbia
cccacgcgtccgcggacgcgtgggttcccaaggatccgcattgttgaagttccgggcaagagtcaactcagatcctcatgggactcttgcgaattggaatgtttctggtattaatgatctctgctattggtcaggggttacttgtgttgacggtaaagtgcacattctggatcttagcggatattctttggaaggaacgttagctcctgagcttagccaattgagtgacttaagatctctaatactctctcggaaccatttctccggtggaattccaaaggagtatgggagtttcgaaaacttg

SEQ ID NO: 104215 - DNA, 268 bp, Arabidopsis thaliana columbia
cccacgcgtccggtcgtgtttcttcttctctttgataacaatggcttctgcttgtcgtaagctttttaacagagcttccgtctcttccctcaaatctaccctcagatcaaccaccggatctacgtcggctgcgtcatcagccggatttcgtcttccttctcaacccactcgccatttcgccttctccagatgtccttcggagctgggatgtgttcagtcgctgttaccgctgcacagcacggtggcggcggcgaggctgacgtcatgt

SEQ ID NO: 104216 - DNA, 346 bp, Arabidopsis thaliana columbia
aacagatcatagagctgtggcatgtctgccatgtctccataatccacaggacacaattctacctactgttcaaaggtgaccaagccgatcaaatctacatggaagtcgagctaagacggttaacttggttagaacaacatctagcagaagtaggaaacgcaactccagctcgaaactgcgatgaatctgtggtttctctatcatcaagtataaaagcattgagaagagagcgagagtttttggcgaaaagggttaactcgagattgacgcctgaggagagagaggagctgtatatgaaatgggatgtgccattggaagggaaacagatgaaacttcagttcgtgaa

SEQ ID NO: 104217 - DNA, 377 bp, Arabidopsis thaliana columbia
agattctgttccacttccagtctcaatcatcgcagagattgatctttacaagtttgatccttgggagcttccaattatttatatttcctaatttatgctttaatgatatgattaaaatgtacgatttaattttactatgaccactgtaatctagccactagttaaatttggtatatatagtaactatcttgtggataataatattttgaatggtttaggcaaggcgagttttggagagcacgagtggtacttctttaatcctcgggatcggaagtatccaaatggggttaggcgaaaccgggcatcaacttccggttattggaaagcaacgggaaccgataaaccgatatttacgtgcaatagtcacaaagttggtg

SEQ ID NO: 104218 - DNA, 365 bp, Arabidopsis thaliana columbia
tgagagttaagctataagagagtagaaagttggtgttaattaaagttttggttcggatattgatggtttttgtcaaaatgactgatgtttacttgatgattgtgatgttgatgggtttggggtttagtatagagttatcaaatgggcacaagttctatgttggtgggagagatggttgggtccttactccttccgaggattattctcattggtctcaccgaaaccggtttcaagtcaacgacactctttattttaagtacctgaagggaaaagattcagtgttggaggtgagtgaaaaagagtacaacacatgcaacacgactcaccctttgacttccctctcagacggtgactctctcttccta

SEQ ID NO: 104219 - DNA, 341 bp, Arabidopsis thaliana columbia
caacagtaagggaaagactgatgcatcacctcctaagaaaaccggcaacacagaaacgcgaaaacgaaaaagaaaacaggtagaggttcactccttatcatctggaagcgagtcagccggtgacattgaaggtgaagaggatgttcagagtacatggaaagaggacggaaatgcgccaagctcgggtacatttgatgaatgtgatgattatggaggtgctctaaaaatcactcaggaaggtgatgtgatgcaagaagaaagtgactttgatcactgttcttcaaattgtacaaagatgaaagaatcaatgatgagagagatagagaaccttgaactgaagc

SEQ ID NO: 104220 - DNA, 378 bp, Arabidopsis thaliana columbia
cccacgcgtccggaacttgttagaggctatctagatttcatgccacatgcctggaatattgtccctgtgaagcaaggttcctcgtgggttcgtatggtagttgatgcttgtcgtcctcatgatatcagagaagatacagatcaagaatatttctgcaggtacattccccttaatcggctaaatgaatccattcgcattaaggaaaagttggaaccaggatgttctgtttcttctctgtcaacgggaaaaggagttgaaagagctaatagtagtcttatccgatgcaagctaggctcaactgaagcagttgtgaagatgcgcacattagaggtttctggagcttccttagatgacattaggacttttgagtatacatgc

SEQ ID NO: 104221 - DNA, 351 bp, Arabidopsis thaliana columbia
aggttttgttgcgttcttccgatttgggttggagaggaaatggcgtcgggatggggaataacgggaaacaaagggagatgctacgatttctggatggatttcagtgaatgtatgtctcactgcagagagcccaaagattgtacccttcttcgtgaagattacctcgagtgtctccaccattccaaagagtgtgattgtgatgtctagatcacttagttgtccaaattccaaaaatcctagatcaggtcgagcaattgggaaatgagtcccatgcctttgttgattggccattttcggaatcctcagctgcagaatcaagatgccattgagagatgatgttctcgtgtttaa

SEQ ID NO: 104222 - DNA, 380 bp, Arabidopsis thaliana columbia
cttatgtacacagccacttggccaaaagaagtaagaaaaattgcaagcgatcttcttgtgaaccctgtccaagttaacataggcagggtagatgagttggctgctaacaaagcaataacgcagtatgttgaagtagtcccacaaatggagaaagagagacgtttggagcaaatccttatgtcacaagaacgaggttcaaaagttataatattttgctccacgaagaggctttgtgaccatcttgcacgtagtgtcggacgtcattttggcgctgttgtgatccatggagacaagactcaaggtgagagagattgggtgcttaaccagttccgaagcgggaagtcttgtgtactgatagctactgacgttgctgcccgggg

SEQ ID NO: 104223 - DNA, 397 bp, Arabidopsis thaliana columbia
attttaatgccgccggccactcttgcgacgagctttatagctcctgtacttcctttcgaatcttcaacaccacttctccctatggtaacaacagtacggttcatacgacgccgtattgctgtttcactaactacgatacggtgcgggtgatgagtatgaacattttggattgctcacattacacgacggtgattgacaatggaaaaatgagaggagtggggcctttggattggtcctatggaatcgagctttcgtactcggtaacggagattggctgtgaccgttgccgaaagtcaggtggcacttgtggctttgacgccgagacggagatctttctttgccagtgttccggttccaacaacaaccctacgagagaatgtggtggaagtatgactga

SEQ ID NO: 104224 - DNA, 312 bp, Arabidopsis thaliana columbia
aaaagatgtaactgagccaacggtagatagttttcttcgagaccttgaagaacctgaagacgaaccagaaacatcggaagagatcagcaaacaaagcatatagagagttctgattttgatgaaacaagctgtggagagcgggactgcacttgtgttagatgctgctgatctggacgcagacacagtcttttcaaaagctgttgccttttcgagtgtagcttcaccaggaccagttttccagcatggcttgagaaaacaaccaacggttaagaagcaggaaagccaagaattcgggtacggagacttggaggc

SEQ ID NO: 104225 - DNA, 110 bp, Arabidopsis thaliana columbia
accacgcgtccgcgaccttctctctacggagttgagatcaatccccccaaatctcggtgtggttcctctagggtttttgatcggaatcggaatcgataatctaaccggca

SEQ ID NO: 104226 - DNA, 164 bp, Arabidopsis thaliana columbia
cggacacgtgggcgacgacggaagaggaagacctagcatcgccgacgatttatttttgaattttcttagtctaagatatctccggcgaggagacgtacattcatcgatctaatattcatcgatctcgttcttgtggctttttaaatcgcccagacttttaagag

SEQ ID NO: 104227 - DNA, 133 bp, Arabidopsis thaliana columbia
aacctaagcagattttgtcacaataagacaactatacattaagactctccgacgatgcctgatgcaccgatgcgaaagttctcgaactcggtgaagctcaagtacgtgaaacttggctagcagtcatttggtt

SEQ ID NO: 104228 - DNA, 387 bp, Arabidopsis thaliana columbia
cggacgcgtgggagacagaacactgtgtcaattttcattacctgggaacgaaaagcaaaatcaaagacaataattttttccccgagagagaaaatgcagaggttgaagcagcagcagcagcagcaacaagttatgatgcagcaagctcttatgcagcaacagtctctctaccatcctggtctccttgccccgccacagatagaaccaatcccaagtggaaatctcccccctggttttgatccaagtacttgccgcagtgtgtacgttggaaacatccatattcaggtgacggaacctctgcttcaagaggtttttgctggcactggtcctgtagaaagctgtaaactaattaggaaagaaaagtcttcttatgggtttgtgcactac

SEQ ID NO: 104229 - DNA, 313 bp, Arabidopsis thaliana columbia
gcaaaatcatcaggtgacggggcaggcagatttgcggcggattactgggtgagaagatccagaatttgccgtctcatggcaatggcgtagagggatcaaagaaagcagaaaatttcaaaccattttgacccaccatcatcaagcttaaaacgaaggcagtggtcaacttctaaaacatgaaatgaggttctggaaaaagtttccagctagggtaacccaattgagaagcgggggcaatggatacttgatcgagtgatttggggaaaaggaatcattctccagggaattggagccgtgtgcatagagatgctca

SEQ ID NO: 104230 - DNA, 316 bp, Arabidopsis thaliana columbia
gcgtccgcaaacgatgagaagtagaattaatgaaaaaatgagagctttacaacgtcgcatctctaattcaaataagacgggtaacgcttcagtgcttgatgaagccattgagtagctgaaacagcttcagcgccaagttcagatgttgactatgagacatggaataaacttgcatcccttgtgtttacctggtactacattacacccattgcaactctctcagattcaaccccctgaagcaaccaatgatcctctgcgtaatcataccaagcaatttgcttcgacttctaatgcaccggaaatgatcaatactgtg

SEQ ID NO: 104231 - DNA, 417 bp, Arabidopsis thaliana columbia
caaatacttcagatatacccattcatcctcatatgagcaggctcagagagcatttcaggctgcacaagctatccatgatttgaatggtgtagcaagtgtccttatacacaatccttaccatattgagtcgctcataactatggcggattactttaagtttgtaggtgagaatgatatggctgcagattccattggaaaatgcttgtacggtttggagcgtgcgtggcatcctatgttcactccgttccagggtaactgccggttggagtttaaccacgatgaaaacaagctgttcttcaagacgcttttcactcacatgagaaacatggacaggcgtggctgtcataggtcagcgttggaggtctgcaaactcttgctttccttggacacgagtaatcctgtgggcgctttgttttg

SEQ ID NO: 104232 - DNA, 426 bp, Arabidopsis thaliana columbia
caaaaacaaatcttaaacgttttactttgtgctgcactactcaacctcaatggccgcctcaacaatggctctctcctcccctgccttcgccggtaaggccgtcaagctttcccccgcggcatctgaagtccttggaagcggccgtgtgacaatgaggaagactgttgccaagccaaagggcccatcaggcagcccatggtacggatctgaccgtgtcaagtacttgggtccattctctggcgaatcaccgagctaccttaccggagagttccccggagactacggatgggacacctccggactttcagctgaccccgagacattcgcaaggaaccgtgaactagaagttatccacagcaggtgggccatgctcggagccctaggctgcgtcttccctgagcttttggctagaaacggagtcaagtt

SEQ ID NO: 104233 - DNA, 255 bp, Arabidopsis thaliana columbia
cccacgcgtccgatttcgatgagccagaccaatcgggtcataactatggtcctgatgatcctcgggttacgactgctgtttctagggttgataaaatgattggtagggtgataaaggggctgatgcatagggagatctttgatgaggttcatgtgatattgcttggtgatcacagaatggtgaccaactgtgagtgtaacgagaaagcgatttacattgatgacttaacggattggatcaagatactcgcggctt

SEQ ID NO: 104234 - DNA, 235 bp, Arabidopsis thaliana columbia
cagatcaaatcaagaatgtcgatctctctctatttccttttgctcttgcctctctttttaaacttcttcaaaaagctctcaccttctaaaggaaagcttcctcctggacctctaggtcttccgattatctggaacttgcactaacttggaaaatctctccagagatcttttcataaactttctcaaaactatggacccgtgatgtttctacatttcggtgtggtccctgtggttg

SEQ ID NO: 104235 - DNA, 226 bp, Arabidopsis thaliana columbia
ggtatcccgagcctgcaactagtcttgatcgtttcaaattagccgacaatacatttggtcttcatcatgctgcttgtttagcttttgtttcaggtcatattgtggtttgtttgatacaactttggttcggtcaccaattgtgtgaatttaaataaattccgaaattaaacacactcaaagtgtctcaaaaaaaaaaaaagaaaaaaaaaaaaaaaaaaaagggggg

SEQ ID NO: 104236 - DNA, 417 bp, Arabidopsis thaliana columbia
gtaggtctttcttgtaagcagccaactacaaccgaagagatatatgatacaatagctcatattgatttggctacagagtcttccccgagcttgagttcctctgttcagtctccatatcctgttatttgtagtcatttggatgacatatataaaatgattctggacaagttggctaagctggatgatctcttaccggtggttcttaagaaatgcttgggcacaaatggaacatgtccaatctctgtgttcaactattcccttttggtgaacttcaagacaaagctaagtagccactctgctcccaagcaaaatgggcataagaacttcaagcagcaattcactcggaaggcctcgcgagagctttttgttaagaagttttcctgcaaggctcccgtttatcataactgtagaatatac

SEQ ID NO: 104237 - DNA, 435 bp, Arabidopsis thaliana columbia
gtcacaagtaccttcatatggaacttgatcctccgtttacaatctctgagctgagctcaaacgcaatttatctcacagaagattttactcccaagctggttgatttcgaatgctggaagacaattcttgcaagatcagaaaagaatttgagaaatattagtagccagggttcgatatgtgtactcccaaacggaatggagagccgatatcttgatgtgtcgggtaatatctatgcattcgggattcttttgctggaaattgtcagtggaagacctccttattgcaaagacaaaggattcttaattgaatgggcaaaggagttccttgaagcaccagaggcaatgtcgggattggtggattcagagctgaaacattttaaccaagaagatcttgagacggtatgcgaagtggctagccaatgcttgaaccggggac

SEQ ID NO: 104238 - DNA, 437 bp, Arabidopsis thaliana columbia
ctgaattgattgctaagatcatatgtcatggtgctcaggactatactagagctacacttaggacttcctttcttgcttcttgtgtttcatcttgccatagccggactgtgagtcttgctgatactgtaactgttatggctcaaaggttgcacgagcgtctccaagagtgtaacggtgatgaggtcctcaaagcagaagctggtgctaaagttcaaaagtttactgaatgggcactcaaatgtataggttttcactcccgatgccagggccctagagataaagctaaccaagactcagctgctgagatccaactccagctttctgctttcaagatgttcttagatcttgcaggaaaccatctatcaggaaaggatttcacagaagcctttgatgcagcttgcttcccgcttacgctgttctctacctcgtttaatcct

SEQ ID NO: 104239 - DNA, 421 bp, Arabidopsis thaliana columbia
cagccataaaagctggtttttatgacattggtattggagctgggctggagtccatgacaactaatccaaggggatggaaaggatcagtcaacccaaatgtgaagaagtttgaacaagctcacaattgccttcttccaatgggtattacttcagaaaatgtagcacaccggtttaatgtttcaagggaggagcaggatcaagctgctgttgattctcacagaaaggctgcttctgctactgcttccggaaagtttaaggatgagataacccctgtaaaaaccaagattgttgacccaaagacaggtgatgagaaacccataacagtttctgtggatgatgggattcgacctaacacaaccctttccggacttgcaaagctgaagccagtgtttaaggaagacggaaccacaactgctgggaa

SEQ ID NO: 104240 - DNA, 361 bp, Arabidopsis thaliana columbia
aatttacagagaaagttaacatgcgggcaagatattatccgaagcggtgtcacaatgtctgtctcgaattttctatcattacagtcaatgatcatacataatgcaaggctaaaacacatgttcaattgcccagagtataccacaaatactaacaaaccacagagcatttcatgcgtgaatatcctagaggataatgatttctggagagctgtggaagaaagtgtggctatttccgagcctatcctgaaagtgttgaaggaagtttctactggaaagcccgctgtaggttctatatacgagttaatgtccaatgccaacgagtcaatacggacatactacatcatggatgagaataagcata

SEQ ID NO: 104241 - DNA, 409 bp, Arabidopsis thaliana columbia
  unsure (1)..(409): unsure at all n locations
acgctgtgtacgatgttgatgtgagattacaaggtgagattcagccgcagctggaggtgactccgattaccaaatacgggtcggatcctcagctcgtagtgggtaggcaaatcgccgtgaataaggtttacatttgctatggattgaaaggaggaaacattanggttctcaatatcaacacagcattgaggtctctgttccgtggccattcacagagagtgacggatatggctttctttgccgaggatgttgatatgttggccagtgttagcctagatggaaaagtttttgtgtggaaaatttctgaagggtctgagggagaggatcagccccaaataactgggaagatagtacttgctcttcagatactaagagaggaagacaccaaacatccacgcgtttgttggca

SEQ ID NO: 104242 - DNA, 335 bp, Arabidopsis thaliana columbia
gccatgggtgtttagtcgtgccggttacgacaacggaaagaaagctccgggacgttgttcgccgtacatccccggttatggacagcattgtcaggatgggcggtctggatacgaagcttatcaagtcagtcacgacttactcttgtcgcaagcttacgcggttgacgcattcagaaactgcaaaaagtgttctggccgtgaactatgctcttgcggaatctctcaaaaatccttacctccgtgctttatccaccaaacttaacggcggtctccgttccataaccgtcgttctaacggcgaaagatgttaccgtcgaaagattctgtatgagccgg

SEQ ID NO: 104243 - DNA, 403 bp, Arabidopsis thaliana columbia
aaaaatatctacagatgtcatgtttcatttggaattcaatacgtaatcaacacctaatcgcttgatcgatgttaaattcgagactttccagcagaaaatggagaatgagacagaattgagggttgttcatcaggaagaacaacaacgcgaagaaggagaagatgaatcacagccacaaaacccaccaccagccttacgacgtcgtttcgtgatatatctttacgttggatattttcttgcaagatggagtgccagaacatgggaattctctgttgcattgtatatgatccacttgtggccaaactctctgcttctcgctgccatttatggtgctatagaatctggttctactgcaatctttggtcccattgtggggcaatgggtcgagggaatggactacgtt

SEQ ID NO: 104244 - DNA, 354 bp, Arabidopsis thaliana columbia
cacgcgtccgggaaaatctaaagcacgatcaaaggcaacaatgttatgcagtgattaataatggtttcaaacaacactatctcccactctaagtaactataatgtttgacggaaaaaaaaaaaaaaaaaagtaattataatgtttatatctaaaaaaaaaaaaaaaaaaaaaaaaaaaaaaaaaaaaaaaaaaaaaaaaaaaaaaaaaaaaaaaaaaaaaaaaaaaaaaaaaaaaaaaaaaaaaaaaaaaaaaaaaaaaaaaaaaaaaaaaaagggggggcccccaaaagggttcaaatttaattacccggtgaaggaaaattaaaactcttttaaaagggtcccaaaatttaa

SEQ ID NO: 104245 - DNA, 361 bp, Arabidopsis thaliana columbia
gtccgaaagaaacaaagccgtacaacgagggctcttcctgggcaacaaaaccaccattttcgttttatctcaatcttcgtctctttcgaaagatctaaccacaacaactccttaagatggataagtatcaacgagtggtgaagccgaaagcggatacgccgattgatgcgaatgagattcgtatcactagtcaaggcaaggcacgaaactacatcacctatgcgatgactcttcttcaggataaagggtcaactgaagttgtattcaaggcaatgggaagaacttctaagcctgttgtcattgctgattgtggtcagatttcttagatctgtctgagattgttgatgatgatgatgatgat

SEQ ID NO: 104246 - DNA, 412 bp, Arabidopsis thaliana columbia
cggacgcgtgggttgtactctctcagttactatctctctgtctcatggcgaatccgacggagaacctcgacgcgaatccacaaatccgagaaccagaagctgaagaagaagttgaagaactgaacggatacgaaggtgacgatggaggagaagatgacgatggagaagacgatgacaccgagtcgaaatctcaaacgcgcgaaagcggatccagtgtagacagaatcaaggcggaatcgctattccgtcggatgcgagctgctcctgtgccggtgcgtgttcacgacgtgattatcggtggaaacgagaagactaaggaccatatcattgaagcggaagtggatgctgtgagagaggcgaccacgttgccaattcgaatctccgtgcgttagatatctttgattccgtcaac

SEQ ID NO: 104247 - DNA, 413 bp, Arabidopsis thaliana columbia
acggacgcgtgggataaaacaaaaagaaaaaaaaaacattttttccaacacttgaaaagaaaaatcataaactttactaataataaagtttactattaatgaagggaggggttaaacttttggccgtgtgcctttgcgtggccacggcgaccgtcatgatggtccaagcggaggacccttacttccaccacgtgtggaacgtgacgtacggaaccgcatctcctctcggcgttccacaacaagtcatcctcatcaacggtcaattccctggtcctaacatcaactcgacttctaacaacaacgtcatcgttaatgtcttcaacaacctcgacgagcctttcctcatcacctgggccggaatccagcacaggaagaactgctggcaagatggaacagctggaacaatgtgtccg

SEQ ID NO: 104248 - DNA, 387 bp, Arabidopsis thaliana columbia
cggacgtcgtggggctgaagtctgaaagatgcaggcaagtgataggtttaacataaattctcagcttgagcatcttcaagctaagtatgttggtacaggtcatgcagatttgagcagatttgaatggactgtgaacattcagcgtgatagttatgcttcatacattggtcactacccgatgctttcttactttgcaatagctgagaacgaatctattgggcgagaacgttacaacttcatgcagaaaatgctcttaccttgcggccttcctccagaaagagaagacgagtaagagcttgtgtgcatttgaaattaaaaaaaacattctacttcttagaagcttgtgtgcaatcatctttaactgctccaccaatgtaattgccgaaa

SEQ ID NO: 104249 - DNA, 438 bp, Arabidopsis thaliana columbia
gtccgcgtcgatctctccttcaacaatttaaccggtccaatccctgattctccggttttcttaaaccaggaatcaaatttcttttcaggaaacccgggtctatgcggtgaaccgacccgaaacccgtgtcttatcccttcctcgccgtctatcgtctccgaagccgacgtaccgacgtctacaccagcaatcgccgcaataccgaacacaatcggttcaaacccggttaccgatccaaattcacaacaaaccgacccaaatccccgaaccgggttacgacccggagttataatagggatcgtagtcggagatatcgctggaatcgggatcctcgccgtgattttcctctacatctacagatgcaagaagaacaagatagtggataacaacaacaacgacaagcagagaacagaaacagacacaattacgttatcaaca

SEQ ID NO: 104250 - DNA, 336 bp, Arabidopsis thaliana columbia
cggacgcatgggtggtcaagctgatccacctgataacatattcaatgcattaggaaacgaattttcacatcctagtggagcaggtcgaggaaagcctcttgtggaatctgctccaatccgacaagaagataaccgccaaattcgacgccctccgcctccaccgcagcagcagagagtacaacctcagcagaagcgggctccaacggtcaaagatggaactcctaagccgcaattgagtgcggaagaggagggagagggagagggagaggaagaggagcaagagggagaggcagaggaagaggtggtgatggatggagagatgataagaaagaagaa

SEQ ID NO: 104251 - DNA, 334 bp, Arabidopsis thaliana columbia
agaacaacaaagaaaatctcaaccgtagaaaattccgacaagagttcagttcagacaatgatctaagtatgggtttctttggcagactgttcggtagtatgaaggacgaaaaggcaacaccgatcagacgaagatggagcttcgctactagatcctcacatctcgagaatgaatcgtcttctcattcaagcaagagacgtggggatgaagatgtcttaaacggcgacaagcatgctatagccgtcgcggctgctaaaactgcagtggctgaagccgcacccgctgctgctcgtgcggcggctgaagtcgtgagactcaccaatggtggtagaaa

SEQ ID NO: 104252 - DNA, 176 bp, Arabidopsis thaliana columbia
ctttgatttcctcgattcatggggacttatcagctataatagctccgcctctgctaatccgctcaagtgggaattaaaaagacgccggaaaatccgccggagatgctgcttctgagccagccatagctgtcacagacactgccaagagaaactgcaatggctgcaaagcaatttgc

SEQ ID NO: 104253 - DNA, 277 bp, Arabidopsis thaliana columbia
gaaaaatgtgaaggcatatttgagacgagggactgctagagaatcacttgtacggtacaaggaagctgctgcagatttcaggcacgcattggtccttgaaccacagaacaagacggcaaaggttgctgagaagagactccgaaaacacatatgagttaaaaaggattattactcgatttctcttgttcaccaatctatcttttcacttatctaaaaccctaaaaaggaaaggttttgctccggtttcaacagactaataatttagtggttttgtgac

SEQ ID NO: 104254 - DNA, 423 bp, Arabidopsis thaliana columbia
agatggcagactacattgttgcatctccgcatggactccgaaggaaaaatgcatacccttcagaaatcgtggaagcactagctactcatgtatctgattccctacatagcagagaagtcgcggctgtatatataccatgtatcgatgaggaagttgttgagttagatactctttacatttcatcaaaccggcattacttggatagtattgctgaaaggctcggattgaaagatggcaaccaagtgatgatatccaggatgtttggcaaagcttcctgtggctctgagtgtagattgtactctgagattccaaagaagtacttggataattcatcagatgcctctggtacttcaaatgaagactcatctcatattgtaaaatctcggaatgcacgagcaagttacatttgtggtcaagatattc

SEQ ID NO: 104255 - DNA, 436 bp, Arabidopsis thaliana columbia
  unsure (1)..(436): unsure at all n locations
nggaaagattcccaccgaacaatgttcttctaatgcttgctggagctggacttttatggatgggatggtccggttttaacggtggtgctccttacgcggccaacttaacctcctctatcgccgtgttaaacaccaacctctcggccgccacaagcctccttgtatggactacacttgatgtcatcttctttggcaaaccttctgtcatcggagcaattcaaggcatggttactggcttagccggcgtcactcccggagcaggtttcagtcatcttcttttcaagttttttgtttactctaagtctctaagtttatttatgattaaggttgaattatgtggaaacttattaatattgcattgttaatttattatactgacaaataagatatctattgcaggtttgatccaaacatgggcagctataataattggagt

SEQ ID NO: 104256 - DNA, 379 bp, Arabidopsis thaliana columbia
gtccgaaaaagttggacgccagaaaacaacaactagaggacctctctaggcgatatgaagaattagaggcaaaatcaaaagcagatatgaaagttcttgtcaaagaggtcaaatctctgaggcgttctcatgtggaattagaaaaagagctaacccactctttgacagataaaactaatgccgagaaactcctccaagaggaaagaaaactactagagaacacagttgcggctagaaagaagctgcttagtgactgcagaattctccacgaccggcttaaagagtacaacttaaatttgtcaatggatggaaacggtaactttgtcgacgactcaactacaatatcagacgttttgcgtttactgtcaatatctgatga

SEQ ID NO: 104257 - DNA, 446 bp, Arabidopsis thaliana columbia
acgcatccgcccacgcgtccgcggacgcgtggggcggaatacactaaagctataagattagcatttgagctttgtaggcctcacaaagtttttgagctcttcagtggtctctgcaggaaaagagattcagacgaacagatagtgaaagctcttcaaggacttgaaaaagaagagttccgtctactttttgaatatgtccgagaatggaacacaaaaccaaagctatgccacattgctcagtttgttctttacaaaaccttcaacatacttcctcccacagaaattgttcaggtaaaaggaattggggaactcctggaagggttaatctcatatagtcagagacatttcagtagaattgacagatttgtaagaagcagtttcttgttagactacacacttggtgagatgtctgtgatcgatccagagactgttgagacagagtatcc

SEQ ID NO: 104258 - DNA, 418 bp, Arabidopsis thaliana columbia
cccacgcgtccgcccacgcgtccgatcaaatctctctctttctctctctaatggcggcgacattaggcagagaccagtatgtgtacatggcgaagctcgccgagcaggcggagcgttacgaagagatggttcaattcatggaacagctcgttacaggcgctactccagcggaagagctcaccgttgaagagaggaatctcctctctgttgcttacaaaaacgtgatcggatctctacgcgccgcctggaggatcgtgtcttcgattgagcagaaggaagagagtaggaagaacgacgagcacgtgtcgcttgtcaaggattacagatctaaagttgagtctgagctttcttctgtttgctctggaatccttaagctccttgactcgcatctgatcccatctgctggagcgagtgagtc

SEQ ID NO: 104259 - DNA, 153 bp, Arabidopsis thaliana columbia
gacaaactacgagagaaacgagttccaaattatgacagtttgagtgaaccaattgagtcatatacttttttttcagggtgggattgtataataataataatcactaagttaaaacttttttgtacaaacacttgcatgtcacaattttttcat

SEQ ID NO: 104260 - DNA, 427 bp, Arabidopsis thaliana columbia
  unsure (1)..(427): unsure at all n locations
attagccctttcgttgcgacgctctctgcgaatccaactttcgtttcagctgtagtcgcgtggttctttgcgcaatcgagtaaaatggttatcaatttcttcattgagaggaaatgggattttcgtcttctctatgcttctggtgggatgccttcgtctcactcagctttatgtatggctttgacgacctctgtggcgctttgtcatggagttgcagattccttgtttcctgtttgtttagggtttagcttgattgtcatgtatgatgcaattggtgttagacgccatgccggtatgcaagctgaggttctgaacttgatcattanggacttgttcgaaggacatcccatcagtcaaagaaagcttaaggaactgcttggtcacactccttcgcaggttcttgctggagcattggttggtattgtga

SEQ ID NO: 104261 - DNA, 412 bp, Arabidopsis thaliana columbia
cccacgcgtccgcggacgcgtgggaagaaaataatataaacacacacatacaagaactgaagaatgagcagacccggagattggaactgcaggtcatgcagccatctcaacttccagcgccgtgactcttgccagcgatgcggtgactctcgttccggccccggtggagttggtggcttagactttggtaatttcggtggcagagccatgtctgctttcggattcaccaccggctccgacgttcgtcccggtgattggtactgcaccgtgggaaactgcgggacacacaacttcgccagtcgctccacctgcttcaaatgcggcactttcaaggacgagaccggcgctggaggcggaggtggtggcatcggcggtccggccatgtttgacgccgacattatgcggtctagag

SEQ ID NO: 104262 - DNA, 369 bp, Arabidopsis thaliana columbia
cccacgcgtccgctctcgccgacaattaccggctacaaggtttctctgctcgtcaacgttctctgaattagtggtattgaaagatgagcttatctcagaatgctccgaaaagtaagggtattaaaagagaggagctcaagaaacagtacgaagatgttgaagatgaggaagagattgggtccgatgatgatctcactaggggaaagagaagaaagacagagaaggagaagcagaagctagaagaatcggaactggttgaaatgacaaagcttgagaatttgatattcgggtcactctactctcctgttacgtttggtaaggaagaagaagaagatggttcggctttgtttcatgtagaccgttctgctg

SEQ ID NO: 104263 - DNA, 179 bp, Arabidopsis thaliana columbia
caaatagtaatattagtagtaatttttttatttttttggggaaaaaatgggtggatattttggaatttctacaatttttattatctgtttgttgggaatttcagccagtgctgaggtattcatcattggttcgtcatcatgttctgatattactcatgcacttctgaaagcattcagat

SEQ ID NO: 104264 - DNA, 434 bp, Arabidopsis thaliana columbia
cggacgcgtgggcggacgcgtgggcagccatgttcatccagatggcacgtgattcggaagccaaaactctggcaagtggagcaatcctcaatacaaacaaagaagaatctgagagagcagaggaacataagctatgaggggtcaagagtggcagatatatcagtgatggccacagagtatagccccgtgctgaaatggcttagctacagggcatctccagatgcgtttccgggaatgggcgaagagacagatgaggaggacagtgatatttctgaagatgatgaaatacaagactggtgacattcaccatcttaagtgtcttatatgttaggtcagatagaactggtatgatagttaacaacttaacatcaagggaaggaacactaattgttctgcttacttataaatagaaaatggagagtcacttctctatc

SEQ ID NO: 104265 - DNA, 409 bp, Arabidopsis thaliana columbia
cggacgcgtgggcatggtttaaactatactcagcagcctataaggtccgagttctcaagaagtttattgcaagaacaccagcaactcccaaatggttacatgcatgggaaccttgggttgcagacaatgccgaatggggcaaatgttttgggaggtgatgtagaatctagtagggataagttatcagcaaggggatttactccagaacttcataatgttcctatgaggcttgagatgggagaatctccggttaattatgatttctttggtggtcaacaacaatcaaacacacagctctctggcatgctccagcctttgccaaggcagcagatgacattcaatgatatgcaactactgaagcagcaagttatggttaagcaaatgcatgaatatcaaatgcaacaacaac

SEQ ID NO: 104266 - DNA, 391 bp, Arabidopsis thaliana columbia
cccacgcgtccggcgaagaagacgaacgcaaagatgcagattttcgtgaaaacgctaaccggcaagaccatcaccctcgaggtcgagagcagtgacaccatcgacaatgtcaaggccaagatccaggacaaagaaggaattcctccggaccagcagaggttgatcttcgccggaaaacagcttgaagatggtcgtaccttggctgactacaacatccagaaagagtcgactttgcatcatgttctgaggcttacgggaggtatcattgagccttcattgatgatgttggctcgtaagtataaccaagacaaaatgatttgtcgcaagtaagatctctgatcttttctctttgttgttctaagtgtaccatgtccatgtgtgatgattatag

SEQ ID NO: 104267 - DNA, 312 bp, Arabidopsis thaliana columbia
attccgactattttttagagttttctctattcgtaaaaaggtagagaaagaaacacagaagaaggggaaggaaaaagaaaaaacacaaatggaagggaaagaggaagaagcaaagaggaggatgatgatgaagatcaaacttaaggagacagaagcagacgtaagccaagacgacattaaaagacaagaagcttacaacatgtctccacgcgtacgtcgtggtggtggtggtggcggtggctcggtaggtatgagcaagtcatcgagcgtgaggcaaaactgtttatgcgcaccaactacacaccctggctc

SEQ ID NO: 104268 - DNA, 154 bp, Arabidopsis thaliana columbia
ccgacacttgggaaggaatcagaatactcaaagaacgagaatagcaagaagatacatttcatagccctcaatgtagcccacaaccacagccataacacattgaaatctttgtttctgttgtagtttgcttcaatgagaaagaatcaagttgctg

SEQ ID NO: 104269 - DNA, 423 bp, Arabidopsis thaliana columbia
gtggcgtttgcgtggacattggtggctctgtgttgcgggtctcacacttcgcatattcttcattccttgggaattcacattgctcatggagggatttgggatttgctacacaactcttacgtgaaaggtggtttggccgttggagctttgttgggaccaggaagagaattgctgtttgatggcataaaagctttcgggaaaagatcacctaatatgaactcgttagttggattgggatccatggctgcattttccatcagtttgatctcactagttaatccagaactggagtgggatgcttccttcatcgatgaaccggtcatgctgcttggctttgtgctccttggtcgttctttggaacaaagagcaaagcttcaagcatctaccgatatgaatgaactattgtcactcatctccactcaa

SEQ ID NO: 104270 - DNA, 345 bp, Arabidopsis thaliana columbia
cggacgcgtgggattttacaaggttatgggttgactgagtcaacgggtacaggagcttctacggatactgttgatgaaagtccgcaatacggtaccgctgggaaattgtcggcaactatggaacggaggattgttgatccggttactggtcagattcttggaccgaaacagaccggtgagctttggctcaagggtccttccataatgaaaggttatttcagcaatgaggaagctacgatttcgactcttgattctgaacgatggttaacaactggagatctttgctatatcgatgaagatggattcatattcgtggttgatcggttaaaggaactgatcaagtac

SEQ ID NO: 104271 - DNA, 243 bp, Arabidopsis thaliana columbia
cagacgcgtggggtcgcttaatggggaactccagcaacttgatgttcaatctaacgggtatgttcctcacagttgatgctgggtataactaccttgtgaggctacatttctgtgagactcttccacaagttaccaaagcaggccaacgtgtcttctccatattcgtcgaagataagatggctaagaaagagacggacgtgattcggttgaccggtggtcctcggattccaatgtatttaaatt

SEQ ID NO: 104272 - DNA, 450 bp, Arabidopsis thaliana columbia
  unsure (1)..(450): unsure at all n locations
ctccgttcgaaatcgcatccatcgccgtcgtcgtcggtgacgaaaaccaccgcgtaaaaccgtttcctaaatcagatgttcaatcttagaagtatctcttagaagctctcttgtatgaaaaaatgggactgttaagcataatccggaagatcaagaagaaagagaaggagatgcgtattcttatggttggacttgataattctgggaagacgacgattgttctgaaaataaacggagaagacacaagtgtgattagtccaactcttggattcaacatcaaaaccattatctaccaaaagtatacgctaaatatatgggatgttggtgggcaaaagactataagatcgtattggaggaattactttgagcagactgatggtttggtttgggtggttgatagttctgatcttangaggttagatgattgcaagatggaacttgacaatctct

SEQ ID NO: 104273 - DNA, 395 bp, Arabidopsis thaliana columbia
cggacgcgtgggcggacgcgtgggcggacgcgtgggcggacgcgtgggcggacgcgtgggcacaaatattagtctttaattttcgaaacttctctcaggcgaattcaagtttcatagttttggtctagtttttgtccaccgatctatctctttagttgaaacttatcagaatggctcgtccacaagaccctccacgtggtttcttcccttttggaaaccccttcaaaaatctatcttcgaagaactcggtactctcctcaaagcttctcccactcctgaacaattttgagaccaacttagcatcttctattagtaagcttgtccctaaggaaaagagcgatatcctgactgtctcatggatgaaacaagctatggaatctctttgcgagacacat

SEQ ID NO: 104274 - DNA, 311 bp, Arabidopsis thaliana columbia
cggacgcgtggggtttttgtttctctcttcttcttgattgttgcgcttttgttagctttctctggttcattttccatggacggaccttgacctctctgcttcccttcgtgcattttcgctctctcactatcctctctctttctagtgtttgtttgatcctctgcgtactctgttcttcttctctcttcagataaaacaagtcttgcatattgaagatctgatgtcttatcgattgctaagtgtggataaggatgaactggttacgtcaccttgtttgataaaacgtaactacttgggtctctctgaatgtt

SEQ ID NO: 104275 - DNA, 407 bp, Arabidopsis thaliana columbia
gttaagttcttatcgatgaagcttgaagcagtcaactcaagaatgaaccctggtatcgaggtttttccacccaaagagtttggtcagcaagcgtttgagaatccggagatacagttcgggtcgcagtctacgagggaatacagtagaggagcatcaccagagtggttgcacatgcagataggatcaggtggtttcgaaagaacgtcttgataaagaaacaacacttggtcatcatcttactacaaataagatctaaaagctctaatatcccgagaagaaaaagcatacatacatataaatctcattctcattataggtttaaatatatggatgtgaatatacacatcatattgttgttctgaagaaagcacaatagaaaagaagatatagttagtttcgacatcaag

SEQ ID NO: 104276 - DNA, 136 bp, Arabidopsis thaliana columbia
ctcatcttctcttccactcaaatctcatattccctcctcacaacagcagcttcgtgttcgctcaacttcttcggtttctgatcttggcaatcgcatgcattgttcgtcgactcgacgatttcaattttgggcatac

SEQ ID NO: 104277 - DNA, 396 bp, Arabidopsis thaliana columbia
ctaattatcttcaactaaaaaaccaaaattgacttcagattcgccttcttcttctcttgcaacgtttcaatttcatgtgccttcgaccttagattccaattttgaattcgaatttctggggtttcgattgagctcttctcgcttttttctacggttttgtcgcatatgctgcgagtgtgagtggaaatttgggggaagaagaagaatgaagatgcatataaaggagatatgcttggagggttttaaatcatacgcgacgaggacggtggtttctggtttcgatccacatttcaacgcgataaccggtctgaatggttcgggaaaatccaacatcctcgattccatctgtttcgttctgggtatcaccaatcttcagcaagttcgagctgctaatct

SEQ ID NO: 104278 - DNA, 336 bp, Arabidopsis thaliana columbia
ggaaaatttttccttgattcattacgacagagagaaccatgccggcgaaacagaggaccccgaaggtcaacagaaaccctgatctgatcaggggtgttggtaaatactcgagatcccagatgtaccataagagaggtttgtgggctatcaaggccaaaaatggaggcgttttcccacgtcacgacgctaaatctaaggttgatgctccggtggagaagccaccgaagttctatccagctgaagatgttaagaaacctctccccaacaggcgcacggcaaaaccaaccaagctcagagctagcattactccaggtacagtgttgattatccttgctg

SEQ ID NO: 104279 - DNA, 355 bp, Arabidopsis thaliana columbia
cggacgcgtgggtttatttttgttttttgggttcgccgaagtaaaaaaaaaagaataaggattttctcattaaatttccaaagattagtcttttgtatgtatcttcactttcttatgaatgtgtaaaccttactcattcccgtgatcctactttgggatttcgctagaagaagtttaggtgacgaccttaatttaagtttgtaaatgcaggtcctttctttctagggtttatcgaaattggtgtaaatcttttggaattggtttgagattttttcttttggggaattgcaattcattagtcgtcgtgatccagtgtgtttttaagtgaagtaaggcattttcgatattcggagac

SEQ ID NO: 104280 - DNA, 372 bp, Arabidopsis thaliana columbia
ggggtttgcccaacctggaatcaaaaaacttgtgtttaagctgaaggaactggtcaggcgtatcgatgaacctgtttcaagacacatggaagagcatgggctagagtttcttcaatttgctttccggtggtataattgtcttctgattcgtgagatcccattcaatctcatcaatcgactatgggacacttatcttgctgaaggagatgcgttgccagacttcctggtgtatatatatgctagctttctcttgacgtggtctgatgagctgaagaagctagattttcaagaaatggtaatgttcctgcaacaccttccgacacataactggtcagaccaagagctcgaaatggttttgtcaagagcttacat

SEQ ID NO: 104281 - DNA, 328 bp, Arabidopsis thaliana columbia
cggacgcgtgggttaggtttgattcttctggctctgttttgttctgtttttggtgtttaattcttcttagcaagcaagtaatattcgatcgtcactgtttttgctttgattttgtgatttctctatcaaagattagaactttacgtgaccctttaagcgatcaacaattatctcactgttttttcagataagggtatatgagtttgttggacatgggtggagatatgatggaagatgattgggaatttgcgtcatcatcaaaccctaaaagaaccctagttcttgtgggccgtactggaaacggaaagagtgcgacaggtaacagtat

SEQ ID NO: 104282 - DNA, 388 bp, Arabidopsis thaliana columbia
aggaggagcaattgcatgtatgctcttggctcttctcttcttagggacatggccagcaatcatgactctaaccgaaagacgcggtcgacttcctcaacacacttatcttgactacacactcacaaatctgttagctgcagtgatcatagcgttgacactaggagaaataggtccgagcagaccaaatttctttacacagctctctcaagataattggcagtcagtgatgtttgcaatggctggaggaatagttcttagccttggaaacttagcaacacaatatgcttgggcttatgttggtttatcagttactgaagtcatcacagctagtatcactgttgttatcggcacaactttgaactatttcttggatgatagaatcaacaga

SEQ ID NO: 104283 - DNA, 341 bp, Arabidopsis thaliana columbia
ggacagtgaaatcgaagaattgaagcagaagcttctccatctctgcaatctctctatccatctctcgtcatcgcatgtttcgcttcccaattcggaagaaagagagacgacgcgtctgaagcatatctccgtaatcggggtgaagaaaaacgcggcgagaagaagaggcagattttcgttttgggagggtagacaaatctggcgaaagtggagggcctaatggcgaggccgtggcttaagccaggagcttgtataaatggagatcaatatgactacgacggttcggaagacgaccattccaggccttggtggcgccgtcgtctcagatccttgtatatggc

SEQ ID NO: 104284 - DNA, 347 bp, Arabidopsis thaliana columbia
acgcgtccgccacgcgtccgcccacgcgtccgcgcacgcgtccgaaaagaatcaataaccctataaataaaagatcagacaaacagaagtttcctcttcttcttccttaagctagtaccttttgttcttgaaattagggttaatttcttttttccaaataccatcaattctccagaccataaaaactcaaaaagatcagatctttcctctgaaaaagagatacccaacttatgtttttgtgtgtctgtatatagataaacattacatacccatatttgtgtatagacataaatagtgggaattaaggtaacaaaaagaaatgggaataggaagagtagagctgaaga

SEQ ID NO: 104285 - DNA, 315 bp, Arabidopsis thaliana columbia
tagtggctcgtttcgttgcctcagatctctcttcgatcgagcttcttgggtcaaaaccagagagctaaggcaattctcatttctcacttctctctcgattccgtcgtatctccgacgatcttgctcgcgcacgatccgattgtgtaattcgttcgattttgcggtagaacaagaagacgaagaagtcgaaataggaaggattaacgatggcggctggtggatttttgactcgagcatttgatacgatgcttaaggagtctggatgaaagaagtttcctgatctccagaaagctattcaagcttatcaagatggtt

SEQ ID NO: 104286 - DNA, 366 bp, Arabidopsis thaliana columbia
gcaaagtgtgtcttctccgatttcgcagacggttagatctcaacaagcgattctcatcgtcgtgaaccttcttctttaatggcgatcgataactctcgtcctcctccggacgaaatcttttacaagacgaagaagattttgtatcgtggacaaaggtgcaatatcattctccaggataagaatggaccatgtcctctcatcgccatttgtaatgttcttatcttgaaacacggaattaatctagacacttacaattctcaagtatctgaagaggatttggtgaatcttgtgatcgatgtactggatgatacagacgagtacattgatattgggctcatcagaaaacttgcttgtgggataaatgtc

SEQ ID NO: 104287 - DNA, 421 bp, Arabidopsis thaliana columbia
  unsure (1)..(421): unsure at all n locations
ggttcttctcaattagtccttcttcacctcttgcttgagtggtgagaaaaaaggaagatggaaatgggtcgtcgagatttgatgagacgtggaacaaccaatcgattttccaataaacaacaatctggatctgggttttctacaaaatctaagaaaggaatgctgaagaaacttggttttgctgatgagaaactgaaacaagagatgagctacgatactcttccttctccagatttagaaaacgaggtttctaagaagaaatctaagcttccaaaaaagaatttgaaagacactaatggtgtggatcatgcctctgtaccacggaagcttcgttcagccatgaagaagcggaatcttgaatctgtntctaagctatcctctgtttcaaagagacttaaccggtttaaaaccggaactgaat

SEQ ID NO: 104288 - DNA, 278 bp, Arabidopsis thaliana columbia
aacaaatcttaaacgttttactttgtgctgcactactcaacctcaatggccgcctcaacaatggctctctcctcccctgccttcgccggtaaggccgtcacgctttcccccacggcatctgaagtccttggaagcggccgtgtgacaatgaggaagactgttgccaagccaaagggcccatcaggaagcccatggtacggatctgaccgtgtcaagtacttgggtccattctctggcgaatcagcgagctaccttaccggatagttccccggagacta

SEQ ID NO: 104289 - DNA, 324 bp, Arabidopsis thaliana columbia
aggattcatcgatgttaacgtcgtccattcttcttctttgatcccttcattgatctctcacatttccgattccaatttagggtttcctctcttttcacatttctagggtttttcttgttccctttgtaccggagatggtgaattgaaaggaaaaataaaacgcttttgagagcttatatttgaggttgtttcctcatgtcatagcattctatttaccattgtggacagcttttacggaaatctttcatatgttgtagttgactttgtggaagagtccataccacttttatcttctcaactcatgaatctattggattctcggtc

SEQ ID NO: 104290 - DNA, 359 bp, Arabidopsis thaliana columbia
gaaaattctcatctgattcagtccatggctgccacggctcttttccgatcgattcgccgacgcgacgtcgtctccgcgcctctttccgtttacaaatcccttgctggtaatgctcaaccttcctggggtagttcatacattggtcagaactatgcaagtttctccagagctttcgggtaggtttgtgtttgtttcttgtgctttttatacctattagaattactctgtggatgtcatttcgactacgtgttgttttcttttataggtcaaaacctgttgtgaatgacattcttggtactggtttgggcactaacaatgccattagagaggagagagaggtaaaatgactttgtctacat

SEQ ID NO: 104291 - DNA, 367 bp, Arabidopsis thaliana columbia
acgcgtccgctaaaagagaagcctttaaagtttttttttaatcaaaaacagaaggaagaaaattttcctttttgttttagatggcatgaatcatcatcatcgctttgctttcttgattctctatttcgtttgatgggatttgtttttctgggaatttattcattcacctgctgccatggctaaattatctttcaaggattctcttaaagctcttgaagccgatattcaacacgctaatacactgtaaattcctccattctccacttttattgacatttatcgacttttattgtaaagtctcgatttttagtttatctcagcgttcaagttagtttttttttttattctagttgttgcttaattttgt

SEQ ID NO: 104292 - DNA, 183 bp, Arabidopsis thaliana columbia
cccacgcgtccgcccacgcgtccgcccacgcgtccgcggacgcgtgggaatgtcaaagccaagatccaagacaaggaacgaatcacaccggaccaacagcgattgattttcgccggaaagcagctcgaagacggacgtaccctagccgtttacaacatccagaaagaatcaacgcctcacctt

SEQ ID NO: 104293 - DNA, 167 bp, Arabidopsis thaliana columbia
gtgactcattcttagtgatgacagtataatgtctgatgcttattatcatcatcatcatcatcggagacattcttcctcttcacgtctatggattttaatgccggagttcccatgtcttctctttcacctttgatgaatcaagatgcaatgtggcaaatgaatttgag

SEQ ID NO: 104294 - DNA, 312 bp, Arabidopsis thaliana columbia
agatcgcgagcgccgccctttttttttttttttctccttctcctcatgtttcttctttttctctcctccagtagtagccttgatgatataagtatgcgagacctcaccattctctctctcactcttcagctccgtcgtccaattataactcttcttcttattcttattcttcttcttctccgcttcagcagcagcaatagctttagctttcgccttctccttcttcaaagcagctaactttaacccttcctcatccttcttccctcctttaatctccgtcgtcgatctatacttcctctctcccgaaccttc

SEQ ID NO: 104295 - DNA, 434 bp, Arabidopsis thaliana columbia
cggacgcgtgggcggacgcgtgggtaaaaacctaaaaaaaaaaccccaacacacacacatggattctcaggaccactgcagcaactctccaggaggaggtaagaaccatgtctgtactaaatgtggttggagttattcaaatccacatcctagtgctaaaaaccgtcgtgctcacaagaaaatctgtggaaccatcaaaggatttgagatctttgactctgaaatgaagaaagagaatcttgatttgccggaagaacactctttggatgatgagcaaaaaccaccaaccccaagtccaacagttgtcgaaaaatctgctccaacagttgtcgaaaaagctgctaatgagagaattggggatgtttctgaagaggatgtgtttactgatgctgtttgtgagttttcgagatctgattctttcaaggaagagacag

SEQ ID NO: 104296 - DNA, 429 bp, Arabidopsis thaliana columbia
gttactcttgtctgaatcttcctcaaatctactcatgtagacctcccgatcgcgatctaaatttccgccaaactttttttaatcgcaaagattctttaaacagaatcatcatcaagcatgaaagagatcaagaagacgatgacgaagcagatgacggcaagacgtgacgacacgccgttacacacggcggttagagaaggcaaaacggaccttcttttggagatgatcggagaacacgacggcgtggagctgaaagagttgttggccgagcaaaaccagtccggtgaaacggctttgtacgttgcggctgagtacggttacaccgacatggttaagattctgatgaaacactccgactctgtcttagccggaaccaaagccaagaacggcttcgatgcctttcacatcgccgccaaaaacggaaatcta

SEQ ID NO: 104297 - DNA, 152 bp, Arabidopsis thaliana columbia
caggctttactaacgacagcatcagagctcgatcctagacatcaacctgtttggattgcctggggttggatggaatggaaagaaggaaacacaagaacagctacagaactttaccaaagagctctctccattgatgcaaataccgaaagtgc

SEQ ID NO: 104298 - DNA, 400 bp, Arabidopsis thaliana columbia
cactcttctttttttttttttttggtttttcatttaagtctattcaatcatggaaaccggtttaaacatcttaaagctatcgctatgcgtcagcctagtcgtggttggatcatatgctcaggctcccgcaccatggaatccatctaatgggtttcgtccggggacatgtgaccactacgagtgtcccacctataaattggtacaggccggatacggctttgagatccgcatgtacgacgctgccctatggatatctactagtcctatcccctccctatccatgactcaagccaccaaaaccggtttccgacggtaaatgaataaatcgaatatataagacttggtgttctttcggtttctttatattataaactgaagttgactacgtttttgggtttat

SEQ ID NO: 104299 - DNA, 216 bp, Arabidopsis thaliana columbia
tgcgtcatcgtacttttctgcattccacgccgtcgaaatctaactgctctacagtgagcatgcaaaactcactgacaatggaactacgaccatcacgtgattccggttcatctgatgtcgatgctgatatgagcgatggcttttcaccgcacgatacttctcacagagtcatcgctgatgaaggttcgttgctgagatcagcatcgatgtatcaag

SEQ ID NO: 104300 - DNA, 439 bp, Arabidopsis thaliana columbia
cccacgcgtccgattgatggtatgcttctgcttattgttgagaaagtcgtggaagaaatcgaaagaggtggattcaataaagttggatcagctccaccttcaccgtcatcggagtttagcgatgatctatgggctactatctgggaagttagtaatacagtgttgaaagatatggagaaagagaggaagaaggagaagatgaagcaatacgttcaatctcctgaagtgatggagatgtgtaggtttgctggagagattggtattcgtggtgatttgcttagagaacttagatttaaatgggcaagagagaaaatggacgacgctgagttttatgagagtttggaacagcaacgtgatttggataattcgattagggaatctgaaactgtggatggagaagtagaagaagaagggtttgttccttctgatgaagttgaat

SEQ ID NO: 104301 - DNA, 426 bp, Arabidopsis thaliana columbia
gttttcctacgagatgagtaaagcccaaaaacggaaacgcctaaacaaatacgacggcgaatcaaaaactccggccaataaatcaaccgtcgacggcggcaatccttaccctacactacttagacctaccgctgaagaatgccgagacgtaagggatgctttgttgtctctccatggattccctcccgaattcgctaattaccgccgtcaaagactccgatcattctccgccgtcgatgatcacgatacacagtgtaatctgaaatctgagacattgaatgaaacggaagaggagagtgtacttgatgggcttgttaagattcttctctcgcagaatacaactgagagcaattcccaaagggcttttgcttctcttaaagctacatttccgaaatgggatgacgttttgaatgctgagtctaaatc

SEQ ID NO: 104302 - DNA, 371 bp, Arabidopsis thaliana columbia
gatgtttttcttcctttttggtttttatcgattttactattattattgtttgttcttcctcttcttcttattcttactcttatatattctacttctttttatttttatttttttacgtttttggatcagggtttgtttgttcaatagaaagccctagtttttgtttttgtgttctttgattcttcttgcggccgtttctgggtttcttcttcttcttctctttccatggagatgggttctgacggtgaagatcagaagatcaggagcgtcgttggtgatgctaatcttaataataagaagaagaagattgataataattcctcctctaaggatggtcgtgtcaagcctaaacgtcagatgaaaactccgtt

SEQ ID NO: 104303 - DNA, 235 bp, Arabidopsis thaliana columbia
gtttcgtggctggaatctatggggaaaggccccatagcgtttcgccgtctttcaggcaaccgtcaccggaaaaaaggttctgcggtgaatgatgactccgcacagacatcgacgccttcatctccaccgcctctcctaccgattcatgctgacggatcggctgtgggagcgacggggaaggcgaacaagaaaaccggaggagctatgctgtggatgaggtttgatctgactggtg

SEQ ID NO: 104304 - DNA, 373 bp, Arabidopsis thaliana columbia
cgcgtcaggtcgacgaggatctcgattcgttagggctcctgggctcttactctgtcgcgttaatcttcaacctcaacccaaaatcccatctttttcctacagtcttcgctctgattatcgtcttcataatggtttctccaattacatcagacgtaactcaattcgaacatctccggttatcaatgccttcctctcagataactcaccatccccgtcaccatcaccatccccaattcgttttgttcaacggagttcaatgcttaatggtcgtctcttctcgacttctactcccaatccagaccaaaccaccaccaagactaaggaaatcaagacaacctcgtcggattcagactcagctatggctgacatgaag

SEQ ID NO: 104305 - DNA, 270 bp, Arabidopsis thaliana columbia
gtgatgcgtttagacagagagaagaagaagaagaaaccctagacaccaaaagaacgaatcgtggatcttccgcccactcgcttcctcagatcgcgtgaacaccactcagcaatttttcttctctttctctcttcttcttctctatctccttttcgcagatggataccccaactcgcagccgattggagcgtgttgtcttcttcttcgtcctcctcgcgacgacgaagagattatggagagacgggcttttctcagtttctgctccgattc

SEQ ID NO: 104306 - DNA, 318 bp, Arabidopsis thaliana columbia
acagatctggtcgcgacgtcgccgtcgccgtcgtcagcgccgagatccgccacagacttcttctcggatccttacgattctcatcttctatggttcaagccttccctcttcctctcccctaacttcgactccgagtcctagatctcagaactccgtacatttgctcactttgacactcgccgatctgatctccggtcacgatttgcatcgctcaggcgagagcttgtcgatcacatcaggcgagattatgccggtttcgtcaatttaagcactaagctcgtagatatcgaggcatctgtggttcgtatgcgtggtccg

SEQ ID NO: 104307 - DNA, 247 bp, Arabidopsis thaliana columbia
aatgaaggaaaaactttttagggagaaactttttaggtccaaagatcgacatagaatagaagattttgaatttgttttgttatataaagtttcgtctgaagcgatctactttttgtgctaaagattgaaactttttggtaagataattgtgttatgtggatggctcgtggaggtgggtcttcattctaatggtgcacgaaaggcagggaagcatggatactgccgctctcgatgagatcattcgtcg

SEQ ID NO: 104308 - DNA, 372 bp, Arabidopsis thaliana columbia
cttgtcttctctaaccctctaaattctctttggtcgggatcactggaaagaaatgtataatctcactttctctccatcattgtcctcttctttgctctcttttacacaacaaactcctgcagccatagtgtcctcttctcctccggatttagtacttcaacaaaaactccggtttgtcgtggaaacctcaccggaccgatgggcttatgtcattttttggcaaaagatgtttgatgatcaatcggaccggtcttacttggtttgggttgatggtcatttctgtggaaacaagaacaacaattcccaggaaaatgttcatttttctttgcctcttatgttatctaatcaaaatatccaaaatttatttaaatc

SEQ ID NO: 104309 - DNA, 375 bp, Arabidopsis thaliana columbia
caaaaacaaagtcgattacgctagaatccatggtcacgacatcttctacagcaattctcttcttcatccgaagatgaattcgtattgggcgaaacttccggtggttaaagctgcgatgcttgctcacccatttatggattgaagctttaggtaattttctcaaacacatttatggattgaagctttagagagaaaatgggtgatgaggcagagatcaaggaacatttaaagccacaagcttcatctgaaacaatagacaagaaacataatgtgaaagggaagaggttatggcagaaagtcaagtatcaattggtggagtttcattcattgcctgcttatttaagagacaatgagtacatcattggtcattaccga

SEQ ID NO: 104310 - DNA, 318 bp, Arabidopsis thaliana columbia
ttttggagcttaataatacaaagctagtctggtttgatttagagagtaagaagatgagtactcttaggattaaggattgccctagctcgtatagtgcggaactcgttgtgagtagccttgtcttggggtgtaaaggagatcttaataacattaagtatcgaaaagaacaacaagctaaagaagctagagaagctaaaattatgcagaacactaaaaggagggatgatttcctgtccaaaggattcaagctggtcttataagccagaaacaagagacaggagctaaagctgcacaaggtaagtgaaaaagttgaccgtt

SEQ ID NO: 104311 - DNA, 356 bp, Arabidopsis thaliana columbia
cgaaacccaaagaatccacaaaaatggagattctccgcaaattcaaaattctcgggagatccaagtctccgatctttgctttcacgagtcaccgccggcctagctctaaccgccgtcactggcagcgccaccgccgtgtccatcttccgagactcaccttccaataaaatagcgacggctgtagaaggcgtcgtccgttcttctcgcgctatctactccatcactctcactgtcgctgattacaagtatactttgcgtagattaccagcagattccgatgagtatcttcagagattaacagaggtgtacaattacatatcttacattcgtgtttaagttttggtttcatggaattg

SEQ ID NO: 104312 - DNA, 146 bp, Arabidopsis thaliana columbia
tttggctcatctgatactctgcacccagttgatgagatagagctctggcacacgtcaatcaacagggagatgaaggaaatagccgatgacgcgaggaagattcagctgtctggagatttttcggatttatcggcatttgatgaacg

SEQ ID NO: 104313 - DNA, 328 bp, Arabidopsis thaliana columbia
gtttttcacgccggagatagagagagagaagtaaaaaagcgagaaaaagctagaaactttagaatacccaataatggatccgatcgaatctgtcgagtacaatggcttcgagacctctaacggtaacgtcgaccatggttggaagaaagtcgtgtacccgaaacgtcaccggaagcaaaaacaagcggatcaagcgacggcaaatggtggcaatatttgttgcattagcgatggtattgcgtatgaagcctgatgctttgactaatgtactgccaactctgagggagaatcctaagtatcagggtcaggataagcttccggttacagt

SEQ ID NO: 104314 - DNA, 105 bp, Arabidopsis thaliana columbia
tccggctccccttttcttatccggaaaccaaaaacttccggtgataaaacctccttcgacacctctcaacttcttggataaaatggcgtcaactttcactggcac

SEQ ID NO: 104315 - DNA, 339 bp, Arabidopsis thaliana columbia
gttaccggtactggtccagaccaatacaacgttgcttcatacatgtctgtaacactaagctgtgaccaccgcgtaatagatggtgcaattggagccgagtggctgaaagcattcaagggctacatcgagaccccagaatctatgttgctctaaaattcagacgcacacacacatcaaaagctaaactcataagagtcttctgacctcaaatttctttcccacaacatattctaccagatttgatcagcagtacgcaatggcctttaaagttgagtgttttgctattctttaaatcattgagttgacagatttttgtctcaaaataaaatcacgaatcca

SEQ ID NO: 104316 - DNA, 277 bp, Arabidopsis thaliana columbia
ccacgcgtccggaaactctctctctctctcgttactccaaccactcctaattattcacatcattattggcatgaaaagttaatctttcctatataacaattattaatggcgacagtaggatccctgaaacctctgcaccattcctcatgttcatcgagtttccctcggaatccgatcgtaaaccggaaagcccttcttggatttgtgtttgattctgcccggaacaaccagattcgatgtgacaatttacgatattcatctgaaagcgatgggaaga

SEQ ID NO: 104317 - DNA, 242 bp, Arabidopsis thaliana columbia
ctccaaggtctgggaaactgtttccaagattttcattcgcgcaaacgttaatacattggtgattgtcacagaacaagcacgacatgcatttgacgtactggcatctatccacaacaacgagctccatacatactgatggcatcatatctgtatgtggggatggtttcgtcaacgatatccttactgggtatctcttgtcgagacttaaagtccctcttccagctactccttcacattccttc

SEQ ID NO: 104318 - DNA, 212 bp, Arabidopsis thaliana columbia
ccacgcgtccgaccaaacacacgttgaggttttggtcacgaccattaacgtttcttataattattatctatctcataattcaacatgtcaactcatcacgaccgtcattagctagagcggagcattttctccggtgcctcgacgctcaggcagccgaccacggcagtctcaactcaggaaccgccgtgatcgcaacaaactcatctttctca

SEQ ID NO: 104319 - DNA, 266 bp, Arabidopsis thaliana columbia
tttatttttttttttttttttttttttaaataacttattcttgattatgttccaagtttggttcaaatcgagcgagctggaggcaacaggaaaagagggcactaaacactgtctacatgtaatctcttttctttctgtgcgtgtgtttctcttaattttatctttgtcatgttctttcagtatcaatcaagcttttctaattcaatgaacaaagtgattcagaagacaaaaaaaaaaaaaaagggcggccgctcgctcgatttgaa

SEQ ID NO: 104320 - DNA, 175 bp, Arabidopsis thaliana columbia
ctattgacatcttcgctcttcttcacaatcctctttgtttccgccaattttctcgaggaataatatattcatctttcccctattgctcatgatgtttgagcaaggattcaacgatatcaacttaggtgtggccactgatgggacttccccgatgttggggttaatcgcaaagttt

SEQ ID NO: 104321 - DNA, 325 bp, Arabidopsis thaliana columbia
aaacttttaccaagcagtgaatcctgatgttgcaaagatgtttcaacttgatccggcatcaaaagggcctgctcttgtcgtatttaacaaggaagaggagaaaattacccattttgatggagaatttgttaagtctgctctagttagttttgtgtctgccatcatgcttgctttggtctctgttttcaccagagagactgctccggaaatttttgatagtgcagtcaagatacagttgttgttgtttgtaaccaaaactgagtctgataaggttcttacggcatttcaagaagcagccaaatcattcaaaggaaagctcatcttt

SEQ ID NO: 104322 - DNA, 358 bp, Arabidopsis thaliana columbia
ttgattttgactctgctagaacacgatgaagttggttcaatggtaatatgtcagattttagttcgttatctgcaagcatacacttaattgaagctttccattcatggaaagtgaaactttagcagatctgatcacacgatagttaccaattttatgatcacagaaattgacgaataacctctttggtgaaatgtgtgtacacaggtcaacaaagaagtagcggaggtgatacagaagctaaagacccacgaagaggacaccgcagagcttgaagatgaagatgaaggtgaatgctcaggcaccacccctgaagaagattctgagcaaccgaataaaaggatcaacttggacactgacg

SEQ ID NO: 104323 - DNA, 121 bp, Arabidopsis thaliana columbia
accacgcgtccgctcatctgttcgaagtctctagggacatactaaaagactttggatcatcttctgactctccattggcggttcttccgatatggattttagcaatgatgtgtttactctt

SEQ ID NO: 104324 - DNA, 410 bp, Arabidopsis thaliana columbia
ggaagatcaaccatcttttcaagaagaagaagctgctaaagttccttatgttggtgataaggaacctctgtctagtttagctgcagagtatcaatcagggagtcccattttgctggagaagattaagatactggacagtcaatatatcggaatccggcgaacaagaggagatggaaattgcttcttccgaagttttatgttctcttaccttgagcatatattggaatcacaagatcgtgctgaagtcgatcgtatcaaggtcaatgttgagaaatgtagaaagactctgcaaaacttaggttatacagattttacatttgaggacttctttgcgttgttccttgagcaactagatgacattctccaaggaactgaagagtctataagctacgatgagctggttaacagaa

SEQ ID NO: 104325 - DNA, 270 bp, Arabidopsis thaliana columbia
gaatattccggcgaagattgagactctcaatatccaatggagaattattcccggcggtctattctcctttccacggtggtcgccgccgtgttattctctttaattccggtttcaatctctattcccttcatactctttcacggaattggagataaatgttctggtggagttagtaacttcacgcaactcctaaccaacctctctggctctcctggctattgcttagaaataggaaatggagaaaaggactcatggttcatgccactaaga

SEQ ID NO: 104326 - DNA, 172 bp, Arabidopsis thaliana columbia
cccacgcgtccgcccacgcgtccgcccacgcgtccgcccacgcgtccgcacatttggtcgacggtcctgctcagcccatggaatttacccaatccgacactgctgcgagtactgtggagaaccagccagctgaggatcctcctactctgaaagttcacgtggactatcccta

SEQ ID NO: 104327 - DNA, 318 bp, Arabidopsis thaliana columbia
ggcgaaatccaccgcgctgatgatttttagcttttgttcgtttgtacaaaatctttacatgtaaagattagattctcatacttaggcgtataggtccttttcggtttcaaagtcactagcaatcgaattcttatgggcgagatccaccgcgctgatgatttttagcttttgttcgtttgtacaaaatctttacatgtgaagattagattctcatacttaggcgtacacgtccttttcggacagatttcgtacatcacataagagcacacgacatgatataataatgttttttaggtgataaattgtttggtttgcact

SEQ ID NO: 104328 - DNA, 211 bp, Arabidopsis thaliana columbia
ctagaattgtgagtgtattactggaatcaattaaagatgtgccaaatgttgcagagaaggtctgtggagcaatatacaatcttgcacagggatatgaagactctggagcaagttcctctcttctctctccttatcttacacagatcatcacacatctccttgcagctgctgagcgtacagatggggcagagtctaagctaagaggtgctgc

SEQ ID NO: 104329 - DNA, 160 bp, Arabidopsis thaliana columbia
catagtgatcaacagtacgtataatcggaaatgacgaacgcagaatcagtaacggtgaccaacacgcaaatcatattcccagactatgttactggatttccaaacggaatctgatcctaaaataagcacaactaccagtgatctaaggcttccggaggga

SEQ ID NO: 104330 - DNA, 259 bp, Arabidopsis thaliana columbia
cacacgcgtccgcccacgcgtccgtgaaaaagacagacaattcgtctcctatcgacgacgaatatgacagatctctctcctcagaaggatttaacgaaactcaactgttgcgaattcgatttgaatctcgacccgttacttagcaggaagaagatgaagcagcgcttcaacttcttcttcgttatcatctcttaataatctccaatggcttcatcatcatcgtaacgacgctgcgtttttgtatggaacattccttacg

SEQ ID NO: 104331 - DNA, 266 bp, Arabidopsis thaliana columbia
caaaactccggtgaacatggcgtcgcttactctccggtgcgattcgacgcatcttttgccttcccgtgatgttgtcaagggaacaaaaccatttggaacgagcttggtgtatcctacgatcatatcgaaaaactttaatgttagaatgagagtgatacctgaggaaggacatgtgttctcttcttctaagagtaatggatcatcaatggggattgagttacagccagatttggtttcgtttggaacattagcacctgaaatgattc

SEQ ID NO: 104332 - DNA, 130 bp, Arabidopsis thaliana columbia
gagaaaaatagagacacactcatctctgtattcttctgcgccacaaactgaacatcaaattcacctttttctccacaatatccttgattgatcctcagagaggatttaagcttgaagttacacagcttct

SEQ ID NO: 104333 - DNA, 157 bp, Arabidopsis thaliana columbia
attcaaaaaagatttctcagccatcaaaattctctttctcctcacccaacaactcacaagcatacctctttttcttccatatagataagttaattaagaaaacgaattatcaggttttgtttcggctgatctgaagaagttcatccatggatacggc

SEQ ID NO: 104334 - DNA, 147 bp, Arabidopsis thaliana columbia
aggagccgtgggttttctggtcatcctcgtggcaagacgtcatactcatgcctttaccaatagcagttttccaaaggcttttctcttcggatcctgtacttcagcttatcagacgagacaggtattggagatctgacatctgatggg

SEQ ID NO: 104335 - DNA, 326 bp, Arabidopsis thaliana columbia
tggaaaggaacatcccggggcatgttggatctctgatgattcggttaaggacttatgtcataacgaaaaccggctttggtacacgagaggatgtcctagcacttttggttggtttgctcttcttggattgggactttatatcatcttcttctctcctggaatggggactgttccatggatagttaactcagagatttatccattgagattcagaggaatatgtggaggaatagctgcaactgcaaattggatatcaaatttgattgtggctcaatcttttttgtcattgaccgaagctattgggacttcttggacttttctcatct

SEQ ID NO: 104336 - DNA, 408 bp, Arabidopsis thaliana columbia
ggtaaatccagacaaggagcttcagaaagagctgaaatcgagttataaagcacttgatgatgatcagaagagcgtatttctggacatagcatgttttttcaggtcagagaaagcagattttgtttcaagcattctgaaatcagacgacattgatgctaaagatgtgatgagagaacttgaggagaagtgccttgtaaccatttcttacgataggattgagatgcatgatctattgcatgcaatggggaaggaaattggaaaagaaaaatccatcagaaaggcaggcgaacgtcgtaggttgtggaaccacaaagatattcgtgatatcctggagcataacacgggcactgaatgtgttagaggcatcttcttgaacatgtctgaagtcagaagaatcaagctttttcc

SEQ ID NO: 104337 - DNA, 246 bp, Arabidopsis thaliana columbia
acgttttaaagctgttgaccgtcctagggatcgtgaagatctttttgacaattacattgtggaacttgagaggaaggaaagagaaaaggcagcggaggaacatcggcagtatacggcagactatcggaagtttcttgaaacctgtgactatatcaaagctggtacacaatggcgcaaaattcaagatagactgtaggatgatgagagatgctcatgtcttgaaaagatagatcgtctgattggttt

SEQ ID NO: 104338 - DNA, 337 bp, Arabidopsis thaliana columbia
ataaaaaactcactccctagaaaagtttgaaaatggcgaaggcagataagaaaccagcggagaagaaaccggcagagaaaactccggcagccgaaccagcagcagcggcagagaataaaccaaaagccggaaagaaactcccgaaggaaccagccggcgccggagacaggaagaagaagagatcaaagaagaacgttgagacatacaagatctacatcttcaaggtgttgaagcaagttcatccagatatcggaatctccagcaaagccatgggaatcatgaacagtttcatcaatgatatctttgagaaacttgctggtgagtcttcgaagcttgc

SEQ ID NO: 104339 - DNA, 362 bp, Arabidopsis thaliana columbia
gaagcaagtagagagatagaggagagagagtttgataaagagagagaaaaaggggttgcgatttgggagaagagaaatagagaggagaagcattagagaagaagaagaagaagatggatagaaatagagaagctagaagagtacctatggcggctgccggaaatggtctttcccggcggagacatagagccggaagtttcagagattcaccagaggaggaaggtccggtggagttaccggaggcggcgaggttgagagatcgaggagggagtaataagaaggatcgagatcgggaacgtgatagagacagagagagggaaagagaaagagatagggagagagatcggttaaatagccggagt

SEQ ID NO: 104340 - DNA, 345 bp, Arabidopsis thaliana columbia
ctagttctagatcgcgagcggccgccctttttttttttctttttttttttttttttttagtattcacagttttattcatggcaagctttgagcatccaatgaacaagatcaaggcgatgccgagggtaaacagtgaaggagttctatgcggtgccaacttcaaggtggatgtgtacaatcgtgttaacagtatccctcgtcgaggaagtgaagccaattggtctctctgaatacttttaataacactttcaatttggtttctttttcgcacttgtgcttcttctccgctttcatcttaattatggactgttcctaagcttgccatgaataaaactgtgaataata

SEQ ID NO: 104341 - DNA, 127 bp, Arabidopsis thaliana columbia
cccaaaccaactgaggtattgcaaactagacagaagctatcgattattggccgcaaaatttctagaggtttatctgatgttgccattacaagtgatgaggattcgagaatattttctccagatacac

SEQ ID NO: 104342 - DNA, 374 bp, Arabidopsis thaliana columbia
caagatcaataaaaagtcaacaactgaagatcatgttgtggtcaacatcccagtttctttctcagacagagagcagaaagaaccaaaatcaggtccgatggcttcagccttggagatcacacagattccatgcaagctctgtgaccataaactggtgtatgggacaacacgcaggtctgtagcgtacagaccagctatgttgtcaatggtggcgattgctgcggtttgcgtctgtgtggcacttctgtttaagagttgcccggaagtgctctatgtgtttcaaccgttcaggtgggagttattggactatggaacaagctgagtgtaagtctactttgaaagatcttctaagatatatatatgaatgttactta

SEQ ID NO: 104343 - DNA, 387 bp, Arabidopsis thaliana columbia
agttagcctgacattcttggttctgcttctggttttcttctgctggcttcttcaggtaagtgagtaacttctacgatcaactcttatgtagtgagtgtttttacttctttttgttctgagcctcttagtagtgaccgcagccaatatatttatttttgtaatttaaaaactcactattacaggcaaattagtaaagttggcgaatcaacgcccctgaaagatttctgttttagtttctggtagagctagtaatgttgtttgattcgtaatttctttcctttatgtgtgatactgtagatagattagatggatcaaatcgttaatgtggatgagtttcaagagctggctaaacaagccctccctaagatgtactatgatttctacaat

SEQ ID NO: 104344 - DNA, 376 bp, Arabidopsis thaliana columbia
cggacgcgtgggtgctgtttctgctctccagcaggttttcgatgctagttcatattcccagctggttagagacaaatacgagtgctatccggaaaatggtggtggaaaccagagccctatagccacagggatggttcatcaagttccttcattcgggtcggattcggactggatggagccatcaatgcatttatgccattcaagaacgttaaagcctcatgcttatgatcaggtttacaatgcttttgacctactacgaaccgaaccatctgtccagaaaatggtagtatcattgtcgtctgacaaagcagtttgggaggcggtgatgaacaacgatgtggtgcgagagattagggacttgtacaacaatggcata

SEQ ID NO: 104345 - DNA, 399 bp, Arabidopsis thaliana columbia
aaattatacactccccctgctggttctgggtttatctcaggattttcttcattctgacgtagatctacattcgatatgagtctcccaacacagattgttccttttggaccgagttcatatttgtcggtacaagcaagagttgttgaagaccatacaatgtcacaagttattttacacgcagtatcaaatggagggggtactggtctactgttaatggtgacaggggcaagtcatgttgagtatggttcaagaggaagaggtttgccagcaaggatctcaaggaagtttccaaagaaacaccaagttgttgtattacttgaccctgaaagacagttcttgcgaagagatggcgaaactccagttgctgatttcttgtggtattctgctgcaagaccctgc

SEQ ID NO: 104346 - DNA, 374 bp, Arabidopsis thaliana columbia
cggacgcgtggggtttctctgttacttgattcgattactctgttactattctcgttctttgttactactactactactactgttacttgtattttcccaaatcggtacgttcatcttcctgcttctgtgagcccggagatcgatcggatttttttgtattttgtatatttgttgtagatctaaatgcttttgttcagttttgttggattgttttgctgatctggtttttgtattatttggataacagatcattaacgatcgtgagactggaagatcaaggggattcggattcgtcaccttcaaggatgagaaagccatgaaggatgcgattgagggaatgaacggacaagatctcgatggccgtagcatcactg

SEQ ID NO: 104347 - DNA, 380 bp, Arabidopsis thaliana columbia
ctcttcatcatcaacctttcttcttcttcttctcaatcttttctcaagaaaatcacaaatttcccaagaaaacactcacatatatgatgctatatatagaaagatagtctcatctaattctctctctccctcggattcgttagatgtgatcattttttcttgatttttgatcagattcttgcgtatagctgtatatatacaccaagatacactcatcatcgtcatatatagattatgtgcagcgtctctgagcttcttgacatggaaaacttccaaggagacttaaccgacgtcgtacgaggaatcggaggccacgtgttatcaccggagactcctccctcgaacatctggcctcttcctctgtcacatccaacaccatc

SEQ ID NO: 104348 - DNA, 272 bp, Arabidopsis thaliana columbia
accacgcgtccgcccacgcgtccgaaacactcctttccggtttcgtttcctacttcctctaatcacatcgaccgagagcaaacacgaccaagatttcaaaccaattcccgcctttcaagtgttggaaaaaaaccaattgggtcagataacatggggagctctcgtcatgaaaagcgaaaagaggctcgcttgcagaagaaccacaagaaacatgaatcttggcttcagcgtcataagtcggaaaaggagaaacgagtatcatcatctgcttc

SEQ ID NO: 104349 - DNA, 382 bp, Arabidopsis thaliana columbia
cccacgcgtccggaaaacttttgatttcgagagtgcttcggagcagaagaacgagcaaagctagggtttccatctatcaaatccagctacaatcgaacctattcatcgaaattagggttttttttttggtcccttaatttttcccttctagtagcttctgatccttcgatttccatggcggatgggtactggaaccagcagcgacagcaacatcatcctcctggtggtcctatgaaacgtccccgttccgatttcgaagctccatcatcaacaatgactatacggcacggtggtggttattatccgcgagatgaggatctcgatgttcccgatactagaactatcggttcagcttacgatcgctatctccatagcgtgcaat

SEQ ID NO: 104350 - DNA, 244 bp, Arabidopsis thaliana columbia
gcacgcagagatcgggataagaagaacccgaagcagaacccaattgctttgaaacaatcacctgttaggagaaatccgaggcggcagctgaagaagaaagtggtggtgaaggaagcgatcgttgcagctgaaaagacgacgcctttggtgaaagaggaagaagaacagattagggtttcgagtgaagataagaagatggatgagaacgacagtggtggtcaagcagctccagtgcctgatgatg

SEQ ID NO: 104351 - DNA, 116 bp, Arabidopsis thaliana columbia
ctcatatcacctaacctctattatggtttggaaccttaaagatgcaatcgtactctgactttaatctttgttttcatgcaaagagcagaagtgtttctgtaacaaaacaccttttt

SEQ ID NO: 104352 - DNA, 265 bp, Arabidopsis thaliana columbia
aaatactgaagttgttctggcacagtgttccaaagaatttggctcctgtatggttgcacatgccatggaattattgacagctggaagcgaagaaggagaagttcttgtacatgaggaacagcgtaagttgggtggaattaacatggaagagctccatagacttgtttatgctcaagttctttcatctcatgctttgacttggcatatagctcctatttatctatcatcgtgcgagaaacatggattaggcttattagagctgttg

SEQ ID NO: 104353 - DNA, 401 bp, Arabidopsis thaliana columbia
  unsure (1)..(401): unsure at all n locations
gaccaatgttggtggtgctggagatgttcattcggttgcggttaaaggttctagaacaaggtggcaacaaatgtcaagaaactggggacagaactggcaaagcaacaatctcttaaacggtcaagcattgtcatttaaggtgactgctagtgatggtcgtaccgtcgtctctaacaacattgctccagctagttggtcctttggacaaaccttcaccggccgtcaattccgttaaaattgagtcaagttcggttttatatagttttagggtttgtgtagtagttggttgaggaaagagtagagaaagagagagggtttaaggctttttaaggtttttaagtggagagccttganacttcttctttgactcttgagggttaaaatggagaaaagagcttgtt

SEQ ID NO: 104354 - DNA, 415 bp, Arabidopsis thaliana columbia
cctatggcttgtttctcggttggaccggctcatgagctgtcttctcttaacggtggttctcaagagtcaccaccaactactactacatctcttaagctagtgtcggggtcatgttatctcccgcatcctgaaaaggaagctacaggtggagaagacgctcactttatctgcgatgaagaacaagctattggagttgcagatggagttggcggttgggctgaggttggtgttaatgcgggactgttttcgcgtgagcttatgtcttattcagtatctgcaattcaagaacagcataaaggttcttctatcgaccctttagtggtgttagagaaagcacattctcaaaccaaagccaaaggctcctccacggcttgtatcatcgttttaaaagataagggattacacgccattaatc

SEQ ID NO: 104355 - DNA, 291 bp, Arabidopsis thaliana columbia
ggacaagagagacgtgcaaaatttgcaagatctaatgattctgggaagtatgaatatgaatacatcgatccagatgatatagccacaattatgtataccagtggaaccacaggaaatccaaaaggtgttatgctcacacatcagaatttgttacaccagataagaaacttgtccgattttgtgcctgcggaagctggggaaagatttctgagtatgttgccatcatggcatgcttatgaacgggcttgtgaatacttcatatttacatgtggagttgagcaaaagtatacg

SEQ ID NO: 104356 - DNA, 357 bp, Arabidopsis thaliana columbia
gtcgaatctcccgatcactgtttccgcaaattcacagaagacggactcttcctcattagtttcagccgtgaccatcaagaactcatagtctatcgtccttcttggctcacttactccagaaccgatgattccacaaccaccctacctcctctacctcgccgtgcttcgaaattcgacagctttttcactcaactctactcagtcaatctcgcttcttctaacgaactcatctgcaaagacttcttcctctatcaccaaactcgtcgtttcggtcttttcgctacttcaacagctcagatccatgattcatcatctccttctaatgacgctgttcctggtgttccttccattgataag

SEQ ID NO: 104357 - DNA, 232 bp, Arabidopsis thaliana columbia
gaaacctctctctctcaaagaccaaaaacaaaaaaaaaactttttttttttcccccttctcttctttcttcttcaaggtagcctccaagccaaacacggaggaacctaatctgttgtctgctcgtaacttcacaagaagctataatttgtcgttaatgttggcttcttcttgtccatttcttcttttcttcttcctctgaaacacaagaaaaacatctttaacccctgagca

SEQ ID NO: 104358 - DNA, 260 bp, Arabidopsis thaliana columbia
ctcacggaagattcttcagaatatctgatccgatatcagaagccccaagttcgcttgaattccgtctgagcaatggctttggtcttgcacacgtacaagggaaacaaaagtgctgagaaggcactcattgcagcagagtacgttggtgtgcagatcgatgtgccctctgactttcagatgggtgtcactaacaaaacccctgtacttgaaagcaacgcaattgcccgttatgtaagccgattgaatggtgacaactcttt

SEQ ID NO: 104359 - DNA, 367 bp, Arabidopsis thaliana columbia
cgcgtgggcggacgcgtgggcggacgcgtgggcggacgcgtgggatcccggcgccggagaccggaagaaagaagaaaggtttgatccgagtgcacaaccaccgttcaagatcggagatataagggcggcgattcctaagcactgttgggttaagagtcctttgagatcaatgagttacgtcgtcagagacattatcgccgtcgcggctttggccatcgctgccgtgtatgttgatagctggttcctttggcctctttattgggccgcccaaggaacacttttctgggccatctttgttctcggccacgactgtggacatgggagtttctcagacattcctctactgaatagtgtggttggtcacatt

SEQ ID NO: 104360 - DNA, 401 bp, Arabidopsis thaliana columbia
attatccaggataacgataacaacactctctctctcactgcaagagcgcgaaacagagtaaggctcactttgttttagctttctcctctacttcgataatgccgtttgctccttccttgttgtcatcgtcttcctcagtctctcaatttcttcccagattccccaacgcgactagattcaatgtaactccacggagcagagccgccaccgtcgtcgcggcatccgtcaccgacctagccggggtcgacagtacaacaatcgccgtactcggtggaggatccgtagcagcactcgcggcgatggtttccttaacggatccggagaggaggcggaaattgcaggcggaggaagttggcggaggcgataaggaggttgtgagggagtatttcaatagcacgggg

SEQ ID NO: 104361 - DNA, 301 bp, Arabidopsis thaliana columbia
accacgcgtccgcccacgcgtccgattttcttagaaaaacaattatgggattttgcttctccaaatttggcaaagcacaaacacatgagatgccaatctcttcctcttccgattcaagccctcctcatcactaccaacctctccctaaaccaactgtttctcaaggtcaaaccagtaatcccacctccaagcctcagcccaaactcaaacccgctcctcctcctcctccgtcaacatcctccggttcacagatcggtcgaatcctaaaccgaccaatgatcgatctctcagctctctacga

SEQ ID NO: 104362 - DNA, 349 bp, Arabidopsis thaliana columbia
cgcaggtgtcctaagatgagctcaacgagaacagaaatctcgtgtcgaacaagaggatggacaacacggaggaaacaagaggcttatttcagttcagacgaatcagatcaggaagcttgtgaatcatttgggttactcttttttcctctctaggctctttgatgttgaggttcgagctgagattggttctgatgaggttattgagaaagtcagagccttgcctagagcgattcatttgcactctgggactgatgctccactgaatgtgacattcataagagcgcctccaggtgctttgttgaaagttgatatccctcttgtgttcattggagatgatgtttctcctgga

SEQ ID NO: 104363 - DNA, 308 bp, Arabidopsis thaliana columbia
cggacgcgtccgcccacgcgtccggtttactgcaagaaggaaatttgggttgctcaagcaatgtagaagcgagaaaattttgatggaagttttttcggaaacagaaggtttgaatgtgagataagtttcaatttcaggggatttggatgggtttttgccggaagttctcttcttccgtggatgcacgccaaatgttcggcgaaatgacgaagagaagcttgtaccagtggaatactcttcttaagagtttatccagagagaaacaatgggaacaagtcttgtatcactttagtcatatgtttcgcgat

SEQ ID NO: 104364 - DNA, 305 bp, Arabidopsis thaliana columbia
gttctagatcgcgagcggccgcccttttttttttttttttttttttttgagtaaaaaaatctcttgagaatttcagcaaagtctaagaagatagtcgaatacaacaaactaaacaacgacataaagatttcgaaagggtacagcaaaaccaaatgccaagtataccgcattactcgaacaaactgaaacccatgtcatcatcggattcttctttctcttctttcgtctcttctttcttggactcagcagcaggagcaccaccacctcctccacctccagatgtagcagaagcaaccgcaacacca

SEQ ID NO: 104365 - DNA, 215 bp, Arabidopsis thaliana columbia
attgtactatctctcttttagatatatctctatctctcttcactccatctttctcgtgttaacacaacagtcacagactcacagatctttgtcggtgatcggagatggagttccgggagaagcttttgaagttcaagttgcaaatcgtgtttgcctttgttttagctctcctcaccgtagctctcgtcgcttaatctcccggtttcctcagcgtt

SEQ ID NO: 104366 - DNA, 225 bp, Arabidopsis thaliana columbia
gtcgactctttttctctctgcaagtctagggtttttctgatccaccagaggtttttcccctgcttcgagcgccgtcttggagaagctttttctcgataggctttgcagtgacagggacacagggtttggattgaagcgaaaaaccctagcgtttacgcgtcttctcaagcgaaaaaatccttaatttccacagagaagaatggctatggagatcacacagttcct

SEQ ID NO: 104367 - DNA, 178 bp, Arabidopsis thaliana columbia
ccgactcatcagtctcgctccgtctgtctgggattcgtcctttatgtcctccgctgctctacccactccagtcgtacaaatattttctagtcaccattaggtcatttcaggcaccggttgtttgcccaagtgttcgtcccacataaatgggtgtctccgctttacatgtcaactgctc

SEQ ID NO: 104368 - DNA, 432 bp, Arabidopsis thaliana columbia
ggtttgtgaaggttttttctagggtttcgaaaagatgccggcgacagcaggaagagtgcgtatgcccgcaaacaatcgggtgcatagtagtgcagcgcttcagactcatggaatatcgcactgggacgaaacctcacacgtctcgaaactctatggttcgattactccgccacgaagtccgattactatctctactgtcacaacattttgttcttgttcctcgtcttctctctcgttcctctccctctcgttttcgtcgaattggctcgatctgcttctggtttgtttaatcggtataagatccagcctaaggttaattactctttatctgatatgttcaaatgttacaaagacgtcatgacgatgtttatcctcgtcgttggtccattgcaactcgtttcttatccttcgattcagatgattgagatacga

SEQ ID NO: 104369 - DNA, 362 bp, Arabidopsis thaliana columbia
ctgtttccttccaacttcccaaaattcaaaatcccttctctgtcaccggaaaattcccaaaatgcaacctccgatttgtaaacccagacctcagagtcacctcgaatttctgaaaccgcgtctcaaagagtcgatcaagcagctcttgttacagtacccaggggggcgaaacaatttctccgagttcgacgccattttcacacgtagtcttaacaatattcccgaagcaccacctctcgagctcgtctgggtctactccgccatcagattctactcttccaagttagctttccgggatgattccgttaggttaacttcgtgtttcttccagctgatagtttcgttttccgattcgttttccg

SEQ ID NO: 104370 - DNA, 342 bp, Arabidopsis thaliana columbia
ttcgttcatctggctccgacgatgacgaagtagccgccgccgacgaatcaccagtctccgacggagaggctgctcccgtagaagatgattacgaggacgaagaagatgaggaaaaagctgaaatcagcaaacgtgagaaagccagacttaaagagatgcagaagttgaagaagcagaagattcaagagatgctggagtcgcagaatgcttccattgacgcggatatgaacaataagggaaaagggagactgaagtatcttctgcagcaaactgagttatttgcccactttgctaaaagtgatggatcttcttctcagaagaaggcagaaggaaggggacgtc

SEQ ID NO: 104371 - DNA, 370 bp, Arabidopsis thaliana columbia
caacaacggtcatttgcgaatttcgaacaactctttcaataaaagcaacaaaaagatcgaaactttacagtcgtaggaaggaaaaaaatggtgagaaagcgaagagttgtagtggggatcacaccagatccatgtgagacaaagaagaaaacgaaaagcaagcgaagaaagagacttagtaaggaggaggaagaagaagaagagggaacacctctcagaggtatattttgtctcaaaacacgacaagatatgaagattttcgaagagaaagaggattgctttatcctcgatttcgatcccaacgattcatttgatgcacgaaagctctccgatagccctgcatctgaatgtgacgacgacgtggcgattg

SEQ ID NO: 104372 - DNA, 332 bp, Arabidopsis thaliana columbia
cccacgcgtccgcccacgcgtccgcccacgcgtccggccagattttaaggttcctgtcatgtctgattgcgaaatcgcttttttcttcttcctgagttcctttttttctccgatgaaattttaaccgtgatgatgatgatcataatgaaacagatatgagcaagaaaaatctagcgattctgttgcgtgctagaatgagatccaacaatccctccaaattttccctctctcaatttcctaaggaaattcaatctaatcctcaagagaatcattctagagatcacattgtgcaaaattctaatgattttggtaccactggaagggtttatgat

SEQ ID NO: 104373 - DNA, 385 bp, Arabidopsis thaliana columbia
aaaatctaagttgagaaaaagagagatctctaatttaaccggaattaatattctccgaccgaagttattatgttgcaggctcatgtcgaagaaacagagattgtctgaagaagatggagaggtagagattgagttagacttaggtctatctctaaatggaagatttggtgttgacccacttgcgaaaacaaggcttatgaggtctacgtcggttcttgatttggtggtcaacgataggtcagggctgagtaggacttgttcgttacccgtggagacggaggaagagtggaggaagaggaaggagttgcagagtttgaggaggcttgaggctaagagaaagagatcagagaagcagaggaaacataaagcttgtggtggtgaagag

SEQ ID NO: 104374 - DNA, 254 bp, Arabidopsis thaliana columbia
cccacacgtccgcatggctggttcgagaaaagtgaatgatttgttggaggaaaataacggaaatgtggacacaattacagggtctttatccactcaaaagggagaggataaggagaatgtgtcgccggagaaagtctctacctctgtggaaactcggaaactacatcgagctttgaagtctcaatcgatgaagggtaactctgggtttccaacggcagttacaggtttcaaatctttctcaactggtggtcgaa

SEQ ID NO: 104375 - DNA, 281 bp, Arabidopsis thaliana columbia
cacacatcatgtccgatatctccaatggaaatatactctcatacttttctcaataaagagtgaaaaacattaaacttggcttagagaaatgtgaggtttaccaaatttctaccactcttacaacttcttcttcgtcttcctcttaattctgttccctgcttactctaactctgccaacactttgtcaggttcagaatctctaactatctcaagcaatatcaccattgtgtctcctggtaatgtcgtcgagcttggtttcttcaaacccggtttagattctc

SEQ ID NO: 104376 - DNA, 264 bp, Arabidopsis thaliana columbia
cggacgcgtgggccgacgcgtggggcacaatcgcacagtacgcatttgtggaacaactgagaaaattgccaaggcagaacaagaactggttcaatcacttatggattatcatgagagcatgcaacttgaaatccacctccgaggtcctgagatccgtcctgacctcatgaaggaagttgtgaagcggtttggtccggagctccaaggtatcaaagaagaggtgcatggtgtggatctcaggctcaatacccggtaccatgttat

SEQ ID NO: 104377 - DNA, 409 bp, Arabidopsis thaliana columbia
cccacgcgtccgcggacgcgtgggcgggtgagaagaacgcgaataagtgatcggattaggaggctgcaagagcttgttcctaacatggataagcaaaccaacactgcagacatgttggaagaagctgtggagtatgtgaaggctcttcaaagccagatccaggaattgacagagcagcagaagagatgcaaatgcaaacctaaagaagaacaataatgtatcctttaggatttgatatatctgtattttatttttgtactatctaaaaatggtgatgatctgttcgaaaattcgaaacatgatcttatatattgaactagaaaaaatagatatatatgaattttagctgtaaaatttttgtacaataaggagaaaaagatttagaagagtcaataaaaagatgatgttt

SEQ ID NO: 104378 - DNA, 341 bp, Arabidopsis thaliana columbia
gtgactcataacgtcctgtgcatccttcacctccttctccaccagaggaaactctcccagctcccaagccaagtccagatcccttaccttctaattcgtcttcaccaccaacattgcttccaccatcgtcagttgtatccccgccttcgcctcctcgaaaatctgtgtcaggtcctgataatccatctccaaacaaccccactcctgtgacagataattccagcagttctggtattagtagagcggctgttgtgggtgtaagtattggagtggcccttgtgctgcttactctcattggagttgttgtctgttgcttaaagaaacggaaaaagaggctctca

SEQ ID NO: 104379 - DNA, 349 bp, Arabidopsis thaliana columbia
gtacctgaaggcttaacattagccaaaccagctgcatcgatcggtattgtgcagttggattgcgtcttctctcatcttctccttcctgctcgtcttctcattaccacccatcttctggtctcggaagccatctcccccttagacgacccaagagccaagtggttcgtgtcaaggtagatgaaaatgtagccgagacagagccaccgaaatggtgggagaggaatgctccaaacatggtcgatattcattctactgaagagttcttgagcgctttaagcggtgcgggtgaaagattagttattgtagagttttatggaacttggtgtgcttcttgcagagcattgttccc

SEQ ID NO: 104380 - DNA, 386 bp, Arabidopsis thaliana columbia
cccacgcgtccggaaaaacaaatcttcacaaggcaaaaaatccaaaattgagttttttttttcttcattttttacaatggtgtctcggtttcgtcttgctctagaggctgttttgggttcgagacgacgtaagaagatggcgagtactagtagtggtggtggtggtggtggtgataagaagaagaagaaaggtttctctgtaaaccctaaagattataaacttatggaagaagttggatatggtgctagtgctgttgttcatcgtgctatttatcttcctactaatgaagttgttgctatcaagtctttggatctcgatcgctgcaatagtaatctggatgatataaggagggaggctcagactatgactttgatagaccatccga

SEQ ID NO: 104381 - DNA, 353 bp, Arabidopsis thaliana columbia
ctcttattgactcgaatatactgtcacctctttgttttcctcagattaaaaagacttttttttgctcaggattagacaaaaaaatgtcggtgaaacccacagttgctttgagaggtatcttagtaggtggagtggcgatatttgcaaaagttgccgctgcaatgaaagcagctggaggtgttaagcttggtgcagctgctacagctatgaccgtggctgcaaccgctgctgttagtggaggttctaagcaagatcaaaagcaagatgcttccaaggcaccaccaccttctaaataagaagtagtgttcatgtaattcttccttactgaatccaataacaagagagagacaaag

SEQ ID NO: 104382 - DNA, 257 bp, Arabidopsis thaliana columbia
gtcaaaatacgattctagactcagatttgcacctccttcatgtagaggagcggaagatactggagagaggccctgaaaactggcaaaaagcttgctttatcccaacaaaatcagacgctaatgtggttacattcaggagatggtttaacaagtacagcgaggctcgagtcgattggagaggaaagtttgatccatttcttcttcctcctacgcctccccgagaatagctcttcgacaggtattggtcccatgttgag

SEQ ID NO: 104383 - DNA, 343 bp, Arabidopsis thaliana columbia
cggacgcgtggggtgaatctcaggaacatcttcgtctctgttcaggtacctgagcaccattctcatcagcggccgagattccggtttgtggtgacaacagagcaaaccgacggcgagagctagccttgcctctccttcgtcgtaaccagatccgagtctcgggtcgatcgcactgaggatctcaccgctcgcttgtagctccataacccagtcggctataaagaaggtcccagagtccgtcggtttcctcccggagacgatctctaacagcaaaacgccaaacgcgaaaacgtcggaagctgatgaggagtttccgttgcgggctagctccggcgccatatat

SEQ ID NO: 104384 - DNA, 302 bp, Arabidopsis thaliana columbia
gttctttttccccagtcggtacagattgagagaagagattacaagatccatattgaagaagaagaaacatcataaccgtaaaatgctgaagacaagagcaatgtttcctcacaaagatcaagcaatgtcgctgtctttggatccacaatctgatcttgtcgtcggtcacaccaacaacagaccaatcactaacccactggctttgagtcttttgattggtctgaacaacaagaacaagtgtatctcagattctgattttgtcaggagtcccaaatctcctcttgaatttagggtgttgtcta

SEQ ID NO: 104385 - DNA, 183 bp, Arabidopsis thaliana columbia
aatctgttggggcaaagcctgaaaaagttcagttgattgaccttaagagagcaggatcacggaaattatgcttactaaagtaaagatgccgctacctgatatgatggctgcagttctggcaatggatgagtctgtactacatattgctcaaatagagaatcttataaagttttgcccaaccaa

SEQ ID NO: 104386 - DNA, 422 bp, Arabidopsis thaliana columbia
ataccagctgaaaatatgctttatcattgttccgtttgcaatttcacatcgtgccttggttgtaccaaaaacccaccactccttgttattgagcatatgaagacccacaaacacccacttactctcttacctagaagaatctcatgtatctgtgacgtttgtgggaagaaatgccagtttacggcgtatgtatgtcttcagtgtgattttgttaccgcaagaaagtgtatcgacaggccccgtgtcatcaatatcaatcgtcatgatcatcgcatatatttaactcatcatctcggcactgggtattcggaatgcggagtttgtcacaaaaatgtaagtcagtacaagggggcttactcttgctctgtttgccctaactatgctgttcattctacatgtgccgtgagaactgacgtatggga

SEQ ID NO: 104387 - DNA, 286 bp, Arabidopsis thaliana columbia
cgtaaagtcttgacagagttttgtagcctagaaaaatggcgtcagtgggtatagctcctaatcctgcagcaacagactctacaggtgttgagaaattgcctaaacacagttttacaagataagagtgtacaagaaccgtgagcttcaaaccatgaggctacttgaccatcctaatgttgtgtctccgaaacattgtttcgtctcaaccactgagtcacatgagctttacctcactcttgtccttgagtaccttccagaaactgttcatcgagtgatcaaacactac

SEQ ID NO: 104388 - DNA, 389 bp, Arabidopsis thaliana columbia
  unsure (1)..(389): unsure at all n locations
agccctggcacatttcagtagataatccgtggcccaacggatggccacacgggagttctggagctcgggtcccatcttcttaccgtactccanagagctccaggaaagcatggttgtggtgaacgccatcgggaaattgaacttcacattgtccccagcatcatagtagcctccggtcaagtccacctgcaactcataccgtgttattcagatggatttactatgcttttactacttgactatgggtatacagttttagggtcttacgtgagcagatgagccatcagagaggccagagctagacctccatgagagttgttggtcactatggaggcgaccagaccgctgaccttggaaaaagagtaatgactttgagagtgcttctctgt

SEQ ID NO: 104389 - DNA, 382 bp, Arabidopsis thaliana columbia
acgtttttaaactcttcgtcttcttcttcccccgcgtataaattctcatttctgtcattttgatcagatccaagaaaccaaaagagtaaaacaaacacagagaagcttcttcttaaacgatgccgtactataccagagatgacaacgacgtcgacgatttcgatgagtttgatccaacgccgtacagtggtggttacgacatcacggtgatctacggccgtccgattccaccttccgatgagacttgttatcctctctcatctggtgtcgatgatgatttcgaatacgagagacctgaatttactcagatccatgagccttctgcttacggtgatgaagctcttaacacagagtacagtagctattctcgacccaagccacg

SEQ ID NO: 104390 - DNA, 424 bp, Arabidopsis thaliana columbia
agattttgcctcggtgtctgtcccaactctcaagaggctaaggtttagctggcaagagcgagatgagtttccaaagagtgtgttgttagatactccgaatcttgtatacttgaagtttactgatactgttgcaggcaagtatccgaaagtgaatttggattcccttgttgaagctcatatcgatcttcgcttgttgaagcctctattgataaattaccatcaaggttatggggaaaatgatatggttggcaatgctacagattttataatgcgtatatgcaatgtgaagactctttatctatctgccaacactcttcaggtacttacttacagttgtgatgctataccaatattcaacaacctgactcatttaaccatcgagagtaatccgagagtaggatggcagtcagtaccgggcttgctc

SEQ ID NO: 104391 - DNA, 224 bp, Arabidopsis thaliana columbia
acggacgcgtgggtaacaaacactatgggtctctaaatttcagatttctgggatctgggtgttaggttaatctctttctcatcgattattagtagagaaagctcactcgtttcactcagagtttctaccgttttgttttcctgaaaatgggttgtgtttgaaatctcacactttgagatttgggtgtatattttgggatccatcttaccacatttagaaatttc

SEQ ID NO: 104392 - DNA, 304 bp, Arabidopsis thaliana columbia
gaactccggtaagaaaatagacaatatccggccgccgcaacaaccggcttaccacgatgatgtcgaaattcctttctctctttcaatggtaaacaaaaccttcctaaaaggaagagagttaaaatgttgctacaaggcaagcattgatgggtttggtgcaacaaagttccacgagcgttgtgacttcaaaggtccatgtgttatcatagcttacacgaaagacaagtctttcaagtttggtggatttagtccggaaggatatagaagtactgatgattattacgatacatttgatgctttcctc

SEQ ID NO: 104393 - DNA, 360 bp, Arabidopsis thaliana columbia
  unsure (1)..(360): unsure at all n locations
agagaatagctacaactcagttgggaatggacacggtttccatttacgatatggactggtcatgcccaacagcaatagttgttggaaacgacggcaggggaataagtgacgaagcgttggagttatcacatctgcgttgcagtattccgatgaatggaatggttgattcgtttaatgtctcagtggctgcagggattctgatgcaccacgcagtctctgatagaaccactcgtctgggaagccatggagatctgtcggaagcagagacagagatattgatggctgagttctcacttcgtcacagtacaagctcaatttgcattgcttacgagttcgctaaacgtanacaacaacactcta

SEQ ID NO: 104394 - DNA, 377 bp, Arabidopsis thaliana columbia
ctttatgatgacagtcacaggtaaggtcagtaaaagttggcaatctctcttcaggagcaactgagcatgatattaaagagtttttctctttctctggtgaagttgaaagcatcgatatccaaaggttagtgatattgtttccttgttctttgatttcaaaattttgacatttaaagctttttttgatcaattaacttccgaagctttttctcagcaaatttagatacagttctcttaaacttactgactctgagctttgtttttgttttctttttctaactagcagtaacgagcatagtgcttatgtcacatttaaagaaactcaaggagcagagactgctgtgctcttatctgtgggttcactcttatctcaatat

SEQ ID NO: 104395 - DNA, 144 bp, Arabidopsis thaliana columbia
gcgtcagccgaaatctttttgtgggcagaaacgtttgtgtcttacgccaatctctgtgtctctctgtcgagagagaaatggcagcatcatcagtactactctcgtgcttcaaatcgcagcatcaaccaaaccttctccatggct

SEQ ID NO: 104396 - DNA, 298 bp, Arabidopsis thaliana columbia
agtgatatgttaggtctaacgaaagagagtttgttagatgcgactctgttcatcaacgaatgttctcattcgaatgatctggatctctccatgagacagaacacggttcctgattacgcagagaagttggtgaagaaacagatgcgtgcagcttggttgtttagagaagcggcattgaagcatggacgtgtgcatatgaaaagtgaagagagggaagtgtatggaaatgaaatagatgattcggaatgggaaacagccagtgagagtgatataggagatgatggaagggatcatatgg

SEQ ID NO: 104397 - DNA, 376 bp, Arabidopsis thaliana columbia
cggacgcgtgggtcgcgactatgctctctgcaaagatggttctacttttggcttaaagagcaatgttttcgagtctttgccatggcgggtttcattaaacgcaaaggcaacgtattttttcattctcaagccttagctgctgtctactccaagttgcagagaagtaattgcacgcttgctgagggattcatggagaagtgttctagcattcgtcaagttattgatgaagatataaattcagttgatacatctaagtggaagaaggtacgagcaagtgatgctggaattaaaaattcaatgatccctgaatcctctatgaatgtcttgagactccttagacgtcaaggtttcgatgcataccttgttggtggatgtg

SEQ ID NO: 104398 - DNA, 226 bp, Arabidopsis thaliana columbia
agattctccaccgcccccaccaccggtttattctccaccaccaccacctccggtgcattcacctccaccgccagtgcattctccaccaccgccagtccattcaccgcccccaccggtacattctccaccgccaccagtccattcacctccaccaccagtctattctccaccgccaccaccgccggtccattcaccacctccaggagtgttctctccaccaccacct

SEQ ID NO: 104399 - DNA, 334 bp, Arabidopsis thaliana columbia
aggcagaagaaggatagaactattgatcgtcgcaaaagactcatcatagccatggatactgcatttgggatggagtatttgcacggaaagaacattgttcatttcgatttgaagtgtgagaatcttcttgtgaacatgagagatcctcagcgtcctatatgcaagattggtgatttggggttatcgaaggtgaaacagaagactctagtatcaggaggtgttcgtgggactttgccatggatggcacctgagctcttgagtgggaaaagcaacatggtctctgaaaagatcgatgtttactcgtttgggattgtaatgtgggaactactcactg

SEQ ID NO: 104400 - DNA, 258 bp, Arabidopsis thaliana columbia
agctctttcttctgataaacctctcggcactgcgctgtgtagtgagctttcacttccgtcgtatattgcagtttaaaatccggcgaattgcggacggagaattcaatcatatagcattattgaggagctgaaatggaggttgtgacaaagatatggtgttgattttcacttcgccgttattgctgcgatggatttcatttccgcttcgtccttatcttcacgcttttccacacagttgtctccgacttatttgagctc

SEQ ID NO: 104401 - DNA, 393 bp, Arabidopsis thaliana columbia
ctaaaacttccatagataccagctttgggtcgtcattttcctttggttatattacgttaagtttcgtctgtggacttaatatatcaaagataattacgagtgtatttcctgaatttggtggctggatcaatcagaatattcagcaacgtcctgaggtcagtttcattccatcaatattcaacgaacctgaatcttacaaattatttttgttgttgtcagctgaatctgggagatctgaaaatgtgtaaatctaggccagtgtcagagaaagacactaatctaaaaccttggtatgatgaatctggtaatactacaggtatggcacctggggatgtaaattctaaaccactgcatgaagttcatgaaagagaaaatgaagttcatgaaagtgtt

SEQ ID NO: 104402 - DNA, 366 bp, Arabidopsis thaliana columbia
agctaagagatgggatatgaaggagggagaggagaaagttgtgtttggtggcggaagagatgaggtggatgggtttggaatcaggggagaggtgaaatctaatgaatgggatgtgtcaaagccatggaatttgaaagaggaagaggagggagttgtgtttgatactggtggtgaagtgccgtttagctttgagaatagcttggaaatggcggaggaagagcgtgtgaagaaggagttgattgagaaggaagagaaggagcttcttgaggttatcaagggtcctgatcgagcatttggagaccttattgctaagtcaggtataacagatgaaatgctagatagtttaatagccttgaaagatttcca

SEQ ID NO: 104403 - DNA, 367 bp, Arabidopsis thaliana columbia
gcgattaaacctactcaatctcagatctcgttaaacctagaaacctcgagaaaaaccgtatcaatggcgccgaaagcagagaagaagcccgctgagaagaaaccagcttccgataagccggtggaggagaaatcaaaagccgagaaagctccggcggagaagaaaccaaaggccggaaagaagctcccgaaggaagctggtgccggaggcgacaagaagaaaaagatgaagaagaagagtgtcgagacttacaagatctacatcttcaaggtgcttaagcaagttcatcgcgatatcggaatctccagcaaagcgatggggatcatgaacagtttcattaacgatatcttcgagaagcttgctcaag

SEQ ID NO: 104404 - DNA, 105 bp, Arabidopsis thaliana columbia
tgcattccgcagtgtctggatgctctgtgtcgcaacaatatcggtcttcatgctgtgaaggatcgaaatgccttgaagtgttttgtgaaaatagatagttctccc

SEQ ID NO: 104405 - DNA, 351 bp, Arabidopsis thaliana columbia
gggggaaatcgatggccgagagaagaaactttagctcttcttcggatccgatccgatatggattctacttttcgtgatgctactctcaaagctcctctttgggaacatgtttccaggaagctattggagttaggttacaaacgaagttcaaagaaatgcaaagagaaattcgaaaacgttcagaaatattacaaacgtactaaagaaactcgcggtggtcgtcatgatggtaaagcttacaagttcttctctcagcttgaagctctcaacactactcctccttctcatcctcacgctcatcaaccagaacagaaacaacaacaacaaccacaacaagagatggtcatgagc

SEQ ID NO: 104406 - DNA, 232 bp, Arabidopsis thaliana columbia
ccggcaaatctttgtctggactggactgtttcaatgtttacagacatctgctaatctgttaaaaaattccattcaatggttgatttgttcttttcgtttcctctacacgttaggttttggcacattcacatagttacagcatctgaagttctaagcggaaaccattcctcccgagatggcgaccgtgaaaggccttcttaaaggccttcgctacattagtcagattttcgac

SEQ ID NO: 104407 - DNA, 120 bp, Arabidopsis thaliana columbia
ggcatccttcagaataacttcatcttcctcgcttctcctcaaaactcatctccccttacacgatcagaatcatttcactatactctctggtatcagcgttggagattcatggactcctct

SEQ ID NO: 104408 - DNA, 369 bp, Arabidopsis thaliana columbia
accacgcgtccgcccacgcgtccggcgttctttctgcttcctggagatctaacgttggtgaattcggattggagccgagagattgcctataagaatcgtcctttgttcggatcttctaatttatagatttgtgttgtctgctttctcgctcaaatctatatgatctttagggagtaattttctcgatggctgttcgaatttttcgagaatagatccaaagaagctcgtgctttggtgcaactagacaggccacatcccacgttttgatttcttaggttcactgtaaagaataatcaggagagtacacagatggattaccgaccttctgatagtagtggtacagatgatgacctgcctccatctcatcaa

SEQ ID NO: 104409 - DNA, 309 bp, Arabidopsis thaliana columbia
agaaaactggtggtggtggaggtgactggaccggtggaggaggagagtggactggtggaggaggagagtggactggtggtggtgagaaaaacaaaaacagataggaggaatatgaagaagagtaaacgagagaacttggaaatggctctatggcttgcttaatagatgaatgttgtggagaggaagcctataatgaaacgaaggcaaacagaaaccattggattgttttgctatttttggtataacaaaatttatatagactaacgtttaaagggtaaaaaacaaaggggacaaaaaaaaacaacaacc

SEQ ID NO: 104410 - DNA, 371 bp, Arabidopsis thaliana columbia
accacgcgtccgcccacgcgtccgcccacgcgtccgcccacgcgtccgcacacacaaaaaaaaacaattttctgtctatatatatattaaggatccaaattagggagagaccaaagaggaaattaataacaatcaatccaacaacgaatggagattgaagaagcgagtcgtgaaagtggacatgttgtgtgcggatcatggattcgtcgcccgaagaaagtaaactgggttcttatcgctaaagcttccaaacgccgtggctcatctgtttcttctcctgctctcctcaacatcttctcttttgaccccattactgcttctctttcctcctctcctttggcaacacacacgcttaaggatagtgatggtga

SEQ ID NO: 104411 - DNA, 374 bp, Arabidopsis thaliana columbia
cggacgcgtgggcaaaattatccgatctgattctatggctgagacattcaagatccgacaactggagatctccgagaagagaaaaggattcatcgagcttctaggtcaactaaccgtcaccggatcagtaacagacgaagaattcgatcggcgattcgaagaaatcagatcgtatggtgacgaccacgtgatctgcgtgatcgaggaagaaacttcgggaaaaatcgctgccacgggtagtgtgatgatagagaagaagtttctgaggaattgcggtaaagctgggcacattgaagacgttgttgtggattcaaggtttcacgggaaacagctggggaacaaagttgttgagtttcctatggatcattgcaaat

SEQ ID NO: 104412 - DNA, 298 bp, Arabidopsis thaliana columbia
gctgaaaatagtgttgaagagaacaattctcttaacaatttgaatgagcctgctaattcactgaaggttataaatgtgtcagttggtaatccacctgttgaaaaagctgttcttattgatcaaactatgggacatcacttggaagaatcggccacttcaattgagtcattgaagttaacttccgagagggagactctcaccacaccgaaaaagactcgcaagcctaaaacgaaaactctgaaggtggaattcaagtttttcaagctggccctgggcttacgaagaaagaaggtacaga

SEQ ID NO: 104413 - DNA, 136 bp, Arabidopsis thaliana columbia
agaaaattaaatttgcatttcacttatcgccgccattgttgttctacactgagctcatagagttgagacatgtaagccagttttcaaaagtttatcactgcaacatactcaggctttttacgtaattatcatagct

SEQ ID NO: 104414 - DNA, 363 bp, Arabidopsis thaliana columbia
gttagtgaggaagatcgacaatggtttgtggaagctatgcaagcacatacaatcgattcaatctctcgtatgaaagtaatatctcaaatcatgaagatgcctgaacaagtcttggaggctcaaggagttacacctgatgatcttgaaggaatgttggctgagctgcaggaacacgtcgagtcgatagatttggccaatggtttgatcttacataactagtctttgtttttcgaggttcttttttttaatatattatttggatctttaaatgttttagatcttcactccattggaggtttggttcctctccttagctatctcaagaactctaatgcgaaaattcgagcaaagtctgccgatgtt

SEQ ID NO: 104415 - DNA, 372 bp, Arabidopsis thaliana columbia
aattaagaatgttgttttattgatattattaatctcttgtaatgtatgtttctgttcttgatttttcctgaagcttgagcatgagtcgcatgatcttgataaacgtgagagggctcttctgaaaaaagaaacgcacaaggtgcaagaagatctaaactctgctaagtcaaagatggagagactggtggctgaatttgaaagtcaactagaaatcactcaagctgatcaatacaattccttaatcctgaaaaccgaagaggcagttgcagagattattgaagcttgctgtcctatggatcctgattccttagaagaagaatacagtgactactcaccacaagctggtgaaaaaattcttgtaactgggctggg

SEQ ID NO: 104416 - DNA, 377 bp, Arabidopsis thaliana columbia
ctcgcaccatcgcaaaaaccctaatttttctcttcgattttctcttctcacaaaccctaattgtttcttcctcccaccactcgctttctccttccatcgttggtttttttaataagtttctctcttttttcttgtttggggaagaagccattggtttctttaaacgattgaatctataaaacttcttctttttcttctgggttctgtgttcttcgtctctttcgttgaacccgttgtttcgattttctttcgtctgagggagattttttttctgttgatgcgttgatacgaattttgccgttgttttgttgaattctaggaatagtgattaagtggttagggtttctggtttagtgcccatcaggctagttccctta

SEQ ID NO: 104417 - DNA, 290 bp, Arabidopsis thaliana columbia
ctctcccgcaaccttcgattttcgtttattcgcatccatcggagagagaaaacaatcaataagcgaccatgttggtgtaccaagatcttctcaccggtgatgagcttctgtctgactctttcccttacaaggagattgagaatggaatcctctgggaagtagaaggaaagtgggttactgtgggagctgtagatgttaacattggtgccaatccatctgctgaagaaggtggtgaggatgaaggtgttgatgactctactcaaaaggttgttgacattgtcgacaccttc

SEQ ID NO: 104418 - DNA, 300 bp, Arabidopsis thaliana columbia
accactgacgcgtgggtgacattctaaacacaatttttctgataataatatacacatttaccattatgcccatctaactgaaaacggcaattaggttccttgttatttgttttcttccttctccttcagtttcttttttgtggccttaatttatttcatattaattcttaaaaagaatgagtcttcactcacataagagtcacctgtaacagaatcactctgatgatcgagacaggtaaataccttctcggcgccgccggtgctagcgggttctgcgctaaatcgatcgcctaggaagtt

SEQ ID NO: 104419 - DNA, 345 bp, Arabidopsis thaliana columbia
caagaaaaacaaaacaaaacaagagtctcattatctctctaattctaaagatggagaagaatatatcaataagcaagaagctagggaacattgtacgttttgtcttgtacatgttacacaaaggcatttctaagcaaaagctcctagccgactttaatgccactctcaaacgcggcaagaatctcatgttccacaaccgccgccgtgtcccaggctcggctgttgcgtcccatccacagaacgagtacgagtttagctgcagcgacactcctaactacaaccgggttttccccttcaacatggctgccttcaagaagaagaccaccacaacagcctcttctcctg

SEQ ID NO: 104420 - DNA, 405 bp, Arabidopsis thaliana columbia
  unsure (1)..(405): unsure at all n locations
ggaagctgcttgtgttgtatgcctctcagaccggaaacgctcttgatgcggcggagcgtattggccgcgaagcagaacgccgtggactgccagcttctgtcgtctccaccgacgaattcgacacgagttccttacctcatcatgaggaggctgttgtttttgttgtctccactacagggcaaggagactctcctgattcctttaaggcattttggaggtttcttcttcaaagaaatctgggaaactattggttgcaacaagttcgctatgcagtgtttgganccnttaaaggtgattctggttaccagaagtacaactttgtagcaaagaagctagacaaaagattatcagatcttggggccacaaccatcattgaaaaacgtctaggagatgatcaacacccat

SEQ ID NO: 104421 - DNA, 277 bp, Arabidopsis thaliana columbia
cccacgcgtccggtcaatccaagatgggtcacagagtattggtttatgttggagctctgtttctgattttattcacgatttttccatcttctagtgctttaatttcgtctcctgatgctaatcctccttaccctaaagctatctccgatttgaaggaatcaattgtgaagggacttggattccaatccgaggaagtcaaggtttctgggtttgatataagggatgcattggtaggacattctgtttcatacgaatttgatttagaaatcgacaataa

SEQ ID NO: 104422 - DNA, 372 bp, Arabidopsis thaliana columbia
atttttcttttacgcgtatcccttttcaatatacatatatatatacagagctagagaagttgcagaatcctgtgttaatcatattacaatctgcattgtgaaattttgcgaattcatctagggtttgatctgactccaaatttgggatttttagggtttaaatctagagatagagagagagagagaatgggaggttgtttatctggagatgtgaaaggaggcaaacaagccattggaggggtccagcagagacccacttcctcaaccattccgggccccagacaatgctgctcacaacgacgccgtcgattttttcttcagatctcgtggtcaatatcctctcttttctcaaatcgagttaactttgtcggc

SEQ ID NO: 104423 - DNA, 278 bp, Arabidopsis thaliana columbia
  unsure (1)..(278): unsure at all n locations
ggtangagggcttctcagtgcgtatgatctttctggggataaaattttccttgaaaaggctatggatattgcagacagattattgcctgcatgggacactcaatcgggtataccatataatattatcaacttgaagcatggaaatgctcacaatcctacatgggcggggggagacagtattcttgcagattctggtactgagcagcttgaatttattgccctttcccagaggacaggggacccaaaatatcagcaaaaggtagaaaaggttatttcag

SEQ ID NO: 104424 - DNA, 380 bp, Arabidopsis thaliana columbia
atagggctttaattttctctctgttttgtcataacatcactgactatatatccttcttaatcactttatattatctcgctatggctttcattgaatggtattttttttgtaaatttaagctttttgttttctcatcgttactacttatttgatttaaaaggtcttttgtgtgttctggtggtactattctgttcaaacttattacaatggatctatataaagttcgtttcaggaagctcttagataatcatgttatcatctttttttgttctagcttcccttaaaaagttgcaggtccctatgctaagttatgaataatgtagtttcagttaagctaagccacagtcttaaaaagtgtcaagtaccaaattattgaacat

SEQ ID NO: 104425 - DNA, 388 bp, Arabidopsis thaliana columbia
tatgggttcttattattgaagtacatcaaagagttgcagatagagagaaacattcggtaacaaacatctgaactgttgttatgaaacgaggattctccgattctccttcaagctctgctcctcctccttcttccagattcaaatctaatcccgaaggtgattctcagtttctggaagatgagactacaaagaattttgcccggaaagttgctgatcattacagtaggagaacaaaccaaacattggaagagcgagaagctagtcccatcattcatttgaagaaacttaacaattggattaaaagtgttttgatccagctttatgctcgtcctgacgatgctgttctcgaccttgcctgtgggaagggtggtgatttgatcaagtggga

SEQ ID NO: 104426 - DNA, 314 bp, Arabidopsis thaliana columbia
aatcgtgactcaacaaagtcattggttcgtgttaaaagtagagatgcccgaaagatcatatgcagtgcaatttctaacaccggatcacattttgcttactctgaccaaattggccccagtctgttcgagttgaagaaaaatgaatttacaaagtgtccatggagtgttagtagaaggcgacttcctgaacttccatttgcacattccatgattttcagttcggactgctctcgtctaataatagcagggcatgatagaaggatatatactattgacataagtagtttggaactagtatatgcatttacaccatc

SEQ ID NO: 104427 - DNA, 297 bp, Arabidopsis thaliana columbia
gaaaatggcaaagacgagttgtgaaataatcctctgtttcttcttcttcattttaagcttcagggtcatttctgtttctgcacaacaaacttgtgacaacactgctggtagtttcaaacccaatagtacttatgacaacaaccgtcgtctcctcctctctaccttcgcctctaacgtcacggctcagaacggctacttcaatggttcgttcgggcttggtacagacagagtctacgccatggggatgtgcgctccaggtgctgaacctgatgtttgctccaactgtattaagaacac

SEQ ID NO: 104428 - DNA, 377 bp, Arabidopsis thaliana columbia
acgcacgcgtccgaccacgagtccgcggacgcgtgggcggacgcgtggggtgagtagcgggaaaggttttaaaactgcaaaggcaaggaaaggactgaatttcaataatgttgatggaaaagaaataagtgctaaggttctttcagaatctgaacgcgcaagcaaagctgaggctgaaattgtggctttaaaagatgctctttctaaagtgcaggctgaaaaggaagctagcttagctcagtttgatcagaatttggagaaactgtctaatttggagtctgaggtatctcgtgcacaagaggactctatggtgcttattgaacgagccacaagagccgaagctgaggtcgaaacgctcatagaatccctcagcaaag

SEQ ID NO: 104429 - DNA, 392 bp, Arabidopsis thaliana columbia
ggatcctcgagctttttgatcggagactttttctctcatcgtcgttgtttgaattctccggctgagagatgcttgcttgacgacgaatctccaccgatcttttaccttttcgcacaacaagtaagagaaggatgtcgactccagcgaggaagagattgatgagggatttcaagaggttgcagcaagacccacctgcaggaattagtggtgctccacaagacaacaatatcatgttgtggaatgctgttatattcgggcctgatgataccccttgggatggaggtactttcaaattgtcactgcagttttcggaagattatccaaataaaccaccaacagtgcggtttgtttcacggatgttccatccaaacatttatgctgatgggagtata

SEQ ID NO: 104430 - DNA, 403 bp, Arabidopsis thaliana columbia
agacagcttttgggagtcaacggccgcgacgatggacccattattacatcttgtattagggatggagttaacagaatatccttgagtggaggtgacgttcggattttttgttttggggtcagacttgtgaagcgcaggactctacaacaggttctaaatttgattccagaagagggtaaaggggagacttttgaagatgctcttgcacgtgtccgccgatgcattggaggtggaggtggagatgataatgccgacagtgatagtgacattgaagttgttgctgatttcttcggtgtcaatcttcggtgtcctatgagcggttctaggataaaagttgctgggagatttttaccctgtgtgcacatgggctgttttgaccttgatgtgtttgtggagttgaatc

SEQ ID NO: 104431 - DNA, 396 bp, Arabidopsis thaliana columbia
atcatcaatggttatatagattactgttttttcttcttctccatttctcaaaacattattttcctacagagaatcaagaacccgaactacaagggaaaatggaagaacccatggatagataatccagaatttgaagatgatccagatctttacgttctgaagtctatcaaatatgcaggcattgaagtatggcaggtaagttctagagctttcttgaattccatcaaatattaacttttataatcactacatcatcaccagatatggatgaatatttatataatattcactgccaattagttcttttaacatatatatgctgcttgtacatataggtcatccaaatttttaaggttgaaaacaaaaccaaaagaaacagaaaagatctgataaaaa

SEQ ID NO: 104432 - DNA, 368 bp, Arabidopsis thaliana columbia
attttctgggttccttctgcttcgtccaagttagtcgccggagacgacaaagagcacctgaattggtgcgagaaaagattcctacttctgagaccatcttcacaaacgtgtagcaaagacgaagcctttgagttttctctttctgttacttagaaaatagctgattttgaacctggagctgagttccgtgtgtgattacttaattcggttatggctgcaccaaacgttcgtagtagtagcagcttctctcgcaacatatcagttgtgtcatcgcctcaaattcctggtctcaaaagtggtcctaatggcacagcttttatatcgtcagggattcgtgatcttgacaggatactaggtggtgggtatcc

SEQ ID NO: 104433 - DNA, 326 bp, Arabidopsis thaliana columbia
aaggtaatggtgctaagctttatttgccctgaggaagctgaaagccctggatctaagcgataatgaattttcaagctcagtggaattgcaagggacttgcccatggaaaaatatggaagagctcaaactcagtaacaacaaactagctggtcagtttcctctatgtttaactagcttgactggacttcgagttcttgatctttcatcaaatcaattgactgggaacgtaccctctgctctcgctaaccttgaatcccttgagtacctatcactgtttggtaacaacttcgaaggcttcttctcacttggtttactcgccaacctct

SEQ ID NO: 104434 - DNA, 352 bp, Arabidopsis thaliana columbia
acagaatcctcaccgtgtcatcagaggccctgtgtttactgttggacgccggggatgtgatttatctatcagagaccaagctatgcccagcaccctctgtgaactgaagcagtctgagcacggtggtccatcagttgcatcccttgagatattaggaaatggagttattgttcatgtcaatggcaagtgttaccagaaaagtacttgtgttcatctacggggtggtgacgaggtgatcttcagccttaatgggaaacatgcttatatatttcaacctgttaaagatgaaaatttagcagctcctgacagagcttcttcgttgagtatatgtgaagctcggggtgcccctctg

SEQ ID NO: 104435 - DNA, 315 bp, Arabidopsis thaliana columbia
aggacgcgtgggcttttggtcagagggtttcatacatggaataagactctcaccattagaacctaatcatcccctttaccttcgcttccttctttctccttcagacctcggtctttctcgcttgcttgctgtcattccaatctgctattcctaaattcactgaacggatcagatgaagaagactaatttcgtttcatctgcttccggtggcgatcccatgatcagattaaactttgtgcaggttcaggagttggtaatggaattagagatcaatagaaagagattggatatgattagggaaatgagattgaccct

SEQ ID NO: 104436 - DNA, 349 bp, Arabidopsis thaliana columbia
gaaagagagatggcgagacacttattagaagatgtaatgagcatggccaccacaacaacacatttcgatgctagttacctgtttcatgttgtgttcctggctgtgatcggttgttgtatcctctccgctctgttattctcttgtgccgacggagtctccgacaacagagccacttcaggcacctctaccggtggcggaggttgtggcggtgccggttgcggtggtggttgtggaggttgagatttcatttttcttcgtcaggaaaatataaacagaacagtccgaccattttactttcgtttatagatgtatagctatcgtatattgaagcaataatttatttagtttc

SEQ ID NO: 104437 - DNA, 276 bp, Arabidopsis thaliana columbia
agtcgagccccaaaagaccacctcaccgtcagaagaagaagttaaactacctaaccgctttcaaaggtcaatacccgcgcaagatcactctcgggtcggatctttccgtgtaagacccgtccggatctatcccggaccgatcaatttcacgagtgttctccttcaatcaaataaagtcaattgctttcatcaaaatttacccgcgaattgaagaaggaagaggaaccaaacctccaatggagagaagtgagtccgttgatgaagatgtccaagcat

SEQ ID NO: 104438 - DNA, 359 bp, Arabidopsis thaliana columbia
aattgaacaacaagtttttttttcctggcttctaaaagaagataactaaaaatttaacaaggtttatactactatgatactacactgttagcagttagcttcatcttcagccacgccgttaaacttccatcaaccaaaaatagttaactaaatcgttgaagatgccacgtgtttcggcggaaattttagatatttctcacaccggcggcaacgagtcaccgacgcttggcgaactcctgaaagatttcaacgacagtggccggaaaaaatatcccggcgaaaatgctccgactcaacacatattggatctcgctcgcgcggctgatacacgatctgtgccgtgtctcttatccttcaac

SEQ ID NO: 104439 - DNA, 296 bp, Arabidopsis thaliana columbia
attccctctattttcggatttttgcatcttctcggatcatcttcaccactatagggtgcatcatcatctacagacgacatgtaatcatcggagaaaccagaaatcgagatccttgctgcttcaaacggagctcttcctctgcttaaacgatccttctccatcactcgtcgattctcaaaacaatagtgttgcttttcactccttgacgcatagttttggcttgagctacgatgcaattaccactgaaggacagcagtcagttgcagacttgtttcccaaattgttggtgcatttat

SEQ ID NO: 104440 - DNA, 179 bp, Arabidopsis thaliana columbia
aaataccctttcatcttcctctcataatccctctctctcttcttctctctcgctcgctgctctgtttatggttattctcgttcgtctcttctacaagtactaaagatggattctgatgaaccgaatgggagtggattaccacctccaccacctttcgttccagcaaatcttgtccctga

SEQ ID NO: 104441 - DNA, 351 bp, Arabidopsis thaliana columbia
ggaaactccaagagctccagaaagagaagagtgatacgttacagaaggtgctcgagtttgtgagcacggtgcatgatctatgtgccgtccttcgtttagattgcttaagcactgtcaccgaagttcatccgagcttagatgaggcacatggtgttcaaaccaagagcattagcaatgaaacacttgcaaggttggctaagactgtcttgactcttaaagaagataaaatgcacagacttaagaagcttcaagaactagctactcagctaactgatctatggaatctgatggatacttctgatgaggaaagggagctttttgaccatgtaacctctaacatttcagcttcag

SEQ ID NO: 104442 - DNA, 217 bp, Arabidopsis thaliana columbia
atttggatctacttgttggtgaaagaagtggccccattaaacttgaagtgacaagacggcatagccttggagatgatttagagcgtcgaatgtccgtggcagaaaatccattcacaattttatatgcggtgctccatgagctgtgcgttgccattgtcatggacacagtcataagacaggtccgagctcttctgcaggggagatggaaagatgcaat

SEQ ID NO: 104443 - DNA, 230 bp, Arabidopsis thaliana columbia
  unsure (1)..(230): unsure at all n locations
aacgaaataacttcgatgcacaattttgtgggttctagctctcaagttaaggttgaggctttgagattgtctgtctacaaaactagtatgttataaacagtgatgatatgaatcagcttttgntatttgcccgtatgattctgtattttgttccattttatgagatatctancatttgggcctaaaaaaaaaaaaaaaaaaaaaaaaaaaaaaaaaaaaaaaaatggaaa

SEQ ID NO: 104444 - DNA, 336 bp, Arabidopsis thaliana columbia
  unsure (1)..(336): unsure at all n locations
caaatcttaaacgttttaccttgtgctgcactactcaacctcaatggccgcctcaacaatggctctctcctcccctgccttcgccggtaaggccgtcaagctttcccccgcggcatcggaagtccttggaagcggccgtgtgacaatgaggaagactgttgccaatgcaaagggcacatcatgcagcccatggtacggatctgaccgtgtcaagtacttgagtccattctctggcgaatcaccgagctaccttaccggagagttccccggaaggtacngatgggacaccgccggacttgcagctgaccccgagacattcacaaggaaccgtgaact

SEQ ID NO: 104445 - DNA, 345 bp, Arabidopsis thaliana columbia
  unsure (1)..(345): unsure at all n locations
ccttgatctgcttgacttttcttcagaggagctcacttggtctgcttctgcttctgagaatcctaaaggtaagggcaacggaacaggggacgttggatcggacacaaggacatggttaagtgctgctctctccaaccaagccacttgtatggaaggcttcgatggtagctctggtctcgtaaaatcccttgtcgctggcagtctcgatcaactatattccgtgcttagggaattgttaccacttgtgcaaccagagcagaanacccaaggctgcntctaaacctggccctattgctaaaggaccgaaggcaccacctggccgtaaactcagagacaccgacgaag

SEQ ID NO: 104446 - DNA, 301 bp, Arabidopsis thaliana columbia
ggacgacgagaggattcgagagcgagagagacttcagatcgagcagattcgtgagcttgattgcgaggaattacaagtcgaagaagtcgatgaccttcacgattccgattccgatgataataatgatgatctctcttcatttcctttctcttcccacgctcaagcttctggtaacctcggtgatgatgaacttatgttcaacccagctttggcttcttggcatatgtatcttggcgaggttgaagacactcaaaacagagtttcttttgtgggtggaggaacggtattgaagatcccgctt

SEQ ID NO: 104447 - DNA, 297 bp, Arabidopsis thaliana columbia
  unsure (1)..(297): unsure at all n locations
ctgaaaacaagtatcttggtacacgagttcggtccgatggaaccattggagagtattcatggatgacatntggagaagcagcgtctgagcgacaagccattggttcaggactcttgtttcatggagttaaccaaggagattgcgttggactctattttattaacagaccagngtggttggttgtggatcatgcttgtgcagcatattcatttgtctctgttcctggatatgatacacttggtccagacgctgttaagtttgtggtgaatcatgctagtctgcaagctatattttgtg

SEQ ID NO: 104448 - DNA, 142 bp, Arabidopsis thaliana columbia
aggatctatacctctcctcagtctcatactcaaatcaataatccaagccccaaagatgggaaaaccagtgaagatagtttaaaaaatgataggttcttgcaaagtcgctatagttcatcatctggttttaatcaatggtgtg

SEQ ID NO: 104449 - DNA, 318 bp, Arabidopsis thaliana columbia
  unsure (1)..(318): unsure at all n locations
gcaaggtctgtaactgcttcactggtcatttggagtttttttaaggttctaggaatgttcaaatttaatntgttctaggagttaagttaggcgttgaaggagggaggacagtgttcgtgtatgttgaaggttcttaatctggtccacttcctcactgttaatgtactcagatgtttgcttttggctttttcttttttctccagggtttgcttttgtatacatgggggatgaaagggatgcggaagatgccatccgagcacttgaccgctttgaattgggggcgtaagggacgcagacttcgtgttgaatggacaaaga

SEQ ID NO: 104450 - DNA, 310 bp, Arabidopsis thaliana columbia
gtttagctcaaaggggctcaacttctcagcactcgtgtcctctgctcgtgtattctctagaaaggtagatcgttcttgtaagaacatcgctctgagagttacttgtgaagcgggaagagtggagctgctagagagaaaagcctcagagactttcaagttaaacaaaagtgagaaaaaattgacctgtgtaatgaaattcggtggctcatcagtggcatcttcttataaaggatgatacaagttgccaaactcatactcagcttcgcagatgagatagctgttgttgtgctatcagcaatggcaaagacca

SEQ ID NO: 104451 - DNA, 350 bp, Arabidopsis thaliana columbia
  unsure (1)..(350): unsure at all n locations
cccacgcgtccgcggacagagtagtagcgaatttatcgatctctgtccgtaaagaatcagaagaaatgcggatcaattgacttgaagtagtagcagctctcctctcctctccattgttgttctgtgactcaatggcggttcctgtagaggaagcaatcgcagctctttccanattctccttagaggatgagcaaccagaagtccaaggaccggctgtgatggtgtcagctgaaagagcagcaaccgatagtcccatcgaatatagtgacgtcgctctataccggttgtctctatcagaagacacaaaagctcttaaccagctgaatacacttatacaagaaggaaaagag

SEQ ID NO: 104452 - DNA, 312 bp, Arabidopsis thaliana columbia
  unsure (1)..(312): unsure at all n locations
cttgtgtagataccaatgaggtagaaacacagaagtttgtggattctttggtggctttggctatggatangaagacaaagatgaattcatgtgagacaaatgtggtcttcagcgagtttcaggactggcttgagaaacatggagattacgaagctatagtagatggagcaaatattgggctctaccaacaaaattttgtagatggcagtttcagtctttcacagcgtgaatctgtgatgaaggaactttaccgtgaaagtggtaataacaaatggcccngaattctattgcacaagagacgggtcaagacgc

SEQ ID NO: 104453 - DNA, 395 bp, Arabidopsis thaliana columbia
  unsure (1)..(395): unsure at all n locations
cagtctcgctcgcgtctttcctcaaacctctctgtctcttcttcttcctcgcctcgtctatctggtaatactactcttatatcacaaaatctccacgaaagcgctactcgaagatccgtcttttcaggtcgtttatgtattttctcttgaaggaagagattagttctttaatacaaaatgtctgggtcaacaaaagtattggatcctgcgtttcaaggangggggcagaaaccaggtactgaaatctggagaatcgaaaattttgagccaggctcagtaccaaagtctgaacatggaaagttctatatgggagatacctacattgtcttgcagaccacacagaataagggtggcgcttattcanttgatatacatttttggattggtaaagatac

SEQ ID NO: 104454 - DNA, 309 bp, Arabidopsis thaliana columbia
acgtttcacttggcagttttttttgttgcttgaacatggtgtcacattaatagaagacaggtattgtggcaaggtttcttggaccacatccatccacgtagccgccttatggtactgatatgactcatgatgatcacgaattaccactcgctcatcatcatcatcatcactagaccggtgagtactacagatagtctcaccatcatcttagtagcgatgtctacaatcatgatatcattgctacaactctccaagacgattttttgcaacttgacatcgcagaaagtcacgattattcgcatcataatc

SEQ ID NO: 104455 - DNA, 134 bp, Arabidopsis thaliana columbia
caaatttccaaatgtctctaattgaggatggcgccttgtgctacgacacgcatgactagccgtatatcggggacacgcccgcgtgttgctcgacctttccctactgacgcggaggttgagtcgggttacaagcg

SEQ ID NO: 104456 - DNA, 271 bp, Arabidopsis thaliana columbia
cttaacctcgcgaatggcgtctccatgtctcctgatcaaacgcatctcatcttctgtgaaacgcccatgagacgatgcagcatgtagttacattacatgtgcagcgtgtacaggtgtttactcacagcttaccacattatccacataacattcggtacgaccgagatggccactactggattgctatggtttcgggagcatcaacgttgtggcggctcaccatgaaagaccctttcttgacgaaaatcacagccatagcggctaagtatgg

SEQ ID NO: 104457 - DNA, 366 bp, Arabidopsis thaliana columbia
cgcgtccgcaaattcacaacttgtggctatgcagctataaacacatcaagtcctttgtcaataagacaaactctgagttctcctggtggattttatgagttaggcttcttcagtcctaataatactcagaatcagtatgtcgggatctggttcaagaagattgttcctcgtgtagttgtgtgggtggctaacagagatacgccagttactagctctgcagcagatctcactatcagcagcaatgggagcctgatcttgcttgatgggaaacaagatgttatttggtcaacaggaaaagctttcacatccaacaaatgtcatgcggagctcttagataccggaaattttgttgtaattgatgatgtt

SEQ ID NO: 104458 - DNA, 356 bp, Arabidopsis thaliana columbia
acgcgtcaaagagacgatgccgacggattcgaaaatggccaagtttcttcaatcctatggatatgatttgattctgggatctgtagctgcaatctatgtggtcatggcaccatatactaaggtggaagagagcttcaacgttcagtcaatgcacgacattctttaccatcgccatcatttggactcttatgatcatttggagttccccggtgttgtccctcgaacttttattggagccttcatagtctctgtttttgcatcacctgttgtaacaattaacagctgccttggtttccccagggtttatacccttgttgcacctcgtttggtgttgggctgcatcatattgtccacac

SEQ ID NO: 104459 - DNA, 371 bp, Arabidopsis thaliana columbia
actctttttcccttcatactcgtcttcacatctgaattccgacaagatattgcgtctgctctcctctcttccctcattctcgtcttctcattaccaaaaacatcttcttctcgtagctaactcaatccaattccaatctccattcaaatcgagcaccagataattttttctcctaaattctaatataagccctaaaattcaaaattgaaatatctatagaatctccttccgattcagacggataatcgccatcaacagcgtgtgaattcgatcaaaaatctgaactttccacaaagaaattcgaaagctcagatttttcgatttcgaaaattttgaaaactcagttaatggcggattttcagacatcaaca

SEQ ID NO: 104460 - DNA, 280 bp, Arabidopsis thaliana columbia
gttaccttttgttcgttcgaatcccaatatagacgatcgaagaggaagacgatcaagcagtctctcaaacttcttctccagatccgaatctcacgcgcatttctccgatctctccatgtgaatgacctacaatttcgcatcacttttggtcttgatcactgtttctctccttctactgaatctcgtgttttgagtaatcactaatatacacaacggtggagatgaaggggagatcagaaggagggaagaagtagccggtgattgtgttactctgcgttgc

SEQ ID NO: 104461 - DNA, 355 bp, Arabidopsis thaliana columbia
ataacctccaaaacaaaaatatcacagatccaaaagatcggattaacataatctctccaaataatcatgcgttactctcatactctccagcagttctcaattctatctttcttcgttacaatatggaccgttcaatcagtaccaccacaaccaccgattcgatgcgaccaaaccggctgcaccgtctccaacgcgtacggcacgtggcctgaccgcaaaacctgtcacgcggctaacgtcacatacccaacgacggaggaagaccttcgtaaagccgttgcttacgcggctgagcacaatctcaaagtcaaaaccgtcaccaaattctctcacaccataccgaaactcgcttgtc

SEQ ID NO: 104462 - DNA, 105 bp, Arabidopsis thaliana columbia
acggacgcgtgggcaaatttctcagaatgctcgattgactccgagagttatcaagagctccggtgctacattctccggcgacgaatcgatcgtgatctctctttt

SEQ ID NO: 104463 - DNA, 243 bp, Arabidopsis thaliana columbia
ccgaagcttccgctcaacatcaccgtcgagaccagccatgggtcctgtcatcaaagctcaaggttccgttgtcggttccgtcatcaaataccacactcgtcagggcaaatgtcctgctaactaccgtagccacaaattcggctagagaaatggttacctcacgggcatcatcaaggatattatccatgatgctgctcgtgctgctcttcttgctcgtgtcactttccgtcatcctttccgttt

SEQ ID NO: 104464 - DNA, 382 bp, Arabidopsis thaliana columbia
actttcattttccctctctctttcaagttccttgttatttaagaaagccatgaatccgattatctatttctaaccctgggccgaccagaaaactttttggacgacccaaacttcaagggttctaataaattcatcaccggaaaaagatacatataaaataaaaatctctcaccactgctgattcaaatggtgaatcttgggagctacgttttcgtctttgtcgcgttgtctctcaccgtggtggttccatcggttcaagcccacatcgccgaatatgatgaatactggacgcagcgtcaaaccaacgcattgcgagaaactttggaatcttatgacccgaacccagagaacgtcacggaccactttaactaccatgccgcct

SEQ ID NO: 104465 - DNA, 341 bp, Arabidopsis thaliana columbia
aatttctccgatcgccggttagcagattcaagcgagatacgagatccgacgagcagatcttctgcttaatctgtaaacatgcctctcagactagatatcaagagaaagtttgctcaacgatcagagagagtcaaatctgttgatctgcatcctactgaaccatggattctagcaagtttgtattctggaaccgtgtgtatttggaactaccagacacagacgattacaaaatccttcgaggtgacggaattgccagttaggtcggccaagtttattccgcgcaagcaatgggttgtggctggagcggatgatatgtacatccgtgtatacaattacaatac

SEQ ID NO: 104466 - DNA, 388 bp, Arabidopsis thaliana columbia
  unsure (1)..(388): unsure at all n locations
atgttgagttaactggggagacattattggatcttaagttgcttgagaaaggtcagataatcataagtactcctgagaaatgggacgctctgtcccggaggtggaaacagagaaaatatatccagcaggttagtttgtttatcgttgacgagcttcatttaattgggggtcaaggtggtcaagtgttggaggtaattgtctctagaatgagatatatttcaagtcaggttgggaataaaatcaggattgttgcattatcaacttcccttgcaaatgccaaagatcttggagagtggattggggccagttcatgtggcgtttttaacttcccgcctaatgttcgtcctgtcncactggagatccacattcatggngtggacatattgag

SEQ ID NO: 104467 - DNA, 248 bp, Arabidopsis thaliana columbia
caatgccatgaattccaaaccatataacattcaagtagaagatagactaaaagggctgttcacacagtaatacttcctgcacatgaacactaagccagaatcgataacatgaaacacacatacagtcagtactcagtagattgacggcacctacggccaccaagtaatactacagacggtacacgttccaatgcctaacgatgaaacatcatcaatagaatcacacttgtttttcatcatacaccgta

SEQ ID NO: 104468 - DNA, 396 bp, Arabidopsis thaliana columbia
acggacgcgtgggcggacgcgtggggttcaacatttggcggagtcaaagaaacagagtgattctctgatccgattccggcgaaagaggacgaaacaaacggaacttgttcatcatcttctccagaaatgacgtcgtttcaggtgatgcgttcttcaaattcgagaaactcggatctatctcgtcgcatctcttctgcttctacttcttcttcgtctataagacctcaacaacagttccggcgagatctaacaagtgtcggttacggcggaagaaacgacggattatacagttcaaattcgatgacggtcgaagggattttacacgatactttcgcatcagatccaccagcaccaacggaatcttcactcttagatgcgtcgataaatctgatggat

SEQ ID NO: 104469 - DNA, 203 bp, Arabidopsis thaliana columbia
ctcttttttacttttaatttctcgccggacacaatctcatctccctggcgaacgaaacttccggtgtggtactgcatccagagaaaaaaataaccaactaggagagattctcagaagctactatgatggaatcagaattccagcagcatcaattccttctccattatcatcagcaatagataccaatcaaactcaggattgat

SEQ ID NO: 104470 - DNA, 300 bp, Arabidopsis thaliana columbia
gtggggaaacattatagcgagagatatagatagagatttcataacgacaatccagagaaagggtcttgccagtttaaggcatccttgggggtgagagagctattgatacatttcaaaaggaagaagaggaagatacgagtgtgagagagatttagagggagagaagaatgatatattcgttttgagtgtgttaaggtttcatttcctctgcagatctacatttagctcttcgcatggaacggaaacttgtggttttgggaatcccgtgggatattgattccgattggcttaatgattaca

SEQ ID NO: 104471 - DNA, 350 bp, Arabidopsis thaliana columbia
agaagaaacagaggttcctcttgtgtttttgttttgggattaaggaagctatttctgttctcttcgagtttcaggtctagccctaaccctaaaattcagccatgtcttcgaagcaaggagggaaattgaagcctttgaagcagcccaagtctggtaagaagtagtacgatgagcacgatatggagttaatgcagaaaaagaaggatgaagagaaggcacttaaagaactcagggccaaggcttcacaaaaaggatcattcggaggctcaggacttaagaaaagtgggaagaaataagactaaatctgcctcaatgtaatcctatatcaccttatatatgtctgtcaatgt

SEQ ID NO: 104472 - DNA, 429 bp, Arabidopsis thaliana columbia
acgcgtccgaaagtatcgaaactgctcggatatttgactttgaggagtttccaagaagagataaggttacatacatgtattataccggccgattagaagtcttcaacgaaaattttcctgctgctgatacaaagctatcatatgccttgcaaaattgcaaccccaaaagagaacgaaatataaggatgatattaaagtatttggtaccggtgaagctttctttaggaattataccaaaagatgagctcctgcgaaattataatctgcatgagtacacaaagattgtgcaagctctgagaaagggtgatctaaggcttctccggcatgctcttcaagaacatgaagatcggttcttgaggtcgggtgtgtatcttgtcttggaaaagctagagctccaagtctaccagagactcatgaagaaaatttata

SEQ ID NO: 104473 - DNA, 402 bp, Arabidopsis thaliana columbia
actgatgagtatgggctatcttctaaggcataccgatcttgtctcgttgaatcagtggatgaagaattacttaagcgtttgacaaaggtcgcccaattcttgtcttgggaacttggacttgaatctgatgcaaatgcaataatttcaaatggaagggtgatatttcctgtggatgagaggacatttttgggccaagatttacatcttcttgagtcaatggagttcaatcaaagagtaaagcctgttcaagaaattattgaaggcattgaatggcaagatgtggatcccgatctgctgacaagtaaatattttagcgatgtcttcatgtttgtgtcatctgcaatggcaacacgggatcgtagttctgaaagtgcgcggtttgaggtgttgaattcagaatac

SEQ ID NO: 104474 - DNA, 210 bp, Arabidopsis thaliana columbia
tcagaatgttaccaacttgcgttccaatcccgccatcgggaccaagccgaaaagaaactcctccatctccgcctatatgcgtatgatacgcgttaaacttgctgtagtacggatcgcttacatataactcaattctacatgttgtaaaagttggtatctgaatctgatgcagagcttgtccaatggtactacaataatttcgcagtgatc

SEQ ID NO: 104475 - DNA, 408 bp, Arabidopsis thaliana columbia
acgcgtccgcccacgcgtccgcccacgcgtcgggctaactttcgattccttatccacgaaatctagttaattatctatctcgctccaccaatgatgacacacagttgtcatcaggtagacaaaatgatgcaacccaatgcggaacttttgtccccatccgctaactttctaccgtcacctatagatccaccgcaagacaaccgtagagccaccgtatgagcacctccgtcattggaaggaaactgcaaattatcgcgacgggatcttagtaaatcctcgttgcttctaatcctcaccactcaagcaactctgacgccattgctcgacttctccaaagctcaagcaaatacaattgctataccgaatctcacaaattgcgataacagaattccgactaagaaagcgttc

SEQ ID NO: 104476 - DNA, 372 bp, Arabidopsis thaliana columbia
cgcgtccaaaaaagatgccagagatgttttagataaactgaatgctacaccatctagggattttgatggtatggtgggaattgaagctcatttgagagaaataaaatctttgctagatttagataatgttgaagttaagatagttgcaatcgctggtcctgctgggattggtaagactactattgccagagctttatatggtttactctctaaaaggtttcaacttagttgttttgtggacaaccttaggggaagctatcatagtggttttgatgagtatggttttaagctgcatttacaagaacagtttctttcaaaggttttgaaccaaagtggaatgagaatatgccatttaggtgcaataaaagaaaa

SEQ ID NO: 104477 - DNA, 408 bp, Arabidopsis thaliana columbia
aatctgattcgtttcttccaaaccctagaaaaatccttagcaatggaggatgctgatggacttagcttcgatttcgaaggcggtcttgattccggacctgttcagaacaccgcttccgtcccggttgctccgcctgaaaactcttcctccgccgctgttaacgtagcaccgacctacgatcattcttccgcgacggtggctggagctgggaggggtagaagtttccgtcaaactgtttgtagacactggcttcgaggtctgtgtatgaaaggtgacgcctgtgggtttctccatcagttcgataaagctcgtatgccgatctgccgttttttccggttatacggtgaatgtcgagagcaggattgtgtgtataaacataccaatgaagatatcaaagaatgcaatatg

SEQ ID NO: 104478 - DNA, 379 bp, Arabidopsis thaliana columbia
aatgaaaagggttctgatctaacaagtttgagcgcacctgctattagcaatggtggccgggatgctgcatctctaaaaactacaaattttggttcgtccgcgctggatttggttaaaaagaaactacatgattctggaatgcctgtctcatctacgataacatctgaagcaaatagtggtaaaacaactgaggtcacacccagtggagaaagtggaaatagtacgggtaaggtgaaagatgctcctggagctggggccctttccgattcttcttcagattcggaagatgaagatagtggaccatcgaaggaagagtgttctaaacagtttaaggaaatgctgaaagagagaggaatatcaccgttttctaaatgggaga

SEQ ID NO: 104479 - DNA, 143 bp, Arabidopsis thaliana columbia
aggacgcgtgggaaacaagttcacaatttcgaataatgtcactaaccgcacaattcgcgccgccggtcaccggtataaccacaagtctcagggatacaagaccgtcactgtcaaatctccgtgtatttccggtttacactgag

SEQ ID NO: 104480 - DNA, 422 bp, Arabidopsis thaliana columbia
aatccaaaagcattacagacacagtaatggcggctcctcggaatttaacaggtgacggtggagcaagacagctagtaaaagacgaagaaagccccgcagcttcatcggcagctaaaggactcttaaacgatgactcaccgactggtaaacgaaccaaatcggagagatttcctctctcacggtgggaattcgccgtgtttttcaccgtctttctcgttttcaccaccggactcttttgtatttacctcaccatgcctgccgctgaatacggcaagctcaaagttcctagaactatctccgatcttcgattgctcaaagagaatcttgggtcttatgcaagtgagtaccaagcacggttcattttaggttactgttcgacgtatatctttatgcagacatttatgatacctggaacgatcttt

SEQ ID NO: 104481 - DNA, 325 bp, Arabidopsis thaliana columbia
agtatacgtgtggatggaaatgatgcacttgccatgtacagtgcggtacatactgctcgcgaaatggcaattagagaacagaggccagtcttgattgaggccttaacataccgtgtaggacaccattcaacatcagatgattccactaggtaccgctctgcaggtgagatagagtggtggaacaaagcaagaaacccactgtctaggtttaggacatggattgaaagtaatggctggtggagtgataaaacggaatcggatctgagaagcagaatcaaagaagagatgttaaaagcgctccgggttgcagagaagactgagaaac

SEQ ID NO: 104482 - DNA, 319 bp, Arabidopsis thaliana columbia
tctacaagatctcttgtgtatagctaatgttgctgaacagcatgaagtttgggattttctaagcgcagcctctaagaattattcttttgggaagtcttcatcagtgatgaaaactcttgcagtcaatgttgatgatgccatggacgatattgtacgtcagttcaaaggtgtctcagatggccttatgcgcaaggttgtaggatctccacttgatgaacatgatcatgctcctacacgccacctctcctgtagtgtaaatgatataagcactcagctctctatggaaagcgcaactgaatctatgcacagcagcatttct

SEQ ID NO: 104483 - DNA, 122 bp, Arabidopsis thaliana columbia
aaattcttcagtcgtctcttgacaaatcctcaaaatatccacaattttcctctctattacccaggttgatttcatcagaacctcttcgccattaatggttacagcgatgttttgtggatcat

SEQ ID NO: 104484 - DNA, 348 bp, Arabidopsis thaliana columbia
gttttgcattcgaattgagttcctcctcggagcagcgtcaaagtcaacggccgtctgattcttgtttatctcctaaacccaaaaacaacgatttcactgtcagcgttgtcaagctcgaatcacactagccgagacgatggcgagaccatcgatcgccacgtgtgatccaagcgcacgaccttgtttagcgacgcgtggctcacttcctcgtagccgtacatgcgcgccgcttttattcctctgcctcctcctaggtttaacggtcttttgtgcggacgcaaatccttctgactcgaagcttctctgctcccgtcttcttccatgtgagccttctattgaaatggtgag

SEQ ID NO: 104485 - DNA, 394 bp, Arabidopsis thaliana columbia
aaaagaatgcaggtaaattcactgatgaccattgaagcaaaaaagaagtacgagttcttggaatctataagtgcaattatggattcccatttcaaatattttaagcttgtatgtttcttctcttattttgcatttagagatgtaaccaagtgtgaccaactaagggaaacatcagtacctcgttgtactccttaatgtggtctctttgttctccagggttatgatctattaagtcaattggagccttacatccatcaggtattgacatacgcacaacagtcaaaagaacagtctaagattgaacaagatcgatttgcacaacgcattcaagaattcaggactcaatctgaattagacagccaacaggcctctgctaaagcagattcctccgatg

SEQ ID NO: 104486 - DNA, 382 bp, Arabidopsis thaliana columbia
aacaacgcgtccgaagcgacccaaatcggaaaccagaacgggcagaacccctaaatcttcttcttcttcttctccgatcagatcaatgctcgagccaccacaaagcttatttccttccaagggagagttcttcacactattgaaggttttgcttgtcgcttgtgctgtagcttttacctgcaatttcctctctaagtctctgagctcaaacccttctaaatctttctgcgatagtaactttaatcccatcgattcagacttggatatttgtgaaccttgtccaattaatggagaatgttaccaagggaagttgcaatgtaatcttggatacaaaaatcaaaggaatttatgtgtagaagatggagaaatcaatgaatcaact

SEQ ID NO: 104487 - DNA, 411 bp, Arabidopsis thaliana columbia
actcgatccttccggcttgctcaaaaggttgatcagacgctaggatttgagaagcaatggcgaatagaatagatcatgagtacgattacttgttcaagatcgtcctgatcggcgattccggtgttggtaaatccaacattctctctcgattcaccagaaacgagttctgtctcgaatccaaatccaccattggcgtcgaattcgccacccggactttacaggttgaaggcaaaacagtgaaggctcagatttgggacactgcaggtcaagagcgttatcgagcaatcacaagtgcttactacagaggagctgttggagctcttcttgtctacgacataaccaagagacaaacttttgagaatgtcttgagatggttacgtgagctaagggatcatgctgattccaacattg

SEQ ID NO: 104488 - DNA, 431 bp, Arabidopsis thaliana columbia
acggacgcgtccgcccacgcgtccgcacggagatggtgtatttttgagtggttctacagtgcaattgactatccatggtttgccagacaagagtttgttgagtatttggatcatgtacggttgggtcatgttcctagattaactcgcgttgaatggggtgtcataaggagttctcttgggaaaccaacgcgattttctgaacagtttttgaaggaggaaaaagaaaagctatacctatacagggactctgtaagaaaacattatgatgaactaaacacgggcatgagggaatgacttccaatggatttggcccggcctctaaatgtttcacagagagtcatttgcctgcatccaaagtcaagagagattcatgacggcaatgtcctaactgttgatcactgtaggtaccggattcagtttgacaaccctga

SEQ ID NO: 104489 - DNA, 421 bp, Arabidopsis thaliana columbia
aaggacgcgtgggcggagtttcgtccgggaatctcctagatggcttatcgtaaagggtcgtaaagaagaagccgtctcaattctccaaagcattgcttctaatgcaatcactatgagcttcacaaacttatgttttgaagtagaaaatgatcaatccaagtcaaatcctgatgtttatgatgcgttaaagatcttggtgaggaaaagttggtcgtttagaagattattagcggcaatggtggttggattcggtatcggtatggtttattatggaatgccattagctttaacgaatctaaacttcaatctttacttaagggttgtgttcaacgccttgtctgagttcccagcttttctgataacgtttttcttcattgataaaatcaataggagagatgcgttgatcggatttacagctcta

SEQ ID NO: 104490 - DNA, 349 bp, Arabidopsis thaliana columbia
  unsure (1)..(349): unsure at all n locations
cacacgcgtccggtttttgaagtgatgcctagaaaggatgttgtgtcgtataatactatcattgcagggtatgcacagagtggaatgtatgaagatgctttgagaatggttagggagatgggaactactgacttaaagcctgattcttttactttgtctagtgtgcttccgatattttctgagtatgtggatgttattaaggggaaagagattcatgggtatgtgattaggaaagggattgatagtgatgtatatattgggagtagtttggttgatatgtatgcgaaaagtgctcggattgaagactctgaaagagtgttttctcgcttgtattgtcnggatggtatct

SEQ ID NO: 104491 - DNA, 428 bp, Arabidopsis thaliana columbia
ccacgcgtccgcagacgcgtgggcggacgcgtgggcgaagtcgaagtggtcttcaaatctccggcggatggtaatcgtcggcggatggtttagactttagagataacagaagaagacctcatctttagagtccggagcgaaattaatggcggccatagctcgtcttccactaactcattctcttccctccatcttcaatccttcatccttcctctctcagtctctctcttttcctacttatctccatcgctctccctttcgctccttctcctccgtctctccaatcctctgcacctcccatcgcgattcgagatcgccggggagtgattctaatgcgtcgattgttggggatcttctggattatcttaatgaatcctggacacagtttcacgccactgctgaggcgaagagacagcttttggctgctg

SEQ ID NO: 104492 - DNA, 436 bp, Arabidopsis thaliana columbia
acccaacaatgtctctcctcctacgaactttgcctctccgacctactcgtttcctctccgccacagccatatccatctctaacgctactaatttcttcgtcggacccaaacggacaaacccacttcccggaactcgaagaaccttctccagttcccctgttgcagctgcctccggcgatgtagtagtgaagccggttccatctcctccgtcggttctccggtgggtgtcacggacagagctatgcggcgagttatcagtcaatgatgttggtaaaagagtccacctttgcggatgggtcgcccttcaccgagttcatggtggcctcactttccttaatcttagagatcataccggcattgtccaggttaggacgcttccggatgagtttcctgaggcacatggcttgatcaatgacatgaggcttgagtacgttgt

SEQ ID NO: 104493 - DNA, 283 bp, Arabidopsis thaliana columbia
gatgaaaaaaagtggggggatttataaatgggattgttataaatttagggttttggttttgggtgtccattttctaaaattttgtaattaaaaaggggggagagagagtggttaatttggtatctttagtgggaaataagagcgtagtgtaatcttccttattgtaacaaaaggaaaggctcgaaagagttttgaaatgtaaagatatcatttctctgcctttatttttgtatatatcattgcctctttttgaacagatgtaaatttcaaaggagttgatcag

SEQ ID NO: 104494 - DNA, 394 bp, Arabidopsis thaliana columbia
agcccacgcgtccggttagtcataaaaaaaaaaaaaacacaaaaaagtttcaatggccgcctcaacaatggctctctcctcccctgctttcgccggaaaggctgtgaacctttcgcctgcggcatcagaagtccttggaagcggccgtgtgacaatgaggaagactgttgccaagccaaagggtccatcaggcagcccatggtacggatccgaccgagtcaagtacttgggtccattctctggcgagtcacccagctaccttaccggagagttccctggagactacggatgggacacagctggtctatccgctgaccccgagacattcgcaaggaaccgtgagctagaagttatccacagcaggtgggccatgctcggagccctaagctgcgtc

SEQ ID NO: 104495 - DNA, 167 bp, Arabidopsis thaliana columbia
ccacgcgtccggaaaaagatgtgtaattttcattgttttattcatcatagtgaaactaggctctatgccacacctgaaagacgacaaacagacatttgagagtagaatggtgtactacaatgtggatgtgtgtgtgtgttttgtcaaagttactttgatacttgtat

SEQ ID NO: 104496 - DNA, 382 bp, Arabidopsis thaliana columbia
  unsure (1)..(382): unsure at all n locations
agcaccacgcgtccggttcttgttttcgatagtgcaactccaattgcagggaaaggtgtagcagcagtgatcctagcccaaaagcctgatgatcttctttctcgatgcaatggtgtaccatgcatttttccagattacgagtttggaactgagattttaaaatacatacgtaccaccaggtctctatcttgaaacaaaaacactctcttaactacacaagtgcatgtatatatatacatcattgatcgtcgtgccaacagatctcccacggtgagaattactgcagctactacactaactggtcagcctgcaacaactaaggttgctgcattctcatgtanagggcctaattcggtttcaccagccattctcaagcctgata

SEQ ID NO: 104497 - DNA, 219 bp, Arabidopsis thaliana columbia
gcgtccggaacaaatgttctaaagatcaaagcttaagtgagaagcagatgcaacagatggcgaaatcgcagatctggtttggatttgcgtcacacgcgttgcatctggtgtcagccgtatctgacgatgtggttgatttgactgacgataacttcgacaaggaacttggtaatgataacggagctctcgtcgagttttacgctccctgttgtggtcact

SEQ ID NO: 104498 - DNA, 330 bp, Arabidopsis thaliana columbia
actagtatctagatcgcgagcggccgccctttttttttttttttttttttcgagaaagctggaatcactaaatttgttgtcaatctcatttatctgtatatactactactagtaaattgagaaaggatcacacccataaaccctcagaagaagatacaatctgattcgagtcccgtcaacgaatctgattaccatgaaggcgaacgtcttactcatctactcgacttgattcatagaggaattgagacgtccaagctttcgaatgtgaactcattacctgagaagatatggctcaagaagcaaatagcgattgggatcaacgaagtcact

SEQ ID NO: 104499 - DNA, 243 bp, Arabidopsis thaliana columbia
acgcgtccgaaaaaatcattatttattaattattttggccaagttactgcatttaactttttgggcacatcaccacaatactctcacaattccaactatatagaaatataatcactctctctttttcatttttcttttgaatgttttcttagtattagatgaaagttgagaattctaatcctcactcatcgagagttgagaatcaaatgagttaaattgcatcttttcaggattgctagaagg

SEQ ID NO: 104500 - DNA, 347 bp, Arabidopsis thaliana columbia
cataaacgttttactttgtgctgcactactcaacctcaatggccgcctcaacaatggctctctcctcccctgccttcgccggtaaggccgtcaagctttcccccgcggcatctgaagtccttggaagcggccgtgtgacaatgaggaagactgttgccaagccaaagggcccatcaggcagcccatggtacggatctgaccgtgtcaagtacttgggtccattctctggcgaatcaccgagctaccttaccggagagttccccggagactacggatgggacaccgccggactttcagctgaccccgagacattcgcaaggaaccgtgaactagaagttatccacagc

SEQ ID NO: 104501 - DNA, 297 bp, Arabidopsis thaliana columbia
agattcatccttatgatctgagatcaatccaagaaatatccacttcagacaactgttgtcctcggatctgtttttcagacaaaagtggagctcaaaacggagacaaatcttcaatctttgactccttgcagaaccagttatggcaagagaagagcaaaacattgaaaacagaggatccgtacatgtggtcgaaagagaaagtaatttacgtagtgtggtgtgtggtcctgtgcggtggctaaagatgttggcgtcaaagcttcactggagctatgtgtttgctgtggtctccaattg

SEQ ID NO: 104502 - DNA, 356 bp, Arabidopsis thaliana columbia
acaacaacaaatcttaaacgttttactttgtgctgcactactcaacctcaatggccgcctcaacaatggctctctcctcccctgccttcgccggtaaggccgtcaagctttcccccgcggcatctgaagtccttggaagcggccgtgtgacaatgaggaagactgttgccaagccaaagggcccatcatgcagcccatggtacggatctgaccgtgtcaagtacttgggtccattctctggcgaatcaccgagctaccttaccggagagttccccggagactacggatgggacaccgccggactttcagctgaccccgagacattcgcaaggaaccgtgaactagaagttatccac

SEQ ID NO: 104503 - DNA, 373 bp, Arabidopsis thaliana columbia
cacacgcgtccgcaaattccctcattacctcaatcgaagtctcttcatcactggtgaaagttatgctggccattatgttcctcaactagctgagcttatgattcagtacaacaagaagcaccatttgttcaatctgagaggaattgctattggcaatccagttttggagtttgcgacagatttcaactcgcgagctgagtacttctggtctcatggcttgatatcggattcgacttacaaaatgttcacatcttactgtaattactcgcgctatgtgagtgagtactatagagggtcaatgtctagtatgtgctctaaggtgatgagtcaagttagcactgagacgagtcgatttgttgataaatatgatgtc

SEQ ID NO: 104504 - DNA, 383 bp, Arabidopsis thaliana columbia
  unsure (1)..(383): unsure at all n locations
attggctaaaaataataagacactcgttagagtgctcgtccctcgtgcccttacctgcctaattccaactatctggcaaaatcatgactttgatggaagatgccgagttgaaaccaaggatgggttcttttaagaagaggagctcttctaagaatttgaggtattcaatgacaaagagaagaagaagtagcaaagtgatgtctgtggagatcatcgaagatgtgcatgacgcagaggagttgaaagccgttgatgcttttcgccaatcgcttattctcgatgagctactcccggagaaacacgatgactaccatatgatgcttagatttttgaaggctanaaaatttgatcttgagaaaaccaaacagatgtggactgaaatg

SEQ ID NO: 104505 - DNA, 388 bp, Arabidopsis thaliana columbia
ccgaatctctcaatctgatgaaagttgttgtttttaggttatacagagccgttggatgataatattgaagtattggtccctgatgatgaccatggactctatgcaattgacattctagatcggtcttgggtatagtaaagtagctagatattactttgtgcattggctacttgtatgcagttgttaagtttaggagtgaggataagtaagatggaaattgtatctgcaaccatttttgtatcataaagaaggttgctaatgaggacatttccggtcttggagatttagtatctgttctttcaaagctttctaagggtgctcgtgttccattggaatatatgtctcacactgatcgtcatcgcaagaagcatctgaataatcttccatt

SEQ ID NO: 104506 - DNA, 327 bp, Arabidopsis thaliana columbia
acgcgtccgccaaagcgtccgcccacgcgtccgcggacgcgtgggcctgtcttcatatccaacagagatctcttcatggctccaattactgtcggcgatgttgtaccagacggaactatctctggcttcgatgaaaatgatcagcttcagaccgtctctgttcactctatcgccgccggtaaaaaaagtcattctctttggtgttcctggtgctttcactcccacatgcagcatgagccatgtgcctggattcattgggaaagcagaggagctgaagtcaaagggtatcgatgagatcatttgctttagtgtgaatgatccatttgt

SEQ ID NO: 104507 - DNA, 249 bp, Arabidopsis thaliana columbia
acgcgtccgtaggattggtttgcaccaaacacagtagatcgacttgaaaggcaagtggtgccacagtttttctctgggaaatcgccaaatcatacacccgaaagttatatggaattcaggaacgcgattgtttccaaatatgtagagaaccctgaaaagacactgacgatttctgattgccaacgattggtagatggtgttgacattgaagattttgcacgagttttccgttttcctgatcactgggga

SEQ ID NO: 104508 - DNA, 130 bp, Arabidopsis thaliana columbia
tcgtcaatacatttcttcaaattacgtttcttttattctttcgttactctcaacaaattttgacatctgattggagttgattccaaataagaaagatcaggagctttagggaaagtatggatatgggttt

SEQ ID NO: 104509 - DNA, 321 bp, Arabidopsis thaliana columbia
gtcagatataaattagggtttcagattttttagattttatctcttcatttcgagccagtgaattgccgactcctcatcttcctcttcgtccctcaagttagttacttgcgtcatgagttttctaaattctctagctatacattgtgatatcaagttgtgagaagttcgagctgattgtatgtgcgtcttctttggtgcttgagaatttaacgagagtattgagtttttaccgacagtagatatccaatgcaatgagcttctacgtgtatcctgtaaaggctgtctaaatcaactgtcaatcgtgttttgtgacatggttac

SEQ ID NO: 104510 - DNA, 166 bp, Arabidopsis thaliana columbia
aagaatttctacaaaacccatagaaaagcagtcacttttccaccacaataaaatcaaaaacaaacattttgtatgtacatgtaaaagttaatgcaaacattaatttagaactaggtggaaagctccattaacttatttttaatctcccaactaattcactacacca

SEQ ID NO: 104511 - DNA, 310 bp, Arabidopsis thaliana columbia
ccacgcgtcagcacacgcgtccgcccacgcgtccgcccacgcgtccgcggtgaagcagttgatgagctttgatccaggggaatggagtgagagtttaaggaaagagtatcttcttgtcatcgggggcttcttctctcttcctctccctctcttctccaccacttaccgcaaagccatccaagcgcggaggaaggtggcggaggcgttgacggtggtggtgatgaaaaggagggaggaggaggaagaatgagcggagagaaagaaagatatgcttgcggcgttgcttgcggcggatgatggattttccgat

SEQ ID NO: 104512 - DNA, 396 bp, Arabidopsis thaliana columbia
  unsure (1)..(396): unsure at all n locations
tgaggtaaagaagatatacagtagcatgaaagctgctggttacttacccacaatccgcctttataggatgatgattgagcttctctgcaaagggaaacgagttagagatgctgaaattatggtctctgaaatggaagaggccaatttcaaggttgagcttgctatatggaattccatgctgaagatgtatacggctatcgaggattacaagaagacagttcaagtataccagaggataaaagaaactggactggaaccagacgagaccacttacaatactctgattataatgtattgtagagacagacgaccagaagaagggtacttgcttatgcagcanatgagaaatcttggtttggacccaaaactggacacatacaagagcttgatctctgc

SEQ ID NO: 104513 - DNA, 373 bp, Arabidopsis thaliana columbia
cattacttctgggttttcgataatctcttttgggtatttgcaaacccctcaaagattcttcctttctcctttaaatcgtctctgctttggctttgtactagccatcgcaattcagcatcatctattgcaagtatctccaaggttttgatttccacaatggcaacaactactctcaatgacagtgtcaccactacacttgcttcagagcctcaaaggacttaccaagttgttgttgctgcaactaaagaaatgggtattggtaaagatgggaaattgccatggaatttgccaacagatctcaagttctttaaagacattactttgaccacttcagattcctctaagaaaaatgctgttgtgatgggtagaaaga

SEQ ID NO: 104514 - DNA, 333 bp, Arabidopsis thaliana columbia
cccacacgtccggttgagcttccttcacgtccacacttctcacctacaacaacaactaaaagctaagctctatgttcacattttgatcgaaagttttagtaaattagagccaatcattgattacccttttctccaatagaagctctctcttctgtctccaatcgacttcagctaaaccctccaagagacacaaacagaagaacgagaggttaatctaaccgaactttaccattcacaagatcgatacacaagatcgctctcgctctacaagttgtatacctgcaggtttggcaggtttggttgaagtgcattgaatcttaagcgttttgtgac

SEQ ID NO: 104515 - DNA, 238 bp, Arabidopsis thaliana columbia
tatgctttgctgtgataaagttctctcctttcctttctaaaggaagaagaaaggctttatctctcaaaaccctcatccacaaaatcccctttaatccgctaatcagagggtttttctgtttttgtgttgcttcgttactacggttacattcttctcgtccccttttgatttcaaagtgaatcgcgaaattgggttcatgttcttgcactgatttcagtgtaacccttcaatttcagaa

SEQ ID NO: 104516 - DNA, 412 bp, Arabidopsis thaliana columbia
cagacgcgtgggcttttgttcttgaaattagggttaatttcttttttccaaataccatcaattctccagaccataaaaactcaaaaagatcagatctttcctctgaaaaagagatacccaacttatgtttttgtgtgtctgtatatagataaacattacatacccatatttgtgtatagacataaaaagtggaaattaaggtaacaaaaagaaatgggaagaggaagagtagagctgaagaggatagagaacaaaatcaacagacaagtaacgtttgcaaagcgtaggaacggtttgttgaagaaagcttatgaattgtctgttctctgtgatgctgaagttgctctcatcatcttctccaaccgtggaaagctctatgagttttgcagctcctcaaacatgctcaagacac

SEQ ID NO: 104517 - DNA, 413 bp, Arabidopsis thaliana columbia
ggtgaactttctcctagctggtggtcgaagatctcgggtttcttgttcggaattcaccccgaacatgtagatactcggttgtgttcagcgctccgtaggacagaagggtacctgcacaatcttcccactgttaacaggtttaataccctcccgaaccctcgattaactatacaagacgcaatgccacacatgaggagttggtggccacaatgggatatcagaaagcatttcaatagcggcacgtgttctaatatgaaagatgcaactcttctctgtgaacgaattggtcgccgtatagctgaatgcaagggaaagcctactcaacaggaccagactttaatacttcgacattgtcacacctccaatctcatttggatagcaacaaacatcctctcacccttggagcctgaaca

SEQ ID NO: 104518 - DNA, 465 bp, Arabidopsis thaliana columbia
cacacgcgtccgctttatcaaaaccagagaagaccaagaagaaggcatggctagatcaccatactatggttcatcttacttagactacctctctctcccaaacccacatctctgtttccgcttcatcgtcgtcttcttcgtgttgtccttcacatggtacttgaacttcgagtccatcatcgaagacaccctggaccacctcaagctcgtctttatattcacccctctcttcctcctcctcctcgtccactttttctccggtggcctctccttctacgtcccctggcctgaacaagactccattcaccgtgctggttcttccccttggggcgtagcagccgtgctcgtgctcatattgttcatggtttcgtaccagtcagatttccaggagaggtggttcccgtttggggctaagtagatcaatcaaagtttatgatgaccagctttacttattctctagctata

SEQ ID NO: 104519 - DNA, 365 bp, Arabidopsis thaliana columbia
aattgttagctatgaccaacctttattttaagacggcttttcttctctccctcttgttactgtccttctcttatcagagtaaactaatcgaggctaaggaagacaaagaatgtaacgacagcaaatgtcttcctaatccgtcaaggataaatttagaagaagggaatataaaaagaatcgatgtgaatcatggagggatatgtgacacataccttgagtgtggagggttggcatgttctgattatcgtcgggcgtgttgcgtaaacggaaaatgtgtatgccgcaaacaaggccaaactctgcccgattgcccaaactaaattatgtattgacaacattctaattaataaaataagatgtcttag

SEQ ID NO: 104520 - DNA, 123 bp, Arabidopsis thaliana columbia
ctgccttcagtagtaacctctgagcttgagggaaactcatgtccatggcgctaattgtccggccattctttgttcctggaagtgctggaatttctgggagtagaaacatatgcaagaaaaatc

SEQ ID NO: 104521 - DNA, 396 bp, Arabidopsis thaliana columbia
aagaagaagaagaagagcttcaagaagacaaatacactattttttatcgtctgcaatgcccttaccctttgaagagtttcaagggaaggggatttcttgtttctcttctttctcgtcttccttcccccaaccaccgtcgtctccgcttttgagccaccgcaaagcaagaggcggcgaagaagaagaggaagaagttcccgcggcggagcctacctctgttctggactccctcataagcccaacctcttcctccacggtgtcttcctctcacggcggaaacagcgccgtctgaggcggcggcgacgccaccaccgatgagcaatgcggagccattgggttgggtgattgggaggagcaagttcctcatgaccacgaacagagcattctcggactcat

SEQ ID NO: 104522 - DNA, 376 bp, Arabidopsis thaliana columbia
catgacacgtcatctctcctcgtaatcggggattttctctccttcgcttttcagccgccgatcgcgccgcaatcttcttcatcggcctccgttctacatcgacggtgtttgccgtaacttctgtcaaactctcagaatttgcttaagtataccacctaactcgagacgctatgaccgttttctcagttcagtccactatcttcagtcgagcctccgtagctcttctctcgagcaatggcttcaaacgattttcattcgtttcttcgttttcttcctccgccgcttactctccacctaaaatgaggaagcgtcgctacccaatcgtctctgctgttgatattggtggcgtcgcaatcgctagaaatgatgtggtgag

SEQ ID NO: 104523 - DNA, 209 bp, Arabidopsis thaliana columbia
cgcgtccgagaaaatgatgatggcgatcgattctaaactttcttttttaccattcttattttcgtttaccgtaggtggttaaaagaccttttttgttgatgaggctcatttaaagaaccaaccaaatgatgtttctttctctcactctctgtctttctgttttctttttgttctgtttagaatttagaaatccaccaagtattcggtcg

SEQ ID NO: 104524 - DNA, 275 bp, Arabidopsis thaliana columbia
gacagcggacgtactctaggatcccccgacggtgttctcatcagtgggaaatctggtaaactaggcggaaacaacgctcctctcttcaccatgaagcccggaaagacttacaagtacaggatctgcaatgttggattcaaatccactcttaacttcaggatccaaggacacaagatgaagcttgttgagatggaaggctcccacgttctccagaacgactacgactctcttgatgtccacgttggacagtgcttcgccgttctagtgaccgctga

SEQ ID NO: 104525 - DNA, 416 bp, Arabidopsis thaliana columbia
cgcagctctacagaagaaatgggacaacatatgccaaagtatccatcacactccggcgtttcctaaacttgggtttcagtcggtgagtccgcagttcccagttcagactgagaagagtgtgagaactcctacaagctatttggagacgcctaaactgctgaatccgccaatctcaaagccaaaacctatggaggatcttacggcatcggtgactaaccgcacagtgagtttgcctttgagctgtgttactacagattttgggttgggagtaatctatgcatccaaaaaccaggaatcaaaaacaacgagggagaaaccgatgctggtgactctaaactcttctttagaacatacatatcagaaagatttcaagtctctcagagaaatactctctcgtaaagttgcctggcagaccg

SEQ ID NO: 104526 - DNA, 211 bp, Arabidopsis thaliana columbia
acgcgtccgcccaagcgtccgcccacgcgtccgcccacgcgtccgcccacgcgtccgctgaaaaggcgtataaggaaacagcttctcctggaaacttcaagttcaaagcagaagatggagttggacacggggcgacgagtttcatgatcaaagaatcatcagactgggttgacaaattccttaaacaagaagatatgacaacttgacagat

SEQ ID NO: 104527 - DNA, 271 bp, Arabidopsis thaliana columbia
atgaaaatgaccaagttgaagattttgctcttgttcagtatattgagaacagtaaatgtcataggtctaattcttttcccagtagcattctcagggataacagtgagaaagagtcacgagtagaattgcctaatctgcacagatgacattcggtggggaaagtaggtgtgaagaggcctggtgaaggcagtgacttggtggagggatcaaaatgacagacagattgggtggcagtttctgaagctaatgaacgcttcaacatgtttaaaac

SEQ ID NO: 104528 - DNA, 290 bp, Arabidopsis thaliana columbia
cttcgacggaggagtccataaaactcacattctcatttttttctcaaaagaacaacgaacagctcttatatttttttacaataattcttcagagctgtttaagttcaacaacaatttgattaagagaaaaccacataaatattaattagtgtaacgaaaaacacaaaacaaatatgtcgtacggatacgacgatgaatccaagaggaagaggaggtacattgttatcaccatctcctctgttcttttgatctcgatggtggttgcggttaccgttggtgtcagcctcaat

SEQ ID NO: 104529 - DNA, 352 bp, Arabidopsis thaliana columbia
ggaaaaacaaggaacctgcaccccctagagtcgttcagcatcatgatttctcttcacagccaaatcacttccgcaccaaaatactcaagcagtatccgaggttcataaaccactgcatcaagatattccacctgctaattttgagaagcatcagaaatctgagactgccagcgtggagactagaagtgatggtcagaagatttctagtcattcaaatgcattccatgaagatcaaaatacagtgagctcagagtgtgactggagtgaacacacttgtcccaatgggaataaatattacttccattgcatcacttgcgaaagcacgtgggagaaaccggacgaatactccatg

SEQ ID NO: 104530 - DNA, 288 bp, Arabidopsis thaliana columbia
cgcggcgccgaaaccgccgcggaagattgtgacgacggtactgataagagcaataccggaaacagtttcttcgatatatatggacccgaagcgaaagcagaactcgatttcaaaagccctgaaacaacattgaacttacaagatgttcaaggacttgtgacatgggttcttgcagaaggttttatgccttcatgggtatttattaagaacaagcctctcattccaaaggttgtactgctctaccttcctggattggatgcagctttatacttatcacattctaaaact

SEQ ID NO: 104531 - DNA, 323 bp, Arabidopsis thaliana columbia
tctacttgcaggaggttgaggcagttgacgaagaacgagagtgtgaggaagatggtatgtcagaatgcgggggaaaagagataactggaacactggagattatgactaagaagctaagatggggtcggttagctagagagctcaccactcttgaagctgtgtgttggcgtaaatttactgttggagggattgtacaaccttcccgctgcaatttcagcgcgtgtgctgttgggaaccggcttgtgctatttggtggggaaggggttaacatgcagccattggatgatacttttgttctcaatcttgatgcagagtgtcctgag

SEQ ID NO: 104532 - DNA, 278 bp, Arabidopsis thaliana columbia
gataccaacagagcatttgacgaggataaacgttgtcgagcatggacgtttcctatctgtgatgatcttatttacagttgcatgcaatgtgattttatcctccatcaaacatgtgcacatcttcctccgaggaaacaacatgcgacacatcctcatccccttcttctactggtggatgaggaacatgaagattattttcaatgcactgcttgtaagcgtgaaagcaatggttttgcgtacacatgttgtgctacggattgcaacttcacattagacgt

SEQ ID NO: 104533 - DNA, 314 bp, Arabidopsis thaliana columbia
gagaaagatgcttgagtattaccaaggaggagttggggtgatcaggagagaccttctggctggatgttgggcaccttatctcgagcgtgcggttacattgaaaccgtgttacgatggaggcattgatggtggcgaggtggcagctaaaatactgcaggacacagccatggggaagaagcgttccaaactcaatcttagcggagcgaggagattgcgggatgcaataatattaggcttccagctacagagagctcctgggagagatctttcagttccagaatggtatcaagtcgctggaaacgaagctgggattc

SEQ ID NO: 104534 - DNA, 333 bp, Arabidopsis thaliana columbia
gctcaaggcttatatcatacaagttgctggttgtctagcaaagctgatcaggaccagctcgtatcttagggacataagttttgttaatgacttgtgtcgccacctgaggaaaagctttcaggcgacagctagatcaattggagatgaggaactcaacttgaacgtgatgattcaaaactctattgaagattgtctgcgggagatagccaaaggaattgttaatacacagcccctgttcgatatgatggctgtttcagtcgagggtcttccttcttcaggaattgtttcacgcgcagccgttggatcactgttgatacttgcacatgcaatgtc

SEQ ID NO: 104535 - DNA, 402 bp, Arabidopsis thaliana columbia
cagcttcgactccatatctgaggtttctgacgtctgattagaaaatgtctcgagctgagtcatcttgggagaggctggtgaatgctgctttacggagagatagaacaggaggagttgctggtggtaatcaaagcagtattgttggttatgtcccttcctcactatccaacaatagggacatcgatgcaattcttagagctgccgatgagattcaggatgaggatcccaacattgcaagaatcttatgtgagcatggttactcacttgcacaaaatctcgatcctaatagtgaaggcagaggtgttttacagttcaaaactggattgatgtctgttattaagcaaaaattagcagaaagagaggttgggaccatagacagaagtcaggatattcttcgactac

SEQ ID NO: 104536 - DNA, 391 bp, Arabidopsis thaliana columbia
cgctcgattcgtcttcgtcgcccattgaaggaggtcagaccagaagtcgcacgcgagccttataattgtgtaatccttagggttttgctcgcgatttctggtactattaggtttccgtcgatttcttcgtcgggataaaaaccctcttcttcgccggagggagaacacggcgagaattacacagctatccttcgaattccgtcgctggttagcttaggactttctgattctgtcgctttaatcttcttctctccatgacacaacgggtattccaagtctggaaaggaagcaataaattcatcctgggtgggagattgatatttggaccagatgctaggtcactgcctcttaccttgctattgatcatagttccggttgttttgttctgtgt

SEQ ID NO: 104537 - DNA, 410 bp, Arabidopsis thaliana columbia
ccacgcgtccgcactcagattcgattctccgaccttcctcagttcaaaatgttcaacgtgaaggtcctacacgtgaagttttgagctggctgttttagcttttgtgctgtttggccataattgatgcagccttttttagaaacatagtacaaatatattatttttgattcttgattgttttggcttactttggtggatgttgtgtgatcatcgttcaaggcttctttcttctattatgcgccttgattcatctcacaaaacgcggaaccagcagctgtttgagagaggttaattatgtcagatagatgggctcgacaaaacgcggaacgtcctgcaactactttggctgagagaagaaatgtgaataaaaacgtttcacttcagactggtgaagagttttcaatggagtt

SEQ ID NO: 104538 - DNA, 377 bp, Arabidopsis thaliana columbia
gcgtccgctactacaattgcagctagagagccatggcctcctccttcaacgaagaaaccgccaagaagttgcttacccaggttgagttctacttcagtgacagtaatctacccacagacggatttctcaagagggaagtcaccaagagcaaagatggcctggttagtttgcctctggtttgttccttctctcgtatgaggaacctccttggcctcggtaacatcaatagagaagacatccctccgaggattgtggaggaagttgctaatctcttgcgcacctctgattttcttaaagtttccaataatggacaaaggatcggtagaggaactaaactctccaaaccggaagaggtgcttgaacaagtccacagaaga

SEQ ID NO: 104539 - DNA, 194 bp, Arabidopsis thaliana columbia
gtccgccaacgcgaccgccccacgcgtccgaaaccatgaagcttcttatgctcgcctttgtttttctattagctttggcgacttgtaaaggtgacgagtttgtttgtgaagagaacgagccattcagatgtgaccaaactaaacttttcaacagtggcaatttcgaaaaaggcttcatcttcggtgttgcatct

SEQ ID NO: 104540 - DNA, 378 bp, Arabidopsis thaliana columbia
cagacgcgtgggcggacgcgtgggcggacgcgtgggcggacgcgtggggtcgtcgtcatcatctctgacagcaatgttattcacataggcaaagaagtcattcttttgcatgctgttttccaataaagttaattctctaacagaacaagtttcgagattggatattgacgacaacgatatgggacttggaggtagtgaaacaatggaatgcaagtgtggtatgcctctgtgtatctgtgtagctcctcccaaatcaactgataaaccaaacccacctgctaccattgctcctgtggttcttcctcagttgaagtcagaggcttcagcaaaaagtaaaggttccacttccagcagcaatgctagatcagctctaaatgc

SEQ ID NO: 104541 - DNA, 402 bp, Arabidopsis thaliana columbia
ggcttgttggtgtggcaagagttttggatcactggcgatgttgatggaagaggtgttccagtatcaaatccgaatggaccactagaccatgaattattcctcttatgtgctcgtgatactgtcaaacttctgagaaaccatccaagcctggctctttgggtgggtggaaatgaacaagttccgccaaaagacataaatgaggctctaaagcaagaccttaggcttcattcttattttgaaacccaattgttatcagacaaagattcagatcctagtgtttatcttgacggtactagagtttatattcaaggatctatgtgggacggctttgcagatggaaaggggaacttcactgacggcccttatgagattcaataccctgaagattttttaaagacacat

SEQ ID NO: 104542 - DNA, 429 bp, Arabidopsis thaliana columbia
cagacgcgtgggtttgaaaagacaaaaaaaaaaaaaaaagagaaagaagaagaagcttgggacaggggagtcccagaaagaaaaaaagttttttttttccggtgacagtgtcggttctctgacgctcccatttttgttcaatctttcttccttctttccctgaatgccttcactcgtattctgaaacttgcggctatttacaattgcaggagtgtgaatgattataaggtagtaatggattcaaagaacaccatcttatctccgagtatcatcaatccgctttgcttgctgtcctggaggtgatttgtcttttagatgattgacgaattcatcgaagaagagttgccaccattaatctgatcagccaaaaaaaaggtttggcatgaactgtatggctgtcgctctcgatccactaaccgaccggttttc

SEQ ID NO: 104543 - DNA, 406 bp, Arabidopsis thaliana columbia
caaatcgttctgtgtattaaaaagtattgatcttttaggtttcaggaatgaatcttggagtgaagaagatggctgtgctttaccattatccttgccatgacggtgttttcgcagctttagctgctcatctctacttctcagcaaagtcaatcccttcactgttcttccccaacacagtctactctccaatcacaatcaaccaacttccacttcaagacatcagtcatctctatctttttgatttcactggacctccaggtttcgttcaccaagtctctcctaaagtcgacaatgtcgtgatcctcgatcaccataaaaccgctattgatagcttaggtgatgtctctttgacttgcaagaacgttactagtgttttggatatagagagaagtggtgcgactattgc

SEQ ID NO: 104544 - DNA, 409 bp, Arabidopsis thaliana columbia
tttttctcggaaaaattactcttcttcatcgattttccggtggtttggtttgtcaacttcatcttcttcttctctttctcctttcattttttttcttgtgtttcttctttgacgtgggtccttcaatctccatgaaggacccgaccattgcttaatcctaaacataactccaaaaatctaattcttttcgatctgttttatcttcaaataataagactctttgattgctaaaaccgattttgatcatcatcatgcactgttttccgtgtttctcttcgccaaagaacaagagatcttcaactacgattgagatcaacgacaacatggaacccaaagcagatgatatgagacgtgcagaagagacagaggagatatagcaatcggaaggaacatcgttgaagatattcac

SEQ ID NO: 104545 - DNA, 172 bp, Arabidopsis thaliana columbia
cacacgcgtccggattcaacaactttgagtgagtttttttttttgtcatttacctttgtcacttcgacgtgagatgagccgtggaagaagacgaaagggctcttaagctctctttacacttttcttcgcctcctcattttgagatgggaagccgtaacgccgctgccgaaac

SEQ ID NO: 104546 - DNA, 263 bp, Arabidopsis thaliana columbia
agaacacgcgtccgcccacgcgtccgcccacgcgtccgatggaagttagagaactctttaggatgtctttgtttgttttcttctactttctagcgtgttagtgtacattggtgtactggagcaaatcttccttaactctttagtagctgacaagtatgatctacatttgtgttagtgtccacgtataatgatggcttgtgtatccaaactacagcttctgatgcttaacagttacatgtttatgcttaaaaataaaaaaataa

SEQ ID NO: 104547 - DNA, 216 bp, Arabidopsis thaliana columbia
cagacgcatgggcggacgcgtgggtcggacacgattgagcgatctgctgcggtgggaatacgaaactcggaacttcaaggtctcatggtagctcagatcgtttgcggttttcacggaatcgagtcctctctaccacacaaactgagaaccggaacggttaagcgcggaatatgaaaaggagctcgaagcagctcatgggaggattcaataaatctg

SEQ ID NO: 104548 - DNA, 425 bp, Arabidopsis thaliana columbia
cgagacgcgtgggcggacgcgtgggtcttcatgtaacccttttaagataattttcttcttcctgttaatttatctgaagtttgcttcttatcttcgtgatcgctttttgcaatcacaataatgtctaaccgttccttcaagaatttcatagaagaagaacttggaacattcccacagttcttaatctacgctcttcttgaatggatcctcatcattatcctcttcatcgatggcttcctcgctttcttctctaaccaaatcgctaaattctttgacctcaaaatcccctgtcttctctgcactagactcgaccatgttcttgtcagcagaaaccctgatttctattacaacgactcgatatgcgatgctcacaagaagaatgtctcatctctcgcttactgtcatgtgcacaagaaactctctga

SEQ ID NO: 104549 - DNA, 337 bp, Arabidopsis thaliana columbia
gatatttggaagctctaaaaagataaatcttgtttttccctcctaattgtaaagaagagggctttagacttttagaacaacactcgagggaagtacgacgacgaagaagagctaacaacgataatgaatcgggttactactgaaagcattgcgtctacggcgatactggtggtgatggtgtttctcttctcgtggagatctatcgaggcggcgaatgtatcctacgaccaccgttctctcaccatcggcaatcgccgtcagctcattatctccgccgccattcactatcccagaagcgtccctgctatgtggccatctcttgttcaaacagcaaaag

SEQ ID NO: 104550 - DNA, 381 bp, Arabidopsis thaliana columbia
acgacgatttcaccgactaatcggagtttggatcggagattagatccgggaaatcactgacgaatcctttctggattttggatcggtctatgcttctctactctacttgatcttgatcttcgagaaatttaacttcgttttgcaattgatcgtctcgctttaagaagcttgcagatccgttgatctctttctgtgattttgcggggtttagggttagggttttaatttcgatttcggttgtcaattttgatggcttcgactgctgatttcctcctggatgatcaaacggacgaggatttcttcgacaaacttgttgatgattcctatactcctaccgcttcatcctctgccaaggagctgaaattcgatgacggtagtgat

SEQ ID NO: 104551 - DNA, 283 bp, Arabidopsis thaliana columbia
ccaacgcatccggttgttattaactcgattaagaagtaaacctacaaccacactatatatttgtctcacttaacacccacgcgtccgcccacgcgtccgcccacgcgtccgatggctgtggctacagctccgtcgccaaaacggcatttcccccggcggaactccaaacctttacccgaaagttaagaaccaaaggcaagggtggcaacaagagaagccaacccttttcaattctcgccggaattgggattcccaccggttggttaagccttctcctcctcct

SEQ ID NO: 104552 - DNA, 300 bp, Arabidopsis thaliana columbia
accactgcacaggcatgcaccgtcttcctctctctcgctctctttgtcgcaatctctggaatttgtgtgatttttcggaattgcttttttaagtgtcactcgtggttgggttcatctcttagttcgaggagtgttctatttttggggctttattgattccatcttctcccttgccgtttatgggataaaatcaacatcaatgagggctttcatgtgagattttgtgtgtgaattttaattcaaatggctgatatgcgtagacgaaatggaagtggaggttcctctaatcatgaaaggaat

SEQ ID NO: 104553 - DNA, 438 bp, Arabidopsis thaliana columbia
gtccgggatgatactctctcttctatctctccaactgatcctcttcctcactctccgatccatcccttttcctcaccgtcacatccccgaaaacttcccttctcccgccgccgtcgtcaccaccaccgtcacaaccaccgtcatttctgccgcctcttccaatccccctctctcatcctcctcatctgacgaacgatgcgattcaggtcgagtcttcgtctacgacatgccaaagatcttcaacgaagtgattctacaacagtgtgataatctcaatccatggagctctcgctgcgacgcactttctaacgacgggtttggtcaagaagcgacgtcgttaagcaacgtgatccctaaagatttggttcaatcatggttttggactgaccaattcgtaaccgaaattattttccataaccggattttaaccaccggtgt

SEQ ID NO: 104554 - DNA, 444 bp, Arabidopsis thaliana columbia
ccacgcgtccggaggtgtttagtgaaaattgggttgtttaccactatttcaatcttcgagctcacaagtacgaggttacggtcgttgagatctatgatcagtcgagggcggagaacaaaaatgtgtggaaactcattctgggaaagcacaatctaacagcacccatcacttcgtactctaggccagaggtgtttacaaagtcacagtcatacttctttgctcagtctgtgaaaaccattgcggtgacatccacagcaaagggtataacttcaaagcagcttctcattggtaccatcggggatcagatattggcacttgataaacgatttgtggatccacgccggacacttaacccgtctcaagctgaaaaagaagaaggaatcatccctctcactgatacattacccatcattcctcaggcgtatgttacacactcccacaaag

SEQ ID NO: 104555 - DNA, 398 bp, Arabidopsis thaliana columbia
aagaagatcctgtcgcttctgttctcacatcgtcagatgggagctacttattcaagaatattattccaggaacatacaatatccgtgcatcccatccagagctgcaagttgaagttcgcggttcaacagaggtggaacttggatttgcaaatggcatggttgatgacatattcttcgtccttggttatgatcttaaggggtcggttgttgctcaggggaatccaatcctgggtgtccatatatatttgcattcagatgatgtttccatggtagattgtccccaaggatctggtgacgctgctggagaaaggaaatctctttgccatgctgtatccgatgcagaaggaattttcagtttcaagtccatcccttgtggaaaatacgaattggtgccgcat

SEQ ID NO: 104556 - DNA, 377 bp, Arabidopsis thaliana columbia
ccacgcgtccgccaacgcgtccgcccacgcgtccgcccacgcgtccggcggaaatatctgaaccaacgcgatgccgtcgacgcagtccttgaccgtcgcagcgaagacgctacgaaatcggatcttctctaggtctggatctacatccgccggtccgagtcggtgggcgacgccaggtcacgaggagcgacctaagggttactttatgaaccgtactcctccggcaccaggacagtcgcgaaaatgggaagattgggagcttccttgttacatcaccagcttccttacaattgttatcctcggcgttggactcaatgccaaacctgatctttcaatcgagacttgggctcatcagaaagctttagagcgtcttgaga

SEQ ID NO: 104557 - DNA, 446 bp, Arabidopsis thaliana columbia
ccacgcgtccggaactttctaggtaggagggactcctctgagcaaatgccgttttgtgggtgcgctattggtgctgttgatgggggtctttatgttattggtggactttctaggtctaaaacagtgagctgtgtttggcggtttgatccgattttgaactcttggagtgaagttagttctatgttggcgagtcgggcttattccaaaacaggtgtattgaataagaaactatatgttgttggaggggttgatcggggacggggaggtttatctcctcttcagtcagctgaggtttatgatccaagcacggatgcttggtcagaggttccgagcatgcctttctcaaaggcgcaagtgttgccaaatgcgtttttggctgacttactaaagcctattgccacaggaatgacttgctacaacggtaggttatgtgttcctcagagttt

SEQ ID NO: 104558 - DNA, 112 bp, Arabidopsis thaliana columbia
cgtggggtattgttgagtttcttgtaagttttgtaactaacttgtgaatgtgatttagagttaaaccagtttgtatctaactatccaaggaatttacatttttgctcgttct

SEQ ID NO: 104559 - DNA, 254 bp, Arabidopsis thaliana columbia
ccacgcgtccgccaacgcgtccgcagacgcgtgggatcaacagcaggaagcggctaagttatcatatagtcaatccgctaatacaatgtcatcattgatgccacctgcttcaattgaacccgtacatgagtggggtgggaacgggaggacaatggcagcacattctagaagtgtatcagagccagatttcagtaggacgccaatacaggatcagactgactcctcaaaagacaaagctcctgatggggtgacac

SEQ ID NO: 104560 - DNA, 396 bp, Arabidopsis thaliana columbia
cgcgtccgcacacgcgtccggctcatggtacggagccgtttgaagcggtggttatgatcgatgtgctacggcgaggcggagcggatgttacggtggcttccgttgagaatcaggtcggcgttgatgcttgccatggaatcaaaatggtcgctgatactcttctctctgatatcaccgactcggttttcgaccttattatgctccctggaggacttcctggtggtgagactcttaagaattgtaaacctttagagaagatggtgaagaagcaagacactgatggacgacttaacgctgctatctgttgtgcgccggcgttggcgtttggtacttggggactactagagggtaaaaaagtatgtgtgtagtgagtgatcagtatccaagaagttttct

SEQ ID NO: 104561 - DNA, 403 bp, Arabidopsis thaliana columbia
  unsure (1)..(403): unsure at all n locations
cacgcgtccggttttttcggacatgtacaatgggaccagatgccggcagatatggtagtaaattcgattcttgtatcaatggccgctcaagccggtaaacaagaagagattatttaccatgtgggttcttcacgtagaaatccgatgaaaaattcaaagtttcctgaattagcgtatcggtatttctcaatcaaaccgtggaccaacaaagaagggaaggtcgttaaggtcngggccattgagatcctgagttctatgcgtagtttccatagatacatgaccatacgctacttgattgcattgaaggtaaatagtatctaatgatatattaactagtgtttttatatggttcctaaatatctatatggttcatttcagggacttgaattggtaaacataatac

SEQ ID NO: 104562 - DNA, 373 bp, Arabidopsis thaliana columbia
ccacgcgtccggtaaaggagctcaagaacggaagattgggtttggctaccgacccagaggcattcgctgagttgaaggtgaaggagctcaagaacggaagattggctatgttctctatgtttggattcttcgttcaagccatcgtcactggtaagggaccgatagagaaccttgctgaccatttggccgatccagttaacaacaacgcatgggccttcgccaccaactttgttcccggaaagtgagccaagttttatctgtattttgcttcagtctttgcttcgtgagtgtgagaggagaaagagagcttgtttagatgtaaaatttgcaagactttgtatttttttcattaatcaaataactcgtttttctc

SEQ ID NO: 104563 - DNA, 416 bp, Arabidopsis thaliana columbia
gaaggtgtgaacctcttagctgtcatgtgtcacgaagatgtggatccaaagaggacaacaagcaatcacttgattgaaattattgaagttctcggaattgaggcagttcgtcgtgctttgcttgatgaactccgtgttgtgatatcctttgatggttcttatgtgaattaccgtcatcttgccatcttgtgtgatactatgacctatcgcggtcatctgatggctatcactcgacacggtatcaatagaaatgacactgggcctctgatgagatgctcttttgaagaaacagttgatattctgctagatgctgcggcttatgctgagacagactgcttacggggtgttactgagaatataatgttgggtcaacttgcaccaattgggacaggagattgtgagttgtatctgaatga

SEQ ID NO: 104564 - DNA, 218 bp, Arabidopsis thaliana columbia
aactagtaccttttgttcttgaaattagggttaatttctttttgtccaaatacgatcatttctcgagagcattgtgtctcaacttgatcagatgtttccgctggtaaggagatacccgtcttatgtttctgtgtgtctgtacatagataaacattacatatggatatgtgtgtatagacatacaaagtggaaattaaggtaacaaaaagaaatgggaa

SEQ ID NO: 104565 - DNA, 369 bp, Arabidopsis thaliana columbia
gcatctccttctcacttccatggcgattctcgtcgtctgaattaggttgtggaatcgaagtattgagaggggagattattgaaattaggggttttgaatagtgatggatggtaataaggatgatgcgtctcggtgtttgagaatcgccgaagacgccattgtttctggtgataaagaacgagcgttgaaattcatcaatatggcgaaacggcttaatccaagtctctctgttgatgaacttgttgctgcttgtgacaatctggattcagtttcgaggaattcttctgttagcgagaagcttaaaactatggacggtgatgatgataagcttgagactgggaaaatgaagtatactgaggaaaatgtgga

SEQ ID NO: 104566 - DNA, 421 bp, Arabidopsis thaliana columbia
  unsure (1)..(421): unsure at all n locations
gcataagaagactagtgtacaagaatttgtaaaggtatatgatacagttttgcaagatagatgtgaagaagaagccaaagctgattctgaaatgtggaacaagcagccagcaatgaagtctccatcgccatttgagaagagtgtttctgaagtctatactcctgcagttttcaaaaagttccagattgaagttttgggtgcgattgcgtgtagtcctagggaggagaaccgagatgccacatgttctacttttagagtgcaggattttgaaaacaaccaagacttcatggtaacatggaaccaaacaaaggctgaagtctcttgcatctgtcggttatttgagtataaagggtatctctgcagacacactcttaatgttcttcagtgttgtcatctttcttccatcncctcgcagtacata

SEQ ID NO: 104567 - DNA, 387 bp, Arabidopsis thaliana columbia
aaaaatctgatttcgcttttgaatcgccattggttgaacaatttgacgccgatctagatttctgtcgctgtgaaggtagtgtcctgtttttccgatcaattggtttgttccgatcgtttctcgtttacgctttttgttatccttgagaaattttacgttgcaagagagatctttgattcatgggtgttgaagcattcgtgttaaaatgtatgattgatcttaatcagtgagatcggtgagctcaagttctgtgttttgtaattgagattcgaagaggtatgtcaacaaagttatggagatgggtgttagggctgatatacctatttgccgttgccacgatttggattgcggctagttttgtagtccagtctgtggtggaagctggtg

SEQ ID NO: 104568 - DNA, 425 bp, Arabidopsis thaliana columbia
aaaattttgaatgtgaagttgcttctttcgtctcaagatctctctttatctctctatctgtttgattgacagtcaccatctaatgtggaggagatagatgataatccttcggtatcattagaggatgaatcagcacatgtgatgcagttcaagtggtctgattttaggattcttgatcgtgttagcattggtcatggcggcagggctgatgagcttgtgtttgaagctatagttcaggttccagataggtcagtttctacttcatatgtattacaagatttcaagatgaatttcagaggcttcatctgtggtgcttcaatttcacagccctttgtttaaccaaggagttgttcttcggaaattgaataccactcgagctcaaagacgaggaagaagagctatagaagttcgtcctcccttttaat

SEQ ID NO: 104569 - DNA, 437 bp, Arabidopsis thaliana columbia
caaattgtaaatttagggaagagactttcgcaagcaatctagaagcaaatcgatcgccaaatctccggattatttgcaagaatcgttcccagataatcttccccagattctccacttctccagctctgatcggagtgttgctcgaacagcttgaagaagacgacgaagatatggctacttcgaagaaaatgatcacacgtgaagaatgggagaagaaactaaatgctgtgaagcttaggaaagaagatatgaatactttggtgatgaattttcttgtgactgaaggatatgttgaagctgctgagaaattccaaagggagtctggaaccaaaccagagatagatcttgcgaccattactgatcgaatggctgttaaaaaggctgttcaaaacggaaatgtcgaggatgcgattgaaaaagttaatgatttgaatcct

SEQ ID NO: 104570 - DNA, 310 bp, Arabidopsis thaliana columbia
  unsure (1)..(310): unsure at all n locations
ccaacgcgtccgtcccttcatctcgtggagaaccaccaaagaaacctttggtgccatctggtcccaaaactctgtcaaacgagacgaagactgttgtccaagttagaacattccaagatttgcttaaggatgagtatgatgctgatttatttgactactacgcttcatcacaactagtattggcttctttggatggtactgtgaaggaagtangggttcctgcagtgtatacatcgttagacccttcgacagaccataagtacttgttggtgtcatcacttcacaggccatattccttcattgtaccttg

SEQ ID NO: 104571 - DNA, 297 bp, Arabidopsis thaliana columbia
acgcgtccggtatatgtagaatctccggtgaagccgaattcaaaccctaacacttttggttcatcagttcttcttgacgattcagtgttgttgcgcgtcttatttctacattttgctttctcgatttgagaatgtgctgattttagattagagaagtaagggttttatagatcgggaataaatggaggaaggtggatatgcgtttgaggttaacaatggaagaccaacggcgagtgagtttggtacgacggcgaggatttcgtcaccgtcattgactatgtcatcgtctttccgtga

SEQ ID NO: 104572 - DNA, 325 bp, Arabidopsis thaliana columbia
aacgaataagaaagtgatcaagaatgtgattaagctcttaacgatggtgattttgatgggcactgtggtgatttggatcatgatgccaacgtctacttacaagaagatttggttgaaatccatgcgtgccaagctcggcaaatcgatttattttgggaaaccaggagtaaaccttttggtttacatgttcccaatgattctactggcttctcttggatctatttaccttcacttgaagaaacaaacgagagtaaaccaatttaatagtagaatggataggaagaagatagacaagtttggtgcattgaaaagaccaatgttagtg

SEQ ID NO: 104573 - DNA, 294 bp, Arabidopsis thaliana columbia
tgtcaatggaattttaccccaagttgccctcatacatggagttagcgtctttcccaaggcatcggatccatggttttggctttacattatcttgtttctcggtgggtacgcgcaagatctatcagactttttattagaaggaggaacttatcggaaatggtggaacgatcaaagaatgtggatggtgagaggactctcttctttcttctttggttttacagagttcactctcaaaaccctaaacctctccactcaaggatataatgtcacgagtaaatccaacgacgataatga

SEQ ID NO: 104574 - DNA, 423 bp, Arabidopsis thaliana columbia
cggaagcgtgggcgggttcgaagccatctttttcctaaatccccaattttttttttttccctcgtttccgaatcttttaccggcgagactctgccatggattcaggcgaacaaaagtctaagcggaggttccaaccaaatcctccgaggccttctcgccgtcttccgatcgctccaacctcaaacaccgaagctgaggaggatgaagagaatataaaagcatctcgccaatttgacagacgtatcgtcggcaggagacccaaaaccgaaacgaaagcttcttctcctgaagttgcattccaaccaagcttgtcaccacttgcaataaggtcctttggtgttcctaaagaagatgacaagcccaattctgatgttaatccgtcttctcctgctagtattcttcctgctgtttcgtctgttactg

SEQ ID NO: 104575 - DNA, 356 bp, Arabidopsis thaliana columbia
caaaatcttgtcttttttttcttcttaaaaacaagatccaaatttctgaaaaatccattcactacaaagaaagaaatgctgtctacaactcttagtggtaactatggcttccctctgtgcatctctgggatcactcagcaattaagtctgtccaaagaaatggcagatcatgacaagagaaggaaggtgatacagaggagaaggagatcagaaggtaaacatgagtacaagagccatggtgaagaagatgtggagaggcttcaagagaatgaagatgttagagatctagttgctttactacaagatctaggcttgtggagcttttcttctcacacagccaaagctgcttagtgttt

SEQ ID NO: 104576 - DNA, 349 bp, Arabidopsis thaliana columbia
ttttcaacccttgcttaaaggtgtttcaatggctttctttaatccttttgggttttgagattgctgcttatttcaaaggttggagctttggaacttctaagcttcagcttcagtttatcttcaataaagggttctttgattgggtttacacgagatgggttttgcttcgtgttgagtatcttgctcctcctcttcagtttcttgctaatggctgcattgttctgtttcttgttcagagtcttgatagactcattctttgtcttggttgtttttggatccggtttaagaagattaaaccggttcctaaaccggattctatctctgatcttgaatctggtgataatggtgc

SEQ ID NO: 104577 - DNA, 231 bp, Arabidopsis thaliana columbia
gtcagcagataacaaagatggtgtcctattgtgcttatcacatggctcccaacccagataacgtgttaattatacaaactccttcatgagccttctctgcaaagagtcttgtccaacacaataagaaaggtggttccaagcttatttcattaatcacagaagacgatgaatcacctgctagagaataccattacatgtgatccattttctgctgctcattgtcgagtattt

SEQ ID NO: 104578 - DNA, 393 bp, Arabidopsis thaliana columbia
cacttttctttctagattaatcaaattctttgaaaccagtttctcacttcgcctctctcttcagatccgtcctctgtagctctagaacaatggggtttatctctaggaatgtgtttccggcatgcgagagtatgtgcatttgctgtcctgctctcaggtcgagatctcgtcagcctgtcaagcgttacaagaaattgctcggcgagatcttccctaaatcccctgatggtggaccaaatgagagaaagattgtcaaattgtgtgagtatgctgcaaagaacccaatccgtatccctaagattgctaagtttcttgaagagaggtgttacaaggaccttcgatctgaacagatgaagttcatcaatattgtcactgaagcttacaacaaaatgc

SEQ ID NO: 104579 - DNA, 332 bp, Arabidopsis thaliana columbia
caaacgcgtccggaatccagtactctctgctactgaaagtgaaatgatcgtagatgatgcggaacctcagtatgaaactgtatatagtcactgtgcagatgctgtggagaacagagagctggaaaagagttgtgaggttgatgagcagaaggagcagatgcaagccaccaattctatctcagtatctgagaacttttcacgtgaaaaattgaattcatctcctgcaaggggtactccaaattgcaactcagtatgccgaatttctaccgcagaaagtgaaaatgctatgcagaacaacagttattacagcaccaatgttcagtatggtgaga

SEQ ID NO: 104580 - DNA, 206 bp, Arabidopsis thaliana columbia
gtcaagaagtgagccatttgatgccctgagtgatatagaactgaaagaaagagaagaaggtgaaactttatatgcagaactagtatcaagaactagcgacattgctgtttctaaaaagctttgtgaggaccctcacgacattgattgtcatgtacatgacatccatgtagtgactgatgaagataacaaggggcaactgaatgttc

SEQ ID NO: 104581 - DNA, 383 bp, Arabidopsis thaliana columbia
ccagatccagatattttcctggctgctgcaaagatcttaggtgtgcctaccagcgagtgtgttgttattgaagatgcgcttgctggagtccaagccgcacaagctgcgaacaggatatgtatagccgtaaaaactactttatctgaagcaattcatactgatgctggtccttctatgagatgagacgatattgggaacatctcaatcagtgacattcacactggtggctcagattctaacagaaattccacagcaatgcttgaagagaacacagtcagcgataaaaccagcgcgaacgggtttcagggctctcgacgagatatactgaagtatgggagtcatggcattgctctttcttgtgtcgacttcgacgtcaccaactg

SEQ ID NO: 104582 - DNA, 358 bp, Arabidopsis thaliana columbia
cgcgtccgataatttatcattagacaatgaaagtgtgatgttctgtcctgtgaagcttgtattaccacattgtaactaaatgttttatcttcattatcagtttaatttagccacaaacccgagaacaaggagagcgagtcgaggataaattaaactgataatgagactcgaacatagacagaggcaatggtgatacgaagtggatcaaagacactaacaatttctactcacattattgtacctcaatcatttatcattagacaatgaaagtgtgatgttctgtcctgtgaagcttgtattaccacattgtaactaaatgttttatcttcattcatccaatccgtaacgtaattgaacg

SEQ ID NO: 104583 - DNA, 192 bp, Arabidopsis thaliana columbia
cccacgcgtccgaagaaacatatatatataaagcaaacatgtttcttagttcacaaagagaaaaggaaatagtactcttattagtaccatagtcaccgagcttaatttgagtactatttcctttgctctttgtgaactaagaaacatatatagataaagcaaacatgttccagagaaagggaaaaaccaaaa

SEQ ID NO: 104584 - DNA, 207 bp, Arabidopsis thaliana columbia
aatccgattctttatacgtataataccatcccttgtgatcaaacaagtaaaccattcagaagatgaaaggaagaattttgattttgagtttgctcatagtgactctggtcatggcagaagttcaagtagaagcagagatctgctgtccttccaatcaagctagaaatggctatagtgtaagccgtaaaaagttttccaatggaatgt

SEQ ID NO: 104585 - DNA, 355 bp, Arabidopsis thaliana columbia
atacaaaaatgcgtcagcttctcccaaatcaaacaactccaatctcacttcctcaccgccggccatttccaatcttcctttctccgttctcgtcttctcgaacgctgcgcaatctcaccattcggagacctttccttcgccgtacaaattttccggtacatccctaaacctttaaccaatgattggaacgcaatcatccgcggattcgccggaagttctcatccttcacttgcgttttcatggtatcgttccatgttgcagcaatcttcgtcatcgtcggctatatgtagagtcgatgctttgacttgttcttttactcttaaagcttgtgcacgtgcgctttgttcttccgcta

SEQ ID NO: 104586 - DNA, 403 bp, Arabidopsis thaliana columbia
atcacactttccctctctccccacttgcccactcctcgtcctcgatcgagagactcgcgacggttccggttcttctgctagaccgttgctccagtccggtttaatccagaaccagttgttctgccatggtggaaggaagaagaagaagaagattctcgctctcctctcaacagctagctctcctcttacttttactctccttcttcctctgcttctccgtcgcgtctcctcgagctatatctgattcggatctactggatgaaacagtcgccaactcctcctcttccgtcgcatctctcaacgcttcttcttcttcttctcttgttaagcctaaggaaggtagcttcgccgacatcatcgatcgtgctcttgaaaaagagttcaatgaaagcgaccagaatga

SEQ ID NO: 104587 - DNA, 419 bp, Arabidopsis thaliana columbia
  unsure (1)..(419): unsure at all n locations
cacgcgtcaagaaaagaaagaagaaataagtaaataaaaattcctcctttttctgggcaatgcttgtctaatgccaattcctaaattgggttctcttcatgggtgaatcttctctcaatccaacggcaagggagctcagaaaaatatccacgctggtagaaccaaaattgatgttaatgtggacttcactcacaagctttgtacttccttaatgtttcctgctttcanggacactaacagtcctctttctctaatgattgggaacctctgtatcaaacatccaaatttgtttggaggaagcgagaagcttgatgtatcatgggataaaggattgtatgattccaatgtacttgtggcttttaagagacctagacctgaatggcgtccacaacagtgtttcttcatacagcattctctct

SEQ ID NO: 104588 - DNA, 213 bp, Arabidopsis thaliana columbia
cgtgggcaaatttctactgtgtttcgttcttttctcccgtgatagaaatctgagatttgtaaattttcgtcttttagcagcttttccaatctgggtactgcaagttcctggtaaggggtgctcaagaaccttacatgcggtgatcctgatttagctcccaaagtttgcatacttttgatcaaattcttgggctccgagcttaactcaagtttg

SEQ ID NO: 104589 - DNA, 434 bp, Arabidopsis thaliana columbia
acggtcaaggattctgattgataacgatattcaagttcagcaatctcattgcagtagaaaatggaatcgaatcatcctcacttcaagctaattttgggatcttcttcgattgcgcgacgtgggatactaacagatatgggataccaattcactctcatgagtgctgatattgatgagaaaagcatccgcaaggagaaacctgaagagttggttttggctttagctgaggcaaaggctgaagcaatcatgcagcggatccctgatggtgaaaacatagaggaggataagtcgaccttacttattacttgtgaccaagtggttgtctatgaagatgctgttagagagaaaccctcgagtgtcgaagaagcaagggagtacataagaggctattccaaggggcatacagcaacagtgagttctgtggctgtgacaaa

SEQ ID NO: 104590 - DNA, 365 bp, Arabidopsis thaliana columbia
gaattgaaaccacacaaagaacagaaaataagaaagataataaaaggaggcaaacacgaagagctcacaacaagattcaagattcaagattcatgctttcagatttcaactaatcaggtaaaagaccactttacctgcaaaatgacgagatcgtgggtgcttttgtttgttcttatgttcattgtgttgacttctcagtttgagtggaatgaacaagttgagaatgaaagtgagactagtagtcgtcctctgattctttcagataaagagcaacaacatatccctcaaggcaaagaatctgtacaagtaaagaaaattctatttcaagaaaagaaaattcagaagttaaacgagctggtccgaga

SEQ ID NO: 104591 - DNA, 401 bp, Arabidopsis thaliana columbia
cccacgcgtccgttcaactgcaatctctctctgaaccatgagaggtcacgatcggattaacaattgtttgccggaggaacttatcctcgagatattccggcgacttgaatcgaaaccgaatcgcgacgcatgctccctcgtctgcaagcgatggttatctctcgagcgatttagccgcaccacgcttcgtatcggcgcttcgttttctcccgacgacttcatctccctcctatctcgtcgctttctctatattacctctatccatgtcgacgaacgtatctccgtctcccttccttccctctctccttccccaaaaagaaaacgtgggagggacagttcgtcgccatcgtcgagtaagcggaagaaattgactgataagacacattctggagctgagaacg

SEQ ID NO: 104592 - DNA, 325 bp, Arabidopsis thaliana columbia
gaaatgtttctgacataggggatgaagatgacgaggaagaggcgtcacggaaaagtagacttggacttaatagaaagagtaatgatgatgatgatgaagaatgtccggggggtggggatcttgacatggatgatgatgacattgagaatggggatgactgggagcacgaggaaattttcacggatgatgatgaagcagtcggtaatgatcctgaagaacgtgaagaccttctggctcctgaaattcctgctcctccagaaataaagcatgatgacgatgatgaagataatgaagaagacgagggatgtttgagcaaatctggtaa

SEQ ID NO: 104593 - DNA, 311 bp, Arabidopsis thaliana columbia
acgcgtacgcgaacgcgtgggcggacgcgtgggtagattttaaccaatttacaaaaatttcgagcaggaatcgaagaaaaggactatttgacccttttcttcatcctcctccctcatttcggccagcgcgaggtcttcattatttattagccgccgaagggaattcctccggcgccattttttataacttttgtgtttttatctttagagatgggaaccgaaattatcaggcctcaaaattgtttggttgaccggatgagagattctccggcgattttttttaactcacggaggaatcattttcaccggaa

SEQ ID NO: 104594 - DNA, 193 bp, Arabidopsis thaliana columbia
atgacgtgagctctcagctacaagcacaagctgctcagaggttcaagatgcctgacgttgcgtctatgatccccaacactgatggttctgaaccagccaccgttgcacagggggaggaagacgatgaagatgttgatgagactggtgttgaacgccaaggacattgatcttgtgatgactcaagccggtgtct

SEQ ID NO: 104595 - DNA, 378 bp, Arabidopsis thaliana columbia
ccacgcgaccgcaaacgcgtgggcggacgcgtgggctgaaacttttgccttgcttgcttgcccagaaagtcgccgagaaagttaaaagtagaacggcggagaaaaaaaaaacgaagaggaagaggagagatggagtcgcagaagaagatagctcatgagatcggaggtatgaagaacgatgctcttcgctttggtcttcacggcgttaagagcgatatccttagatctcatcctctcgaaacggcttacgaatctgggaagcaatcacaagaagaaatgaagaggagagtgatcacgcatacttatggagctgctcttcctttgaagatggatcttgatagacaaatcctttctcggtttcagagacctcctggacca

SEQ ID NO: 104596 - DNA, 335 bp, Arabidopsis thaliana columbia
gcacaaaccccaaaaattaacagaaaaccaaaagaaggcggcgcaaacaaaagataatgcaaccagagacctcagatcagatgttgtactcgtttcttgccggaaacgaagtcggcggtggagggtagggcgtctccggcgactacatgacgactatgcagagcttatgtgggtcttcgtcgtcgacgtcatcgtattacccactggcgatctccggcatcggagaaacgatggctcaagacagagctttagctgctttgaggaaccacaaagaagctgagagaagaaggagagagaggatcaattctcatctcaacaagcttcgtaacgtactc

SEQ ID NO: 104597 - DNA, 207 bp, Arabidopsis thaliana columbia
tttctctctctaatggcggcgacattaggcagagaccagtatgtgtacatggcgaagctcgccgagcaggcggagcgttacgaagagatggttcaattcatggaacagctcgttacaggcgctactccagcggaagagctcaccgttgaagagaggaatctcctctctgttgcttacaaaaacgtgatcggatctctacgcgccgcc

SEQ ID NO: 104598 - DNA, 351 bp, Arabidopsis thaliana columbia
cgaatctttaccggttaagactcaacggtaacagactcgcggggaatattccggcggagattgggaatctgaaaaatctcaacttcatcgatataagtgagaatcgtctcatcggaggcatgcgtccggagatctccggttgtacaagtctcgaattcgtcgatctacattcaaacggtttaaccggtggtttacccggtacacttccgaagagcttacaattcattgatttatccgataattcattaagcggttctctaccaaccggaatcggatcgttaaccgaactcacgaagctcaatctcgcgaagaatcgtttctccggcgaaatccctcgagagatatcttcct

SEQ ID NO: 104599 - DNA, 353 bp, Arabidopsis thaliana columbia
aagaagaaggatggttctccatgcttttgggaaaaggtaagagtttatgagagattgagattattacaaaaaatctaaactttttttttgtccattttttctcggagggattagtcttcttcatcgattttccggtggtttggattgtcaacttcatcttcttcttctctttctcctttcattttttttcttgtgtttcttcttttacgtgggtccttcaatctccatgaaggacccgaccattgcttaatcctaaacaaaactccaaaaatctaattcttttcgatctgttttatcttcaaataataatactctttgattgctaaaaccgattttgatcatcatcatgcact

SEQ ID NO: 104600 - DNA, 324 bp, Arabidopsis thaliana columbia
gcaggatttgaggtgattgatacttgtttcttattggtcttcataagtgtcaataggaatagagttgtttcacaccttatgttgcctcaaatgagtatgcgtagtgtccattatcagctactctatgcattcttacagcttcaataagagttgtttcatgatattaggcactcgatgctgatggaatggatatggaaattgacttgtcaaacctcgggaccgtaaataccatgtttgcagcattgttcagcaaactaggtgtgcctatcaagactactgtatctgctaatgttcttgaagaggctatgaatggaactgttacag

SEQ ID NO: 104601 - DNA, 185 bp, Arabidopsis thaliana columbia
ctaatctactgttcttgttttgaaaatcaggttcccttctttttgtaaattaattctcaatttaaatatcatgggatgatctttctcttgttttagtttttgttctcgtcttttttccttggagacaaattattataaagacatactactttgtactttcacatccaatgagtttgtgttatgtt

SEQ ID NO: 104602 - DNA, 386 bp, Arabidopsis thaliana columbia
  unsure (1)..(386): unsure at all n locations
ggatcgtagtggtcacgagatgaagaagacgttgacgtggtgggatctcatgtggtttggtatcggtgcagtcatcggctctgggatattcgttctcactggactcgaagcacggggcaggggggtccanccgtcgtgttgtcttacgttgtctctggtgtctccgccatgctctccgtcttttgttacaccgagttcgccgttgagattcccgtcgcaggcggttcttttgcctacttaagagtggagctcggcgacttcatggccttcatcgccgcgggaaacataatcctcgaatacgttgtcggtggagctgccgtggctcgatcgtggacctcttacttcgccactctcttaaaccataaacctgaagacttccgcatcat

SEQ ID NO: 104603 - DNA, 190 bp, Arabidopsis thaliana columbia
cttaaaccctttcattcaacaaatccctaatggaaaatcatctgatatcgtcgcgactcaggccatcacagaactcctcactagttcggggacttctgcaggaaagccgaagttgatgccttctacagctgaagaattggaaaggaagacatttttctacagcatgcttgtgcctatcatgaacaaatat

SEQ ID NO: 104604 - DNA, 374 bp, Arabidopsis thaliana columbia
  unsure (1)..(374): unsure at all n locations
gttaagattgagagagagcgaacaacanacaaaaaaagagagagcggagagaagaaaaaaaaccctagcgtgttgttcagtgactttggggggaaaatttctcgtagtttcttcgctgggtccgtcgtctcatctctttccatttgtggaattcaatggaagctttaggtttttggtgctgagaattctctgttttcgaatctagggtttgtagaggagatctattcaattgtagatacgcaagatcgaaacgagtcagaaaactaggagaaggagtcatgtcggattctgataaagagctcgagaatcagattattgaagctggggaaaagcttattgacccgccttcttcactcgatgagcttctctctttc

SEQ ID NO: 104605 - DNA, 264 bp, Arabidopsis thaliana columbia
actacccaaggaactgttattattgatgaagagagtgatgatgatattccttttgcaccaatgggacgaagtaggcaagggagacctgctggttctgtagccaataataataatcaagattacaatgatatagaagaagaaatgatcagagctgccattgagacctcaaagaaagaggctgagggatcaagtaaccctttacttgaagagaggccacttcacatggaagatgatgatgacatagcaatagctgttacaatgtca

SEQ ID NO: 104606 - DNA, 291 bp, Arabidopsis thaliana columbia
cagagcaaaactcaggcagatcccttcttggctcttcgaacctcaccaccacacacctattgcaaaccctaaccctaatttgagctcggcgtcttcctcttcaacaacaacagctcatcttgagccttccctaaccaaccagagatccaaaaccactccttttccttctgcccggtttgatcttttggacagtactactagctatggaggtttgatgatggacagagagaagaacaagagcaatgtatgtagcagagagatcaagaaaagtgccatcgatgcatgtcattc

SEQ ID NO: 104607 - DNA, 341 bp, Arabidopsis thaliana columbia
  unsure (1)..(341): unsure at all n locations
ccctttttctcactttaagatctttcttgttcttagcccatgacaagtcaccaaaatatcaagatttcagaaaaaattatgatgggggtggggggggaanatgtcaagcagccacgagcttgcgaactttgtctgaacaaacacgcagtttggtactgtgcctccgatgatgctttcttgtgccatgtttgtgatgaatcagtgcattctgcaaaccatgtagcgacaaaacacgagagagtttgtcttagaacaaacgagatatcgaatgatgtgcgtgggggaacaacattaacctcggtttggcacagcgggtttcgaagaaaagcaagaactcctag

SEQ ID NO: 104608 - DNA, 405 bp, Arabidopsis thaliana columbia
cgcgtccggatatttttagggatgttatgaatctcaactcatccgtggagtgagagacttgggagagtgaggatgtggatgggatttggctaatgtaatatccgtcaatgatgtttgttgctgacatagcttattctcttcaattcacaggctccggagggttatggtactcagcatgatccaaatcatcggtttggcgtatcatatgatgacggatatcctgatgaaaggttgatgcgggatgatgtctacaactatccacctggacataatactctgggtgacttgcctcaatctagaaagcgaaactatgaagaaaattatcccagtgaacttcgcacgcaagaaaagccttacatcgattcagattatgctgctgactattatcatgatagtgaagctggg

SEQ ID NO: 104609 - DNA, 189 bp, Arabidopsis thaliana columbia
gcgaaattctctgatgtctcttcattttattttccctctacatctctcccaacgatttccaaatctcagttcactttggctcatccacctgaatccatggagattgcttcgtcatctctctcacatgctcacaaggtcattctcacgcgtcaaccttcgtcccgggtcatcacctgcgcccttggctcg

SEQ ID NO: 104610 - DNA, 313 bp, Arabidopsis thaliana columbia
tggagcaacactatcagaagccgatactgttgctgttcatgatatgaatgacaaaggtcaagtagtccaagatatttcgtccacatcagatgagaaaaaagtaacaacaaatgtgcactgggaagggaaaatgtcgaaagacttggttacattcgcggaaggataccaaatgactctgttacccggaggtatgtacatgggatgtccttgctacgtatcaaagtgtgttgctgatttaaagtctttccacttagaattctgctggcttgaatcgccgagctcaagacaaagactcatccgcacatatgaccat

SEQ ID NO: 104611 - DNA, 323 bp, Arabidopsis thaliana columbia
ataattttgaaggaagatatgatttagtgaaatttgtgaagcttgcggctaaagctggtctctatgttcatttaagaattggtccttacgtctgtgctgaatggaattacggtggtttcccagtgtggttgcattttgttccaggaattaagtttcgaactgataatgagccatttaaggaagaaatgcagagatttaccacaaagattgttgatttgatgaagcaagaaaagctttatgcatcacaaggaggtccaatcattctctcgcagattgagaatgaatatggaaatattgactcagcttatggtgcggctgctaaa

SEQ ID NO: 104612 - DNA, 264 bp, Arabidopsis thaliana columbia
gttagtgtttttatttgtcttggttctacaaagatcaattatgctgttgttgaactggatcgagtgatggaagctagaattgatgacagtggggaggctcaacaattctatgggtcagtacgtaaaagatgtgtggactggaatttgcatgattggcaacgggatggtgatctcattctcgccacccagactaccacgggacgtcagtttatccctctatgaaactcgtccaatatctcctcatcctgctctgatgaaggcaat

SEQ ID NO: 104613 - DNA, 312 bp, Arabidopsis thaliana columbia
aaaaaacatacctgggtttgatcctgcctctgattcgcggacatcggcacctgtcgtccttgttagtgatgagtgttgagatgaaccacatcgtcagcacttgcagagctcgttgcaggcatttgtagactcgcttccagaaactaccaagcttgggattatactgtatggtcgtactgtttcaatatatgatttctctgaagattcagttgcttctgcggatgttatttctggtgcagtatcaccatctgcagagtcgatgagagcgctgatttatgggaccggtgtatacttgtcaccaatgcatgcatc

SEQ ID NO: 104614 - DNA, 257 bp, Arabidopsis thaliana columbia
cgaagacgaaagggtaaacacgccgccgttgattcagccggagaatcaatggaaagtgaagcaattcaagaggatcttcagaatttagacgtcgagttaaaggatgttcaaggtcagataagtgctttgattgagcatcaagataggttatacgagagaaagtctgagttaaagacattgttaaaagcattagcagcatcaggaagtcctgttgcatcatctggtggctctagtgctatagagaattggtctgagac

SEQ ID NO: 104615 - DNA, 434 bp, Arabidopsis thaliana columbia
aaaaaatggagggaggaataatacatggaggagcagatgaatcagctttcaaagaatgtttctctctaacatggaagaatccttatgttcttcgtcttgctttctctgccggaatcggtggtcttctctttggttacgacaccggagtgatatcaggtgctctgctttatatcagagatgatttcaagtctgttgacagaaatacttggttacaggagatgatagtgagcatggcagttgcaggagccatcgttggagccgccataggaggttgggcgaacgacaaattagggaggagaagcgcgattctcatggcggatttcctctttttattaggagctatcattatggcggctgctcctaacccgtccctccttgtcgttggccgtgtttttgtgggcctcggggtcgggatggcctcgatgaccgctcct

SEQ ID NO: 104616 - DNA, 361 bp, Arabidopsis thaliana columbia
gtcaatttctttgtttggttgttctttcttcgcatccaaagatgaagctcgtcaggtttttgatgaagttaaacaatgaaactgtgtctatcgagctgaagaatgggactgtggtccatggaaccatcactggtgttgatgtgagcatgaacactcacttgaagacagtgaagatgagcctgaaggggaaaaacccagtaacacttgatcatcttagcttgaggggtaataatattcgctactacattcttcctgatagcttgaacctcgagactttacttgtggaagacactcctagagttaaacctaagaagcctgttgctgggaaagctgttggacgcggtcgcggacgtggccgtgg

SEQ ID NO: 104617 - DNA, 424 bp, Arabidopsis thaliana columbia
  unsure (1)..(424): unsure at all n locations
cccacgcgtccgggaatctcttaatgaagagcacataataggctgtggaggctttggcacagtgtacaagctgtctatggacgatggcaatgtttttgcgctgaaaagaattgttaagttaaatgaaggttttgatcggttttttgaaagggagcttgagattcttgggagcatcaaacatcgttaccttgtgaatctacgtggatactgcaattcacccacatcaaagcttctgctatatgattaccttcctggtggtagccttgatgaagctctacataagagaggcgagcagctggattgggattcgcgagttaatatcataatangagcggcaaaagggttggcatacttgcatcatgattgttctcctaagattatacaccgtgatatanaatcaagcaacatcttactggatggaaat

SEQ ID NO: 104618 - DNA, 396 bp, Arabidopsis thaliana columbia
cggacgcgtgggtgaaattcggtaaccttcttgatgcttggcatcctagtgatgtgtctgtccacactatcctttccccttggaagactgtttttgatgctgcaagctgggagcagcttatgcgtcgttacatagttcctaaattacaggtggccttgcaagagttccagataaacccagcagatcagaacttagacgagttcaatttggttatggggtgggtatcttcagtacccattcatctaatgactgatttgatggagagattctttttccccaagtggctggatgttttatatcactggttgtgttcagaaccaaagttcgatgagataatgaaatggtttttgggttggaaaggaacattcccacaggagctttctgcaaacaggagga

SEQ ID NO: 104619 - DNA, 394 bp, Arabidopsis thaliana columbia
ttaagtttgtgttcttgggatcatcaagagttaaaacaaaaaaaaaaaaacatttcttttttccttcttcaatttgagatttagtgtctcctttaacacccacaaagccagcagatgctttcctgatgactccttgtttgatctgatcataagaagaagaagactatggccacttattacaaaactggctcaagtgagatttattccagaccagaatttgtccctggaaacgcaatgaactacacaaattctttcacagagacatttcctagagattcaactaataatgtgtcaccttcaaaagagattcaagtgttgtcaagccttggtggagtttcacaaatggttgagattcaagattctggttcttggagagatcaagaagacaatgaca

SEQ ID NO: 104620 - DNA, 348 bp, Arabidopsis thaliana columbia
gcaacttcgtttgcagaagcgaaatgtttgtctctaggagtctctcgagacactgctggaggacttgtaaatggtctttattttctctcctccaatccgattcctgtgttaggagatctggtttcgtcatcgaatccggttacgagcattggtaactcaagtgaaggtaattcgaattcgtttcagccgttgatgaatcaagtgtttaaaggatggtctcgaggtatgtcaacatcgagaggaatgagtatgaggagcaaagttgagagtagaatgcgtaaagagtctggtaagacgttaagagagattatgagagcgaagaagttgaagaagaaactcatgactgat

SEQ ID NO: 104621 - DNA, 256 bp, Arabidopsis thaliana columbia
acggacgcgtgggctcgaaaggaaaaaaggggtctccttcaaacattctgcagaggttgctggtatggacaaacaagaagatgaaaacaatgatggggaggctcttgcagattttgagaaaattatgactgtagaaaggagcacagttgttgatgatagtggtgatggtacaagtgaaggagatggagctaaagagctaaatgatactcagtgtaatgggaatacgttgcaccaacaaaactccaaactctctttg

SEQ ID NO: 104622 - DNA, 334 bp, Arabidopsis thaliana columbia
ttttgatttggggagacttttgtttgcgttttcttagattttgaaactccctttttccagattcactacttcgattttgaatttttatccaaaagttctctctctttaatttccaaattgcgtttcgattttatgtttgttttttttgtgcaaatcgaaaaaaccctcttttagatctgatttttgaggttcttgattttccaaaaacttgtaattcagaatcatagtttcaattgatttcttttatatcgctaatctaagaaaaaaaccgtcttttgtcttaaggtttctaatttcaatcttgtattcctcttcaaaaattatacatatttgt

SEQ ID NO: 104623 - DNA, 320 bp, Arabidopsis thaliana columbia
gaaagctcttcaagaattagggtttcgttttgaatcttctctgattcccaaatccaaagatatgaagagatcttcagggagaaaggattcaaatttcatagaacaattgatactttacgtcgctagtgctgcattgagtagcttggttctctacgttggtctccgtcaacttgacccgaaccgtgacgccgctaaaaagtctctcgagcacaaaagagaaatcgccaaacgtttgggtcgtcctcttattcaaaccaatcaatacgaggatgtgattgcgtgtgatgtaataaacccattacacatagatgttgaatttg

SEQ ID NO: 104624 - DNA, 309 bp, Arabidopsis thaliana columbia
  unsure (1)..(309): unsure at all n locations
cccacgcatccgcccacgcgtccggagcctttcagacttcacccgaatcatatttcttagttctcctccagtggatgaggctaaagttcgccagaaccaaagcccatacttgagcgaggtaatccgcacaaacgacctctgcaagacttattcagatgcttgtgtagagctgtgccaagaactcggcctagaagtagttgatctcttctctacttttcagaaagcagatgactggaaaactgtttgcttcacagacgggattcatttgtcagcacaaggaagcanaatagtagcgggagagatactaag

SEQ ID NO: 104625 - DNA, 414 bp, Arabidopsis thaliana columbia
  unsure (1)..(414): unsure at all n locations
gaaaaattcgataaacctcgattgatcccaaattcccaatggaggtttctgttctcacctaatttagctccatatccctcgcagtccgattcaagtgagattcttctaagttttttggaagaataatggtgttgccgttgatgaaactgggcacactcgccgtcaaaaccataagtaaaccattggctagtcagctcaagcaccaagctaaggttcatcccaagtttcgtcaatctatcatcaacttcgctcagaggaatcatcgaatcactacgcaaatgcaaagaaggatatatggtcatgccactgatgtagagattcgtcncttagatgaggaaaaggctgttcaagctgctgttgacctcattggagagatcnttctctttggggtcggtggagctgttgttgtttttg

SEQ ID NO: 104626 - DNA, 366 bp, Arabidopsis thaliana columbia
  unsure (1)..(366): unsure at all n locations
ctcgacaaagattctaactttgagagagatttttcggttgtagatgcagattcagagcgtatcatctctcgagaaaggatcaatgtctcatgaaataagctagactctgtttctgttttcttcttcttcgatctcaatttcttcttcttcgagctaggggttgtttatgtttgggaaaggaatgggcactaggcagtattcactgggagaagtagggccaccaataaatccgagagctggattgcgaagggaacaagctggtagaggttcatacagaggtagttagtagattcgtagctcatctgtaggcaaanaaggtttccttttaggtggcaagactgtttattttcagacacagagactgat

SEQ ID NO: 104627 - DNA, 137 bp, Arabidopsis thaliana columbia
cttaaatcgtggtggatacttaatcatggtcgatcaagtctccggcgagaacctggtcggagttaataaattcgatcttcaacgtgctaccgtcgtgtctatcgtctccatcatctttggttacgatactggtgtta

SEQ ID NO: 104628 - DNA, 117 bp, Arabidopsis thaliana columbia
gaccgatgcataaagtcatccactcatcttgcgtgtgatactctagtgacggctccatctatctcactccctctctgcttccttcaatcaaattgcaattcaactggatcgtcataa

SEQ ID NO: 104629 - DNA, 387 bp, Arabidopsis thaliana columbia
tcttagtccttttttgttcaatttcttgtctttttgcttgttcctttccaattttgacttcttaagagagaggctatgtgcattttctttatgggtttggttagatttctaggtttgagtagctcaaatctaatatttggtataagctttgtgtttctggtttgttttgattactttgattcaggtcttgaaatgattcttctcgaacttctttttttcttgtttaagcagcaaaagttatggtttatacaagagttttgagtttaaaattctctgccttttcaggtgaataaagcggaggtcagaagatgggttctggtttaaatgacacattatctcggaactacaatggtttggagctatgggagataatagtgattgttctct

SEQ ID NO: 104630 - DNA, 343 bp, Arabidopsis thaliana columbia
cccacgcgtccggtccatcaactaccccaactgcagaagctggacagtccctctttctctaagagttcggcttcgttcccaaagatggtgttcgattcgaggagttcgatgagccctggaacggatgccgaagactggacgtgggagaccgtagcggccaagagcaagagtagtgaaagtgggactgtccatcaactaccccaactgcagaagctggcaccttggtgttgagacctctaacatcataaacttcgacacggtgcccgcaaattgcaaagcctatgttgaagactacttgatcacttccaaacagtaccaatacgactccaaaactgtaaacaaa

SEQ ID NO: 104631 - DNA, 104 bp, Arabidopsis thaliana columbia
ctagtggcttgtcgtgtcatggcttggtccattttcaaattctactttgaccttttcgagtgtttcactaaatgagttaatgcaacatctatgaacttttcaat

SEQ ID NO: 104632 - DNA, 363 bp, Arabidopsis thaliana columbia
acgcgtcagctcatctcttcttttcttcatcgtctttccaaccttcacgttttcctccaccttattgtttcagagtttcaattgggagtcatggaagaaagaaggaggattctacaattctctccacaactccattgacgacatagccaacgctggaatcactcatctttggcttcctcctccttctcaatccgttgctcctgaaggttacttaccgggaaagctatacgatctaaacagctccaaatacggttcagaggcggaactgaaatcgttaatcaaagcgttgaatcaaaaaggaataaaagctttggctgatatagtgattaaccacagaacagctgagaagaaagacgataaatg

SEQ ID NO: 104633 - DNA, 343 bp, Arabidopsis thaliana columbia
agaaaagcaactggggcttacagtcatagccagggtatcaagggtttacgtgatgtaattgcagctggaatcgaagcacgtgatggtttccctgctgatccaaatgatattttcttgactgatggtgcaagtccagcggttcacatgatgatgcaacttctcttgagctcagagaaagatggtattctttccccgattcctcagtatccattgtactcggcttcaattgcccttcatggtggatctttggttccgtactatcttgatgaagcaacaggatggggactggaaatatctgaccttaagaagcaactagaggaagctaggtccaagggcatctctg

SEQ ID NO: 104634 - DNA, 389 bp, Arabidopsis thaliana columbia
ccttgaaagacttggtattggatggaaactgtagaagcggggcatgatgatgttattggttggttcgagcatgtgtcggaaaatgcctgcaaggtccaaagcgagacgctacgaaggattcttgagctcaactccggagtggagtatctgaggaaatggcttgggactgttgatgtagaaaagatggacgattatactttggaaactctctttacttccttggtgcctattgtttcacatgctgatttagatccttatattcaaagaattgcagatggagagacttctccattacttacacaagaacccatcactgttctgtccctcagctctggaacaacagaagggagacaaaagtatgttccgtttactcgccatagcgcgcaaac

SEQ ID NO: 104635 - DNA, 233 bp, Arabidopsis thaliana columbia
ggattacctcccgttcttgaagcttccactgcgttttaccatcttttatcattcgttgattcgtctctccatagtcatttagtagaactcggagttgaacctcagtactttgggcttcgctggttacgagttttgtttggaagagagtttttgcttcaggatttattgatagtgtgggatgagatattctcagcagataacacgacgagaacagatgcggataacaatacaaa

SEQ ID NO: 104636 - DNA, 162 bp, Arabidopsis thaliana columbia
gcgataagatgataagactaaaagaaggaaaaagaaaaatactatagtagcatcttaattaattaatgcataaataaggaccaaaggaataagtagttgggctttaattaccgctgtactttgtaatataactaaacctataatatattgtgttcttgcgcc

SEQ ID NO: 104637 - DNA, 313 bp, Arabidopsis thaliana columbia
cccacgcgtccgcgaagttagatctacaggctataagtcgacgagacaacacaaacaagcttatgataaaatcaaactacatttggaagctgaacaggccaagagtagcaaagaagcctgcaaaaccacgcaagatgcagagcacatggctattcgctatctcggtttaagagcatattcagcagctgacctgaagaagaagctcataggaaagaaatatcctattgaagtcgttgacaaagtgatcgatgatttccagattcgaggttttgtcaatgatagcttgtacgcggagtcattcactcgatctaga

SEQ ID NO: 104638 - DNA, 346 bp, Arabidopsis thaliana columbia
gagataactggattgactaaggaagatttgaaggatggtatgccacttgagcatgtacgagagagagttttttcgttcttgtgcggtggacagaatgatggggctggaaggcttcttcttgttggtcatgaccttaggcatgatatgagttgcttgaagcttgaataccctagccatttgttgaggtaactaactgacccgtttttgttgactctttgcttgaaatctaatgtaattgctatgcttcacctcagagacacagcaaaatacgtgccgttgatgaagacaaatcttgtaagccaatcgctcaagtacctcacaaagtcatatctcggatacaagatcc

SEQ ID NO: 104639 - DNA, 353 bp, Arabidopsis thaliana columbia
cggacgcgtggggtaattcactacacacacacaaaaaataaattgagtgcctcccccaaaaacaaaattggtagataacgagcaattgttttttttcagatttgatcctgaatttttacatttttttttttgcaatctccccctaatctgttgtttctcgcttcttcttctgttaatcatctgtctttcaaaaagaaagaaaaaagaaaaattcgatttctgggtttgtttttgtcatacagaaaaaaatcaagcttatgaatttgtgtttaattttttgttttaatttgaaaggcaggttttttcagaacgagatcgttttttcaaatttcttctgattttacctctttttt

SEQ ID NO: 104640 - DNA, 318 bp, Arabidopsis thaliana columbia
gctactgatacttctgcaacttctgtccttaaactctctgtctctgaaacattcttcagccaaaccaaatggaaagatcactgtaatgggtcttgtttactgcgacgtctgctccaacaacagtttctccaatcacagctatttcattcccggtgtggaagtgagaataatctgcagattcaattcagcttcatcgacaactacagagatgattacgttctctgcaaatcgaaccacaaatgagcttggactctacaagctagacataacgtctctggaaggcgttgcttgcgccgctgaagcaaacaaagattctct

SEQ ID NO: 104641 - DNA, 359 bp, Arabidopsis thaliana columbia
cccacgcgtccgcggacgcgtggggtattcgtagcggttctaacatgtacagtggtgttccaagtaatcataatcgagctgctgggtacatttgcggatacaacaccattaaatttgggacaatggttggttagcatcatactcgggttccttggcatgcctgttgctgctgccttgaagatgatccctgttggttcacactaagcaacacattgtataatgtgattccttgtgccacaactttggcattgaaaggtaccaattttttctccggcctttggaagtttgatatcccaagatggccttggactagttacggtgcttttttatgttttcattttggccaaatgtataagtga

SEQ ID NO: 104642 - DNA, 295 bp, Arabidopsis thaliana columbia
tggagtgttgcatttgcaaagatgtttacaaatgggatgagtgaaagccagtcatcaatgatctacctaaccgatgtaacaccagaagcattcaaggctatgatgaatttcatgtacactggagagttgaacatggaagacactgtgaattttggcaccgagttgattcatcttctctttctagctgaccggtttggagttgttccacttcatcaagaatgctgcaaaatgctcttggagtgcctcacagaaggatggcgttccgttttggcagaaggattctgtatgctcagtt

SEQ ID NO: 104643 - DNA, 252 bp, Arabidopsis thaliana columbia
gacccacgccccagcttcaaggtaaattggagatttcttccatcttttgttttcttctgtagattaatttcccaacgtcctgttcatgttctgtgtaatacattgttgctagcttttactttgttttctgtgagattaattcgtgttgagttcaaacttggacaagaaaagtggatacatattgtctcgtgggttgatcccaatgatggaaatgataatatatacatacacagacacacacacaatgcatca

SEQ ID NO: 104644 - DNA, 310 bp, Arabidopsis thaliana columbia
ccatcactcgaagacgttttcgcacaatgcgtcaccgattttaaaccttcaaatccaaaatccccaatccaaaactacatatacactcaacgaagcccgaatttcctcacaatccttaacaactacgtccgtaaccttcgttacgtcaacaacatgacacgtaaacccgtagcgattgtaactgccgcggatgtcactcacatccaggctacaatgacttgtgccaagaaactcgggctccagctccggatccgcagtggaggacatgactacgacggtatgtcgtatttatcaaccattgatttcgttg

SEQ ID NO: 104645 - DNA, 162 bp, Arabidopsis thaliana columbia
tccgcctaacactaaactttctctttgcggctcttaaacattttcttagctttttctatcttcgtgtgataatggctggtaaaagataacgtcctgcgatcagtatcgatcttggcaccacgtagtcgtgcgtccgagtgtggcaacacgaccgtgttgaga

SEQ ID NO: 104646 - DNA, 351 bp, Arabidopsis thaliana columbia
tttcacttttaacaaactataatttgaaattatttcaaattacgttttagggaaaattaatctttaatcatggcaaagatctcctttgcgcttgtcgttgtcgctcttattgtctttcaacaagtatctgaggctcatcgtccgatagatttcaacgaagaagtacttgaaaaggacttgcatgaagccaaggacttgatagaagaagacttgagagagaaagaaacgagcatcaggaacttggaaagcgaggttagtttgttaaccaaatctgagatgatgcttactcagctcgaacttgcttacaaaaatggtagaaatcttgagcatttcgggaaaaaactcaagaaa

SEQ ID NO: 104647 - DNA, 161 bp, Arabidopsis thaliana columbia
cccaagcgtctgcctagtctcctgtcttgtctaaagagaagagatagaggcatatgtggagacctctgaggaaagctctgatttggatgttatacataaacatctaattgtagacgtgaggatcactgatggtttcatcgatgattttgtcgctgatgaca

SEQ ID NO: 104648 - DNA, 257 bp, Arabidopsis thaliana columbia
ctaaacacgaactttttcttccttgaagtcgccggcgagacaaacaaaaacaacataatcccgacggttacacgtaccggagaattgtatttaaattgaagccgctttgtattttcctcacagccaaagatttttccttactaggattttcattttctcgtctgttttcgtttcaaattcagaaaatcttccgtttcaatccggtttatatcggtttttaacaatgtcgatggtaactgtcaaagttagcaacgttt

SEQ ID NO: 104649 - DNA, 452 bp, Arabidopsis thaliana columbia
cttcaaaaccgatcaaatccatggctaactcttccgctggctccgccgcagaccaccgcaacaaacacctctccgtcaatccaccgcaccagatcttcaaagatatccaaggttctgacaatgcgattcctctttcaccacagtggcttctctccaaaccaggggagaacaagactgggatgggaactggggatcctaatcagtatggaaaccattcggatgttgtgagaacaacagggaatggggaggagacactggataatctgaagaaaaaagatgttttccggccatccttgcttgatgcagaaagtggtcgtcgtgatcgttggcgtgatgaggaaagggacaccttgtcctcagtccgaaatgaccgctggcggaatggcgacaaagactctggtgataataagaaggttgaccggtgggataatgtggctcctaaatttggggaa

SEQ ID NO: 104650 - DNA, 174 bp, Arabidopsis thaliana columbia
  unsure (1)..(174): unsure at all n locations
gatccggtgctgcacctccggctggagtcgctgaattcaccttaaacggagctaatggtctcgatttctacgacgtcagtctcgtcgacggttacaacatcccgatgaccatcgtccctcagggtggangagatgccggaggcgtcgccggaaactgtacgacaaccggctgcg

SEQ ID NO: 104651 - DNA, 415 bp, Arabidopsis thaliana columbia
gaaaaccttcgtgctctttcttcgccgccaagttatatcgacggtgttttcgtatcgacgtcttctcctctctctctctctcgccgtcatcacctctttgaatgaacggcggacgcgggaaaaggcctaactcagcagaggaggaaggaaccatggctgaaccctctgtaaagaagagcaagttgacggaatccgattggataagtggtttagcagatgatttgctacttcagatcctctcgaaagtccctacgagggaatccgttttcacaagccgtatgtcaaagcgatggagaaatctctggagacacgttcctgccttggacttggactccagtaaattccctcatgagtcggacttggaagatttctttgatagctttctgcagtttgatggtaatcttaagatagagag

SEQ ID NO: 104652 - DNA, 364 bp, Arabidopsis thaliana columbia
agcaaaaaaaactcactccctagaaaagtttgaaaatggcgaaggcagataagaaaccagcggagaagaaaccggcagagaaaactccggcagccgaaccagcagcagcggcagagaagaaaccaaaagccggaaagaaactcccgaaggaaccagccggcgccggagacaagaagaagaagagatcaaagaagaacgttgagacatacaagatctacatcttcaaggtgttgaagcaagttcatccagatatcggaatctccagcaaagccatgggaatcatgaacagtttcatcaatgatatctttgagaaacttgctggtgagtcttcgaagcttgcgaggtacaacaagaagccgacgat

SEQ ID NO: 104653 - DNA, 283 bp, Arabidopsis thaliana columbia
  unsure (1)..(283): unsure at all n locations
cgatgggagagatagcaacagagttcacgccggttatggatgatgatgatgaccggtgcgttgtaccggaggtagagctcactgtacccaagaccgacgattcaactttaccggttttaacatttcggatgtgggttcttggtatangcgcgtgcattgtactctcctttatcaaccagtttttctggtacagaacgatgccgttgagtatcaccggaatctccgctcagatcgccgtcgtgccgcttggtcatctcatggcgagagtgcttccgacaaaaag

SEQ ID NO: 104654 - DNA, 439 bp, Arabidopsis thaliana columbia
cccaagcgtccgcttccggaaaagagctgtgaagagtataggtccatggaagactggtttgagtggacaattgcagaaagcttttgttactggtgtacctaagctaaaccggtctgaactagaaacagcctgtgaagatttcagtaatatcattgaagcatttgatggttacactgtctataaaggaactttgtccagtggcgttgagattgcggttgcttcaaccgccattttggaaactagggaatggacaagagctatggaaatgacttaccgcagaaggattgatacaatgtcaagagtcaaccataagaactttattaatctgattggttattgcgaagaagatgaaccgtttaataggatgatggttttcgaatatgctccaaatggaactcttttcgaacatttgcatgataaggaaatggagcatcttgat

SEQ ID NO: 104655 - DNA, 383 bp, Arabidopsis thaliana columbia
gacgatttgaaagagaatgagattgattcagctggagatggtgatgttttggtgattctggatctacgagcagatgattctttggttgaagcaggttttgcccgtgagattgtaaacaggatccagaaactaaggaaaaagtcaggtctggaaccaacagactttgtggaagtgtacttccaatcattggacgaggatgaatctgtttctaaacaagttctagtctctcaggaacaaaacatcaaggattcaattggctccactttacttttgtctagtttaatgccatcacatgcagtcataatagccgatgagacattcaccccaaaagaaacatccgatgagagtgtcaaaaaggttccaaagttgtcgtataagataag

SEQ ID NO: 104656 - DNA, 454 bp, Arabidopsis thaliana columbia
tctaaacaacaccatcaccaccaccaccggttcgcaagatccgaatctcgacccaattccagacccggatcaatttcccaaccggaaccgcaaccaaccacaatctcgccgccctcgcggattcgccgctgcagcagcagcagcgtcgatagctccaacggaaaacgatgtaaacaacggaaacatcgccggaatcggcggtggagaaggaagcagcggcggcggaggatgtggaggagggaaagggaagagagagagggagaaggaaaaagagagaacgaagcttagagaaagacatagacgagcaatcactagtagaatgctcgccggattaagacagtacggtaattttccgttaccggcgcgtgctgatatgaatgacgtaatcgctgctttggctcgtgaagctggttggagtgttgaagccgatggtactacttatcggcaatcacag

SEQ ID NO: 104657 - DNA, 210 bp, Arabidopsis thaliana columbia
cgtccgcggcagcgtgggcggacgagtgggcggacgcgtgggcggacgcgtgggcggacgcgtgggcggacgcgtgggtcttcgtcaaaggttgttctgtggactagatgggatctactgtatgtttctagggagattgaataatctctgtacattgaatcgacaatacggtttatctgggaagaactcaaacgaggcaatgtttgtgat

SEQ ID NO: 104658 - DNA, 448 bp, Arabidopsis thaliana columbia
ttaaatcgaagctacattatcaaatcacaatggcgaaaaagctctgtttcattgttatgctatcaatatgtctcctaatttttgactttgcgggtgctcaggaggaatctccttcacctgctgctgtctcgccaggacgtgaaccttcaacggattctcctttgtcaccgtcttcatcaccggaagaagattctcctttgtcaccgtcttcatcaccggaagaagattctcctctcccaccatcttcatcaccggaagaagattctcctctggcaccgtcttcatcaccggaagtagattctcctctggcaccgtcttcttcaccagaagtagattcccctcagccaccgtcttcttcaccagaagcagattctcctctgccaccgtcttcttcaccagaagcgaattcccctcagtcaccggcttcatcaccgaaacctgaatccct

SEQ ID NO: 104659 - DNA, 414 bp, Arabidopsis thaliana columbia
gtcatgactgctccagttcgacctgacgtctggtaaagtgacggtggtggattgatcggtgctcatgtcaccgtcaagtccttggacggtgacaagaggtcgtgcggcggctgaggcaaccatcactttaccagacgtcatgactgctccagttcgacctgacattgtcaacttcgtccacgcccaaatctccaacaacagccgtcagccttacgcagtctccaaaaaggccggtcaccaaacctccgccgagtcctggggaaccggaagagccgtgtcacgtatccctcgtgttcctggtggtggaactcaccgtgccggtcaagcagcgttcggaaacatgtgtcgtggtggtcgtatgtttgctccgactaagatctggagacgctggcaccgtcgtgtcaatgtcaacat

SEQ ID NO: 104660 - DNA, 453 bp, Arabidopsis thaliana columbia
tcgacccaggcctccgccgcagttgacgttcagatgaccaccgctgagttaaatccatttccgtctcgctccgttttctcggtgtcgacgttggcactggaagcgcccgtgccggtttgttcgatgataatgggaagcttctaggatctgctactagtccaatacagatttggaaggatggagactgtattgagcaatcttcaacagatatttggcatgcagtttgtgctgctgtgaaatctgcttgctctcttgcaaatgtttcggatgtggaagtgaaaggaataggctttgctgccacgtgctctctcgtggcggttgatgctgagggatctcctgttacagtgtcgtggagtggtgattcaagaagaaacattattgtatggatggaccatagagctgtaaagcaggcagagagaatcaactcatttaattctccagtcttgcagtact

SEQ ID NO: 104661 - DNA, 424 bp, Arabidopsis thaliana columbia
ccggacaatttccatcttctaggtttctttctttctcagcaatttccaggaaaatggaagtgaaagctagagctcctgggaagatcatacttgcaggggaacacgctgttgttcatggatccaccgctgtagctgccgccattgatctctacacttacgttactctccgctttcctcttccatcagctgagaacaatgataggcttacacttcagctcaaggacatttccttggagttttcatggtccttagccagaatcaaagaagcgattccttatgattcaagcactctctgccgttctacgccggcttcatgttcagaggagacccttaaatcaattgcagttttggttgaagagcaaaatcttccaaaggaaaagatgtggctctcctctgggatctccacgtttctctggttatacac

SEQ ID NO: 104662 - DNA, 449 bp, Arabidopsis thaliana columbia
agcggacgcgtgggcggacgcgtgggcggcagtttgggcgatgtgctgttattggtaactctggtgatctcttaaaaacaaagttcggaaaggagatagatacttatgatacggttctaagagaaaatggtgctcctattcagaactacaaggaatatgtgggagagaaaagtacattccgtcttcttaatagagggtcagcaaaagcccttgacaaagtcgtggagttggatgaaaaaaagcaagaggtcctgctcgtcaaaacaacaatacatgatattatgaacaagatgattcgggaagtcccaataaaaaatcctgtgtacttaatgctcggtgcttcatttggctcagcagccaaaggaactgggctcaaggctcttgagtttgctctctcgacgtgtgattcagtggatatgtatggattcacagtggattcaggctataaa

SEQ ID NO: 104663 - DNA, 396 bp, Arabidopsis thaliana columbia
gcactaccatggaggttgccaagttggaagagtggttgacaagaattacagagtcttaggcattgattccttaagggtcatcgatggatccacatttctcaagtctccggggactaatcctcaagctactgttatgatgctcggaaggtatatgggccaaaggattcttcaagagagggagatatacaacaaaccggataaagaagcgtgagatattacttgttttgagaaaatcttgatcttggaattgttttaatcaatgtatgattaacttaaagagtatgaatgtgtacatctgttcatgttctgtttctaatatgtataataatggtggaattatggtacttggggcttctagttttgcagaatttcggaatatgagtctagtattatcca

SEQ ID NO: 104664 - DNA, 425 bp, Arabidopsis thaliana columbia
aaaaatcactctccattttgattttcgtatctctcgtgtcacactcacacaaaacacaatcttcctcaaaaaaaattttgtgcaatctgatttgattttcactgtctttctaagtttcgaaacggtggattttgtccgtacgtggttttgattctcgtagatgtcgaagctctgacgtaagattagagtttcgatttctaggtttcttataactatggcggtggaatatgaatgctgcgggaccagcttcttcatacacatcgctgtgatagtgttactagtcttgttcgctggactaatgtctggtcttactttgggtcttatgtctatgagtctcgttgatcttgaggttcttgctaaatccggtactcccagagatcgtatccatgctgcaaagattttaccagttgtgaaaaatcagcatc

SEQ ID NO: 104665 - DNA, 421 bp, Arabidopsis thaliana columbia
ggggtgaccttcagctaagattcataatttcctctgttttttttccatattctctgaagcatgacaaaagattcacactttcctctgttttcttatgtcaaaattagaaccaataactgaaagatttggtcaagaagaggaaatgggaagaacatgtttgccgagatggcgattaggaagactaatggcaggattacaagtcatcttaggattactggtgatcactgtgagcctctcatgtctctaccgattccattccgtgggttacttcttgcaaaacgaagacacttgcaacaatatctacacaatcaaagaagtcagcagcgaaggattcgacctaaaggcgctgcacgatcgtgttgatgaagtactagaaaagatggacaacttgtacgagaagctagagaagacggtaaaagat

SEQ ID NO: 104666 - DNA, 435 bp, Arabidopsis thaliana columbia
gaaacagattgaaatttgtcaggaagagaatagaattatagacaagatgcacagacagaaggttgcagaagttgaaaagcttatgcagagtgttcgggaattagaagaagctgttcttgctggtggtgcagccgcaaacgcagtgagagattaccaaaggaaattccaagaaatgaatgaagagaggaaaatccttgaacgggaattggcccgtgcgaaggtaaatgcaaacagagttgctactgttgtagctaacgaatggaaagattctaatgacaaagtgatgcctgtaaggcagtggcttgaagaacgtagatttttgcagggagaaatgcaacaactacgcgacaaacttgccatagctgaccgagctgcaaaatctgaagctcagctgaaggagaaatttttactgcggcttagagtgttagaagagag

SEQ ID NO: 104667 - DNA, 355 bp, Arabidopsis thaliana columbia
ctcaagatcaatggcggctgaaatggcgttagtgaaacccatctccaagttctcttccccaaagctctcaaacccgagcaaattcctcttcctcaccgcctcctccaaccaccgccacctcgaagtccaagaagggaacgaagaaagagattcaagagtcgcttcttactccgaggttctacacgacggacttcgaggaaatggaacagcttttcaacacggagatcaacaagaaccttaacgaagcagagttcgaggctctgcttcaagagttcaagaccgattacaaccagacacatttcgtgaggaacaaggagtttaaagaagctgcagacaaattgcaaggacctctccg

SEQ ID NO: 104668 - DNA, 430 bp, Arabidopsis thaliana columbia
cgacatttatgttcaagggattttgttggagagggactttaacatagcacagagagcaggtggagttggtaaaccgttcctaaggcaagttgatgaagttcaagtgaatggaagtacgttggagattcatttgaagtggacaggaaaaggcacaaacgtaataccaacaagaggtgtttacgggcctctcatatccgctataaccgtcacaccgaatttcaaggttgataccggaaaaccattgtccaatggagtagttgcaggcattgtaatcgcagcgtgtgtagctttcgggttgctggtacttgtaatcctcaggctaacaggttacttaggtggaaaagaagtggatgaaaatgaagagcttcggggactcgatttgcagacaggatcgttcacattgaagcaaatcaaacgtgctactaacaac

SEQ ID NO: 104669 - DNA, 354 bp, Arabidopsis thaliana columbia
cactatgtgtgtgatggcgtgccctagaaactccataacatacaacgccacgcgctgcgcgtgcggtatcggtcagctactaaaccggagctccgggagctgcgagatcttcggttggccgtcaacaatctccacagacaaagatgtaaactacagcgtaatatcattcgccgagactttattcgctttcgataggatccgtaagttcacgcaatctcaagctattttcttagaagctacgctcgtgatgcttctctcctggttagtcttttgtttcttcctgagattcagcaaactcggcgatggtcgtaatgtctggtttaatctccgttggtggattactcgacttgacgt

SEQ ID NO: 104670 - DNA, 413 bp, Arabidopsis thaliana columbia
gaccatacaaagcctatggcgaggtttccgacttctccggcgcctaaccgcctcttgaggctcttctcttccaacaaacggtcgtcatctcctactgccgcgcttttaaccggagattttcagctgattcgtcatttctccgccggaaccgctgctcgtgttgccaaggatgagaaggaaccatggtggaaagaatccatggacaagcttcgcaacatcgggatctcagctcatatagactctggaaagactacgttgactgaacgtgttctcttctataccggtcggatccatgagatccacgaagtcagaggtagagatggcgtcggcgctaaaatggattccatggacttagaacgagagataggtatcaccatccaatcagccgctacctacggtacttggaaggatta

SEQ ID NO: 104671 - DNA, 405 bp, Arabidopsis thaliana columbia
cccaagcgtccggttttgccttggcctcgatgatggtttctggaaattgataagacttacttcttcagctgcaaaagacttctttttaccgaaacaagtcagtgacaattatataagttatgtcaaatggaagtttttgcacagagttttcagctctgctttacaagttcttgccactcaggcaatgtttagagcaataggaattggacaatctcggtcactagcttcatctgctgcttttaactggattttgaaagatggacttggaaggttaagtagatgtatatacactgctagtcttgcttctgcttttgacactaatttgaagagagttaggttctcgacgtctgtactcttcagtctaagcattggagttgagttaatgactccagtattccctcagta

SEQ ID NO: 104672 - DNA, 251 bp, Arabidopsis thaliana columbia
acgcgtccgaaacactaaaaatcatacctttttttttactcctcattccccaatttagggtcggtctgtgtgattttggatttcatgagattttgatagtcgaccacccgtcgatctttggcggcactcgatctatggttcactgtaacttttgaattttgagactaatcttcgtagcctggtcgatccattttcacgaactgaagaatcagatagattgcttctgagcctcccgtcatgtattctctgat

SEQ ID NO: 104673 - DNA, 212 bp, Arabidopsis thaliana columbia
cgcaattgaaagaaaaaaaaaaacgagaagcgttttctttctctccaaaatccattactcgcgaactttcctctgctaaggtattctttaaccttgtcaacacactagccttaagtgttcactagaaagaggtggtgattatgagttcaagcgaagcgtttcccgtgatgcaggagatcatgcttgagtttcgtgctgggaagatgtctttg

SEQ ID NO: 104674 - DNA, 260 bp, Arabidopsis thaliana columbia
cgcgtccgcctagtcaaccgatatactgtttggattagtcaaggtcctttcatgtgcctcatccacaataacgacactgtagctggccaggtctggctcaccaagcagctcgcgcaaaagcattccatcagtcatatacttcagaactgttttgtctgaagtacaatcctcaaatcgaatggaatagccaacctcatgtccgagtttgacacccatctcttgagccacacgggcagctacactcatagctgcaactcttc

SEQ ID NO: 104675 - DNA, 272 bp, Arabidopsis thaliana columbia
cgaaagcatcttcttcatcaattgatctactctgctctgctcaagatcagaaatcgtcggtttagttctccggttaaaagtttcgtctctgcgggaattggaacttcaatggagggattaaagctctcagaagcggaattgatgatttttattcatccttcccagagcagaaacgtttttcaaggaatttgtcgcgagctcagttctcttctattccagttcgttctttttcttcctcctatttacttcttctttggtttcaagttttgatt

SEQ ID NO: 104676 - DNA, 449 bp, Arabidopsis thaliana columbia
  unsure (1)..(449): unsure at all n locations
ggtcgacccatacgtccgcttgtcttgtttgtcgtgcaagtaacaaagatcaagatgatatcaagattttctcttcttctgttcttgttcttggtcatagttcctctatcaaaatcttcaatcttcaaaaccttcatcaaatcctctccttcctcagtcgtcttccctctctccggcaacgtcttccctctcggatactactcagtcttaatgcaaataggaagccctccaaaggcatttcaatttgatattgataccggaagcgatctcacttgggttcaatgtgatgctccttgcagtggttgcactttgcctcctaatcttcagtacaagcctaaaggaaacattatcncgtgctcaaacccgatctgtacagctcttcactggcctaacaagcctcattgcccaaacccgcaagaacaatgtgactatgaagttaaatatgctga

SEQ ID NO: 104677 - DNA, 362 bp, Arabidopsis thaliana columbia
acgatcaaatttccgtttttgctaccgtcgtctctggtcagactcagaggaaacacggagcttgagcaactgacaagactgtttcgtgtttggggctttcgaagagagtagggagattcgcgggtttcgtcaattcctgggttttctctagattgctgtttcggtggtgttttcttttgaggatttaagggaaacatggaacccaacaaggatgataatgtttcattagcagcaacagctcaaatttcagcacctccagttctacaagatgcctcgtctctgccaggtttctctgccattccacctgtggttcctccttcttttcccccaccaatggctccaatacctatgatgccacatcc

SEQ ID NO: 104678 - DNA, 415 bp, Arabidopsis thaliana columbia
cgtgaagctactttgtaattataaagatttattgtttcccataaactggttaaatgattttagaaactaaagtaaaatgagcttgacactagagtttctgcttcttctgattgtacttatcttgagtcaccatgctcattctggctctattgtcaaattccttcctggttttgaaggcccccttccttttgaactcgaaaccgggtacattggtattggtgaggaagaggaagtgcaattattctactatttcatcaaatctgagaagaatccagaagaagaccctcttcttctatggttaagtggaggacctggatgttcctctcttactggccttctttttgagaatggtatatctataatatttcgctaagcattactagaataacttgtttacagccgggggaaataaata

SEQ ID NO: 104679 - DNA, 412 bp, Arabidopsis thaliana columbia
gctgtatgtaatgcagagcttcacacagattatggtggtgctgcagtgagatgggggcttacacatcataaagagagtgcagctgattgttgccaggcttgcttagaccaggcaaagcgtgcgaaacctggagaaacgagatgcaatatttgggtttattgcccatctgagtttggttgtttctctccagatatttatgagcataaacatcaggagtgttggcttaaatacgcagagaagccaaaacagaatttcaaagacagatattctgagacatacagaaacaaccacccaaaagcgccatctatcgttccatgggtttcaggtgttgtaacggcttgagcaaaacccatgtggacagattgatgggagaaataggagatagttttggtttttttttctcagctgtgtt

SEQ ID NO: 104680 - DNA, 342 bp, Arabidopsis thaliana columbia
atcagggttttcctcggaacctaaaagagttatattttgctggcactacgttaagagaagtgccccaacttcctttaagcctagaggtcttgaatgcacatggttctgaggcggagaagcttcctatgcattacaagttcaacaattttttcgatctatctcaacaagtggtcaacgattttttattgaaaacgctgacttatgtaaaacacataccaagagggtatacgcaggaactcatcaacaaagctccgactttcatcttcagtgcgccctcacatacaaatcaaaacgccacatttgatctgcaatcaggatcttctgtaatgacacgactaaatc

SEQ ID NO: 104681 - DNA, 399 bp, Arabidopsis thaliana columbia
acgaccacgcgtccgcttctcatctcctagacaaacgaaactcatgacatgagaagaaaattttggagggtgtttataaactataatataatacacatcaaatctttgacacgagtaccaacttgaacaacaagaagaagctgcattgatcttcccaaaagatcctccatggctcaaggcatggatggttcctgtgatgatgcttttcgttttctttgtattttcaattgtaggaatttgtcaacgttgtcgcaattgtcgccgtggtgaaaattctcccagcattcatcctattaactaattatttaatttagatttattttttcctttttgttttctttctataatatgtaaatcattgttggtgaaatgtcaaagtttacagtttcaccatatcga

SEQ ID NO: 104682 - DNA, 413 bp, Arabidopsis thaliana columbia
ggggagacctatgatctgtgcaatcaagggagatccagaagatgcctttaagaagactgtcgaaatcgatcggatgattgatgctcttagagatgcaaaccctagacaagttgagaagattgttgttgaaaatatccttgcttttgatgaggttttttggataagactagcagctaggtcggatacttgtaaatcagaagatgacaagaaggactatgaggagttagctacaactgtgatgactatagttgactgtgttgtgaataagactcgggaaaagatagagacgtctactgatattctgaaagggattttaagacctgctatagatggagtggaagagatttcatggccgccaagagatcctgaagccatcaatctaatgaaaaaggaaattatacaacgggaaaaag

SEQ ID NO: 104683 - DNA, 363 bp, Arabidopsis thaliana columbia
ctgatcttcctgcatcgatggtttccgagttgttatgggcttgggaatctcttaaggtagcaacatgttgtaagtctctagttattgtctacaatggaatttgccttattcaaattgggatggtagctgaatctccagaagataagaaaacagtcatagtaaagaccgataagttgatgcaaggatcggtttacagaggggttatgaaatccaaagcacagagttacttggctaatctttctctttatcctgggagatcagagctgccatttctacctgcaaatacacaggcggtgattttgcagccgcttggagataaaggaatcgcagtcattggtggaaatacgattagaggattcacgt

SEQ ID NO: 104684 - DNA, 142 bp, Arabidopsis thaliana columbia
gtagaaccgttggatgaatctggaactgatgagaaaagtttgatgtctgagacgaagtacaagttcaaaactgagaagcctccgatgggtaatgtaacacgcattggtggaagtaaaggaattgatgagattatgtctggga

SEQ ID NO: 104685 - DNA, 372 bp, Arabidopsis thaliana columbia
atcatcttcttcgtttcaagccctaaattgtgtatcttctttgttgcaatcttctctacgaagagaatggtgaagagggtcaagaattgagagactccaaagtgaagtctaatcggcacacaaacttgaagcctttccgagcggtcttgcaatctccgtcgtgttaattaaaggaagggttttgcgttttctttcctgattcggtcgcttctatggacatggagagatactgaacctaccagtttaaattgtgggaacaacatggttgtcaaaacttatccattaggaatggttgggactaacaatggcattgctgaaaacgaaggagattctggtcttgaaccttatgttggattagagtttgatactgct

SEQ ID NO: 104686 - DNA, 367 bp, Arabidopsis thaliana columbia
cccacgcgtccgacgccacaagatcctaaggcctctcacggatctctcttaagatcaatcgccgcggctcatgacgcagtcgcctgttcaaccgcctccgccgctcccagctcagccgcattccgccgccggaggtgtaataagaggcgatgtacaggttaggtgcgcaggctgtcgcgtgattctgagggtgaaaaccggcgttgtggagttctcgtgtccgacttgtcaacttccccaaatgttgccgccggagcttctttctagggcacggccgcagtttccgcagtctccacaacaaccaccacagccaattcagacgcttccgccaccgattcaacagcagcttaagcctcttaatctacct

SEQ ID NO: 104687 - DNA, 326 bp, Arabidopsis thaliana columbia
gaaagatctcaacttttttcaacccaaatcttcagatctggaggaacgaaacagtaagagattgaaatcaaacatggaagaagatgaatcaacaacaccgaagaagaagtcagattctcagctgaatcttcgaccgtcgatgaatcgtccgacggtgtcactcgagtcacgaatcaagcgtttaatcgattcgaatcattatcactctccttcgaaacctatttactcagataggtttattccaagtagatctggttccaatttcgcgcttttcgatttggcatcttcttcgccgaataagaaagatgggaaagaagatggggctg

SEQ ID NO: 104688 - DNA, 433 bp, Arabidopsis thaliana columbia
ctaatattttttgtacacttagactaaggaaagcaaagtttcatattcctaaaaattctggttttataagtatcaaagacaaattcagtctccatggaaatagagcaaagaaggatcatgaagagagaaggagaagaagaagaagacaacaatcaactttcactgcaagaagaagaaccagatacagaggaagagatgtctgggaggacaatcgaaccgtggacgaagcagataacggtgagaggagtgttcgtgagcatagtgatcggagttgtgttcagtgtgattgctcagaagctaaatctcacgacaggaattgttccaaatctcaacagctctgcagctttacttgcttttgtctttgtccagacttggactaagattctcaagaaatcaggatttgttgcgaaaacattcacaagacaagagaaca

SEQ ID NO: 104689 - DNA, 306 bp, Arabidopsis thaliana columbia
cggacgagtgggtcgaaatatcgataatttcatggaggagttgaaacgtgaacacgaaatgagagatagaccaaaccaggatcgtgaccgtcagggcgatagctcgccatctagccggtttgatgagctacctgatgattttgatcccagtgggaggccaggatcgtttgacgatggtgacccacgaactacgaatctgtatgttgggaatctgtccccaaaggttgatgagaatttccttctgcgcacgttcggaagatttgggcccatagctagtgtcaggattatgtggccaggaacagatga

SEQ ID NO: 104690 - DNA, 382 bp, Arabidopsis thaliana columbia
gtcgaccacgcgtccggtttaagaagatgtattcgatgttttcatggaaaattgtgggaagtttgaccgtgatgatatatatggtttaatatctctttacgaagcatcatatctttcgacaaaattggataaaaacctgcaaatattcatcagaccttttgctacacaacaactcagagactttgttgatactcatagtaatgaagattttgggtcgtgtgacatggtggaaattgtggtccaagcgttggatatgccctactattggcaaatgagaaagctatccaccagatggtacatagatgtgtatggaaaaagacaaaattataagaaccttgtcgtcgttgaatttgccaagattgatttcaacatcgtacaagct

SEQ ID NO: 104691 - DNA, 420 bp, Arabidopsis thaliana columbia
gcgatgattgtatagctgagtttcttattgcttatctatatattatgtatcaaatctccttgtttgatctatgatcatctttctagggttttgctcgatttcccggattcgggtgggaaatcatcatctgatcgattatcgcggctggacatggaggggaaaaaaacaacatctgatcaactctcattgatccaatcatcaactctcgttgatcatagccacttatcatcaactctcgttgatcataaccacttatcatcaacgcttgttgatccaaccatcaacgctcgttgattcaacatcaacgctcgttgatccaaccatcaacgctcgttgattcaaccatcaacgctcgttgattcaaccatcaacgctcgttgattcaaccatcaacgctcgttgattcaaccatcaacgctc

SEQ ID NO: 104692 - DNA, 284 bp, Arabidopsis thaliana columbia
tggtttcttcaatttctcgtctttctcgtccaattcgaacaggagactcgctaaccaacgtcgattcaacttgcccatctccaaattccactactatcgcgtttcagattcggggaatctcggctcggttcggagagacctcgaggcgacgtaattcgctgaggaagaagatcatcggtgatgagtattggcgttcgactccgaaatcttctgaaccaggtacgaaacctctaaacgaaagccataagtttggtcactgtgatgatttaagtagcaccgaggga

SEQ ID NO: 104693 - DNA, 231 bp, Arabidopsis thaliana columbia
  unsure (1)..(231): unsure at all n locations
tttttggcatcacanatccattgtaggagcggaatacatgtttcacaacgtttggaggggtcaaagcaaggagatggtaagtcaggtgatacgagcttcaatgtgcttcgtcgcgtgctttcgccaaaggagaaagatctaatcaagaagctccccggacaaccttccggcgttagttttagacagtatggcggttatgtgcccgtaaacgaaacatccagtcggtttttg

SEQ ID NO: 104694 - DNA, 432 bp, Arabidopsis thaliana columbia
atttgcctccttgaaaatttccaatgacgaagaaactcaatccactggaagatccaccaacggcaacttcaagcgacgaagatgacgtcgagacttccgaagctggtgaagcttcagacgattcctcttcatctgaagaagacgtaccaatcaaaattcgaatcaaatccccttccgccacaaccgccgccgctcctccagctaaatccaccgccgtctccaccgccgctgattcagattctggatccgagactgaaacagattcggattctgaatcaacaaatccaccgaattctggatctgggaagacaatcgctttaaacacagtgaatctaaagaagaaagaggatccaacgtcgtcgtcagctactttagctttaccggcgatgaaatcaggaacaaaacggccagcgagtgaagctgctgctacga

SEQ ID NO: 104695 - DNA, 394 bp, Arabidopsis thaliana columbia
tttaatggtatgcctaaaccattggtgtttaagagtaataaggatcagtttaagtttgtggagccgcggctaacttatgggacgattggtggacggtttaggaaaggcgagaatccgtttgtcgaagaagcgtatcagcgagttgcgttggatcagttgcttaggattgctggtattcaagaagatgatttgttgataatgtctgatgttgatgagattcctagtgctcatactatcaatcttttgagatggtgtgatgatattcctccagttcttcaccttcagttgaagaattatttgtattctttcgaatactatgtcgatagcaagagctggagagcgtctatacaccgttacagtccagggaaaacgcggtatgctcatttccgtcaga

SEQ ID NO: 104696 - DNA, 381 bp, Arabidopsis thaliana columbia
cccaagcgtacgggaaacagagaggtttggttttgcgttgcgtgagctgtttcctctttaactctctcttcttctacctcttgaccctctctctctctctctggtgatgcggtttcttccttggaagccatgaaaacacaatcagcttcaccgttcttcttcgtctccttcttcttcttcttcttcttcttctcttctctgtttcttctctcctctgctttaaactctgatggagttctcttactgagtttcaaatactctgttcttcttgatcctctctctttattacaatcatggaactacgaccacgacaatccttgttcatggcgaggtgtgttgtgtaataacgattcaagagttgttactttatctctcccaaac

SEQ ID NO: 104697 - DNA, 420 bp, Arabidopsis thaliana columbia
cgcaatgttcgtcggcgacgacgactcagttcagattgttcggcttcttgaccagacgcttacttctattgatggcgtttctgtccgcgaggcgacggaggctctggatctactgtctacgaagctccctcatttcccttatcgtcttctctccatcgcttccggaagtgaaaatccaagcctgaaagttgctgctgcaacatatctgaagaattttaccagaaagagcactggcactgaagggacaatctcagaagtcagcaaggagtttaaggatcagctcctcctagctttgcttcaggcagagcctgcagttcttaaagtcttacttgaactgctgcacattgttgttgtgtcagaatttgttaggaaaaatgcatggcctaaacttgtaccggagctgcgctctgctatcgagaa

SEQ ID NO: 104698 - DNA, 432 bp, Arabidopsis thaliana columbia
  unsure (1)..(432): unsure at all n locations
atcaagcgcgatcgtatgttgaaatactcccggtctcaacgggagagaagaagtcctcatatgcttgtggagtcactgtacgctaaggatatggggatgagaagctgtcggctggaacattggggtgaatccaagtctgcaaaatccatcaactcatttctcattccaagtgaaatgcttgtccctacaaaagtaaagcttagatctttgcagagacaagactctggtgatggacaagactctccattttctttcccaaggagatctttcagccgtttggagcagagtatattggaagacgagagctggtttcaaagatccaatggtttccagccgtacatgagtgtgacagagtctgcaagggaaaagatgagatcactgagcacaccaaggcaacgtgtanggatcatggattctttgtttgataactac

SEQ ID NO: 104699 - DNA, 440 bp, Arabidopsis thaliana columbia
cttattcttcttcgccttctctctgagtcgaactcgctccgatcgactgagccaactcgcccgccttctgtaatgatcatttcctctacattgtacaaaaaaagagtgttgtaatgactcgttccgggagacgatggtcggagcgacggtgagagttacagttttctttccggcgaccaatactctcggcggcggagatgtttaagtcagcgagatggcgtagcgagaagaacaggatcaaagtcgttttcagattgaagtttcatgcgactcaggcgtcacagttcaatacagagggattgattctgtctctagttcccggagatattggaaaaccgacggcgaggtcagagaaagctattgtgaacgacggacattgccggtgggagattccggtttacgagactgtgaaatttctcaaagatgtaaaaactggaaaa

SEQ ID NO: 104700 - DNA, 403 bp, Arabidopsis thaliana columbia
cggaagcgtgggaagacgcgtgggcaaaaaccaaaatctcagtctcaaacaaacaacaacaacacacgagtcacgaggttgaagaagaagaagaagaagcaaatatgttaaacggctggagaagagctttttgcacttccattcccaaagaaactaaccaaaacgacgtcgacgacgacggactcgttggtctccgccacaaatcaacctctcgattcggctttttctcaactccttctacgcctcgttctgattccggcaccggaacttacagcctccgttgcaggacttcaacagccaccgccgtctccactacttcatctcttcccggaactccaaagcttaagtgcaaaaccaccaccaccggagaaacaactcccagaaacagaagccttgtctctct

SEQ ID NO: 104701 - DNA, 421 bp, Arabidopsis thaliana columbia
cccaagcgtccgaaattctctctcttttctcttctttcgtaggaacaacttctctccctcctgttaatcccgccgtttcttacattttcctctgtttttttcccgggaaacagaaggaaaattttcgtttttttttcttctttttcccggaagaagagatctttgtgaattaggtagctgcccacatctttaagacttgtctcgagctggcgtggcttcattcttccggttaattcaattggagaatgcaacaaaggttactgcttttattagattctaaagctagggtttttgggaacgtgcttaatctgtctgtatcttagcatttgagattgggtttttgggtataataacctattatggattcagaattgagtttttcttcgagggatgtggtgaattgctgtgaatatggttgtga

SEQ ID NO: 104702 - DNA, 371 bp, Arabidopsis thaliana columbia
gggtcgcccacgcgtccgcggaagcgtgggcggacgcgtgggcggacgcgtggggcgtctttctctttctctctgtctgaagttgagaacacgaaccactgaaaaacccgcgaaagactcgagcacgaaccaacaatggcggaacccaaaaccaagtatgatcgtcagctaaggatttggggagaattaggtcaatcagctcttgaaaccgcgagcatatgtttgctcaattgtggtccaactggctctgaggctctaaagaatcttgttattggtggaatcggaagtatcaccattgtcgacggatctaaagtagaaattggcgaccttggaaacaatttcatggtggatgcgaagagcgttggtcagtc

SEQ ID NO: 104703 - DNA, 410 bp, Arabidopsis thaliana columbia
gctaaaggtaaaattggcattgcacacagtccagcttggttcgaaccacaagaccttgagcatgttggaggttccattgaacgtgtgcttgatttcatcctaagatggtaaaataattacaataatgaaaaatgtgatatattataactctaactgtttataagttctttttttttttttttttaatcaggcatttggctccaacaacttatggagattatccacaatcgatgaaggatcgtgtcggtcatagattgccaaaattcacagaagctgagaagaagttgctaaagggttctacagattacgtaagaatgaattactatacttcagtgtttgcaaaagaaattagccctgatcctaagagtccgagttggacgactgattctcttgttgattgggataataag

SEQ ID NO: 104704 - DNA, 254 bp, Arabidopsis thaliana columbia
agggaagctaaaacaattttcaaacactcgatttcttgatcccatctggaattggattccatcgattaatctctcaatggtggtggaccaagatcagcaatggctgctcggttgcttatcagcatgtcttgaccctaactagaacgttcgttctttcgctgagacctctctcaatcaggcttctcttcaagcagggtttgggagtgcattgtgcatagttgctgctaccatagagttctcttctgggattgcgt

SEQ ID NO: 104705 - DNA, 300 bp, Arabidopsis thaliana columbia
ggaattctctctctttcacatcatcatcatcatcatatgggttcgtgtgtctcgtcttctcaaagcatgagctcatccgcctctgattccgtcgtgaatcttgcctctttcatctctaaaccagactccagagcggccctcaagactgacgtcatgatcagttcctgcaacatcaatgggaatcctcccatcgattccggtcgttgggattcaagtaacagatacgatatgagatttttcgattcacggaggtggcgtgattcctattgcgatgatgatttcatgagcgttggtggtgat

SEQ ID NO: 104706 - DNA, 413 bp, Arabidopsis thaliana columbia
cggcagcgtgggaagacgcgtgggctggtaacacctgtgcttattcatttcaacatagatcggtaacactggctcgtcctcacccagcggacgatagccacacgcgagtgaactcgacggtggtcgccattgacacacacaggaacagtcacttcgctgttcgttgggccgtcgatcatctcttcaatatgatcattagttccgaactgactctactccatgttcgtctcaaaaattctaatcatggaggatacattgatgatagtggattaaatcagcgttttgttccagacagaggctaatgtgcacgtacagggatttcaatgatggatgttattctagacgataccgacgtttcaaaggcagttttggattacgtgaacaataaccttgtgatcaaccttgtgttggga

SEQ ID NO: 104707 - DNA, 415 bp, Arabidopsis thaliana columbia
cccaagcgtccgcggacgcgtgggtttttcttcaacttccatttttcgaaaggcgacgagaaaaagtatttctccagttttggaattcgccatggctgttgatagcagaatggatctgctaagcgaaagagctgtgttgatgagagcatctcttcaaaagagtcaaaccatcaccgataatgttgtttctatcctcggctccttcgatagtcgtctgtctgctcttgaaaccgccatgcgtcctactcagattaggactcatgctataaggaaagctcatgagaatattgataggactcttaaggctgctgaagttattttgtctcaattcgatctcctccgtcaggcagagactaaagtactcaaggggccacatgaggacctggaaagttatctggatgcaattgctcaactc

SEQ ID NO: 104708 - DNA, 459 bp, Arabidopsis thaliana columbia
cgggtcgaccacgcatccgcggacgcgtgggtaaaaaacaaaaaataaaaaaatccttcaaatctttcttttacatatctgacaaaacaatggctagatttcctatagcaatatgtctaatgttaatactagtagcatcaagtaccatatatgaagcgcaaggtgtattcttattaaggcattacatgaataaatttcctaaaaattcccaagactttgagccttttgcttacaaaggtatgcttagttttgtggataaccttgagaatatggctccggaaaaaggagagtacaaggatttcttctcaaagctgaaagctttcatgtccttcataaacacggcaaaagggtcgtcttcagagttccagtctcaaatgaaacaacaagctgagggcctcttcaaggctatctctgcattgggtgtcaaaggaggatcatcggctgatacgagcaaattga

SEQ ID NO: 104709 - DNA, 444 bp, Arabidopsis thaliana columbia
caaaagttacaaaaggagagtatgtcaaaggtttcatatgcaccgttgctgcgtctgctggttatggtctagtcttatccctacaacagctagcctttctaaaagtcctaaagaagcaaaatttctcagaagttatggatatgataatctacgtgagtctagtggccagttgtgttagcgtggtggggctttttgctagcagtgagtggaaaactttgagcagtgaaatggataactacaaacatgggaaggtatcctacattatgaacctagtgtggacagctgttacctggcaggtattctccatcggtggcacaggactgatcttcgagctctcctctctattctcaaatgcaataagcgttttgggactcccagtggttcctatcttggctgtaatcattttccatgacaaaatgaatgggttaaaggtgatttctatga

SEQ ID NO: 104710 - DNA, 402 bp, Arabidopsis thaliana columbia
caaaaacaaatcttaaacgttttactttgtgctgcactactcaacctcaatggccgcctcaacaatggctctctcctcccctgccttcgccggtaaggccgtcaagctttcccccgcggcatctgaagtccttggaagcggccgtgtgacaatgaggaagactgttgccaagccaaagggcccatcaggcagcccatggtacggatctgaccgtgtcaagtacttgggtccattctctggcgaatcaccgagctaccttaccggagagttccccggagactacggatgggacaccgccggactttcagctgaccccgagacattcgcaaggaaccgtgaactagaagttatccacagcaggtgggccatgctcggagccctaagctgcgtcttccctgagct

SEQ ID NO: 104711 - DNA, 424 bp, Arabidopsis thaliana columbia
ccgccttatcctaacagcgaataatagaagaaaaagtacaaattctctaataaagcggtaaaagcgtttaagaagatgaagaagaaaaaggaaacgcctccaaatcaccattattgtccgaatcttcttcgcgtctctcaccaacaccacttctcctaccttcttcttcacaccaaatgattctctcgtataatattcatcaaacccagatcatgttttcatcatcaatcatctcttaaactcctctatagatctcaccgcatgacgttccgaagtttactccaggaaatgcggtctatgccacaccgtgtagttcacgccgccgcctcaaccgctaatagttcagaccctttcagctggtcggagctcccggaggagctgcttagagaaatcctgattagggttgagactgttgacggcggcg

SEQ ID NO: 104712 - DNA, 392 bp, Arabidopsis thaliana columbia
aatcatggcggatacaatggttgctcatatggaccgacataataagatagatgttgagatctcagaagatgacaagagattaacaaagctttgctctctaaagaagaaggctataaatgcgacgaacaagtttaagcactcaatgaccaagaaaggtcgaaggcatagccgtgtggcgtgtgtctcaatcgtcgatgaaatcgatacagaagagttgcaagcggttgatgctttccgtcaagctcttattttagacgaactacttccctctaagcatgatgatcatcacatgatgcttaggttcttgagggcaagaaagtttgatctcgaaaaggctaagcaaatgtggtctgatatgcttaactggaggaaagaatatggcgcagacacga

SEQ ID NO: 104713 - DNA, 356 bp, Arabidopsis thaliana columbia
gcgattaaacctactcaatctcagatctcgttaaacctagaaacctcgagaaaaaccgtatcaatggcgccgaaagcagagaagaagcccgctgagaagaaaccagcttccgagaagccggtggaggagaaatcaaaagccgagaaagctccggcggagaagaaacgaaaggccggaaagaagctcccgaaggaagctggtgccggaggcgacaagaagaaaaagatgaagaataagagtgtcgagacttacaagatctacatcttcaaggtgcttaagcaagttcatcccgatatcggaatctccagcaaagcgatggggatcatgaacagtttcattaacgatatcttcgagaa

SEQ ID NO: 104714 - DNA, 197 bp, Arabidopsis thaliana columbia
cccaagcgaccgcccacgcgtccggttgagatgaattcaatgttatctaacttagcattcaacaacattattagaatggtgacgggaaaatgttactatggagatggtgcagaggatgatcctgaggctaaacgtgtgcggcagcttatcgcagaggcgatgagttgttttggtgcaggacatgcggctgatcattt

SEQ ID NO: 104715 - DNA, 446 bp, Arabidopsis thaliana columbia
agcctccgacgaaacctgatgcactactcgctctgggaatgttcctctgtgctgagtctccacagtggctattcaagcaagggaagatagctgaagcagaagctgagtttgagaggctgcttggagggtctcatgtgaaaacagcaatggcagaattatacaaactagatctagacaagacggatgaaccagatgttgtgagcctctctgagctgttatatggtcggcattcaagaggtatgtagaactctttgcttttgtcccgcggaaggaactgcaaacatgtatgttgattgttgtgtctatttgtttcctgtatagtactttgttattcacttgttccttttgcagttgtttttattggattaaccctgtttgctttgcaacagctatctggtataaatgctgttttttatttctcttctaccgtattcaaaagtgctgga

SEQ ID NO: 104716 - DNA, 290 bp, Arabidopsis thaliana columbia
ctctgtgttctttcttgcctcctcttatcgtgaaaataaacatacttaggatcgtagaagagagaaaataagaagaaagatggtaggaagcaaagaaaaatcgaaagagaaacgagataagagactccaagagatctccctccttcgtactattccctattctgatcaccagaggtggtggacctctgaaaccgtggcggtggtaacacgtgcgaatagaggaataggatttgagatggtgagacaattggctggacatgggacaacagttattctaacatcaagagacg

SEQ ID NO: 104717 - DNA, 413 bp, Arabidopsis thaliana columbia
  unsure (1)..(413): unsure at all n locations
cccaagcgtacgagaaattccagatctttcaaaggccaccaatctgaagcatttatatctcaacaactgcaaaagtttggagattcccaatagtagaaggaagtgtcaccaaaaattggtgaggttggaaatgaaagaatgcacagggctggaggttcttccaaccgatgtcaacttgtcatctctcgaaaccctcgatctcagtggttgctcaagtttgagaacttttcctctgatttcaaagagtatcaaatggctctatctggaaaacaccgccattgaagaaattctagatctttcaaaggccaccaagctcgagtctttgatactcaacaactgcaaaagtttggtgacacttccttctacaattgggaatcttcanaatttgagacgtttgtacatgaaaagatgca

SEQ ID NO: 104718 - DNA, 118 bp, Arabidopsis thaliana columbia
ccttgtgcgagaggcgtacttgacaagtatttcgaagtaagtaagacaaatgaactacattggggtcatagagtgtacgtgtaatgaaacagcaatttcagtgaggatacgctcaaaa

SEQ ID NO: 104719 - DNA, 414 bp, Arabidopsis thaliana columbia
acccacgcgtccggaaaagacaacattcggtgctgatggcatcctcatgaccagacctggctcatcagctgaaccaagcgagaaccactcaagccgactattttcaagtggttcacgtcatgccacaacccaacgggttccacagagctatgaatctgcagctgcagcaaggcctgggcatgaggatgccattagaaacttcgagctccttaccatcggcgctggaaagaagaggagatgaagatagggagagagaagtttgatgagagtgaaaagactacattcggtgctgatggctctctcctctgaacataggaaagacatgtcctcgaattgttttttaaccgtgggaacaagatgagaaagtgagagagagaaagagagttaatgtaatctgcctctcccaatctctca

SEQ ID NO: 104720 - DNA, 418 bp, Arabidopsis thaliana columbia
cgggtcgaccacgcgtcagagacactactccggttgaatcatcagcagctgttgaaacttcaactcgtcctaagaggctctgtagacgagtcttggattttgaagccgaaaatggagaaaaccagaccaacggtgacattagagaagcaggtgagatggaatcagctcttcaagagaagcagttagattctgggaatcaagagttaaaagattgccttctttcggctcctagcacgcccaagagaaagcgcagccaaggtaaaagaaagggagttcaaccaaagaaaaatggcagtaatctagaagaagtcgatatttcgatggcgcaagctgcaaagagaagacaaggaccaacttgttgcgacatgaatctatcagggattcagtatgatgagcaatgtgactaccagaaaatgca

SEQ ID NO: 104721 - DNA, 440 bp, Arabidopsis thaliana columbia
agcggacgcgtgggcggacgcgtgggtgggtttgatcttgaccacgacgagaaagacagcagttacaacagaatcaagagcttagtgactgaggaactaaaacagtatttcagaccagagttcttgaacaggttagatgagatgattgttttcagacagttaacaaagctggaagtcaaggaggatacagcggcggcggcggcggttactcctcaagaggtggtggtggcggaagctacggtggtggaagacgtgagggaggaggaggatacggtggtggtgaaggaggaggttacggaggaagcggtggtggtggaggatggtaattcctttaattacgtttgggattaccaatgaatgttctctctctcgcttgttatgcttctacttggttttgtgtgttctctattttgttctggttctgctttagatttgatgta

SEQ ID NO: 104722 - DNA, 254 bp, Arabidopsis thaliana columbia
gtacacccataatatggaggcagacgccagtgacctggttctgactgtggaagatgcttagagattgctgactatacaaggaactgctggtgacgcttatgaatgatgagcaactcatctccatgaaggaaaggtaatgcaaagcatcccattacaaaacattcgactttcataaatgtcctaatcccatgtttacatatcacttttaagcttaggattgaaatcttgaactggtcatgtgttagttacaatca

SEQ ID NO: 104723 - DNA, 353 bp, Arabidopsis thaliana columbia
  unsure (1)..(353): unsure at all n locations
acgcgtcaagngaaggaaaggttatagcgaaatagatagagatagaagagagagaaaggacgaagaaagagagttcctttaactctctcttcttcctctgcaaatctgacatattgaaccaaaccaaaggaagccctctttgattagggttttgtgtcaagattctggagagagcttttaggtgagttttgtgtatctctgatgttgatgttattgaaattgggactcttctccacttaacttggagttgttttgttttttgattgagcttttgagatcttgaaaattgagatcttggagttgtttgtttctaagtgacctaaatcttacaagatgtcctgggttcgattcac

SEQ ID NO: 104724 - DNA, 408 bp, Arabidopsis thaliana columbia
cccaaacgtcagtatcaagcttaaatttttacgattcgatttggggtactgcaaatttctactgtgtttcgttcttttctcccgtgatagaaatctgagatttgtaaattttcttcttttagcagcttttccaatctgggtactgcaaattcctactaaatcgtgctcaagaaccttacttgcggagatcctgatttagctcccagagtttgcttagttttgatcaaattcttggcctccgagcttatctcaagtttggttaaagtacttctttgcagatctctgttgttcagttgcgttaaaagtggtttctttaagattttaaaaatgatggagagaaaacgagaaatggggattgcttatttcgcgcgtaggattaaacagccacgagggatttgggtgaagatg

SEQ ID NO: 104725 - DNA, 296 bp, Arabidopsis thaliana columbia
cggacgcgtgggcggacgcgtgggcggacgcgtggggcatagtcaagagccatcacacagtacctatcagaggaatacagtgagaaaggtgaaaagcttatctcccaagactgcaagaaagtcaaggcaaccactaacgtatggcttcaagttgaaggtcaacagtttgaccctaacgcctctaaccttgccttcgaccgtgtctttaaaggcatgttcggcatgacaactgaccctgccgctgtccaaaacctcaaaggtaacctccaaaaattcttggatgtcaacaaggctag

SEQ ID NO: 104726 - DNA, 453 bp, Arabidopsis thaliana columbia
cccaaacgtccgagatagatcaagatgtatcttcacgcggaaatgcggcattgacagctttacattatgacagcaactcaagacttcttgtttctggtgatcataacggaatggttcgcctttataggttcaaacctgagccatacctaacagaaaacagttttatccctttccaaggaagcttaaagaaaggaaataaccatattgttcaaagtgttaagtacatcaagcttactggttccataacctgtattcagaagagccaaaactcaaaacatctcgctattggatcagatcaaggacatgtttctctggttgacattgaggaagcaaatgtgttatacacaaaacacattgcaagtgatatatgtccagggatcatctccttgcaattcgagagttgcattgtgcaaggcttcgagaagaacgtgttagtggttgctatgagagact

SEQ ID NO: 104727 - DNA, 412 bp, Arabidopsis thaliana columbia
ccttaatataaaaccaaacatcaatctctcgccgttaaggttacatctgtcgccgccgctgagaccgccacttaaggccgtctcctccgctctatccatatccaaaacagctataaagataaacttccagagcttggtgaaggagcagcaaccctagttttcaatccctaaagatattagttctccagcgagttgacacaaaacccgattacgtttcatccggcgactcgctttgatattccatggattctcagttgaatccttccaagagacgcaagataagtgtcaggcacagatgcgttgcgtgctataagatgttcaatagacgagaacacctcgttgagcacatgaagatttcctaccactcacttcagcagcctcgctgtggggtttgcctcaagcactgtaaatc

SEQ ID NO: 104728 - DNA, 310 bp, Arabidopsis thaliana columbia
cccacacatccgcgactaccatgactgctgctgtgtctctcacatcttcaacctcttcttcttttcacgctacaagttgtgccaatgctcctgaacggatcaggtttactaaaggtgctttttactaccaaagcaacaatgtagtgacaagtaaaatagtgttttccataatagcacaaatcacaacatgaaacaggatctcctactcctgcacataaagtacaaaaagtgtcacacaagaacgacgaatgtgtcattgttaacaggtacagacgaaatgagccttacactgaaagatgccttctcaaca

SEQ ID NO: 104729 - DNA, 179 bp, Arabidopsis thaliana columbia
agagaacagtgatttcgtcaaacgcatttgctttgaatttttcgatttcatcttcgtctcggaatcacatggggaagcttaaagattttgagaagcgacttagagagtctacagaaaagtctcagaatcttaaagattatttagggattagcgagttctccaagacgagcatcgagacc

SEQ ID NO: 104730 - DNA, 381 bp, Arabidopsis thaliana columbia
ttcaatggttgagagagaaaagagtaaaaaagcacatggcctcattaccattggggcctcagcctcatgctcttgctccgccgctgcagcttcacgacggcgacgctttgaaacgccgtcctgaattggattctgataaggaaatgtctgcagctgttattgagggaaatgacgctgttactggtcatatcatttccactactattggaggcaaaaacggcgaaccaaagcagaccattagttacatggctgagcgggttgttggaacaggttcattcgggattgtttttcaggcgaaatgcttggaaactggagaatcagtagccattaaaaaggtcttgcaagatcgacgctataacaaccgtgagttgcaactaatgc

SEQ ID NO: 104731 - DNA, 212 bp, Arabidopsis thaliana columbia
caaattaaggttttttttttttttttccaggcgagtttttttgacgagtgctctaagatttagtgattgagtttcgctctgataagagatctaattagctcgtcttcttcttcgtcttcttcttcgtcatcagcatcctcaccatgttttggaagttgactgctctctctgctgcttcaccggttgaatccatattagacaaggaagatttc

SEQ ID NO: 104732 - DNA, 442 bp, Arabidopsis thaliana columbia
cccaagcgtccgcccacgcgtccgcccacgcgtccgcggacgcgtgggtgaacataacgttccggaacacggccggaccggagaagcaccaggctgttgcgttacggagcggcgcagatttctcaatcttctatagttgtagtttcgaggcttatcaagatacactctacacacattctctaagacagttttatagagaatgcgatgtctatggaacggtcgattttatatttggaaacgcggcagttgtgtttcaaaactgtaatttatacccgaggaaaccgatgccaaatcagttcaatgctatcaccgcccaaggccggtctgatccgaaccagaacactggtacatcaatccaaaactgtacgattaagccggcggatgatcttgtttcgagtaactatacagttaaaacgtatttgggtcgaccgtggaaagagta

SEQ ID NO: 104733 - DNA, 288 bp, Arabidopsis thaliana columbia
cggaagcgtgggcggacgcgtgggcggacgcgtgggcggacgcgtgggcaactatggatgaagagtacgaagtcatagttctgggtactggtctcaaggagtgcatccttagtggtcttctctccgtcgatggtcttaaggtacttcacatggacaggaatgactactacggtggagagtcaacttctcttaatctcaatcagctgtggaagaagttcaggggagaagagaaggctcctgctcatttaggttctagcagagactacaatgttgacatgatgccaaagt

SEQ ID NO: 104734 - DNA, 388 bp, Arabidopsis thaliana columbia
cccaagcgtccgcggacgcgtgggtgcgtatcagctttcgtctttattacatcgaagttgctactgtttatgccatgtatcgggtaccaaaacagtgatctctgcatccaaaaacttctctttgattggccattcagaatcatactcagagttcagaagctagctactactaataggccaagcgttttacatcatcaagaacaagaacaagaacaagaacaagaacaagaagagaagactatggttgataaagataagaactcggaattgatggatagagttaggttgttggaagtagctgttgagcaagagaaagtaactaaagctgctttaatggttgaattggaacaagaaagagcagcttcagcatcagcagctgatgaagcta

SEQ ID NO: 104735 - DNA, 417 bp, Arabidopsis thaliana columbia
  unsure (1)..(417): unsure at all n locations
aagaatatagataacaaggttagatacggagttgtctttgggaatcaaaagcatcttccatcncgtgtcatgaagaatgtcattgaagtcgagaaatctgaagatagaaacgaaaagtattggtttcatgaagcacgcgttcccttatatttgatcaaagaatatgaagaaagtttgcatagggtggtacacataccttttatcaagaagccatcaagaaaaatatcaaagctccagaaaaggcaactaaaagcttctcgagcaaacatattttcttatctagcctctcggagggacaacacggagaagtgttcttgtgcatcatgccatctcgatgtttttttgagggattcaataacatgcagtacttgccaaggtttctgtcacaaggaatgtactatgagttcacaacacaca

SEQ ID NO: 104736 - DNA, 440 bp, Arabidopsis thaliana columbia
  unsure (1)..(440): unsure at all n locations
acacaacgcagctaagaaacctccttaaagaacaaagaaaaaacttggtgaaatcgattctcttcaaagatcgtcttcctaatcactttcaacaactcgatcaatccttactgattctgattctgtatcgaatttgatacagagacgatgccgaagaacaaaggaaagggaggaaagaacaggaagagaggaaagaacgaagctgatgacgaaaagcgagagcttatattcaaagaagatggacaagaatacgcacaagttcttcgtatgctcggtaacggtcgatgcgacgttatgtgcattgacggtgttaagcgtctttgccatatccgtggtaagatgcataagaaggtttggattgctgctggtgacatcatacttgttggtctaagagattacaggatgatanagctgatgttatactcaagtatatgtctgat

SEQ ID NO: 104737 - DNA, 357 bp, Arabidopsis thaliana columbia
atctgatccacattcattgtatataatcttatggcatttctggtcatttagtctcaagcaaaatggataagagatggagtctacaaggtatgactgctcttgtaaccggtgcagccagtggaatcgggtatgccatagtagaggagttagcaagttttggagctataatccatatatgtgacatctctgaaactcttctcagtcaaagtttaagtgaatgggaaaagaaagggtttcaagtgagtggttcaatctgtgatgtagcttctcggcccgatagagaaaaactgatgcaaaccgtctcctcgctgtttgatggcaaactcaacattcttgtaaacaatgtttggtgtaata

SEQ ID NO: 104738 - DNA, 317 bp, Arabidopsis thaliana columbia
agagattaaaattttgaattcttcatcatgacgacgacgacgacgattcagtctcctctctctacacgttgaatttcaatcggcttcacgaaccttcaacctcgtgcggatcgaaattcgatcagtttgtagtaaccgacaagttccgaagatttttcatctgctggatttcgtcgatcagattgaaaccgagcttttcaatcaggtgacttggatatttctctacgttatgctcgatctgaagaattgggattcagatctagtctcatagatcgattctgattaaactcgtggagatccaatctctatcactagtt

SEQ ID NO: 104739 - DNA, 189 bp, Arabidopsis thaliana columbia
gcgtccgaagtagagcaagtgatcccgccggtgaaggttgaagacggcgaaagcacaactcatgaaacgcgacggatgcgttacggagaggagtttctttcttctcgactttgcaggcctccgatggtcactggactggagaaatcactggacctctcttcttccttcctccattgaacgatgatggtg

SEQ ID NO: 104740 - DNA, 431 bp, Arabidopsis thaliana columbia
gggtcgactacgcgtccgcggaagcgtgggcggacgcgtgggcggtttacggtccatggggaagaccagacatggcttacttcttcttcactagagacatcctccacggtaaatcaatcgacatttacagaactcaggacaatcaataactggcgcgtgacttcacctacatcgatgacatcgttaaaggttgtgtcggtgcgttagacactgctgagaagagcaccggaagcagcggaaagaagcgaggacaagctcagctacgtgtttacaatctaggaaacacgtccccggttccggttgggagagtggtctcgatcttggaaggattgttagggataaaagctaacaagcatcttatcaaaatgccaagaaacggtgacgtgccttacacgcatgcaaatgtgagtttagcgtataaagatttcggg

SEQ ID NO: 104741 - DNA, 172 bp, Arabidopsis thaliana columbia
cgcgtcaggtggatctcatggatgaatgtcagaacggggttgattcaaaggttgagctctgctaggaattggtcagttaaaattaaccgccttattctagttcttgttgtaagtttagctgtactagtcatcattgtgacgcctaacataacttataatttattccatgcat

SEQ ID NO: 104742 - DNA, 431 bp, Arabidopsis thaliana columbia
tggaaattattatctctttctcttccattattatcttaaagtgagaaatcaataagatgttggagaaagagtttttcacggagtatggtgaagcaagtcaatatcagatccaagaagttgttggcaaaggaagctacggagttgttgcttctgcggaatgtccacacacgggaggcaaagtagccatcaagaagatgacaaatgtgtttgaacatgtctcagatgctattcgtatcctcagagagatcaagcttctcaggcttcttcgacatcctgatatcgtggagatcaagcatatcatgcttcctccttgtcgcaaggaattcaaagatatatatgttgtttttgagttgatggagtctgatcttcaccacgttcttaagctcatgtgttccatagagatctgaagcctaagaacatcctcgctaatg

SEQ ID NO: 104743 - DNA, 361 bp, Arabidopsis thaliana columbia
cccacgcgtccgcccacgcgtccggttctctcagtggagaagaagactcgagtcatctgcagaaaagattcccgatcggattggatcatataagattttagggatttggaaaaaatcttgagctatggaggcgaatgcggcggtggacggaacggggaatccgatccctacgtcggcggttttaacagcttcggcgaagcatataggaatcaggtgtatgccggaaaacatggcgttcctgaaatgtaagaagaatgatcctaacccagagaaatgcctcgagaagggacgtgacgtcactcgctgtgttcttggcctgtacgtttcttctacttcattctcgtttcaatttctctacaag

SEQ ID NO: 104744 - DNA, 357 bp, Arabidopsis thaliana columbia
tggagctcaaaaagtgtaagagacaaccaacaaaaaacgattcatctcttctcctatcctctcctcttcgaattcaacgtttggagaatccagcagccgcaaaatggcttcgcttgtgtattctccattcactctatccacttctaaagcagagcatctctcttcgctcactaacagtaccaaacattctttcctccggaagaaacacagatcaaccaaaccagccaaatctttcttcaaggtgaaatctgctgtatctggaaacggcctcttcacacagacgaacccggaggtccgtcgtatagttccgatcaagagagacaacgttccgacggtgaaaatcgtctacgtcgtcct

SEQ ID NO: 104745 - DNA, 377 bp, Arabidopsis thaliana columbia
ctctattgaaaaaatcagaaaccctaaaatcgccactctctcgtctctcttcgcggtccattctgcttcatctctcccggcgaaaccttaatcgaacagctcggattcgatcctattctctgttgttttctaagaaagatggagtggaatcgggagactctagtgttcctttcgcaatgttttcttaacacgctctctccgataccggagcctcgtcgaacggctgagagagcactctcggatgctgctgatcaggctaactacggcctagccgttctccgtttggtggctgagccagcaatcgatgaacagacgcgtcacgccgctgctgtcaactttaagaaccatctccgttcgcgatggcatcctgctggtga

SEQ ID NO: 104746 - DNA, 144 bp, Arabidopsis thaliana columbia
ctcttagttgattaaactgagattgtagcctcgcatttgcttgagatttttcgttggctgaggactctgaatcctggatcttatctcccatgtttgcatctgtagtcacagttgcatttccacgtgcccgagcgagtttctcag

SEQ ID NO: 104747 - DNA, 425 bp, Arabidopsis thaliana columbia
caaatcttaaacgttttactttgtgctgcactactcaacctcaatggccgcctcaacaatggctctctcctcccctgccttcgccggtaaggccgtcaagctttcccccgcggcatctgaagtccttggaagcggccgtgtgacaatgaggaagactgttgccaagccaaagggcccatcaggcagcccatggtacggatctgaccgtgtcaagtacttgggtccattctctggcgaatcaccgagctaccttaccggagagttccccggagactacggatgggacaccgccggactttcagctgaccccgagacattcgcaaggaaccgtgaactagaagttatccacagcaggtgggccatgctcggagccctaagctgcgtcttccctgagcttttggctagaaacggagtcaagttcggag

SEQ ID NO: 104748 - DNA, 286 bp, Arabidopsis thaliana columbia
agatttcagaccgaaacctaaataatattgagtaagtttattcgaagaagagatgaagagacaaagagcaatcgagttagatcgagtgaagaagacaatgttgaacatagattgggacgatgctttgggcgatgaggaagttcccgagctcgagatcatcgctactgacaaaattccgccgcgtgaacctactctttccggctatgaacccgccgtctctgtgcgatccctcagggataacgaactcgacgatcatctgaagcgtcagagatcacttcttactcgt

SEQ ID NO: 104749 - DNA, 280 bp, Arabidopsis thaliana columbia
cggacgcgtggacggacgcgtgggcttccctgatcgtgtcgaaatcctgtgtttaactggaaccgagtcttttgatgtaaaaggtcaacaactcataaagacacttcaaaaaggttttccgacaaaattcttatcttctcagatgtcttccaaattcgggttaacgggtggaataccggagcgacgtgttcgacccatctgggatgcaatcgattctcgtcagttcaagaatgctctaaagcttgtcacttcgcttctcgctaagtaccctaaatctcct

SEQ ID NO: 104750 - DNA, 211 bp, Arabidopsis thaliana columbia
atagcagccaaaagcaagggacaaatccaaagagaacttcttgacttaaaaagaaaggcacttgccttcaagcgtcaagggaaaactggagatgctgatgaattatacagtaaggccagtgttttggaggcacagctagcagaactggcaacccccaagatggagatgaaaggctcagcttctgcaattaaacctgaaaactacatggatg

SEQ ID NO: 104751 - DNA, 168 bp, Arabidopsis thaliana columbia
gtcaagagaagacacttgagaggatacactcacactaatgctgcttatatagtcactgtggaactcttggctgctaagaatctaattggtgctaacttatatgggagatcatatccttatgctaatgttaattgtggatcataaaagcgattcagttctatggtccct

SEQ ID NO: 104752 - DNA, 169 bp, Arabidopsis thaliana columbia
ctgatgcgtaggaaacagcagagctcacacttacaaaacaatatacagagatggctacgctttcgtttggaatctccgccgctgcaaccaccgtccgtacgattccgacatttacttcacggaggaccaaaatcacatacgaatgggatgcgaaaggtgtgttgggtcc

SEQ ID NO: 104753 - DNA, 575 bp, Arabidopsis thaliana columbia
ggtcacaagaagcctcttttcacctctgcccgcttgaagaaaggggaagttttgtacttagaaactcattcatgcaggtatgagctctgtttcgcaggagagaagaccatcaaagcaatccaagcctcacaacagcaatcatcacatgaagctatggagacagataataataataacaagtcacagaaccatctgacaaacggtgacaaaacagattcagacaacagtttaattgatgttttccgctggtcacgatgtaagaaacctctcccacagaagcttatgcggtctatcgggtttccactcccagcagatcatatcgacgtgttggaggagaatcttgattgggaagatgtacagtggtcacaaactggtgtttggattgctggaaaagagtacactcttgctcgtgttcattttctctcccccaactaaaaaaaacctttcatgctttgcttctatcttacaaaactttttatattttatttatggattagagactacagttactttggcctatcttgtcttgtgtacatcttccttgtaacatttatttatatatcgtcagaaacatc

SEQ ID NO: 104754 - DNA, 307 bp, Arabidopsis thaliana columbia
gcttaaagagcaaggacaagatgtggcacgaagcgagaagatcggagaagaaggttcacgatatgatggacgctgctcggaaaagagcacagcggcgagctatttacttagctaaacgccgtggagatcctattcagtcgattcaagccgttggttcccgctaccgagtattccgtgatgatggtctttaccaagccaccgaagatcaacagggcttgattccttggaatgggaagcatgatgttatgattgatagatttgatggtcgtgctcttctggattttgtgcgtgaggctggttcgagaag

SEQ ID NO: 104755 - DNA, 219 bp, Arabidopsis thaliana columbia
cgcagattacgtttctctttcaccggttctcgcctactgacgtcttccttccattctttctctcatctgataaccaacctccacatgtctctctcgtcggactccagcgttcctactgtttcgacggtcactatatcctactcagagctcaacgagagcaacatagatttgtctgcaatgattgaatatcgatttggacctaatgtacttggaatcctc

SEQ ID NO: 104756 - DNA, 99 bp, Arabidopsis thaliana columbia
cccagattcagaacgggtagttgttttgtaaaatcgtaaagcaaattgtaccacattatgcgtgcagcttaagatgatgattctatttgtttacatttg

SEQ ID NO: 104757 - DNA, 275 bp, Arabidopsis thaliana columbia
agttagtttgtttataggactgccggtctcccacagtatggtcaacttggtcatggaactgataatgaggtaacttagttatctgcgcgtagatgtgcaaccaatgcagtcttcaactattatctcttacttgtagttattatcatgattggaggtgtatggagcgtgaattgtttgtgtttatttgaaacttccaaacaagttttgagctcttgtttcttgaattgttatgtaaagtctgctatgcataagttagttactttagtctctctgaa

SEQ ID NO: 104758 - DNA, 271 bp, Arabidopsis thaliana columbia
acggacacgtgggggcacatagcttgacatgtatggatctttatgtgtttgcaacgccatacaggatcacttgggactactatttctctgccatagatcatactttgaactttgattcgtgggaagagaaagctgaattggaatatgtgcaggagcatggcgtttcagtgtttctaatgccatcaggaatgcttgggacgttgctatctttgagtgatgtgttacctcttttctccaatactgcttggggacagaatgcgactttggcgtt

SEQ ID NO: 104759 - DNA, 427 bp, Arabidopsis thaliana columbia
tattaaattactagacttggtttagttattagattaaataacaaattattaagggaatataatcttgattgattaatctaaattgttgtagtttgagatcgttgttgagccggatccattgttgctagtcctatttcttaaaatccaaccgagttgccaaggtgagggtaggatctgtggaaacatagtatcacctttacttttgtatttctgaatttcatttgtataagattagacattgggtgctgattgttaaaatgttaggattatatattaaatattgttgattcagtaatcaaacaatgaatttgtactaagggatttagacaaattcactcctctcttagctcacaaataatcaaaggaaaagaactaggttgcttaaacaaaaagctagggtttgctctgtaatagtagtctcttgtat

SEQ ID NO: 104760 - DNA, 283 bp, Arabidopsis thaliana columbia
tcccagacggcctagctgcaggcggaagtcaattcacgagtgactaatggcaatcgtagtacatattgatcattttgcactaatagaaaactttttggtggaaaagtcacggtatgtggaatatcatcgctcacaataattacagacaagtctacataacacaaaaaggcaggatgcccgtgacgtgtacgtgtaagatgaaccaaatcctcattgcatttgatttttccattataaggggcacgtacatgttcggcagtacctcctgtaaatactccgccgg

SEQ ID NO: 104761 - DNA, 420 bp, Arabidopsis thaliana columbia
caaaatttgaagaagaagaaaaacctctgagcttccaatttcatggcgcttcttcagagagcttcttatctgcgtctctattatttacggctcatgggttctcgacctcgtctcttctcgagctctctctctcctgctcttcaccgtcacagctcgacgctctcctcgcctccattttcctctccaagtcccaggttaaagtttcagttaaccagtgttttgagtcaaagactgatacaacgaaatgctatttcatcgaggttcttgtctactgaggcttcccaagagactaccacatctaagggttacagttctgaacagattcaagtgctgggaggcttataccctgtgagaaaacgtccaggaatgtatatcggtagcactggatctcgtggtttgcatcatttggtttatgagata

SEQ ID NO: 104762 - DNA, 523 bp, Arabidopsis thaliana columbia
gtccgaaaatatttctcttacttacactttcttcatcttcttcacataaaccctaaacccctttttctcgctctcttcctggtttaaaatgttctctccattgacgaagagagctaagcaaagctcacgcaacgaaaaaactccacgcaatcgagtccctccgccggattctccagtaactccggcaactcaaaatcggaacaatttcatctcagatcgtcccgccactggaactcctgctccttgggctcctcgtttatcggttctagctagagtttctcctggaaacaatggtgacaaaggagttgattcagatcaattaaagcctgtattcgttggagagtttcctcaattgttgcgcgatgaacaaagttatcctggtgatgcttgtgtatccggtggaatggataaagagacctgtctttcttggtttattactggaagtaaagtttttgtatggagtcatttgacgactttaccgtcgagaaaatgtgttgttcttgaacttcctgttgttgttttg

SEQ ID NO: 104763 - DNA, 378 bp, Arabidopsis thaliana columbia
aaaaaaagctattgtttgaaagaagaagaagttaactatggcaaaggatgtggaagccgttcccggagaaggatttcagacaagagactatcaagatccgccaccagctccgtttattgatggagcggagctaaagaagtggtctttctacagagcagttatcgcagagttcgtagccactctcctcttcttatacatcaccgttttgacagtcatcggttacaagattcagtccgatactgatgccggtggcgtagattgcggcggagttggaatcctcggtatcgcttgggcctttggtggtatgatcttcatcctcgtctactgcaccgccggtatctctggtatgatccttctttaatcttgattttggtttgg

SEQ ID NO: 104764 - DNA, 267 bp, Arabidopsis thaliana columbia
accacgcgtccgcccacgcgtctgcccacgcgtccgatttgctctctctctctcatatccgagtcaagctttccgatttgcgatggacggtggagcggtaggatctcagcagcctcaccttattctagccaacacgcgcttcctcatcactcagccatatgttccatacatcgagaaagtccagctcaagtctgaggttttggatttcatcagatcccatggtatgagctccattgtacgaaaccctaaatgcctcttcggtgctgg

SEQ ID NO: 104765 - DNA, 174 bp, Arabidopsis thaliana columbia
cccacgcgttcgcggacgcgtgggctccatgcttggaaccttcaaggctgaaatgaacattgtggacactgagactatttctgttgatggtaagctcatcatggttgtctccaacatatagcctcttatgcttccatgggctgagctcggcattgacattgttatcgagggaac

SEQ ID NO: 104766 - DNA, 305 bp, Arabidopsis thaliana columbia
  unsure (1)..(305): unsure at all n locations
ctaaaaaacttgaatccgatcttcntcttcttcttcttcttcctctgcttcttgtgttctctgctgctgctgctactactggtttcttgcaatggtaactttgagtatatttgaaaacctgattttgatgcgccgtatatgacagatttttgtgaatactgagggctatttttcttttatcactaatctttgttgtttggtattgatgtagttaatcatttgtagttgtatgttgttatttttggtgagatttaagccctgtgatgatgactctaatgagtttgagtggttccgcttggtttttt

SEQ ID NO: 104767 - DNA, 380 bp, Arabidopsis thaliana columbia
atctctcactcatccaaatctttgatcatctcatcatcattggacttgaagctaactccagagttttatccagattcatcattttccaacgtttttcttcaatcgaatcatcagcgagtttggttccgacgacgatcttagtagcttcataagctcaagattcttcaggtttcggtggattttcttgagctcttctaagcttctccattttgtgagcctccgatttcgaacctggtagtgttgtggatctcactggaccacgaagctttcttcactgagctaagcttgaagtcaattcctctgttcgacaatcaatagaggaagatgaattatttcccagacgaggttatagagcacgtgtttgacttcgtagcttctca

SEQ ID NO: 104768 - DNA, 206 bp, Arabidopsis thaliana columbia
ttcaccggtgataacattgatgcagaaagattctccggtgataacattgaagctgaggagcaatgtatccgactggtcaacagatttcgtttcagaccactccgttgaatgttcaggatccaacaaggatgatgaatttggatcaatcttcaccagttgcaagaaatgaaactcagaatggaggaggcattgctcacgctgagttt

SEQ ID NO: 104769 - DNA, 349 bp, Arabidopsis thaliana columbia
cttactaactaaagagccttttacttgcgccacactctcaccgcaatggccgcctcgacaatggctctctcctctcctgctttgaccggaaaggccgttaagctatccccggcggcctccgaagtatttggaacctgccgaatcaccatgcgcaaagcctccaagcccaccggtccatccggcagcccatggtacggatccgaccgagtcaagtacttgggtccattctccggtgagcctccgagctacctcactggagagttccccggtgattacgggtgggacactgccggtctatccgccgatcccgagaccttcgctatgaaccgtgagctataagttatccaca

SEQ ID NO: 104770 - DNA, 374 bp, Arabidopsis thaliana columbia
cggacgcgtgggcggacgcgtgggcggacgcgtgggcggacgcgtgggttcagacccagaaggtactggaggattcattgagccaagatggctagcatacggagagatcatcaacggacggttcgccatgttgggtgcagctggagctattgctcctgagattttaggaaaggctggtctgattccagcagagactgctcttccttggttccaaaccggtgtgattccaccagcagggacatacacttactgggcagacaattacacactctttgttctcgagatggctctgatgggattcgctgagcaccggaggttacaggactggtacaacccaggatctatgggaaaacagtacttcttggggttagaga

SEQ ID NO: 104771 - DNA, 381 bp, Arabidopsis thaliana columbia
atcaaaaccatcacagcaaaaaaaactcactcactagaaaagtttgaaaatggcgaaggcagataagagaccagcggagaagaaaccggcagagaaaactccggcagccgaaccagcagcagcggcagagaagaaaccaaaagccggaaagaaactcccgaaggaaccagccggcgccggagacaagaagaagaagagatcaaagaagaacgttgagacatacaagatctacatcttcaaggtgttgaagcaagttcatccagatatcggaatctccagcaaagccatgggaatcatgaacagtttcatcaatgatatctttgagaaacttgctggtgagtcttcgaagcttgcgaggtacaacaagaagccgacgattac

SEQ ID NO: 104772 - DNA, 140 bp, Arabidopsis thaliana columbia
cttgattgtgtgtgtgattttgttttttcatttttgtgagataacattacaaatttatttgatcagagagttgagaatccgatagaataggtcacgcaaagcggaaaacaaacgttaagtcgggaaattaaaacccaaga

SEQ ID NO: 104773 - DNA, 384 bp, Arabidopsis thaliana columbia
cccacgcgtccgcccacgcgtccgcgaaaccctagtcgatttcgagatccaaccaactctgctccttatctcagcttgttgaatttgcgaagtatgggagacgctagagacaacgaagcctacgaggaggagctcttggactatgaagaagaagacgagaaggtcccagattctggaaacaaagttaacggtgaagccgtgaaaaaagggtacgtgggaatacacagttctggattcagagacttccttttaaaaccggagcttctcagagctattgttgactctggatttgaacatccatctgaaggtaataaacgatatttcaatctattggtttggagtgagcttaaacatgtgctaaagccaccaatttaaaagatatgg

SEQ ID NO: 104774 - DNA, 343 bp, Arabidopsis thaliana columbia
tttttcctctctctcgcggaaaaaaaaaccctagtttttctctcttctcaccgatttttcattccgatgcttctggtcgcatagcccatccccgcagatctgttaattccggttacatatgaaataacattgaaacatttgatggatgatgactttacagatggataaaactactgcttcctcttcatgggagcgagccaagtccatatatgatgagattgctgagttagcaaacaagcgtcagaaggctggaaatccacctgacccaaatttgttgcagctcttacgtgagaagtatgaagcaataattcttgaaagtcataccttttctgagcagcacaac

SEQ ID NO: 104775 - DNA, 377 bp, Arabidopsis thaliana columbia
gaaaccaagtttgtatagaaggaaatggaagctcagactggaagtcactcgagttcattaagaggtcagaagaagtagctgttgttatcgacgaaacagaagacttggggtcaggtttcgatgatgctgagatattcaaaggggaaaaggaagcgagttacgaaggcggttattcggagaatctgttcacttgaacttgcaccttttcctgtaatcatcatagggtttgattttgtgattctttcttagggtttgatttgtattattaatagaagtctttaccagctttaagttgtatcccagaaactaatagttactcttcttcttcttcttcctcttcttcttctttactcagtaatgagaacaaaaaccatttt

SEQ ID NO: 104776 - DNA, 394 bp, Arabidopsis thaliana columbia
cccacgcgtccgcccacgcgtccgcccacgcgtccgtgcagtttcagatttataatcgcttgcctaagtttcaattcatcttcattccgggagaaaaagtcgcgatacttgagctactcagctttagggtttaacatgttaaggtctctgatttggaaacgatcacaggcatattcttcagtcgtcacgatgtcttcaatcagtcagagaggaaatgaaaggcttttgtctgaagtcgctggttcacattcaagagataataagatattggttttgggaggaaatggttatgtaggttcacacatatgtaaggaggcactgagacaaggtttctctgtatctagtcttagcaggtctgggagatcttctcttcacgattcgtgggtcgatgatg

SEQ ID NO: 104777 - DNA, 356 bp, Arabidopsis thaliana columbia
ggccccgtgagcttcaccgcagcttttagatattttctttccccgttctttcggattttttttttctccccctctcaagcaaagcattatcgctattgctctgccttgtgagctgcgatcacctgtttactgagagaagaacactgcgacgtcgttaaaagtaggttgagagcgagaaaggccgagagaatggagatggaagaaggagcaagtggtgttggtgagaagataaagattggagtctgcgtcatggaaaagaaggttttctcagctcccatgggggaaattctcgacagactccagtcttttggtgaatttgagatcttacattttggggataaagttatacttgaaga

SEQ ID NO: 104778 - DNA, 349 bp, Arabidopsis thaliana columbia
gcggcattagaagaataactttttcatttctctctcttcccgctcctccttcctccttctcctctctctttgacattccaccgagaaaaaaaaagaaagaagttgaaatttcaactctctctctctcaccctccgacccatttctggtcttgtcatttctacaattagacttctcttagatttcccttgttcttgtctctttccgcggatttcgattccgacacaatcccaaacaagatagctgtttattcgaaataaagaaaatggaaggagggtctgttaatgaatcgcattctaatgcggaccaaatgtttgacacaactatagaagagttatgtaagaatctctg

SEQ ID NO: 104779 - DNA, 203 bp, Arabidopsis thaliana columbia
ctggttcaatttccatggacggaccttgacctctctgcttcccttcgtgcattttctctctctcacgatcctctctctttctagtgtttgtttgatcctctgcgtactctgttcgtcttcgcgcttcagataaaacaagtcctgcagattgaagatctgatgtcttatcgattgcgaagtgtggataaagatgaactggttac

SEQ ID NO: 104780 - DNA, 405 bp, Arabidopsis thaliana columbia
cccacgcgtccgcggacgcgtgggcggacgcgtggggaaagttcttcaaattcgcggttgaattttgtttctcggagaaattatcatcaccctatacgatcacattatcgcttctgagatcaacgacgatgcagcaattactgttcgctgttgttctcttcgaggttgttgtgataatggcgctttccttcaagacgccgattaggaagctgttgattatgagcttggatcgttccaagcgtggtcgtggaccggtggtgattcagacggtttctgcgacggttattgtgcttctggtgacgagcgtgtacaatatgatggggatccagaagcgttggatcgaagatggtgtagtgaatcctacagatgaggttatcatggctaagcatctccttgaatcgactc

SEQ ID NO: 104781 - DNA, 379 bp, Arabidopsis thaliana columbia
cacacgcgtccgcggacgcgtgggcggacgcgtggacggacgcatggggattttaaactgttctgatctatttgagatttctcaattccactcaaaatcctttaaagcttgtctctttttggtatctcggaatcactttggggaaatcaagaggagaagtgacaatggatgcgtttagaagacaagcgagtaagcttagagaccaagtcgcaaagcagcaactggctgtgataaagcaattcagtgggactggttatgaaagctcagatgtaatggtgattgatgagcttgaaatgcaaaggcatcatcaactcgataaactttaccgctctactcgttctgcaaaggagttccagagagatattgttaaagcagctga

SEQ ID NO: 104782 - DNA, 401 bp, Arabidopsis thaliana columbia
ctggtcggctggtttatccataagattttgaaacaacgtaaggtgcctgagaagatatgtacatattctgtaatggtttggcttttcaatccgtttacattcactattggaaccagagggaactgtgaacccatcgtttgtgccatgatattatggatcattctctgcctaatgcaaggtaatttgttacaagctgcattttggtacgggcttgttgtgcatttcagggtctatcctattatctatgccttgccaatcatcctggttcttgatacccaggtatttagatctggtcaaaagccggctcttttgtattggaataccggtcaggccaagacacctgccagtaacatggagagaaaaacattcctcttcaatctcttgaccaccttgaaaagttt

SEQ ID NO: 104783 - DNA, 393 bp, Arabidopsis thaliana columbia
tgaattctttctaattaagcaataataatttaatgttttttttaattgaattttatgattttttttaggtaattgaagcaaagaagtcgcattttgattatagcacacctaaaaagagattgccatttcgagacgcaatactaatccttgattcaaattcgaattccagtagtcaagatgatgaaatggagcctcctaatgcaccaattcgaaggaggtttattaatcgagaatcggatttgtcgaagatctctatggtattgtttaaatgaagaagaaaggtaaaaaaaaagaatcagctaattgtgcagaagatgaggaaagaacaagacatagaagagtttgcttttgcttcaattctttatcattgaagctttttattatatttactga

SEQ ID NO: 104784 - DNA, 387 bp, Arabidopsis thaliana columbia
gtcgccggtgtccaccgttttagtcttcctctcccgccgaagtgttctctccgtacttttagcgtcctcgccaatggcaagcgcactcaatctctgctaccacatcacttctccgtattcaaccaaagtcaccgacttgttacctccttgagtcacaatgtttccaacaaatctgatgcagaggcagagcgttcctgtgatgaaggagaaatgttggataagaataggataagcaagaaaaacccgtttgtttcggaagagcttctcaagaagttgaagagatatggactctctggaatattatcctatgggttacttaatacagtctattactctacagctttcctcttggtctggttttatgtggctccagcaccgggaaaaatg

SEQ ID NO: 104785 - DNA, 337 bp, Arabidopsis thaliana columbia
gcggcttttaaactatgtgaaggaggagaacctccataacaagaagcggattctctcagttttccggcggcggaggaacacaaagccaccggtttttagacacacagatttcattttcagttgttaaatggtaactagagaaacgaagttgacgtcagagcgagaagtagagtcgtccatggcgcaagcgagacataatggaggaggtggtggtgagaatcatccgtttacttcattgggaagacaatcctctatctactcattgacccttgacgagttccaacatgctttatgtgagaacggcaagaactttgggtccatgaacatggacgagttt

SEQ ID NO: 104786 - DNA, 127 bp, Arabidopsis thaliana columbia
accaacatgtgccgatcctgatctgctttccggtgtgatccgcggacaatggcagctcaacggatacattgtttcggattgtgattcggtagatgtgttgttcagaaaacaacactatgctaagact

SEQ ID NO: 104787 - DNA, 318 bp, Arabidopsis thaliana columbia
taaccccggagggaagaaatggagacatggagggaaatgagtttacggacaacggttccatcaaagagactgtagatgctgctgttggaatgctcaacgaaaaaagagctcatgagggagaagtttctggtgaagaaaaacgaagcaacgagaattgggattcatttcagaatattttgatgaggcacgatgatggctcacatgtgcattcaatggatgtcatccgtcaggagcatttcacacatagaggcgctagtgtgggtgcaaattctaatgggttgcaaacaaagaacactgcctccggtgattccatcatca

SEQ ID NO: 104788 - DNA, 201 bp, Arabidopsis thaliana columbia
accacgcgaccgcccacgcgtccggacaaagtagctgatgtccttggggctcttccttctaaagatgcctcatgggacgatctaatcaatgtttctgtgcaacttcgtttgaacaagaaatgggattctatgatcttggtgtgtgagtggattttaaggaagagctcctttcaacctgatgtaatctgcttcaatttgctt

SEQ ID NO: 104789 - DNA, 389 bp, Arabidopsis thaliana columbia
gtcagagagaagtagagcttttgagactgagactggtgacgactctgtgtctgggcatcaagaagagcagccgcttgctgaagatattgctagctcggttcagcggtcagcctctggtgaatttatgagaaaatgtgaaggatcaggtgattccgagtctgtgttggacaagtacaatctccatgatgaggcacagtctaagacaggttcctcgagtgccgggaaagatatggtacaggattgtgacatctctaaagtatccgaaggctcttctagcttgagtgctggatcatgagagatgaaacgtacgtctggtggtaatggtggagatgatgagaaccagactgctatcgaagatggatctatccatcaacgttgtgaacatgcat

SEQ ID NO: 104790 - DNA, 380 bp, Arabidopsis thaliana columbia
agcttttgttcattcatcttcagttgactccaatggacatagcatgatcaaaacattcctctcagatgaatcagctatggtgacggcctatggttttccagatattgaattcaacaaatactctactgtaaatagcaaagatggctcttcttactttttcgttcctcagattgagttagatgagcacgaggaggtctctatattagcagttacattggcatggaatgaatctctctcttacacagttgagcaaacaattagttcatatgagaaatcaatttttcaggtttcttctcatttctgcccaaatgtagaggatcactggttcaaacatctaaaaagttctttagcgaagcttagtgttgaagagatacatccac

SEQ ID NO: 104791 - DNA, 294 bp, Arabidopsis thaliana columbia
gatccagttgctgtgggaatcgataatggaggcgacgaagcagagaaagacggagagatgatgacgacggcgaaaaagcttcaccggaatcactcgttcttccaccagagatcattacagaaattcttctccgattaccagccaaatcgatcgggcgattcatgtgcgtatcagagctctgttgcactttatcgtcagatccaaggttcgcgaagattcacctcgatctgatacgtcgaaacgaatccgtaagatcgcgccaccgtaagctcattgtgtcttcacataatcagt

SEQ ID NO: 104792 - DNA, 358 bp, Arabidopsis thaliana columbia
tgaagatgaatatgacattcctttggtttctaagagaaccagtaatccagaagctacaacaaatcgtcatagccctattaataatgctatgagaaactcggctattggttccatcaagtcctcaccagcaatgaggtctccttgaacaagcccgactcggtcagcttcttcagccactagaagttcaatgatgaaaccagcattaccgtcatcttcatctgttcaacgttcgactctgaagtcaccgttgcgagatgatagatctgttgttgctaaagagaggaacggttttgggaaagctccttctgtgtctaaaagtgatgattaggattctgaagatgataaaccattgagtgct

SEQ ID NO: 104793 - DNA, 229 bp, Arabidopsis thaliana columbia
agaagattgaggttagctcgaaggagcatacctatgtgattggtttggaagatgaagaagagaacaagagtgtgatggttgaggttagaggacttgagatgcttgttggaaaggattttaacatgtcctggaaaatgggtatcaattaatttacatgtgagagttggtaaactattgaggaggagaatgagattatttaaaaaaaaagggtaatgttttgttcttctcc

SEQ ID NO: 104794 - DNA, 346 bp, Arabidopsis thaliana columbia
ggaaagaacacaaaatcgaatctctctgtctccctcttcttcttccagtaaacttggatgacactgtgaatttcataatttgcccttctccggaatggctaatcactctcggcctcacatctgccagtgtttgactcggctagcctccgtcaaacggaacgccgtcgtcacagtctacggaaaccggaagcgcaccggcagggagttcgttgacggcgtactgagccttgccgccggactgattcgtctcggcctccgaaacggtgatgtcgtctctattgctgcttttaacagtgatttgttcttggagtggttattagctgttgcattggttggaggagtagtt

SEQ ID NO: 104795 - DNA, 152 bp, Arabidopsis thaliana columbia
agaaaacaaatctgtatttttaattcacacaagtaacaacaaaatcttgaaaatgttcagagagattgaaacaaatagacatgatacataatcaagattttgttgttacttgtgtgaattaaaagtaaagaaaacaaatctgtatttttgct

SEQ ID NO: 104796 - DNA, 427 bp, Arabidopsis thaliana columbia
  unsure (1)..(427): unsure at all n locations
cccacgcgtccgcccacgcgtccgcggacgcgtgggaaaaatctatcaataatcacttcctctctctctctctctctcttatacaacactcaagaagcgagacacagaggagagattttgtttcagagatcaatggccgggactggattgtttgctgagattcttgatggagaagtatacaaatactacgctgatggtgagtggaaaacttcttcctcaggtaagagtgttgccatcatgaacccggccacgaggaagacacagtacaaggttcaagcatgcacgcaagaagaagtgaacgcggtgatggaactggcgaaatcagctcagaaatcgtgggcgaaaactcctctttggaaaagagctgagcttcttcacaaggctgcagcaatccttaaggacaacanagctcccatggctgagtctc

SEQ ID NO: 104797 - DNA, 154 bp, Arabidopsis thaliana columbia
cccacgcgtccgaaaaaaacatcatttcttctcgcactcttcacctgctccaatggacgaaagacccgagacagagctaatatcaataccagccacaccacgagtttcaacaccggagattctaactccctccggtcaaagatcacctcgtccg

SEQ ID NO: 104798 - DNA, 390 bp, Arabidopsis thaliana columbia
caatcagaaaggctgtcggggagaagataattccttcaacggataatcgaaagcagtatcacagtaaagctcagcgagtaagattgtctttgctctttttgagaaaatctcatgttgttactatgatataacgttgcagaagcatgaagacatacatcagttttttccttttttcttgagcgaaactaggaaggacaaaatacatttaaatgatcttataaggcactttactccatttatacctttttgtactctcgtttccctttcagttttgaatataatgactttgatgtttttttgctgtgcataacaggaaatatttgaaaacaacaggaaagacataactgtggccatgatgaagaattatccacagcttctacgtaaattcat

SEQ ID NO: 104799 - DNA, 248 bp, Arabidopsis thaliana columbia
  unsure (1)..(248): unsure at all n locations
accacgcgtccgggagaacccatgtttcgtttcgttttggaaagataagagagataaaggtttcgacttttttaggtttttctgtgtgttttgtgattcatttcgctgattgatatcaattctctctgtttgttgtcncttctcttcaatttcacctgacttttgtttttgttttggataaagttttcacctttgtgtcttctctctgctctcttgtgtgatctatctganaaaggctgatttttttt

SEQ ID NO: 104800 - DNA, 343 bp, Arabidopsis thaliana columbia
  unsure (1)..(343): unsure at all n locations
cttcggtgaacaatcaatctcgaagaagacgaacataaaattttcaatttctctgtaatcttcgcttcttgcgaaaccaattctctatgtcaggtaatcaagaaccaatcttggtgaaagaagagagtgtggttggtataccaacaccactcttgaagcttaaaagttggcaatggtgggttcttgtatccgttaacatctttttccttattggtggtcaagctgcttcggttcttcttggtaggttttactatgatgaaggtggaaacagtaaatggatggcaactcttgttcaaacggctgcttttcctatactctatatcncgcttttgctacttccgtc

SEQ ID NO: 104801 - DNA, 390 bp, Arabidopsis thaliana columbia
cccacgcgtccgcggacgcgtggggttcgagaaaaatttcgattctcttgctcgtaaaagcttcttttgattctctttgactctgttttgtggatagctcctgaagaagaagaagatgatggtagtgaacagctttgatctatggcaaaaagatgttttcttctctgcagctgaagaggttcaaaaatctacagatataatggagtctgcttatagattgtggattagagagaagaaagatgagatttgtaaggaacttcaagcagctttaggtacagctaaatggcagttggaggagtttgagaaggcagtgagattgagtcataaacggtgtggggataatgattcttcatccacacggcataaacagtttgttaccgctattgaaaa

SEQ ID NO: 104802 - DNA, 392 bp, Arabidopsis thaliana columbia
caacttttgtcccacaacgcagaaaagtcctctctttctctctctcgaataataatttttcatttgctgcgtccttttggtgcttgaagcgatgaccatggcagcaaatctagcgcgacggctgatcggaaaccgatcgactcagatccttggagccgtgaactctagctcaggtgcggctagttctgtcgctagggctttctgctcctccaccactccgatcaccgcaactctcttccctggcgatgggatcggtcccgagatcgccgaatctgtcaaaaaggtgtttacaacagctggtgtaccaattgagtgggaagaacactatgttgggactgagatagatccgagaacacagagtttcttgacatgggaaagtctcgaatctgtgc

SEQ ID NO: 104803 - DNA, 391 bp, Arabidopsis thaliana columbia
accacgcgtccggggaatttggataaagctgcctcttggattggctaatcttgtggaggctgcagttagtgaaggatttagatatcaccacgcggagcctgagtacttgatgcttgtatcttggatctctgaaactcctgatacaatcccagccaatgcttctcatgttgtaggtgctggtgctttggtcatcaacaaaaatactaaagaggagaggagtgggtttttcaaagataaaaatgtgtggaagctgcctactggtgttatcaacgagggcgaggatatatggactggtgtagctagggaagtggaagaagaaactggaattagtgcatattttgtcaaagtactggctttcaggcaaagccacaacgccatcttaaaaaagaaa

SEQ ID NO: 104804 - DNA, 204 bp, Arabidopsis thaliana columbia
gccacttggtgaagttatcgaactcggtgtagtcactgtctgaaatcatagtctgataccaagcctcttatatctaggcaaagattttggttttctgatttatgttcttcgtttgtattggatttatctgggattttatgttgttgagttggtaagacgatttttaagaactatgatggtgtttttcaaactcttttcaatctg

SEQ ID NO: 104805 - DNA, 263 bp, Arabidopsis thaliana columbia
ctagttctaagatcgcgagccggccgcccttttttttttttttttgcaagattgataaatatatcgtctgattgataatttcgatctgcatgactatatgaattggttatgtttgttttgatagttaatatctgttattttcatttttgtataacaaataatgttatgtttgcgaatgaattaagtttccattttcttactaaaaaaaaaaaaaaaaaaaaaaaaagaaaaaagagaaaagaaaaaaaaaaaaagggcggccg

SEQ ID NO: 104806 - DNA, 396 bp, Arabidopsis thaliana columbia
cacattttgttcacacagagatagacatggcttccgatataaacagaagaagatcgttctctcttctagtcttgattattgtgatgctttatgggcataaaggtgattcaaaatgtgatttcgaagcaattttcaacttcggagactcgaattcggacactggcggattttgggctgcttttcctgcccaatctggtccatggggaatgacttatttcaagaaaccagccggtcgtgcttcagacggtcgtcttatcattgattttctagccaaatctcttggaatgcctttcctaagcccatatttgcaatctattggatcggattttcgacatggcgcaaactttgcgacgttagcgtccacggttctcttgccaaacacgtctttatttgtct

SEQ ID NO: 104807 - DNA, 100 bp, Arabidopsis thaliana columbia
agacaatccgtaaaggctgtggagagacacatgcagacatttcatcatcgtgagaagaagaagactggtttggctggtgcacatgggacgctttctacac

SEQ ID NO: 104808 - DNA, 405 bp, Arabidopsis thaliana columbia
cccattcgctgccttcgggatcatcctcccattcgctgccgccgacggaagacactcctcttttggggcctcgaacattgtcgtcgcagccaaaaacctttgcaaatgtcttcatcgccatcgtcggcgccggcgtgctcggacttccgtacaccttcaagaagactggatggctcttgggcctcctcacactcctcttcgtatcctccctcaccttcttctgtatgatgctcctcgtccacacccgccggaaactcgagtccctctccggcttcaacagcatcacttctttcggagatctcggcgaatccgtctgcggccctgccggtcgtctcgtcgtcgatgttatgcttgtcctttcccaatctggcttctgcgtcagttaccttatcttcgtcgccacca

SEQ ID NO: 104809 - DNA, 386 bp, Arabidopsis thaliana columbia
gacaacacttcccacaaaaataaaaaacaaaaaaaaataaaaatttggccaaatctctctctttttttgcttcttcgttgtagatgctgctggttgtctgaaaaacatttatctttcgctctgcgaatcttcctgtgcggaggaggaacaatgaacgggacatcgcccgacgaatctcccgattcgacaactcagcggatcgattcgttcaacggcgagcagagagtctacttcgttcccttgaggtggtggaaagatgcgcaagattcaatgccttctgaatcagttgaaaaaagagagatcttgtatacagcaagttgcgggtcgtcttatggaggcccaatgaagttgataaataacatttttaactctgatattttgttcga

SEQ ID NO: 104810 - DNA, 350 bp, Arabidopsis thaliana columbia
aattttcccgtcgtctctgaattttccctttttctcttcttcactccaccgccttccccgaatcacttcctctgcctgatctaattcaatctccttcctagctcaaagaagtcaatttacacgagcagatctctgcactcaaaactcctggatcttcatttctgggcttcaatttagagtttttttatattaaatgggttggagatacaaagctggtctgttcttgattggcactgttgttatcatatgggtcacctccgctgaagttactcaggatatctttacagcctataagcagccatttgcagtcacatatcttggagcttctcttatgattgtttaccttcccg

SEQ ID NO: 104811 - DNA, 301 bp, Arabidopsis thaliana columbia
gatgaaaagtttgttagcacaagaaatgtcaaagcagaaagaatctaaaaagagatcgccaagcattatagcgagattgatgggtctcgatgttttgccttctcagagttcttctcataagcaacaaaagtctatggagaatcagcaaggcaggagtggtggaggcacttcttataaatctcttggaaagcgctcaaagggtgagcagaagtttaaagatgttttcgaagttttggatgcaaagatggcagagagtaacagaaacttatatcatcaggggagggtgaatgctaatctaaca

SEQ ID NO: 104812 - DNA, 396 bp, Arabidopsis thaliana columbia
aggacgcgtgggcggacgcgtgggcggacgcgtgggtcggtctcaggtgggcagtgattataacttcgtctccgtgtctgttcaagctcccattcttgtggccttcacgcttcaggaacaaagaccagtatctctctgaaagactacttctcggaaattttcgtctccatggcacccgtgagggggattcttggcttgcaaagggcagtgtccatttggaaggaaagtaacagactgactccagctttgagatcattcagcactcaagctgcatccacttccaccactccacagcctcctccacctcctccgcctccggaaaagactcatttcggtggtctcaaggatgaagatcggatttttactaatctctatggtctgcatgacccatttctc

SEQ ID NO: 104813 - DNA, 381 bp, Arabidopsis thaliana columbia
aggacgcgtgggcggacgcgtgggcggacgcgtgggcggacgcgtgggctctggcgaaagctaagaggtttcggttacggtctccatctccgatcaaatcacgaagtttctatcggaaattttcagtgatacataccgtcagagattttctttacgagagaattgtcgccgacatactaaagcagagttttgggtgggaattagtaagatttcgactttggaattgggagatctttccattatgggttctgagcaaaacgacagcacaagcttctctccttcagagccaaagctctgcgtcaaaggatgtggcttcttcggatctccatcgaacatgaacctctgctctaaatgctacagagacatccgaaccacggagga

SEQ ID NO: 104814 - DNA, 372 bp, Arabidopsis thaliana columbia
aaaaacttcaaaccaaaaaaaataaatgggagaggttcaagaaaatcctaaactcttatatcagcttttcaaatctccatgaataatattaacaaatttgttctgatctattttattttatttttggtatcaggaagagaagaaaccagaagcagcagaggaaaagaaaatggaagagaagaaaccagaagagaaaaaagaaggagaagacaagaaagtggatgctgagaaaaaaggagaagattctgacaagaagcctcaagaaggagaatctaacaaagattccaaagaagattctgctccggcggcgcctgaggctccagcaccgcctcctccgccgcaagaggttgttcttaaggtttacatgcactg

SEQ ID NO: 104815 - DNA, 371 bp, Arabidopsis thaliana columbia
accacgcgtccgcggataacgtttatgagatcccgcatgtaaggattgttgggaatgtttgctttactaattttcctagcaacactgctttccgagggtttggaggcccccaaggtatgcttataactgaaaactggattcaaagaatcgcagctgagcttaataaaagccctgaagaaatcaaagagatgaactttcaagtggaaggatcagtcacccattactgtcagactcttcagcactgcacattgcatcagctctggaaagagctgaaagtatcgtgcaacttcttaaaggcccgcagagaagctgacgaatttaatagtcataatcggtggaaaaagcgtggtgtagctatggttcccacaaaa

SEQ ID NO: 104816 - DNA, 367 bp, Arabidopsis thaliana columbia
aagaacttcaaggatggttgctcgaattccgagaaattggtggaagtgctaaaacgtgtcaagaaacagagtgaacaactttcttctgcagcaaaagaccaagtggaagctgcaaaccctgtaactaacgtctctgtgtcaaaggatcattttgataggacagtaacaactctcaacattgcggttacctggtttcatctgtatcactattcaaaatccttttccattctagaacctttgtttcaaaatattcagcggctagacgagacaatcgcacttcaaatctgcttcttgttgctggatatttcactggcttgtcgtgatgctgtaaattttttggctgtgtttgactatatggacaaagctt

SEQ ID NO: 104817 - DNA, 200 bp, Arabidopsis thaliana columbia
acgaagcaacactacacaggaagcatcagtaataatgctgtgcacacaccaagcaacaacgatagtgcttggtgtcatgattcattgccacgagggtttcttgacttccatgaaaccaacccggcgattcagaacaactgtcagattgaggatggtggcattgcggctgcttttgatgacattcaaaaacgaagtgattg

SEQ ID NO: 104818 - DNA, 99 bp, Arabidopsis thaliana columbia
attacaactccatcttacaacactgaactactagttttggctgagaatttggcactgagaatgcttcctgcatttgctacaccgactggaatcccaatt

SEQ ID NO: 104819 - DNA, 384 bp, Arabidopsis thaliana columbia
atctgcttcacgttcgcgacattactctcttttaaggcgcttccttaattttatcatcttctcaaatctcaccctgagtattcacattttcaaatttcgacgcggtttcaatactcaaaactcaagtgctccaaactaattccggtctttacttgcgatttagaggtgggtattgactacaggttgtagtaagggagtctatacagagccgagtggaatcgtgggtcagagaccagagggcaaggttcttacgggtttcgtggggaccgattcagtggaggttccggtggccaacatggaacggatgagatgcggatcaaaggattaggatccgtcgggaatacgagaagcgcatgttgcacattgaggatctctgtctcgcac

SEQ ID NO: 104820 - DNA, 412 bp, Arabidopsis thaliana columbia
accgaagctgaaagttttctctgacaagtctgatgatgtttctgatacaactatggacgaaatggtagagaagctagatttgaatgaaggcgtcaaagcaaagttcttccttaacttgataaacctgtgcgactcagctggtgaaaagctcttggttttcagccagtatctcattccactaaagtttcttgaaagactagctgctttagctaagggatggaaactagggaaagaagtttttgttcttacaggcaataccagttctgagcagcgtgagtggtcaatggaaacgtttaacagttcgccagacgccaaaatattctttggttcgataaaagcatgtggagaaggtatctcgcttgttggagcatctcgcatactaatattggatgttcccctaaacccttctgtg

SEQ ID NO: 104821 - DNA, 252 bp, Arabidopsis thaliana columbia
aaaagcctttataactctttctggggtttttaattctctcaacgaacaaaaaaaaaaactcaactaatattctccatcctctttcttcagatttaagagaaagcttatcgttatattctctcttctcttttctttttgactcccacaagaagaaagcaaatttctttttctcaggattgcttgaaaactgtagaaatctttaaggtttttttacaccaataagagtcagagagagagagagagagagaaaga

SEQ ID NO: 104822 - DNA, 358 bp, Arabidopsis thaliana columbia
gtcctcttccattttcaccggtgttaagttctctccgatcttagctccctttaactccggagatagccgccgctctcgatatctaaaagatagccggaataaagttaggtttaatccatcgtcgccgcgtctcactcctcatcgtgttcgcgtcgaagctccgtctttaattccctataatggtctttgggcggcgcagccaaattcgcataagggacgtttaaagaggaacattgtttcgggaaaagaagctaccgggatatcactttctcaaggacgtaatttctgtcttacttgtaaaaggaatcaagctggaatcagaagagcattacctagtgcctttgtggatagaactgca

SEQ ID NO: 104823 - DNA, 385 bp, Arabidopsis thaliana columbia
accacgcgtccgagcaaatgtgttatgtgtgagtgagattgtgtgagagaaaagaagaagataagtgagagagaaagagagaaagagagaaaatgaagttcttgttccagtgtccatgttgctcttgcttctgcttcatgaaaccaaagccgggcaaaccaaaagctgttggagatacaaaaccaaaggaggagaagaagaaagaggtgaagaaagaagagatcaagaaagaggagaagaaagaagagaagaaagaagagaagaaggaaaccaaagcagagaaggctgagtgaaaactctactttgagaaaatgtaattaattatcccatttttattattatttatctgctatttgatgattatgcaagtaataacatgttattt

SEQ ID NO: 104824 - DNA, 292 bp, Arabidopsis thaliana columbia
accacgcgtccgagctgttgagcctactatcatcgaaggaaaagtgttccgtgagctatctgagaaagagagagaacaagtagccaagaaaataacggtgatgggtaggtcatctcctaacgacaagctcttacttgttcaagcactacggaaaaatggagatgttgttgcagtcactggtgatggtactaatgatgctcctgccctccatgaggcagatataggtctctctatgggtatatcaggaactgaagttgcaaaagagagttctgacatcattattttggatgac

SEQ ID NO: 104825 - DNA, 175 bp, Arabidopsis thaliana columbia
cccaagcgtccgcaatatccacattcttcctcatttgagtattagatccaacgaaacgtctctttcattctctctgataggcaacaatggcgcatatgaacatgattgggtttcccaccgagactgacttgtccgatgcaatggttgagtacactgccactctctctgccaagtt

SEQ ID NO: 104826 - DNA, 364 bp, Arabidopsis thaliana columbia
acaatttgtagtttacccagatccttttctcctctgttttttctttcgcattgttatcttcagtgtctgtctcattgttcccttttcccagaagctgaaacaaatctgttttttttttttttgttttgtttctgtgaatcttcagatcttgatctgagagaccctacagattctcttagtgttttggttcactggaatgatcaaggatctagttatgtagaaatttcttagtttgggagatttcatgagattgctaagagttgagtgatactaagttcaggattaatattgtttttgagaagaacacaatcaaagatttagaaagtgatgtgattttttgggttcagatatgttacaccgtctt

SEQ ID NO: 104827 - DNA, 398 bp, Arabidopsis thaliana columbia
ggcgtttttatttggatgcgctttatagattcagaaatttctatctaggattagaggagcttctgaagaatcactttgaggaagaagacaacatatctcacaagtgagcaatgggagcgattgctggagaagagctgaagaaaatggagaagacacaggtgcatgttgcccgggaagagaagatattggttctggtgagactgagacctctgaacgagaaagagatcttggctaatgaagctgcggactgggaatgcatcaacgacaccaccgtattgtacagaaacacgttgcgtgagggctcaacttttccttctgcatactcatttgatagagtgtaccgaggtgaatgcccaaccagacaagtttacgaagatggccccaaggaagttgctctc

SEQ ID NO: 104828 - DNA, 132 bp, Arabidopsis thaliana columbia
agcaggttatctcgctagaattgaagcatggggaaactgatgcaaattctaaaggttacttgggtcaggtggctgatcttcaatccacactatatgcatttcacgtgataagttcaagcctcgaatctgctt

SEQ ID NO: 104829 - DNA, 179 bp, Arabidopsis thaliana columbia
caaaaaaaaaatccattaatccaacaacagcaatatctggaaactaagacaaatctactccacaagtctttcgcttttcccctctgcattttgtgtttcatttgcttcagtttgttcccagaatttgtcttagtttccagatattgctgttgttggattaatggattttcagtttgatc

SEQ ID NO: 104830 - DNA, 399 bp, Arabidopsis thaliana columbia
gccacactcttaacaacacaactcagaatcgctctcgccgctgtttttctgtgaagagttatgatgccgaaagctgcgtgggaaccagaataccacagagtatttgtggacttatgcgtcgagcaaaagatgttagggaatcaacctggaacgcagcatatattgaaaccttttctacaaagaactggcgctaggttcaccagaaaccagcttaagaatcactgggatacaatgatcaagcagtggaagatttggtgtagacttgttcaatgcagtgatatgcaatgggatcctcagactaacacttttggtgctaatgatcaagactgggccaactatttacatgtgaatcctgaggctgggcagtatcggttgaatcctccatcgttcctcgagaaa

SEQ ID NO: 104831 - DNA, 261 bp, Arabidopsis thaliana columbia
gaccatacgtcgtcgttttgttcatcttctatttgcatgcacttgtttgttgtctcggagactctgttttggtgaggacagactcactttctcaagtcctagcaaagactcagagtcagagacccttctatgcaaaagtggtattttcaggtttgggttcttcacgcctgttaattccactactcggttacatgatgtagggatttggtacgaaaagattcgaatccagactgtggtttgggttgctagcaaagactctcc

SEQ ID NO: 104832 - DNA, 348 bp, Arabidopsis thaliana columbia
accacgcgtccgttttgttttaacgacatgtatttggtgttgcacatacgaaaccgtggcgaaattattacttgcaccagcagaggagctatcctatcaatacaaggaaaaactttgaccacatatctgattccgttactgatgattaccgtacgcgtactaagatgcatagaggtagtacaaaaggtcaaggggcatcctttgtggcaagcgactcccatgtgaaactactgatcacgtcgttcagggtgcctgagcttttcatagagattccagaaactgctactgttggctcattgaagagaatggtgatggcagcagtgagcactttactgactgatggacacc

SEQ ID NO: 104833 - DNA, 350 bp, Arabidopsis thaliana columbia
accacgcgtccgagaccggcgacgaatcgtcggcgagaaagatgcgacgtaaagtacccacgtcgatcgaatctctagacgccgatatactgtgcatcatcttctcttttcttgatttgttcgacctcgttcattgtaccgtcgtctgcaattcctggaatgctgttatcaaaaggctgaagctgctacaagcttcttgccggaagatgcaccatctcggttccgactctcccagtagctccacgtcacttgatcgtccagctgagatagatgtggaggattttgcgatgaagcatcacaagatggcattgttaaagggtcgaatcgaaattgaacgatgggaagctcat

SEQ ID NO: 104834 - DNA, 380 bp, Arabidopsis thaliana columbia
atttgtaagctgttgatgtgaattcttttttatggttctcgattgtttaatgatttgattgtttggttatatttgcatgtgggttttgtgtgtgtttggaaatttgaatgaattgatgtgaaaagttgtaactcttgtttttgttgatttaaaaggctaagttttgaaaattttcatttctgtggagagaggtagtgttggatatgagtgatattagctatgtgggttttgtatgcttttgaattttgaaatgaattgctatgaaaagttgtaacctaagaaaggtagtgttagatggaaattagattagtatgtgagttttgcatgttttagaagcttgaaatgaattgctttgaaagtttatagctttacgctgatat

SEQ ID NO: 104835 - DNA, 414 bp, Arabidopsis thaliana columbia
cccacgcgtccggagatctcattctccctctcgcaattctccgtcccctcgaatccaacaaaaagattttaatgtaaaatcactctattgatccacaatgtcgatgatgttcccatcgtttcagttgctagaacttaacataatatcagctcaggacttggctcccgtcgcacgcaagacaaagacttatgcggttgcttgggttcattccgaacgtaaacttaccacccgtgtcgactataatggcggaacaaacccaacttggaacgacaaattcgtattcagagtcaacgaagaatttctctacgctgatacttcagcagtggttatcgaaatatacgccttgcattggttcagagatgttcatgtaggaacagttcgtgtcctcattagcaaactcattcctcctaatcg

SEQ ID NO: 104836 - DNA, 375 bp, Arabidopsis thaliana columbia
ggcttattgctaggtcaccaaacctgaagagcttgaagttaaaccgtgcagtaccgcttgacgcactcgcaaggttaatgagttgtgcgccgcagctagtggacttaggagtagggtcttatgagaatgagccagatcctgaatcttttgcaaaactcatgactgccattaagaaatacacatcgttaaggagcttgtctggctttttagaggttgctccactctgcctcccagcgttctacccaatttgccaaaaccttatctctttgaacctcagctatgcagctgaaatccaaggcaaccacctcattaagcttattcagctttgcaagagacttcaacgattatggatattggatagtattggtgacaaag

SEQ ID NO: 104837 - DNA, 399 bp, Arabidopsis thaliana columbia
aaaggaaaaaagttgctctcgcttcaggttttttatttcccgccaattatttcgacaaaaatggctcctaaatcggataacaccgaagctatcgtactcaactttgtcaatgagcaaaacaaacctctaaacactcaaaatgcagctgatgctctacaaaagtttaaccttaagaagactgcggtgcaaaaggcacttgatagtcttgctgatgctggaaaaatcacgtttaaagagtatggtaagcagaagatatacattgctagacaagaccagtttgagattccaaactctgaagaacttgctcaaatgaaagaagacaatgccaaacttcaagaacagcttcaagagaagaagaaaactatcagtgatgtggaatcagaaatcaagagtttgcag

SEQ ID NO: 104838 - DNA, 400 bp, Arabidopsis thaliana columbia
cggacgcgtgggggagaagataatgttgtcaaggtgtgggatttgactgctggaaaacttttgcatgagtttaagagtcatgaagggaaaattcagagtctagattttcatccccatgaatttctgctggcaacaggttcagctgataagactgtaaaattctgggaccttgaaacattcgagcttattggttctggtggaactgagactactggggtccgttgcctaacctttaatccagatggaaagagtgtgctttgtggattgcaagaaagtcttaaaattttctcatgggagccaataagatgtcatgatggagtggatgttggatggtcaaacttgtcggatatgaatgttcacgagggaaagcttctcggttgctcatacaatcaaaattgtg

SEQ ID NO: 104839 - DNA, 401 bp, Arabidopsis thaliana columbia
gaagaaacaaagcgtgcctcttctctctttcttcatcattctcatcaagctttcttcttcaccaaattcccaacactatcattcccttcttcctctataaagaatcatcacttcttcttcttctcaatggatccttgggatacttataacataccactagaccaccaacaccgtctccgtaaccgccgtgaccaccgtcatccttccttctcctctactctcctcgaccaaatttaccgctccatcgacgattcctctactaactcctcatccatgagaaaaaccaaacatcagaaccgcgaggacacgcgtgtttctgctaaccgccgcgacgatttcaacagatccaagaatcttaaaaccatagaacctgttttcttcaaacattcaagctcaagctc

SEQ ID NO: 104840 - DNA, 400 bp, Arabidopsis thaliana columbia
agacaccaaattcgtctcacggccttgtttcctggcgagatccttcccggtggttcgttgttcaagcaccagagacgtacctaagcttgaactcttcagccgcggaaaattcgaccggattcttcaagatccgccacttattgaaaaagccgaatccgaactctcaggtacaacaatttcattcacttcctatacatagacgaacactgattcagataagagtatcaacgaatcatgtttgattttgatttcagattactgttcgacgcttgaaggtgatgactcttacagttgctggagagcttactttgaactcaaagatctcgaagtaagtaattctatagttttttttttcaatttgagaatccaaagaatttagtgatagtgactagatttggtt

SEQ ID NO: 104841 - DNA, 402 bp, Arabidopsis thaliana columbia
agggaaaactgccatttctggactggatttgtccactgtcgctgggaatctagctgctccttactacaaagacatcgttgtgaacgcaacacttatgggccctgagctccaagtccagattggtcccatgggagaagatacagggaccaaaaacgcgatcttgaacggtgttgaggttctgaagatgagcaattccgtgaacagccttgatggagagtttggagtggatggtagaaccactggcatggggaagcatggtatggtagcaaccgcggggtttgtgatgatgtttggagctttcattggtctgggagccatggtttacaagtggaagaagaggccacaagattggcagaagagaaatagtttctcctcttggttgctaccaatacatgctggtga

SEQ ID NO: 104842 - DNA, 389 bp, Arabidopsis thaliana columbia
gccagagaggtgaggcggtttatggctggtcattttgaccgacagcagatggatactgcttatagagatttgactttcagggaatcaaacgctagccatgttcccaatttccagaggccacttttgaggaagaatgtagggggaagaatgtctgcaggccggaggaggagttttgatgatagccaactgcaaattggtgacatatcaaattttgttgatggtccagcttccctgaacgaggcccttaacgacggactgaactcaagttctgattggtgtgccagagttgcagcttttaattttctccaaactctgctgcagcaaggcccaaaaggtgctcaagaagtaattcaaagttttgagaaagtaatgaaactatttctccggca

SEQ ID NO: 104843 - DNA, 386 bp, Arabidopsis thaliana columbia
ctcttctcgtcctagctctgtaactgacgatgaagatttcttctttaaacctccaaagaacaaatcttcaagtggtggtttctcactttctagattctcctctgttttcaagaaagatcccaaaaccaatctccaccaccactcctcctcctcttccaccgcaacaaccgccgcagctccgtcgtcggtgaagagaatgagctcaacagctaaagaagtaatacggaaatacatgaaaaaagtcaaaccattatacgaaaaattatctccaaaacagagctccaatataaaaacagagtcatcatcatctctcaaagattccggtaacaacatccgtgggaccaccaccgtaaccaccgtcaccgccgctccaaccgttgtctcct

SEQ ID NO: 104844 - DNA, 388 bp, Arabidopsis thaliana columbia
caggggcagaccttgagtcggctatacaaaattgcatgggctaccaagatgacggtgaaggtttcatggttggggtgcagataaatcctgtatcaggattgccttctggatatccagacttgcttcgtttcgtcctagaacatgttgaagaaaagaatgtagagccacttcttgagggtttgcttgaagctcgtcaagagctaaggccacttctgctgaagtcccatgaccgcctcaaggatctgttattcttggacctcgctcttgattctactgtcagaacagcgattgaaagaggatatgagcaattgaatgatgctggacctgagaaaatcatgtacttcatcagcctagttcttgaaaatcttgccctctcttcagatgacaa

SEQ ID NO: 104845 - DNA, 372 bp, Arabidopsis thaliana columbia
cagacttccagatcagtagcttctacaacattaacatcaacacctatgttgttgtttgtaagatttgtgtgaagtcatgttcttgattcccaagggtatcaagaacatgacttcactcaaacatctagacatatccaacaacaacatttcaagtcttcctccagaactgggtttgcttgagcctacacttgaggttctacgacttgacgggaacccattaagaagtatcaggaggccaattctagaaagaggaacaaaagctgtgttgaactacctgaaagacagacttccagatcagtagcttctacaacattaacatcaacacctatgttgttgtttgtaagatttgtgtgaacaccagattgattttat

SEQ ID NO: 104846 - DNA, 397 bp, Arabidopsis thaliana columbia
agaaaaaaaaaaaagtaaatgcaattgaaacggagggaatattcgccggcgaatttccggtaaatgtctgagtggtttatcagtaggaatcctactttttcgacggcattcccaagtagttgtattacagttgtaaatcccaattttattctcctttcttcagaattcgattcgtatactcctcaatgcctatttaatagtttaaccaccaccatgcgtctctctaaacgccaactctcgcttcctctttctctctgcttctctactttctctcctcgttcccgtttccatcattttcctggaaaatatccagctcctcgaagagaatttctccacactactgggacaagccagctgtgttttaagagttcgatggaagatcagaaaccgagtgctc

SEQ ID NO: 104847 - DNA, 402 bp, Arabidopsis thaliana columbia
cccacgcgtccggcatttttggtcataaaatccacacagaggtggttcgacatccaggtgaatccaagtaataaattgcaggattctctctctataatatatatagatatagcttgcaatcatttcctgcgtttggatcggtctgggttttgtcgagggttttttggggaagacgaaattagggtttagttggggcaaagtaagtagtaaagaagaagaagatgcagcagcagcagtctccgcaaatgtttccgatggttccgtcgattccccctgctaacaacatcactaccgaacagatccaaaaggttccttctttctcaccctatatctctccctctctcttaatttgttcaacactacttaagaggctcttagagcttttttgtactgacaaaatca

SEQ ID NO: 104848 - DNA, 329 bp, Arabidopsis thaliana columbia
ggaatagagagctaaagaaaaagaaaaaagactacatttctacaaggacgttggttcttttagtcgtcgtcggtcgtcgaagaaagatcttctccttctttcttcgccgtacgatcgtcgtctaatgggagaatcatcaaatccaatggctacaagttcttcttcctcctcctcctcaattcctccttcgtctccaacaccctctccgacgtccacaaccactccgccacgtcaacatcctctcctccagccaccatcttcaaaaaagaagaaaaacagaacaaacgttttcagagtcttacgcaccgtgtttcgatctttcgcaatct

SEQ ID NO: 104849 - DNA, 165 bp, Arabidopsis thaliana columbia
cacaaaacaaatcccaaagcttcagaggaagaagaagaagagagtgagaaacaatggcgtcgacgactctctcaatcgcaacaacaatccgttcctcttctcctctcacttccgcttccactcatcacttcctttccaaacccagcgcaatcgaattcccatttc

SEQ ID NO: 104850 - DNA, 205 bp, Arabidopsis thaliana columbia
ccgcccacgcgaccggaggatgaggatgttgaatatgagggggatcatgggacacagtacttagggaggccagttggtagagctgaacatgacgaggatgcaagtgattttgagccggaggagaatggtgtggaagaggatatagaccaaggagaagacgatgacaatgataactcaggtggtgctgggaagtcagaggctccgc

SEQ ID NO: 104851 - DNA, 401 bp, Arabidopsis thaliana columbia
gtcacaaggtttccaattttcgattcacgatggaaatggcggaaggggaaggaactacagaggagaactacgacgtagacatcgcgaccaccgcttcttcattaggcggctccggcgtcttccatatcatcaatgacatagtcggattcgtcctctatatgcaccagcagatcccttcggtattacaagacatgagccttgaatttgaaggattgcaaactgaatttatggatttggagacgaatcttgcagaacctcaagtgaaaccactggttagaagaaaactgatgagtagaaagagagaggtgaagaatgagattaagaaactggagaaactgatgaaaaccatctctagtctccgaagtgcgctgcagttaatgatccgtgaagctcctggcatt

SEQ ID NO: 104852 - DNA, 417 bp, Arabidopsis thaliana columbia
cccacgcgtccgcaaaggagcaacccggagctctatcatagttccttctgttcaagagatggtgaaggagaagatgatcacgacggttcctccgaggtatgtacggtctgatcaagacgtagctgagatagccgttgattctggtctaagaaaccagatcccaatcatagacatgagtcttctgtgttcttcaacctccatggattctgagattgacaagcttgactctgcttgcaaagagtggggattttttcagcttgtaaaccatggaatggagtcaagtttcttgaacaaagtaaagtcagaggttcaagacttcttcaaccttcccatggaagagaagaagaatttgtggcaacaacccgatgagatcgaagggtttggacaagtatttgtggtttcagaagagcagaaact

SEQ ID NO: 104853 - DNA, 345 bp, Arabidopsis thaliana columbia
cccacgcgtccgcacaatctctctctttttacaccggcgataattttccgatcccgattataagatggcgaaggaaccagttcgtgttcttgttaccggagctgcaggataataaatcggattggataaccggccaaacatgtttcacatctcatgggtcgaatctccggtcccctccggtttaaaaatgatgggctaataacaaaagtcaaagactcaaaaaagttgttagttaagtctgcgtcgaatcacttgcaaacagtcaatagcttcatttcaatcttcggtgaagaatcaatctcgaagaatgacgaacataaaattttcaatttctctgtaatcttc

SEQ ID NO: 104854 - DNA, 288 bp, Arabidopsis thaliana columbia
tttttgtctcattcccgatcagatctcaacgacgacgagccatggcttcaactttcagcggcgatgaaactgctcctttcttcggattccttggcgctgccgccgctctcgttttctcctgtatgggagcagcgtacgggacagcgaagagcggggttggtgtagcgtcgatgggtgtgatgagaccagagcttgtgatgaaatcgattgttcctgttgttatggctggagttttaggtatttatggtttgatcattgctgttatcatcagtaccggaatcaacccta

SEQ ID NO: 104855 - DNA, 415 bp, Arabidopsis thaliana columbia
gtcgggatctccggcaacaaacgcgccggagtcaagattttgtctctcaactgcttctcctttctttccccattgtaaatttctaaactttagccagaaattgacccaataccctaaaatttgtgtttttggttctccgacctaataatggaggagtctcgaggatcttctgatcaagaagatgaacaaattgttcaagtcagggaagctttaatgtgtcccgacggtgaaaagtttgaatctttacgaacggcgaggttcttaaactacacaacggcatctatcgacgacgatgtctttgaccttcctctcgatgcgtttgtgtgtagaccaccggaagggtttgatccaacggcgaagatctcgtttccagggtggggaactccgtcgttgaactggattgagtgggttaatg

SEQ ID NO: 104856 - DNA, 411 bp, Arabidopsis thaliana columbia
tttccataaaacctagtagtggaaacatgactaagaaagtagagaacaacagagaagcaagcagaaagtatcctcctagaagtagagaatcatcttcagcaatccaaaaccaattcatggcattaacacctctacgtgatatagttagccaggttgctcatgatcttagcatcggtgaggtcatcaatttcagacataaaggagataatatgttgcgggtctcagatttgggatccaattgttgtggggttcaagatttactggctccaagcagtaactatgatcatgacaacatcagtaacatttcgatgaaaataaatccgcatataagaaaagaagctgtaacattttcgtcatatgatggttatgctcatgacaactttggtatattcagttttagtatagtacata

SEQ ID NO: 104857 - DNA, 151 bp, Arabidopsis thaliana columbia
gaaagacacacgtctaacgttaacacacagagagatcagattgcgacatcaaattctacaagacacattatgaacacacatattaatctggaacctgtttcaacatccttggctaaaactaatacgccacggtcccaacattttcacgcat

SEQ ID NO: 104858 - DNA, 374 bp, Arabidopsis thaliana columbia
cggacgcgtgggttttcatcgatcttcaaattccagaaaaaactcgatgaatcttcaagctgtttcttgtagcttcggattcctttcgagtccacttggagtcactcccagaacttcgattcgtcgcttcgtaatccgagcgaaaacggaaccgtcggagaaatcagtagagattatgaggaaattctccgagcaatatgctcgtcgctctgggacttacttctgtgttgataaaggagttacttcagtcgttattaagggtttggctgagcataaatattcatatggtgcaccgctttgcccttgcagctgctgaggttggacaaggcttttggaattgtccgtatgttcaaatgagagagaggaaggagtgc

SEQ ID NO: 104859 - DNA, 270 bp, Arabidopsis thaliana columbia
gaaaactaatataaagattcgattttttttttggaagacctcaaagacacactcttctctctctcgtcttcttcttcccctctttcaatttttttcagattccgagtacaagccctaaatctccgtctctctgtttctctcttctctcaagtctcagctatgaatccttaccagggtttactcgttctgtgtttctcactctgcatttgcttctgtggagtagatagattcttcagggctaaatgagtcattttctcactttctgcttcc

SEQ ID NO: 104860 - DNA, 252 bp, Arabidopsis thaliana columbia
actgatcaagccttggatctttactgaaattaaagagcaccggcattgggacattacctctggagaaagacttaacatcatgaacgacttcgtacgttttggtcgtcaacattggggatccgacacgaaacgagttgagacaactaggcatttcttgctggagtggctaagctacacatttaggtagatacctgtcggtttgcatgatgtgatcccgcagcacatcaactggcgtccgccttcatactttgg

SEQ ID NO: 104861 - DNA, 366 bp, Arabidopsis thaliana columbia
atgctcgaagcttgtgccctttcattattatgtcaacaaccctcctctattgaagatttcttcaatcatcttctccacaacaaaaaaataaccctaatttacacagaaaatatgtggggaattggaggaaattactactggcgaaagaaaaacaacaacggatgagaaagcgaagcgatcgttgtggtattcgcttggatgtctagcgaagaacgcaatctaaatgaaccatgtcgatctctattcttctcttctttgggattctctcgtttgccattctcaatttctcaacatgtctgttttcatctccttctctcatctctctgttttctaatctctctgtttcataaattgaattctcttttg

SEQ ID NO: 104862 - DNA, 388 bp, Arabidopsis thaliana columbia
attgggtgacattgttcctgctgatgctcgtctcctcgaaggagatcctttaaaaattgaccaatctgctcttactggtgaatcccttccaaccaccaaacacccaggagatgaagtattctctggctcaacctgcaagcaaggtgagattgaggctgttgtcattgccacgggtgtccacaccttttttggcaaggctgctcatcttgttgacagtaccaacaatgttggccatttccaaaaggttttgacatcaattggtaacttctgtatatgctcaattggattggggatgttgattgagatattgattatgtaccctatccaacaccgcacatacagagatggtattgataatctattggtgcttttgatcggaggaatccca

SEQ ID NO: 104863 - DNA, 122 bp, Arabidopsis thaliana columbia
aaaaagctcctgctgctacccccccataagtcaactcctccttctttcagatcaccttcatcttctttttgctcctctgatactggttcatgattaaagcacagccagctaatggatctgga

SEQ ID NO: 104864 - DNA, 248 bp, Arabidopsis thaliana columbia
ctgtttttgacgaacacaccaagctctagtagatcggtatcagatgcatcgtaggtttctccaatttctcacaattcagtccaaaattttgagtatgtcgtcattctggtctgtcaattttagtcagttgtaaaccttgcttttgcgatcggaatcgtaaaaatccgatcgttcggttatattcgttttgtatttgagtccaacatcgggtaatgggtaaagtacctgtaggagcgactgttgtttgc

SEQ ID NO: 104865 - DNA, 367 bp, Arabidopsis thaliana columbia
cgagtaaatagttagttccagaccaattctacaacagaaacaaaagagagaaaatgtctttttcaggttatagcttcatcgtactaacattattgtccatcgtcttaactcaaatctatggtttgagaagctttagccgaatggacgatctccaaccggcagaaacactagcggttcacaaccagattcgagctgcggtcggggttgctccattggtgtacgaccaaaaacttgctgcccatgcacagaggtacgctaacgtacgttcccaagactgcgccatgaaatattccaccgacggaacgtacggagagaatatagccgccgggtgggtccaacctatggacaccatgagcggtccgatcgc

SEQ ID NO: 104866 - DNA, 289 bp, Arabidopsis thaliana columbia
gaaaaagatacgaactactcgtcgtaaatctctaaagctaggacgcataacgagtagcagtgatgcaacaggaggtgaaaccgctcctcgcgtgacaaaacctcaatactcatcatcatctacagtggagatttcaataacaaagtctcagccaaagcttgaaactcaagagaaatcagtgaaggccaaacaagagatacagaaagtgaagatagaagaagcagttatgagaggataagaatataaggctactgctgtggatgcgaaacctgaagagcacaaaccaaac

SEQ ID NO: 104867 - DNA, 420 bp, Arabidopsis thaliana columbia
aatcggtccacctttatactttgttctgaagaattataactacagctcagaatcaagacatacaaatcaactttgttccattaacaagtgtaatcctaactctcttttaaatgagattgcaagggcttctttgactccggaactaagctacatagctaagccagctgcttcgtggctcgatgactttcttgtgtggttatctcccgaggcgtttggatgttgcagaaagtttacaaatggtaccttttgcccccctgatgaccagcctccttgttgccctcctggtcaaacgagctgtggcctaagtgaagtatgcaaagattgtaccacgtgcttccggcatgcagatttaagtagtgaccgcccttccacaacacaattcaaagagaaacttccttggttcctcaacgcgctcccttc

SEQ ID NO: 104868 - DNA, 137 bp, Arabidopsis thaliana columbia
taacacacacaccttcaaaatggcatcaagctcactcctcaaggcttctccggtgttggagaaatccgagtgggtcaatggataaaacgttctcttccgtcagccttcttcagcttcggtcgtcctccgcatccgtg

SEQ ID NO: 104869 - DNA, 376 bp, Arabidopsis thaliana columbia
cggacacgtgggggaagaagaagaagaagattgacaaacaaaaaggattcacctttagtgactgagtgagagaaagagattgaaggaaaaaaaaaaaaaagggtgaagctttggagagaggataaccacgtagaggattctaatccgtggttgcaaacgaaggacccagaatttcaatctttttcagtttctggaatctcttgcttcgatcgaatcactctcatgtctaacgaagactctcttccgcctttcactttgtttggtttggatgatgtcgaaaattacggtctggtcactgaagcagacaattcgttacctttagatatacacaatcaggtttttcaacttgtggagaagggaaaccaatcattcaaag

SEQ ID NO: 104870 - DNA, 387 bp, Arabidopsis thaliana columbia
aacacgcgtccgaagactacgaaatgatccaaaacttgaagacccttaagagactactaagtcgtcgatagcttcaacctctcttttcttatctctcaaatattttattcttattctctaccatatatcttcacctctctattctatataaatgcataaacttgagtcacgctgataagtaaattaagaaaggaatattcattaagatggcatcttctatagtctcttccatgtttctctttctccttcttcttcttgtatttccacatatagataatgtccttggcgcacgaatggaactccgtgaacttggagagataaattatgctgatccactaggttttactcggcccattgtccccattcatgttccgggttttccgcctc

SEQ ID NO: 104871 - DNA, 253 bp, Arabidopsis thaliana columbia
gtcggttataaattcatttcattttagtataaattcgctaccgtttttttctgtcaccggagctccttcttccaggtaacaaaagaaatacttagatcacttgatgattgagctaagtttcgatatctctgttttgattagatctttgagtccaagttcctagttcttgctaactcttcgatccggtgcagtagctcatcttttgtgtgtgtgtagagttttataggctaaaaactcgggttgtgttcttaag

SEQ ID NO: 104872 - DNA, 410 bp, Arabidopsis thaliana columbia
caaaaacgagctgttcatatatattttaaagaacaaaaactaaaaaaaaaaaaaaaaaaaaaaactttgacaaaaaaaaaaaatgtcatatggatacgacgatgaggatgcaaagaggaaaaagagatatgtaattatctctatctcctctgttcttttaatctccatggttgtcgctgttaccataggtgttagcgtcaacaagtccgataacgctggtgacgaagaaatcacaacttctgttaaagccatcaaagatgtttgtgcaccgacggattacaaagagacttgtgaggatacactaaggaaagatgcgaaggacacatcagacccgttggagctggtgaagacagcttttaacgcaacgatgaaacaaataagtgacgtggcaaagaagtcacaaactatga

SEQ ID NO: 104873 - DNA, 270 bp, Arabidopsis thaliana columbia
gtttctgaggggataaccattttttttttcttcttaaaaagtttttttttttgtcaattggtcttcttcttcctcatccgctcgcttacatttaatttaataataataaaaatcggtgttcatttttatataaaagtatcaattttgtgtttggttgatccagccgtagtcgtagtagatctacaatctctgaaattccatgcccacatctccgccgtcctcttgagatccttctcttcagatcagtttcatgcacaacttgagttgcat

SEQ ID NO: 104874 - DNA, 347 bp, Arabidopsis thaliana columbia
cggacgcgtgggcggacgcgtggggatcattcacaatctctctctttttttcaccggcgataattttccgatctcgattataagatggcgaaggaaccagttcgtgttcttgttaccggagctgcaggacaaatcggatatgctcttgttcctatgattgcaagggggataatgcttggtgctgatcagcctgtgatcctccacatgcttgacatcccttttgcagcagaagctttgaacggtgtgaagatggaattggtcgatgctgctttccctcttctaaagggtgtggtggctacaactgatgctgttgaagcgtgtaccggtgttaatgttgctgtcatggt

SEQ ID NO: 104875 - DNA, 292 bp, Arabidopsis thaliana columbia
ggtccaggtacacgtccggcttctcgtgtggagccttacatgtgtgatacagattgtaatccttcttttccaatgccgaattttataacacaagctctctttgatggaagtcagactgggcttcgtgtacgagatgggagatcattcccgagcaacagtgatgtttgtagtcatgcgcctcagaattttttaggagctcaatccagcttgcagagttcctctgttgaaccagttaacttcgatgtgttactgggatatggtgaagctactggtcatatcaagcctttgcccg

SEQ ID NO: 104876 - DNA, 363 bp, Arabidopsis thaliana columbia
cccacgcgtccgcccacgcgtccgcccacgcgtccgagtaaacgttaatacacagatctccagcaaaaggcacatagataaattcgaggcagttcctgattctaaaagattggcagttggggctcaaataggatcacccaagagatctgttctcccaagaatgtccactttatcccgagaaacatcatttaagggcttagagaagccaacgagaaagctagctcattactcatctttcaatagccactccagtgatgacacagaaagcacacgatctactgactcacagctccagtcccctaaaggttcgtttttgaagtccaattcgtttaattctttgagctctagatcaaaagtgagacc

SEQ ID NO: 104877 - DNA, 380 bp, Arabidopsis thaliana columbia
tgctgagcttatcattgagtaatcatgttcctccattaacgctcttgagccatgaacgaagaatcctcaagctccaaagtcgatcgtctattctctttcaccaactcttccacactaagttccttctcctgtcgaattcttcctctttgtcttcttcacatggagttgttgctatttcggcatctccgtcttcagtcgcagttccggaattagaagacgaggaccacttcgatgacgaattacgtcgtctattggcgctcgtaccggaggagatacgccagacaccgaaggagcaccctgaaattagtgaactcatagagatagtgttggatttaggtcgtaaacctctggcgcgattcccttcaggtgactttgttatc

SEQ ID NO: 104878 - DNA, 216 bp, Arabidopsis thaliana columbia
cccagaataatagtaataagaataataataatagtaatcgtaattccaataatctcgagagtaatcgtttgatcaattgacaaaaaaatcatggagtccaggaaaaactctgatcgtcaaatgcgtagagctaaatgcctttcagctggtgagaggatgaagacgaggtcgccctccgtgaatgtgatcggaggtggtttcggtgggatttcagct

SEQ ID NO: 104879 - DNA, 384 bp, Arabidopsis thaliana columbia
gtagtatataccatcttcgagtgacatcattcatcacgaaaagaaactatagtgaatgcttgcgctctgttgttactgcagataaaaaagagaaaaaaagatgctgaagaacctacaaagtatatgggttgtggagactgtgacaatctgagtcgctccatcacggtgcctgctgctacagatgacatagaagttctgcagaggatttcaaagaagttgtttgggtcattttgcttgggtaagtgcgtctcagctgctttgaaaagatggttttgcagttgcgatttactgagcatctatcgagtccttcctcacatgcaagacgcagcttagttgaattttcaaattttataaaagatggatgagactagtttgaaagattaa

SEQ ID NO: 104880 - DNA, 377 bp, Arabidopsis thaliana columbia
ctctcagtatgtcgcaaagtagcagcaacttaattctctcatggagtctcttacatcaaatccttccttcgcttgtttctctaaaaccatttctcattacccttctcgtttctccttcgtaaagctaacctctatccaaaagttggaagcttccaacaacaccttatcgttattctgctgtaaatcatcttcgaatcctaaaccagattgcaatcgtcgtatcaagttaaaccctttatgtgtattgcgtccaatcattcgaacaataaagggtttggtttcttctcaatccaggcaatggatgtctcgttttcgagcttacagagacgacacggcggcgttttctgaggatttcgctggagatttgaagcataacg

SEQ ID NO: 104881 - DNA, 406 bp, Arabidopsis thaliana columbia
gcagcaaaaaaaaaaaaaagggatagagtctccgttgattcaggtagctcagcgtcctctgagatgaaacgattgttgttgtttgtttgttgattttagtttttagtttagtggaagatgatcggtaatagcgtctacatctcaccgtcaccgtcaccgtccgaccactctctctcgcccaaccctaatctctgcatctcggcgatggaagagcagctggttgttgatgatgatgatgatgaccttgctcctcctccaatccctgatctcgatattgaccttgaagatgatgatgacgcctgttgtcacggcttgcttcatatcgcacctaatcacgaagaagaaactggatgcgacgaaaacgcttttgctaatgaaaagtgtttgatggctcctcctcctactc

SEQ ID NO: 104882 - DNA, 309 bp, Arabidopsis thaliana columbia
ggtcgggccacgcgtccgcccaaacgtccgcaagaacgtgcaatcggcttcagatggatgtgtgactgacgagtaaagtgaacgatctaagagagagttttgtgaatgagcagcagaatgtggtgtaggttcatgacggaattctgttctcaatttattgcagcttctaaatcacgttacattgtgactgaattctcagcaattgcagggttcgtttttaagattttgtttctcttaaatgtcaaaataaaaacttgtgattgtggccgaattccaaagaatataaagacagaataaagacggatttgc

SEQ ID NO: 104883 - DNA, 421 bp, Arabidopsis thaliana columbia
caaacatccacgcgtttgttggcactgccacaaacaggaaattttggtagtttcaattggtaaacatgtactgcgtattgatactacaaaagttggcagaggtgaagtattctctgctgaggctcctctccagtgtccccttgataagctgatcgatggtgttcagattgttggtaagcatgatggagaagtgacagatttgtcaatgtgccaatggatgaccacgcgtctggtttcttcttcagttgatggcacgattaagatatggcaagatcgtaaggcacaaccacttgtagttttgaggcctcatgatggacatccagtcagttcagccacgtttgtgacatctcctgagagacctgatcacatcatacttatcacggggggtcctctaaatcgagaaatgaaaatctgggtctct

SEQ ID NO: 104884 - DNA, 241 bp, Arabidopsis thaliana columbia
accacgcgtccgatgaattcttgcgtgtttcaaatttttatgttgtaatatatattgttggattctagattcgattcgtgattcttgtttttgattcttaatgtggtatcatagtttggatcgttcaaaaagttgtaagtcaaaaaaaaaaaaaaaaaaaaaaaaaaaaaaaaaaaaaaaaaaaaaaaaaaaaaaaaaaaaaaaaaaaaaaaaaaaaaaaaaaaggggggccgctctaaag

SEQ ID NO: 104885 - DNA, 214 bp, Arabidopsis thaliana columbia
accacgcgtccgatcatttcttcttcttcttcctcactttgttcatcatcttcttctccgatctaggcaacaatggctacaccagaagcttcctcagcacgagatggattcgtatacatggcgaaactcgccgaacaagcacagcgttaccaaaaaggggttgagttcatggataaagtcgctaaagctgttggaaaagacgaactcaccgtcg

SEQ ID NO: 104886 - DNA, 307 bp, Arabidopsis thaliana columbia
atttctcaacttctcaattcccaaaaccagccgaccgattattgagccagcctcgttaccctagctcctctcctccgtcaaatcctccggccaaatcaacggatccgccgtcgtaacccatctctcagatcgacgaatctcccgactcgccgatcctcctaaggtcatatcccttaaatcggctcagatctgtggctcatagatccagcgccgatcctctttctctctagctgctgtttctgctttccctccaaaaaaataacttccctctctctctcgcaacggtttttactctacggatcgtttc

SEQ ID NO: 104887 - DNA, 353 bp, Arabidopsis thaliana columbia
cttgtctgcttgttttgctttgatccgtcgtttatactttgttgtggtgagtggaatttgcttcaaaataaatcctgaaattattacgagattctgaaccagttccatttgatataatataataatataaacaatacctgaatctttaagtcaatacttactacaggtttgttatcaaaacaagttcttctctgttttagtaaatgtttcttctgtctcagtctcactagaacgatctgtccatgagattttctcgtaaagggttattatggctgaaggagttgtgttgtttggagttcataagctttgggagcttctgagtcgagaatctgcgcgattgaatggaattggtg

SEQ ID NO: 104888 - DNA, 332 bp, Arabidopsis thaliana columbia
gcgtgggcggacgcgtgggttttttttttctttttgttcaacgaatctctatctctctctagattttggggattttgctctctctccctctctgtctctctttggtgctcgtagctttctgtctcccaattgagagaaggagggagatagaaacgtcgatgggcttaattgtggatgatgataacgatggagaagttttgattccgccgccgaatttttcaatggtagaagatgaaatttaccgatctgggtttcctgagctggagaatttcggattcttatcaaccctaaatcctcgattcatcatttatctgtgtcctgagccataccct

SEQ ID NO: 104889 - DNA, 263 bp, Arabidopsis thaliana columbia
gtaaaaaacaaaactttactaattcaatttcaaagtctcttcttttctccagatactctgttttaccattcaaggaaaaaggataaatcttgtagaaagaagatgccaaaatgatttttttatttagaaattaaacagcgacgtcgttttgcagctacagtgcgatcatctaatcagtcagtgtcttcaagtttaaaccgcatctctagtctctctctacttctctctgtgtacaatattcggaaagtgaggaagatacactg

SEQ ID NO: 104890 - DNA, 252 bp, Arabidopsis thaliana columbia
ttcattcttaatttctcaaaaatcttatctttctccctcatttttcccgtcgagggttccttaatctccttcctaggaacgtttcatcgatttcatatttgctttccttaatccacaacgtttcttccttcgtttttttctgcaattttgttttcctttacaccaaattcatctcttagtcttgtccaattttcgattttttttccgacaatcctgattgtttgtttttttatctgtcgggatttcgaatgg

SEQ ID NO: 104891 - DNA, 260 bp, Arabidopsis thaliana columbia
cggacgcgtgggttgcataggagcaccccttgctttgaatatagattcaatcttgtctccgtttggtgcaaccattttgttcctcgtcatcacgtttcatctcttggcttttgttgctggttactttttcactggtttcttcttcagcaaggcacctgatgtaaaagctctgcaaagaacaatttcctatgaaacaggaatgcaaagtagtcttctcgctctggccctcgctacaaagttctttcaagatcctctcgttg

SEQ ID NO: 104892 - DNA, 255 bp, Arabidopsis thaliana columbia
gttgaaaaaaataaaacacatatttcagactgtagtttagatgtggtaaaatatagcaagaatataaaaatatcaatataagtttcaaaatttagagaagaaagaacttcattgattgtgagttctaaataaataatggttagtatatattagtgatagagggttaggaagaagtcgttatatacataaactcagtgtaatgtttctgtcaagctttgctttgatttaagattgtactttcttccttctcactgt

SEQ ID NO: 104893 - DNA, 254 bp, Arabidopsis thaliana columbia
ggaggatcctgcgaagaccaaccagtctgttaattttgtataaacactgaaacgaagaagatcttccgagaatattctctccttctcacgcataccctagaatattgtttcgtctctcttccttctaggtttgcttatttgccccaactcgacgcgaatcatcagcttttagagattctgtcaactcaaagattgtttctgaattggaagcttacagaggtttagcttgagatgatatgactagtcagcaggag

SEQ ID NO: 104894 - DNA, 255 bp, Arabidopsis thaliana columbia
agtgggactgaaggagcgttattttatataagaaatggatttaacaacttcaacttctgtttcaatttggcaatgttggttggcccaataaaacctggtaacaagaaggaattatgaccgtgccctgctggttgtgatttccccgatgtatatttggctggcgttcatgtcacttcagccccacaaagaagaaaggttcctttatcctatataccctcttatttgtgtctctgcttctgctgttattgagaacat

SEQ ID NO: 104895 - DNA, 185 bp, Arabidopsis thaliana columbia
ggcttacacaatgagaaaactggtgactatatttattatcttcatgtgatcatcacgatgttacagtcatacaatgccagttaaagtctcgttcgccatgaaggttgagccgcttccaaccgcacatgtgaatgcacactctttcgtcctatggactgcctctgtccacatcaccacatttgatc

SEQ ID NO: 104896 - DNA, 316 bp, Arabidopsis thaliana columbia
cattttctctcactttctcgagaaaatataacttcagaacttttcagagttagtttgacttcaaacgtgggaaaaaatggccggaagtcttgtaaaatgcagcaagatccgtcacattgtgagactcagacaaatgctccggcgatggcgtaacaaagcgcggttatcttcggtcagccgttgtgtaccgtcggatgttccatctggacacgtggcagtttgtgtgggtagcggttgcacgagatttgtggtgcgtgcgtcgtacctgaaccatcctatcataagcaatcttctggttcaagctgaggaagagttt

SEQ ID NO: 104897 - DNA, 243 bp, Arabidopsis thaliana columbia
ttcgaaaccaaaatctctctctcgtttgactttccctctctcccgtcgtttcaccggaaaaaaacaacagaaaaaaaaccgacgggagagaagaacaaacaataatggggaaaggaggacgtgagaagatatcatcaaacgaagaagaaagagaaggagtcatggctacagatttcttttggtcttacaccgatgagcctcatgcttcgaggagacgtcagattctgtcttgttaccctcaga

SEQ ID NO: 104898 - DNA, 293 bp, Arabidopsis thaliana columbia
ccaacgcgtcagcggacgcgtgggtgggcagatagcccaagaactttgaaaatacgctccgaaaaaggagggagagagagacgaggacgatgaagaatcagacacaacagagacaagcgacaatcgtatcctcctaaattctctctcttttctcttcattcgtaggaacaacttctctccctcctgttaatcccgccgtttcttacattttcctctgtttttttcccgggaaacagaaggaaaattttcggttgttttttcgtcattttcccggaagaagagatctttgtgaa

SEQ ID NO: 104899 - DNA, 388 bp, Arabidopsis thaliana columbia
  unsure (1)..(388): unsure at all n locations
cccacgcgtccgcccacgcgtccggttaacttgaacacgaagttaatgaaactatcaggaagtgtgatttgtagagttgtatttggtatcaatcttaaaggaagtaaacttgagaatctttatgaggaagttattcaaggaaccatggaggtggtggggagttttgcagcagcagattacttcccgatcattggtagaatcatcgataggatcacagggttacatagcanatgtgagaagattttcaaggcaatggatgcattttttgatcaatctataaagcatcatctagaagatgagagtattaaggatgatatcattgacttgctcctcaagatggaaaggggagagattgaacttggggagtttcaacttactcgagacaaca

SEQ ID NO: 104900 - DNA, 250 bp, Arabidopsis thaliana columbia
gcaaagactaaaacatccttctttactatatatatctttcgctccactacgaaggttattttcgtaattcgacacaattccttacagagaataagcgaacagatcaacaactactctgctcttacaggcgacgacgtcaacaacaacccaaaataccaaaaaccctcaaaagtctcaaacaaaactcaaaacccaacaattaaagaaacaacatttcaatatacagatttacttccttttacagattttc

SEQ ID NO: 104901 - DNA, 391 bp, Arabidopsis thaliana columbia
cacacgcgtccgtgtctctcttcttcccgcggagctttcagtttttgtttggtattgcttggtgtggggaagattagatagtgtgaagaatggcagtagctacacattgtttcacttcaccttgtcatgaccgtattcgatttttctcaagtgatgatggtattggtaggcttggcattacaagaaagaggatcaatggcactttcttgctcaagattttacctccaatccaaagtgctgatctcagaacaactggtgggagatcctcacgtcctttatctgcattcaggtcaggattctctaaggggatatttgacattgtgccattaccatcaaagaatgagctgaaagagctgaccgctccgctgttgctaaaactcgtgggtgtttt

SEQ ID NO: 104902 - DNA, 363 bp, Arabidopsis thaliana columbia
gccggaaccgcaagtccttggcggagagaggccgtgttcttgacggcaatgctggtggtcgaaaccagcgtcgtcggaataagtactttgtttaaatttgcaacttcaaagggactcaacatttatcctttcctcggctattcttatcttcttgcttctcttcttcttcttccttctcttttcttcactaacaggtcaagttcacttcctccactaagtgtctcaatactttcaaaaattggacttcttggatttctaggatcaatgtatgtgatcacaggatacataggcatcgaatacagcagcccaaccttagcctccgccataaacaatatcactcctgctcttaccttcatcctcgcc

SEQ ID NO: 104903 - DNA, 388 bp, Arabidopsis thaliana columbia
tgttgctaactttctcagcttccagatatctctctctctgaggagatatcaaaggttgatccaaagaaggtgtttcacgttgttgaaattggataattcagaaaaaagcacctggaatcaatcactcaagaggagttgaaggaaccaaagccctaataaactagggaaagtaatctatcctcgccggagtcgttgtctcgccgataaggaacgaaggacgaagctgtcttcgatttccgggattgaagattcggttttgagctcaaatcgtcgactgagtaatgggggttgatccattcaaaactacggaaacgttagaagccgacaaggaaaccaatggtggtgtccctgtgaaggataaattgacttttaaagctcctgagagaaa

SEQ ID NO: 104904 - DNA, 211 bp, Arabidopsis thaliana columbia
cccacgcgtccgcccacgcgtccgcccacgcgtccgcccacgcgtccgagagcttatcttggtttgttgtgaaggttttggtactagtggtatctctattgttgccaacaagtgcagaaagctgaaagtgcttgatttgattgagtctgaggtcacggatgatgaagtggattggatctcttgtttccctgaggatgtaacttgtttggag

SEQ ID NO: 104905 - DNA, 180 bp, Arabidopsis thaliana columbia
agacgaaatctcgctcgctttcgccgccgtgaaatttgaatctccgatgactacaacgattccgatatgtccacggttgatttcgaattcgaattttgatattgtgactccacgatgtcggtcttctcacctattgctctcaccagaacgtttgttgagaagaattacaaagatttgaag

SEQ ID NO: 104906 - DNA, 202 bp, Arabidopsis thaliana columbia
atttaacctcgatgaccgaggatttcaatttctatcaaggaggaatcccggaggaaatcactaggcttccgaaaccagatatactttgggtgcccagagctacgttagaaggtagatttccaggagattggggttcatgtcaaaacttggagatggttaatttgggtcagaacttctttaaaggcgagaattcctgtcggtc

SEQ ID NO: 104907 - DNA, 129 bp, Arabidopsis thaliana columbia
gctttagatcaaaatctaaaaacaagagtttcgtgcagtggtttcttagagatctagtagattagagaatttggatttgttgaagaaaagtggatttggtacgattctataggtttccttcttctctga

SEQ ID NO: 104908 - DNA, 211 bp, Arabidopsis thaliana columbia
cggacgcgtgggcggacgcgtggggtccaagactcaggatggactcagggtgttgacacctcgtgtagatggaattgattcatctgtcagtcatcgtgggaaccactttttcatccagagaaggagcactgaattttacaactcagaactgatcgcctgtccagttgatgacacatcaaagacaactgttctgcttccacatagagaaagc

SEQ ID NO: 104909 - DNA, 340 bp, Arabidopsis thaliana columbia
acgaaaaaaaagaaaggaggaagaagtatcgtttcgaaagaggggagtctcaggaaaaaaaggacagaatttttttccggtgacagtgtcggtgtctctgacgctcctctctgttttcaatctttctccgtctctccctgaatgccttcgtccgtattcaggaaaattgcggcgattcatggttggaggagcgaatacttaaagggcacaatggattcaagcgaagcaaaggacacaccatcttgtggctgtatatagatccaagttgatttgtaggtttttaaaaaaaaatacgaaattttgttttagttgtgtaaatatataaataggagtgccaaag

SEQ ID NO: 104910 - DNA, 312 bp, Arabidopsis thaliana columbia
acttgcttcatcttcattcgtcatgatttccctctttttttactttaccaatttcttgaattcttaaacccaaagacaaagcctttcgatttcctatagatactttcagatgtctaagaactcaaacgttgaagagaatggaggagcaaagccaatctgtgaagctttgaggagattcaaaaggtcgaggcttgtgttcgagccgtctttaggagtgttggggtttttcttggttggggtctgtttggtttgcagttttttcttctttgattacagaagcgttgctaaaagctatggcctttcggataaatc

SEQ ID NO: 104911 - DNA, 355 bp, Arabidopsis thaliana columbia
acggagatatacaatgaggccatacgagatctgcttagctcggatggtacatcactgaggctacgagacgatcctgagaaagggacagttgttgaaaaagccacagaggaaactctgcgagactggaaccatctgaaggaacttctatctatttgtgaagcacagcgtaagataggtgaaacctcattgaatgagagaagttccagatctcatcaaatgatcagactgacagttgaaagctctgctcgtgagttcttaggcaaagaaaactccaccaccctcatggcgagtgtgaatttcatcgatctagcaggaagcgagcgtgcttcacaagctatgtcagctggtacaagac

SEQ ID NO: 104912 - DNA, 325 bp, Arabidopsis thaliana columbia
aaagtcattgtggagccaacggcaaatgggactagctctcttcaaaagacatcagatgcaatcagtggaaaggaagtgcaggagaatgctagtggaaagaaagttgcaagaaggagaagaaagagttgctaaatctcaaatgattgtaacacagagagaagatagggcaaatgaaagcgataagattatcaagcataagggaaaagaactggaagaggcacataagaagattgatgctgctaacctcgctgtgaagaaactagaagacgatgtcagttcgaggataaaagatcttgctttaagggaacaagaaactgacgtgttg

SEQ ID NO: 104913 - DNA, 265 bp, Arabidopsis thaliana columbia
agacagagagagagggaggggtagagagtcaggggctatttgattcccctggaaaatttcagatatttgtttcttcatcttctttccttatttctctcgttctcgtttttaccagatttgtcttacgaatcaattctgaaagatagccaaaagtggtagggaagcatcgtactgttttaatttgcgtttgattctatcaagatcaggggtgaaagaaaggaattttttttattatcagagaaagagagattcttgataatcgaat

SEQ ID NO: 104914 - DNA, 363 bp, Arabidopsis thaliana columbia
attttgaggagcttcaccgacggctaaaagtgtttcctgagtacaaacttcatttaccgccaaagcatttcctatcaacaggcgtggacatacctgttatccaagagcgatgtgtactacttgacgagtatatcaagaagcttttgcagctacaacgaatttcaggatcaattgaagtttgggacttcctcagtgtggattctcagacttatgcgttctcaagttccttctcaatcattgagacgctaacagttaaacctgtcaataagacatctactgtcgctacaaatatagcaagtatgactcaggcagcaccaggtccgcttcctcggagggaaaatctgagttctgagaatgggatat

SEQ ID NO: 104915 - DNA, 376 bp, Arabidopsis thaliana columbia
aggatttttcgtgttcgccggcggtgacatttacgcgcagaaacgttgatactctctctctctcgacggaaaattcttcctcggagatatggtgacggagctggaagagcttgtcgaatttttgtcatctccttcaccgcctgtgaagaaagctgcggtggaaattgttagtggtttaactggttccgaggaaggtttacaatctctatcaaagtattccgagattcttcttccatcattgtctcagcttctaaatgaaagcaaggaggtatcagagccagcagctcaagctcttgttaatctttctcagaagtgtgaattggcaaagaagatgattcaaatgggtttgattaaagtggccatggacatgttgtat

SEQ ID NO: 104916 - DNA, 381 bp, Arabidopsis thaliana columbia
agcggacgacgtgggcggacgcgtgggcgcaactctttgtcgcgaaccttagctatcgtgtcctctactatctaacccgacccttgtatcttcctcctttcgtagctcagatcctctgtggattattatttagcccaagtgtgctcgggaacacacgtttcataatcgcacatgtattcccctacagattcacaatggttcttgagacattcgctaacttagctctcgtctacaacatcttcctccttggtctagggatggacctgaggatggtgcggatcaccgagctcaaaccggtcatcattgcttttacagggcttcttgttgctttaccggttggtgcctttctttactatctcccgggaaatggccatccagaca

SEQ ID NO: 104917 - DNA, 352 bp, Arabidopsis thaliana columbia
acgtccaatccttcatcggagctcgttgtcgccgcctcactgtatatcgttgccgtcgttgtatcaacatctcaaggaagcttcgttagatgcggaaaacgtcatggacgcgaacaataccttcgattctgatctgattcacgccatttttaagcacatttgggcccgaagatttcgcgaaagggagaggagcgatgccattgatgctacggaagctgaggttgctctgggaacaaccaagaagaacagacttgcttctgcaaacgcaaatgctttaaaactcagctgtgaacttctcaagagttttgtctcagaggctgtgcagcgcgctgctataatcgctgaagctgag

SEQ ID NO: 104918 - DNA, 299 bp, Arabidopsis thaliana columbia
gtttatccagaagaagtactgatgaattatcttgttaattcagcctaattagttaccgggttttcttcgatttagactgttttagctggttgaatcgtcactttatagatcattagccaatttaagctattaaagttttaaactttttcttctgattcgttgaacgtcattgtccaattcagaccactttactgatttgatcagagagaattgtctttcttcaaagtaattttctacactgatctcattgattacgtcactctctctattgatgtgtctttctctataatattggcctt

SEQ ID NO: 104919 - DNA, 382 bp, Arabidopsis thaliana columbia
aaattgttctatgttcctgaaatgggattaaacgagcaacaaaatgttccaagtcagaggaagatcatagtttttatagtcttagcttttataccaatagctctgtttcgactctgttttaataatccattctcctccattaaagacacctctcttcaagactctgcagctaacgttgtgatcactagcttctcttcatcttctcaagaagaagaaagccaagagagttttgatcatatacaagatgaacctttatgcgattatacgcaagggaactgggtcagagacgagattggtccactctacaatggttcaacatgtggaacaatcaaggatggtcagaattgtttccgccatggtagacctgattccggttatcttt

SEQ ID NO: 104920 - DNA, 336 bp, Arabidopsis thaliana columbia
ctcttcttgattatcgtccagggattgcaacagagagaaagtaacgatgccggcgaaacagaggacagctaatgtcaacaggaatcctgatctgatcaggggagttggtaaatactcaaggtctcagatgtaccataagagaggtttgtgggcaatcaaggccaaaaatggaggcgttttcccccgccacgacgctaaatctaaggttgatgctccggtggagaagccaccgaagttctatccagctgaagacgtgaagaaacctctccccaacaggcgcacggcataaccagccaagctcagagctagcatcactccaaggacagtgcttatcat

SEQ ID NO: 104921 - DNA, 339 bp, Arabidopsis thaliana columbia
aaatgaaaggaccagttgatttcaacaaaattattgattacgggaacaaggataaatgaacgggccaatttcccccaaattggaaaatccgaaaggagttcccaacaatttgcctaaacacaataatccaaaatataatgagaataaacctgttaataaagtagagacacacacaagaggttaagttggagcagggtttgaaggttgtaaagattttcaaggagcataacagcaagacatgcattttggatgatttctcgttctacgaggctcgacaaaagactattttggagaagaaagctaagcaacaacaatcccagaagcaggcaagagaagaaa

SEQ ID NO: 104922 - DNA, 322 bp, Arabidopsis thaliana columbia
cggacgcgtggggaaagtttctcaagaaactcttcttcttcttctctgccaagctctgtaaacgttggagctctgtttacttatgattctttcattggaagagcggccaaacttgcgtttgtggcggccattgaagacattaatgctgaccagagtatcctcaggggcaccaagcttaatattgtcttccaggacactaattgcagtggatttgttggcaccatgggagctttgcagctaatggagaacaaggtggttgcagccattggtccacaatcttcaggaattggtcacataatctcccatgtagctaatgagcttc

SEQ ID NO: 104923 - DNA, 300 bp, Arabidopsis thaliana columbia
ctcaaagtcaattgctgttctgtgattccagagtgtttgtttctctgtcataatctcttctagttgcggtttgttgggctctcactttctctttcagccgatttgatctttcgtttcttgtggtttgacttcacttgaagcaagctcttttattgatcttattgtctcctttatgttctgatgattccgcattgtgaaatcactacagattttggggttgtgatatgaataatctggggaattttggggtttggggattcgggttcttctccttatctatttggtttgcggttctgcaac

SEQ ID NO: 104924 - DNA, 332 bp, Arabidopsis thaliana columbia
cccacgcgtccgcgtaaacttattgctttcttccttctggtagttccccaaaactcaaagtactctttttctgtgtaaacaaaaaaaaaatcaacgtttcaatctcggttccattcattctgtttcatgggattagagatcaatgctccaatggtggagtgagcagcttcgtacagctccttagcaacctctctagctcccatggatcttgcttagaaataggaaatggagagcaagattcggtgactatgccgcttacgcaacaagcgagtgtagcgtgtgagaaagttaaacagatgaaggatttgagtcaaggctacaacattgttgca

SEQ ID NO: 104925 - DNA, 386 bp, Arabidopsis thaliana columbia
cccacgcgtccgtagtaaagcttcacccatggctgatttcattgctttcagaaagattagagacaaattgggaggtcgcatccggttgctagtatctggaggagcacctttgagccctgagattgaagagtttttgagagttacttgttgttgctttgtcgttcaaggctacggtctaacggagacacttggaggaacggctttgggtttcccggacgagatgtgtatgctagggacagtcggtattccagcggtttacaacgagatacggcttgaagaggtgtctgaaatgggctatgacccgctcggagaaaatccggcaggagagatctgtataagaggacaatgtatgttttcagggtattacaagaaccctgaactcactg

SEQ ID NO: 104926 - DNA, 386 bp, Arabidopsis thaliana columbia
cccacgcgtccgcttctctgttgtttcgtgccctgagaaaccttgaagcagccatggctcccaaatcgaaagaaaaccccaaaacctcgactccagcaatcgaagatctcttcacttccctccacaaacatatcaaggatactaaatatgaagaagccgtcaaggtcgctgatcaagttttgtcgattgtacctaccgatgaggatgcgatccgatgcaaagttgtggctctgataaaagacgataagttcgatgattatctaatcaaagacgttaagatcaatggtgctctctccgtcattaactcgtttccaatcgatctaggttttcacaaggcgtattgtttataccgtgaaaacaagttagatgaggctttggtgtgttta

SEQ ID NO: 104927 - DNA, 369 bp, Arabidopsis thaliana columbia
  unsure (1)..(369): unsure at all n locations
cccacgcgtccgcccacgcgtccgcccacgcgtccgcccacgcgtccgactttgtgagcaaagagcgagaaaatgagcggagccggtaagaaaatcgcggatgtggctttcaaagcttcaaggactatcgattgggatggtatggctaaggtccttgtcacagatgaggctcgtanagagttctctaaccttcgtcgtgctttcgatgaggttaacacacagctccagaccaaatttagtcaggaacctgaacctatagattgggattactataggaagggtattggagctggcattgttgacaagtacaaggaagcttatgacagcattgagattccaaagtacgttgacaaagttactcctgaatac

SEQ ID NO: 104928 - DNA, 259 bp, Arabidopsis thaliana columbia
ggcgaagaagaagatcgtagtagcccgataatgaagctacgattgagacatcacgagacgagagaaaccctaaaacttgaattggccgatgcagacactctccatgatctccggcgacggatcaaccccacggtgccttcctccgttcatctctcgctcaatcgtaaagacgagctcatcacgccttcgccggaggatacgctccgatctcttggtttaatatccggtgacctaatttacttctctctcgaggctggcg

SEQ ID NO: 104929 - DNA, 245 bp, Arabidopsis thaliana columbia
gtggttttgattttgatttcagtctatgaagagaaagaagaatatgtttgttcatttcattctagatcctatttcgattagtgagactgcaacagaagcttcttttgctgctagatatggttgcttggtacttattgaaaacgttgagagattggatgttggtgcacttgtttcgataagaggcgcgggtcgtgtgaagatttcgaggtttttaggggcagatccttacttgtccggagaggtca

SEQ ID NO: 104930 - DNA, 283 bp, Arabidopsis thaliana columbia
accgtttttgttataacgcacgacgccgtttcaaacaacttccttattagctagctccctcccggcggcaaacaccagaagatccaccggttttgatctggttgtttgtcgtcgatatggcgaggatctcgtgtgacttgagatttcttctcatcccggcagctttcatgttcatctacatccagatgaggcttttccagacgcaatcacagtatgcagatcgcctcagttccgctatcgaatctgagaaccattgcactagtcaaatgcgaggcctcataga

SEQ ID NO: 104931 - DNA, 288 bp, Arabidopsis thaliana columbia
atccgcatttgccaattttcttgtaaattcacctctttccttcgtctatctatcctcccttccgcaacattgattttgtttgatgatcgttgggttttgaaagaagagcaatgagcaattatgcagccggactcggtaagcctggctcaggtaaaaggagaatcagagatcttttaaatcaacctgataaccgagtctgcgctgattgtggcgcttctgatcctaaatgggcatcagcaaatatcggagtattcatttgcttaaaatgttgcggtgtgcacaggagcc

SEQ ID NO: 104932 - DNA, 204 bp, Arabidopsis thaliana columbia
ctttgtttcgtttttcaggtaaaagatagaagaaggagagatgaattggaagttaagcaattctctcactttcactcattctcttctcgtgtaatcttttggtgttcttgaaaccacttttttttttgtcaattcctctgtttccttggaattgttttctgcttttttaagaagatgattacgatgaatgtggtgcggagatta

SEQ ID NO: 104933 - DNA, 247 bp, Arabidopsis thaliana columbia
cccacgcgtccggttttctataatatatcaaccgttacaaagttttaattacataaagctataacgttttgtctgaattcgaaaaaaatggtgaagttgttttagccaccaccggatttatagatggcggcgtggaagtcatggattgtggcggagaaagcacgaagatgtttaaggacgatgttctttgtggcagcaatgacggcgtctctgttagcttcttcattaccggttctgatcacggtgg

SEQ ID NO: 104934 - DNA, 254 bp, Arabidopsis thaliana columbia
cccacgcgtccggttctttcttcttaatcacagctcagcctgacgcaaccgctcaggctgatctcttccaatttacagccatttcccagctcagatctctgatccggtgagatctctctcaaggaaaaggagttagagcatcatcaagatgaaggcactcattcttgttggaggcttcggcactcgcttgagaccattgactctcagtttcccaaagccccttgttgattttgctaataaacccatgatccttc

SEQ ID NO: 104935 - DNA, 250 bp, Arabidopsis thaliana columbia
cccacgcgtccgggccagcagcatgtcttgtatatggaaattgcatggagatattcagcttacatacgcaagatgctttccatggtctggtggaactgaaaactcagaattcactttgaagacatttagtgattcaattctttcttggagaagcatttgttactcagctgcattgtcagccaaagcttcttaccagcgagctctacacttagccccttggcaagctaatgtttataccgacatagccata

SEQ ID NO: 104936 - DNA, 283 bp, Arabidopsis thaliana columbia
agcaggtgctatgggttgtagtgattcacaaccatccacaaagctaccgttgcctacttttggactcgcatcttataagctgaaagtatctgtgtggaaccaaaatagaattcaagagtcccaaaagatgacttctttgctacaagctgcagataaatggctcaagcgtctgcaagttgatcatccagactacagattcttcacctctaacagtccacaaatgaggtgaaaatgaaagatacattcttgaccatggatttggctctggtctgatcaaaagacc

SEQ ID NO: 104937 - DNA, 264 bp, Arabidopsis thaliana columbia
atccgcccacgcgtccgggacttctgtgatttcatgcaagagatgatctcaatgatgaacaatgtcaaagacgcggtatgccctgttctgtttaccggttataattgtttagtcaatttgtatatatgatttggattttgaccggttagaattgtttggtaaattcaattttggcgtccacgattagttgaagaaagatttgctcaacaatgtgtaaaccaacatgaaccaggaaataatcttctggttatgtacatttttaga

SEQ ID NO: 104938 - DNA, 255 bp, Arabidopsis thaliana columbia
ctctctctctctctctgcaatgtcacaacctctcaccaccagacccaccgttaccggaatatctataatccctttccgacaaccgccgcctctctgttctttcctcttcgtcatcgttcttttcgtcgccactttctacactctccatcatccagacgccgttactcctcctcttctattttctcgaaatgcctataatgcccttcgtctccgccgcctcttcctctcctctgcttctaacgccaccatctcctc

SEQ ID NO: 104939 - DNA, 385 bp, Arabidopsis thaliana columbia
cgagccttttctcgttcggcggtcgttttccaatcatcaactgccgcgtgtcagctcctgcttcggctcccttcgtcgcttccgttcctctcccgccgtcaacctcctccgactcactagcttgctctctccaatgtcctcatttccaatcgtgctcaggatgtacgcaagagttcaatctccatcgtccagctgttgtcgacgaagcttcagacttcttcaagcgttacggcgtcgatgatttcactttcgacagttgtagactgtggggatggagatgccgagcaaaattggctgttcgtggctcttcagataacgcattaattggattgtaccaagaaggaactcacactgttgttgatattcctgaatgcacatctcatca

SEQ ID NO: 104940 - DNA, 333 bp, Arabidopsis thaliana columbia
gaaagtttggaattcaagatgactcaatctatctgttcgtcgtcacaagatcaatcttcttctcctcgctctttgatcacaccacgcatatcggcgacgaagtttcaccgccgcagggggaggagtgtatttaacatgctggttcagagggaaatgtcaccaaaggctaagtttgtgccacggaaacgatggggtaagagtatatggtatactgattcttcatgcggaaccaacatcgagtctatgaaagagacgggacatagtcttacctcatgggttgaggcagagtcattgcagcatttatctgcaaaatattgtcctcttggagctcct

SEQ ID NO: 104941 - DNA, 332 bp, Arabidopsis thaliana columbia
gtttagtgtgataatggtcatctggcttgtactttgtgctgcaccaaagtgaggaacagatgcccgtcgtgtacattaccgataggttatgttcgttgcagagctatggagaaggttatagaagcatctagagtctcgtgtctaaatgccaaatacgggtgcaaggagagtacctcctatggaaaccgttttagtcatgagcaggtatgtgttttcaccccttgttcttgccccatacttgactgccactacactgggtattacaaggatctcaacaatcacgtccgtgctgaacacaaagatgatctgatctcgttcgtgtggaatactcg

SEQ ID NO: 104942 - DNA, 351 bp, Arabidopsis thaliana columbia
attcggtagctctcctctccgaatctaaaagttttccgaagaacttaaaacaaatatgactgatacgctcgagctcgactgacgaattcggcgtagtgttcacttttcttcttctttcttggaaagccacactcgtctgagtcgtctctgttactgacacccattaaagccctagcctttggtttcttttctccaaatcttgcaagatctcttgagataattcacatggaggaaccgagagaggaaagtgaggctgttcgtgattgcagtgagcccatggaggaagctggtaagggatcaggtttatcttctaaaactgaaaccctagttgatgaggatgccaatacggac

SEQ ID NO: 104943 - DNA, 318 bp, Arabidopsis thaliana columbia
cggacgcgtgggcggacgcgtgggcggacgcgtgggcggacgcgtgggcggacgcgtgggctgaagctctgaggaagacatgatttcgtctctctcagcttcttcttcattggtttcttctttcgtcgccgttaaagcgactccggtcaccggacctctgattccccgtcgcgatcttctttctattcgtatcagagctagctcgaatcagaatagttctggttattgttttccagaaaagtttaaatcttttgccaaatcagcgattctcatcggtgctgctgtttcaatgaccggaaagttttcaactttaccggt

SEQ ID NO: 104944 - DNA, 160 bp, Arabidopsis thaliana columbia
accaaaaccccacaaagcttggaaagagccacaaataggtcaaagaatgggtgaagacaagaagacggcaagggagacggtggaggaggaaccacttagcccatgttcacggctgttcaattcgccggattttaactgtgcaataatcgttacaatggga

SEQ ID NO: 104945 - DNA, 389 bp, Arabidopsis thaliana columbia
gaaacgcagtcaaaatagagagagagagagagagagagagagagagagagagtcacacatgtaataaaccttggtcgacaatctcgccctttccatgtgatttctccacttcctctctctctctactgcaacttcctcctcctgcttcaacttcattcgggtaatgatgaactagcgtagagatttggatcttcttcttcgtcctctcaccaactcttcaccggttagatctctttttcacgctaacgaatgaggagcgttgccgccgccgccgctgctgctgctgctgcttctaagccttctaatcctctcgtcgcctttgagcacaagagggatgcatacggatttcctgtcagacctcaacatgtgcagagatacagagaatatgc

SEQ ID NO: 104946 - DNA, 371 bp, Arabidopsis thaliana columbia
cccacgcgtccgtgcacgaaatgctcattgatcggtccaatttgctatcagaatcatttgagtacatagtgggcgcaagccctgaagcacttcatggtggactgttcatggaattcaagaatgaggaagctacaggtcctggtgttctacgagaatggttctatctggtatgtcaggagatattcaatccaaaagataccctcttccttcgatctgctgatgattttagaagattctctccaaacccagcatccaaggtggatccattgcatcctgacttcttcgagttcacgggtcgtgtgattgccttagctttgatgcacaaagttcaagtgggtgtgctgttcgatcgtgttttcttcttacaattg

SEQ ID NO: 104947 - DNA, 374 bp, Arabidopsis thaliana columbia
acaaaatctgagattcgcgaaggaagaagaagagttgtcttgagagattgatagagatggacaacaatggagttaaacccgctgtttccgccatggaagcctttgaaaagcttgagaaagtaggtgaagggacttatgggaaagtttacagagcaagagagaaagctactgggatgatcgttgctttgaagaagacgcgtctccatgaggatgaagaaagtgttcctcccactactcttcgcgagatctctatcttgcgtatgctcgctcgtgatcctcacatcgttaggttgatggatgttaagcaaggaataaacacagaaggaaaaactgtactttaccttgttttcgagtatgttgatactgatctcaag

SEQ ID NO: 104948 - DNA, 343 bp, Arabidopsis thaliana columbia
cccacgcgtccggcagccaacgacagttatcaaagcttaagccgttttagggttttatccttttgctgagatccaatcatggcggatgttgaaccagaggttgctgctgctggagttcccaagaagaggacgtttaagaagtttgccttcaaaggagttgatctcgatgctcttctcgatatgtctactgatgatcttgtcaagctcttctcttctcgtattcgtagaaggttctctagaggtttgacaaggaagccaatggctctgattaagaagctgaggaaagcggtaatcatttcttatatagtcttgaatgtttggttagttcttaagttgctcgttt

SEQ ID NO: 104949 - DNA, 344 bp, Arabidopsis thaliana columbia
gtcaggtgagacttcattggccgtaggcaaaactgaggatccgacgcagccgaagctcaagcctttacattgggataagatgaaccctgatgcaagccgttctatggtgtggcacaagattgatggtggctccttcaactttgatggtgatctcatggaggctttgtttggatacgttgctcgaaaaccaagtgaatcaaacagtgtaccgcagaatcagacagtctcaaacagtgtaccgcataatcagacttatatccttgatcctcggaaatctcaaaacaaagcaattgtgcttaaatctttggggatgactaaagaagagatcattgacttgttaacag

SEQ ID NO: 104950 - DNA, 350 bp, Arabidopsis thaliana columbia
gaagtatggagtctagcttgcatagtgtgattttcttaggtttgcttgcgacgattctggttacgaccaatggccaaggagacgggacggggctaaatgcataagaaatgtggccagtggaggtggggatggagtatagagtatggaggagaaagctgatgacgccattggagctgtgcttggagtgcaaatgctgctcctccaccacttgtgccaccatgccttgctgtttcggcatcaattgccagcttcccaacaagccatttggcgtttgtgcctttgttcccaagtcatgccattgtaattcttgctccatttgactgtatttttgcttctaccaacatgatgct

SEQ ID NO: 104951 - DNA, 392 bp, Arabidopsis thaliana columbia
caacaatctctccggcaatccctaaacacggcggcattcccacggtggttcacttgcacggaggtatccacgaaccaactagcgatggaaatgcagattcatggttcaccgctggtttcaaagaaactggttccaaatggaccaaaaagactacacattacgtcaacaagcaacaacctggaaacatgtggtaccatgaccacgcggcagggttgaccagagtcaaccttcttgccggtttgttaggctcttacattctccgtcatagctcagtcgaatcgcctcttcggttacctaccggacgcgaattcgatcgtcctttggtcatctttgaccgatcttttcgtaaagatggttccatttacatgaacgctacagggaacaatccaacg

SEQ ID NO: 104952 - DNA, 218 bp, Arabidopsis thaliana columbia
gaaactatcagtctctcacctaacagcttccacgtgtcttcctcgcgaaagtaatggcattgccattgtatggttgcgttaagaattctacagatcattcattccccaattcaatacgaagacgaagttgtgtgataatcattcattaatcacacatttgatctgagcgagggagagagagaaagagatcttgtccgaacgatgaaggcggagaagaa

SEQ ID NO: 104953 - DNA, 136 bp, Arabidopsis thaliana columbia
tccagatcgaacctttctcaggttcacacattccctagaaacattgaatgtccagagattcatgaaaggaaagaggacgtggtgaccagatagtacaccatcaaccttcacacacgccttcatattcgtaccttta

SEQ ID NO: 104954 - DNA, 226 bp, Arabidopsis thaliana columbia
ctgaaggcacccctgattgcttagctggattgacatttgtaattagcggaacacttgacagtttagaaagagaagaagcagaagatctgattaagcggcatggtggtcgtattacaggctctgttagcaagaaaacgacctaccttttgtgtgatgaagacattggcggaaggaaatctgaaaaagctaaagagctgggcactaagttccttacagaggatggcct

SEQ ID NO: 104955 - DNA, 216 bp, Arabidopsis thaliana columbia
ctgcacttgggacattgatgatgatcaaagtggtgatagattgtcctcttttattatggtattcttttcgaaattggtggaaaacagagacaatttataggtcggtgacttgcaagtcgtcgtttaaaatgttaagaaaaatcttgtaccattgttgtgttatgtttcctctttgagtgtctgtgttttatctaagtcttgagctataagctgtgg

SEQ ID NO: 104956 - DNA, 223 bp, Arabidopsis thaliana columbia
cgagcatgtctccaacactaatctctttatgttcaacactatgatcagaggttactcgattagcgatgagccggagcgagcattttctgttttcaaccaattgagagctaaaggtttgaccttggaccgattctcgtttatcacgactcttaaatcatgttctcgtgaattgtgtgtttcaattggtgagggattgcatgggattgctttgagatctgggttt

SEQ ID NO: 104957 - DNA, 218 bp, Arabidopsis thaliana columbia
cggacgcgtgggcggacgcgtgggcgacccacgcgtcaggaaatacacaactctctcttgtttttctttttctgtagattttctgtttattcaaaaacttatttttttcgtccaaaatttgactttcctgagaactaatcatcatcatcatgtccgatggttatcgtagttctaagaagacggatactatctgcgaagatgtttgtggacaggaagga

SEQ ID NO: 104958 - DNA, 180 bp, Arabidopsis thaliana columbia
tgttttgtatctctctctctctctcactctttgtctctctcctaacctttattgtactagcataaccattaccatacatactcttctctatcacgccacatccgcagattcatcatatcttcttcttgttcatagcatcgctatcactagtgggctctcttcaaaggtgtatttcggggg

SEQ ID NO: 104959 - DNA, 166 bp, Arabidopsis thaliana columbia
ggaacatttccttatgattgtttctgcactgagaaacgagctgaaccaggcctttgttattttaaggagcattgccttaggaagggacttgaagaaatttctcatggtggtttttgggctgtggataatcctcggttgtgggaaactggggttcaacttttcttga

SEQ ID NO: 104960 - DNA, 144 bp, Arabidopsis thaliana columbia
caaaaatctgaaaaatgtcacaagcagagaggagatagattaccgaggaagatgatgaagtggtcgatcgttaagagaatccccgtctatggaggttccttcatttctatgaaacatatgatgttagttccaagctgatttgag

SEQ ID NO: 104961 - DNA, 139 bp, Arabidopsis thaliana columbia
tctatttgcccgaaatcgttcgagaaacccataatccaaacccttgtcaaattcatcgatgcccaaaccaaaattgaaaactttatcctcaagagattaggaaaatctcattcattaggttagaaaatcccttttggga

SEQ ID NO: 104962 - DNA, 134 bp, Arabidopsis thaliana columbia
cttttgccttctctaaccagtgtttcgtgattttgggtgatcctagaaatgggagatggggctgagattgtaaccaggttatatggggatgagaagaagcttgcagaggatggtagaatttagtgagttggtgg

SEQ ID NO: 104963 - DNA, 172 bp, Arabidopsis thaliana columbia
  unsure (1)..(172): unsure at all n locations
gcctgagttctcttccggaaaagataggaaaggtaaagacacttgagaaaatcgacacgagggaatgcagcttatcgagcataccaaactctgtggttttattgacttctctacgccatgtaatatgcgaatagagaggctttnatggatgtttgggaaaagggggtccaga

SEQ ID NO: 104964 - DNA, 140 bp, Arabidopsis thaliana columbia
  unsure (1)..(140): unsure at all n locations
gaatgatgtttggtatgtagcttttggatgagctacaaagtgatcagtggcctgttaagccaggtcatcggtcccaacgatgtacaggcgtggcattgagtgtagctgcaggattgcttggnagcttgctntgcctggaa

SEQ ID NO: 104965 - DNA, 207 bp, Arabidopsis thaliana columbia
cccacgcgtccgcggacgcgtgggcttgctataggtattgtggttgttgtgtggggatttgcagctatctgtttcttcatagcattacctacacactcttggctatggctcatttcaatcttcaattcgattcaggtcttcatgacatgcgtcaagtacatcccacaggcaaagatgaacttcactaggaagagcacagtcgggtgg

SEQ ID NO: 104966 - DNA, 176 bp, Arabidopsis thaliana columbia
  unsure (1)..(176): unsure at all n locations
cggacgcgtgggcggacgcgtggggccgttgacactagcgatgataatagaacaccagttcaagaaaagaaaggcttgccagatcaatgcagtagtggtgcattgagccctgctgttgacactagcgatngacaggccaccagtttctgaaaagaaaggcataccagcatcaacac

SEQ ID NO: 104967 - DNA, 417 bp, Arabidopsis thaliana columbia
gcgtccgaacccctatgcaccacagtctgatgcatccctcttatggagaccctcataggttcccgatacacggaagaggtcctcatccctacttctcgggacaatatgttggtaataataacaacggtcatgatctctttgacgcatacccgcagcaaaacgggcattttcatcactcatcttgctcttgttaccactgttatgataataaatactggcgaggttcagcaccggtggtccctgatgcaccctataatgctggtttttatcctcatgagagcgttatgggttttgctccaccgcataatcctagaacttatggttctcgtggtctacagcctcatggaagatggcctagtaacttcagtgatgctcaaatggatgctctttctcggattcgtcctcctaaagttgtat

SEQ ID NO: 104968 - DNA, 418 bp, Arabidopsis thaliana columbia
ccacgcgtacgcaaaaccaaaaaaaagaaaacacaaaaacaaagattataatggcttcctcaaccatggctttgtcctcccctgccttcgccggaaaggctgtgaagcctgccgcatcagatgtcctcggaagcggccgtgtgaccatgaggaagactgtcgccaagccaaagggtccatcaggcagcccatggtacggatctgaccgagtcaagtacttgggtccattctccggcgagcccccgagctaccttaccggtgagttccccggtgactacggatgggacaccgctggtctatccgccgacccagagaccttcgccaggaaccgtgagctagaagttatccacagcagatgggccatgctcggagccctaagctgcgttttcactgagctattggctaggaacggagtgaa

SEQ ID NO: 104969 - DNA, 121 bp, Arabidopsis thaliana columbia
gaagaaaaagctgttcctgtgctttagcagaccatttggtaattgtcctggacgctgatcatcactttccgacaactctgttgctctttctcacacgtttgagtctgaatcttcgattgtc

SEQ ID NO: 104970 - DNA, 396 bp, Arabidopsis thaliana columbia
gagaaaacacttcctgattgcctattgcttgtctttccttacaaagctttaaatactatcatcttgaaaagaatttgtgttacaaagttccctggatgatcaattttataactttggtgtattcttaatgatatattattgaaactgaatcaaaatttacttttaaataaaaaaaaaaaaaaaaaaaaaaaaaaaaaaaaaaaaaaaaaaaaaaaaaaaaaaaaaaaaaaaaaaaaaaaaaaaaaaaaaaaaaaaaaaaaaaaaaaaaaaaaaaaagggggggccgcccaaaaggttcaaagtttacttacccttaaatggaatttcaaaccccttcaaaagtgtccccaaatttaatttcatgggccttcttttaaaaacttcttaatgggaaaa

SEQ ID NO: 104971 - DNA, 379 bp, Arabidopsis thaliana columbia
caaatacattatcaattatataaataacataaactgaactcctaagcagggttctttttataaatttattatttatttattgtggaaaaagaacaataataatatggggatgtctaaaagtatcaaggttatcctatctcttgctcttgtagtgttcttggcacttgcatgaaccaaggttgaggcctccgtaagatacataacttatcctgctatcgatcgtggagatcatgctgtacattgtgacaaagcccaccctaacacctgcaagaagaaagaagcacatccttacaggacaggatgcggagtgctcgaaggttgccatcgtgaaacacgtcaaaagcccacctaacagcattagatatacatttggttgaca

SEQ ID NO: 104972 - DNA, 113 bp, Arabidopsis thaliana columbia
gcgtccgcacacgacgtccgacactcttcacctatccacttctcagctcatcgtcagcccctcgctctaatggccaacgaagacctcactgagtcacagcaacatgaacaccc

SEQ ID NO: 104973 - DNA, 284 bp, Arabidopsis thaliana columbia
tgggatatgggtgcaccttctccaattccaattcgggcttctggatcatctatcacatcctcaagctctaggtatggtggaagatccaatcagcttgcatattctagggaaggtgatctgacaaatgaggggcattcacatgacgatagatcgcaatgagctgaagaatttacacatgacatcacagaaacaatgcgtgtggaaatggaatatcagtcagatcgtgcatggtatgatacagaccaagggaactcactgtttgatgcggacagtgcatccttttt

SEQ ID NO: 104974 - DNA, 316 bp, Arabidopsis thaliana columbia
  unsure (1)..(316): unsure at all n locations
cacacgcgtccggagagagggagacgagaagaacanaaaaaaaaaggaagaaaactttgcgtggatgaaaaaatggagatcggagaagaaaattctcgatgaccattgaccttcagaagagttgggaagtgaggactgatgtgttctggtggagaaggaaaacaatggagctgtggaaaagcgggtgtagtgagtttgcagaaagttggatctttggttcgagatttgagcgagccttgtctttcacagtcacggatacaggttgttataactatcggcaaaatgcttaagccagagaagtggcaagcgtcttttg

SEQ ID NO: 104975 - DNA, 393 bp, Arabidopsis thaliana columbia
gatgctagctagacaagatcctttttgtaccatatcaggatttatcatatatcatttctgttatgaaggaagtttctcatgaagtcgccttgatttatcgtctttgatgattatttctttgcaggcttttcctgatgctgcaacgatttccagtagagtctaaagggcggcgcaagaagctacaagaggttggctacgtgacaaccatatgctttacatgtttcctcatcagatgtatcatgatgtgctttgatgcgtttgacgatgcagcagatcttgatgtcttagatcatccaatcctaaacttcatatattacttgttggtggagatattgccatcgtctctggtcctctttatcctaagaaagcttccgccaaaacgcggtatcacac

SEQ ID NO: 104976 - DNA, 164 bp, Arabidopsis thaliana columbia
ccaacgcatcggcaagtttctcggattcaggtcccggtccaattccatctacctggaaaggcgagtgcgagatcggacctgattttcctgcctcatcttgcaatcggaagcttaacggagctcgagcgttttacaggggatatttaacgcaacggaatggaaca

SEQ ID NO: 104977 - DNA, 435 bp, Arabidopsis thaliana columbia
cgcgtccgaattttttgatctctctctctctcttcgcttgtagtaagaaagctcacaacataaagaaattattacagaacaagcaagcaagaagaagaagaagaagcaataaaaattagtgcttttttatttagtgagagagaaaagctctgaagaggaaggaagttgttttcgagatgcgagctagtaaaggaaccttctctgtacttcttctctttctccttttgattctcaatctgcccagtctttaattttttttcctttttcttcttcttctttcttcttcttcaatttcactcttgttgggtaagtcaagaatcgtccaaagtcttttttttttttcttgggttgtttggtattggatctgtttcttggttcttttaaagattggctaatactttgattttggggggttttgatttgatctagggtttc

SEQ ID NO: 104978 - DNA, 117 bp, Arabidopsis thaliana columbia
gaaagaaaccgagacatgtcacgtacgaagacgataacagttcacgcgtcactacaatcaaatccgaagccgaagctccttcagaacatcaagttccgttcagtaatcaactaaaga

SEQ ID NO: 104979 - DNA, 388 bp, Arabidopsis thaliana columbia
gttctctctttcttacatatttcttttggatttcgttgtcttttttttctctcttttcttctcctctctctcgctcgatttcaatttgggcgagaaaggagcggtcttttgtctttcctgggtttatcagctagatccctcttgcctaaagtttgtaactttcttagggttttcttctgatttcctctctctcggggttaattctgctcaaaaatggtttgattcagaggcaaatctggttttgtttagacaataaagttcgggactttttgacatactcacagctggtttttagctttggttcttatagagagtaatagtagtgaagggtttgtgccaatagttagaaatgatcaaacagatatttgggaaattacctagaaagcct

SEQ ID NO: 104980 - DNA, 341 bp, Arabidopsis thaliana columbia
cgcgtccgcacacgcatccgaaaaaagattcgtcgacgtcgccagccattggcgacttgttcttcttcgtcttcaaaccttgtcctcttcaattatcttccagatctctctctctctctctctttcatcaagtcttccttctcattcgtctccttcttcgtcttcgtctacccttgcagaagagatacgaaactccatttatttattagcctctctctctctctctctctcgtctcgttatttctttatttgattcttcgtattgacgtattggcttgcgtcacctcaatctctttctcttcaattccaatttcctggggatagatagaggcatttttagc

SEQ ID NO: 104981 - DNA, 425 bp, Arabidopsis thaliana columbia
cacttcttcacctttttaccaatttcctcgcttacaagattcaaagggtttgtgattgagagaagctttaaaaaacccatctttggtgtttgattctctgtttatttaattcataaaggaaggctcttttttttttgtttatttcaggctcattacgttgatggtcatctaaatctcaagaagacaaagttgcgatttttgcaactgggtttctctcttcagagatttaatctgtataagaagatctcaagatcagcttttgtgtattgaagaagaactaggaagaacgaggatagatacaggctttaatctaaactttgctctctgctttctgcgattaaaagatggtggcttttgggaaatacttgcagcggaaacaaatcgaagaatggagtggctattatatcaattacaaattgatgaag

SEQ ID NO: 104982 - DNA, 305 bp, Arabidopsis thaliana columbia
gaactaaactaccacgttccctcgcacaagcactgatccattactcgacctcagttatcacaccacaacacacgctcaaagagatagcggtatgcaatagagtaatccgcacgaagtcaccctgcaatttcttggagtttggtctacgccatgacagcctcatgtggagctctctcaactatggaggtcggactgtgtttcttgaagaagatgaatcatggatgaaacagatcacgagacggtttccgatgctggaatcgtaccatgtaacatatgacattacagtcaatcaatccgataatctc

SEQ ID NO: 104983 - DNA, 410 bp, Arabidopsis thaliana columbia
cacgaggatcatcacattaaactctgttttgttgatctctctttctgttccgtttctctttccactgccaaaagttaaagctctctctctcactcaatcacacactcatttctcactatttcacaacttccttgtggacaaaattagtcgacttctctgttctctccaacactgtttcgttttcactacccaaaattcgaatctgggttattgaaaaagttccaatttttttatctgggtttttcgaaagctgatatctttttagaatctgatctatctcttctacttcatttcccttgcatttttttaataagttgtagaatctgtcttgttctggaaaaatatggagtcttgctttcctgccatgaagctgaatcagtgtacctttggtctcaacaacgaaattgtct

SEQ ID NO: 104984 - DNA, 377 bp, Arabidopsis thaliana columbia
cacacgcgtccgcccacgcgtccgctctcagttgcaaggatgggcaaataggctataccgggatgaagttgtggcagaatggaagaaagtgaaagggaaaatgtcgcttcacgttcattgtcacataagcggtggccatttccttttagatctctttgcaaagtttcgatatttcatcttttgcaaagaactacctgtggtgttgaaggcttttgtgcatggagatgggaacttgttgaacaactatcctgagctacaagaagctcttgtttgggtctatttccattctaatgtcaatgagttcaacaaagtcgagtgttggggtccgctttgggaagctgtttcgcctgatggtcacaagactgagactcttcccg

SEQ ID NO: 104985 - DNA, 402 bp, Arabidopsis thaliana columbia
tgatctttttattttcctcttccttggccaaagaaaatcttatcgtagctgtgaaaaccctagtttctaatcatctcaattctctcattaacctatcaatttcgatagggtttgatcaagtatccgatttcatgatcggttgctgtatggagactaattgctggagtttaggttcgtgtgttttgaactgagcttttggttcttgtttgtgtctggtgttgaagacatggatttggaagctaattgtaaggaaaaactttcatattttcggataaaagagctcaaggatgtgctcactcagctgggactttcgaaacagggaaagaagcaggaacttgtcgaccggatcttgacccttctttctgatgaacaagctgccaggttgttgtctaaaaagaatac

SEQ ID NO: 104986 - DNA, 161 bp, Arabidopsis thaliana columbia
gcaggcagcgatttcatttcctctccattctttctctcgtctcggttctatctcatggccattggcggtcaggacttctcagccgtatatttgattccgtccccggatttactcatgctgtgatctgaagtcaaacatggcggctgccaacgcccccatca

SEQ ID NO: 104987 - DNA, 363 bp, Arabidopsis thaliana columbia
cacacgcgtccgcccacgcgtccgcccacgcgtccgcggacgcgtgggtttgacattttaagtaagaacagctagctttgccatctccctaaaggcaataaatctcggatccactttcacgatattttgatattttttctatttataatctttctgggttttgagtcttttgaaggctgaattgctctgaaatctcaattgtataatcatctcctgagtcgtcgttatcgtgatcatctagaagaaagcatgactacactagatttgaccagagccgagcttgctcttattgttctctatttgaacaaagctgaggctagagataagatatgcagagctatccaatatggttccaaatttttg

SEQ ID NO: 104988 - DNA, 349 bp, Arabidopsis thaliana columbia
cagacgacgtgggaaaaaagaaaacacaaaaacaaagattataatggcttcctcaaccatggctttgtcctcccctgccttcgccggaaaggctgtgaagcctgccgcatcagatgtcctcggaagcggccgtgtgaccatgaggaagactgtcgccaagccaaagggtccatcaagcagcccatggtacggatctgaccgagtcaagtacttgggtccattctccggcgagcccccgagctaccttaccggtgagttccccggtgactactgatgggacaccgctggtctatccgccgacccagagaccttcgccaggaaccgtgagctagaagttatccacagcaga

SEQ ID NO: 104989 - DNA, 385 bp, Arabidopsis thaliana columbia
catctctttcttctatagcttctagtttctcccacttctcacttcctttttcccgaatcttgataatgtaaattcacaacaaatctgtttaaaaacaaccaatcaaaacccaacattgcttctcaacaaaaaagcaaagcaaaagattttgcgagagaaaaaaaagaaaatggatttgttcaagatccttcttcttgtgttcttcgtgaacataagtttctgcttcgctgcagatccatattctttctataacttcgaagtctcttacattactgcttctcctcttggtgtccctcaacaggtcattgctataaatggaaagtttcctggtcctacaatcaatgttacaaccaatgaaaatctggttgttaatgtcagaaacaag

SEQ ID NO: 104990 - DNA, 387 bp, Arabidopsis thaliana columbia
aaaaaacttggctagtttttctccacaaggttttttctgcaaacatgtctgaacttgcattgtcatctcaagaagagtctccaagtagtaataagattggtttatcttctcttcttctctctgactttcatctcttttgctcatttatcctcactcaccctttctatttttcttacttgctcttcttttcaccttacatcttcaagattctctcttttctttcaccactctttgtcaccaccacactcttgcttcttgccttattgagtactttacatgttcaagacacttgtctcgactctgaatcactagaaacacaaccaagcttccttttctccttttgtagtaagcttggaagtgtcttggaacacaagtttgatgtcaaca

SEQ ID NO: 104991 - DNA, 408 bp, Arabidopsis thaliana columbia
caaagagaaagagagctttgactttagatccaatcatggagacaactacaactcctctgctccccggtgatcgcagcagatgcgggtggctccgtcgccgtctccgcctcaaaaaccctctttcttctgaactctccggcgctgtcggtgatctcggcaccttcatccccatcgtccttacactaactctagtctccaatcttgatctctccaccactctcatcttcactggtttctacaacatcgccaccggtctcctctttgacatccctatgcccgtccagcccatgaaatccatcgccgctgtcgctgtctccgaatccccgcatctaactccttctcagattgccgccgctggtgcatccactgccgccacgctcctcctccttggcgccaccggagctatgt

SEQ ID NO: 104992 - DNA, 370 bp, Arabidopsis thaliana columbia
cacacgcgtccggttttgttttcctttaaccatctcccaaaatactcttccctttaacgtgggtccttcagtctttttgaatgaccccgccattgtcaatcaactttcaaacggatcgttattctttttggttttaggctatttagattattgaattgattttgaatgataatcatgatgaattgtattccgtgtttcacttcacaaaagagcagaaacgctccatgcacgacgaacgagactaacgatgataacgttgaccacgacgaattcagaccacctgttgttgcgacgacgaaacggactgaagaaagagaacctgcagagcaacaaccaccggtgaaaacattcaatttccgggagttagcga

SEQ ID NO: 104993 - DNA, 359 bp, Arabidopsis thaliana columbia
gacaccacgaagagttttggctccaaaaccgctccaaatgtcctgcgcctacctcgcctgggtccttgatcatgtttctgcagctgtgaataggcagagagggtagaagaaccgtggcgggatctttaccgctggatttggtcaatgacatccaatacttcatgaaatgactgaaggtgactccatctgctacaacatgtgtagctgagttgcctatacagattccagctccagggaagatggtgacttgcatagccattattggtcgcatctgaattccttccggagagacgtgaggaggaggtaacttgggcaagacgccatgcaacacactgatatctttaggggaatcagacttc

SEQ ID NO: 104994 - DNA, 192 bp, Arabidopsis thaliana columbia
cacacgcgtccgatttttcaggccaatttttttcagtgtcttcactgttttatattgacaagtgtgaaaatataataaagtttccttggtaatcagaaatccgttagactaatcaaaaagacctcgtgtcgaatatcatcataaattaataaaataatattctgctggagctggtcattttttttttatttt

SEQ ID NO: 104995 - DNA, 378 bp, Arabidopsis thaliana columbia
cacacgcatccgctaaaacatcaccagcgttaacacaagatccttccgttcccgaagttccttacatgacggcgagagttttccgatctcctttcacttacactttccctgtagcatcaggtcgtaaattcgtgcgtctctacttctacccaaactcgtacgacggtctcaacgctaccaactcgttattctccgtctcctttggtccttacactcttctcaagaatttcagtgcttctcagacggcggaggcgttgacttacgctttcatcatcaaggagtttgttgtcaacgttgaaggtggaacgttgaacatgacgtttacaccggaatcagctccgtctaatgcgtatgcctttgttaatgggattgaggtta

SEQ ID NO: 104996 - DNA, 220 bp, Arabidopsis thaliana columbia
cggacgcgtgggcttccccactccgccacctactttccttcccactctgaaacctcacttaaacctcactccgccgcttccttcaccgtccgttgcacctccgcctctcccgccgttcctccacagactccacagaaaccccgtcgttcacccgatgagaacattcgagacgaagctcgtcgccgtcctcatcaactccaaaacctctccgcacgttacg

SEQ ID NO: 104997 - DNA, 157 bp, Arabidopsis thaliana columbia
attatctttgcgatttttacccaaagcttccaaagcttagttttttttttttttcaacttctctcatgcgtctgctactttattacacgaactttgttttgggcttcaactaacgatcaaggttcgttgaaaactatgagtatagttgagtttttta

SEQ ID NO: 104998 - DNA, 193 bp, Arabidopsis thaliana columbia
agcccacgcgtccggtaaaaccctaaacatagtcacttcatcgtctcctccactgtatcattcaatctctgtcttccttctttttagcgacctcgtctccaaagctcacaaattttctacctttccgagagaaagatgcaagcttgttgtggtggtaattcgatggcttctcttcagcaacctggacgggttc

SEQ ID NO: 104999 - DNA, 218 bp, Arabidopsis thaliana columbia
gtgaaatagtgcctccaggtgctggtcacaaaaggatactgcttagtatatcttctttgatagccattagtgctgctgcagccattgtggttggtgtaatagccatcacggtacttaatctgagagtgcgcgcatcaacggtttcaagatcagcagtaccgctcacgttctcaggcggagatgacttcagtcgatctcccactactgatagcaactca

SEQ ID NO: 105000 - DNA, 218 bp, Arabidopsis thaliana columbia
cggacgcgtgggtccggatttcgattcccgaggctcgaaaaaaccctaaatctcttctccgttcactcatccaaccgaagatgcgtgagattcttcacatccagggtggtcaatgcggtaaccagatcggcgccaagttctgggaagtggtttgcgccgagcacggcatcgatccaaccggaaggtacaccggagactcagatctgcaacttgagcgc

SEQ ID NO: 105001 - DNA, 193 bp, Arabidopsis thaliana columbia
gtttgtcttagcgatatcttctccttcaacgactctcatcaaaccattaaaacgaaatgggccaaaccggtcaccggttcgaaaaatcctttgcctgagccagaggaagcagagcaaaaccagtaccggcaaatcttggatcgtcccagtaagtctctctctttttggttcaggcttcgtcttgggtcctctc

SEQ ID NO: 105002 - DNA, 202 bp, Arabidopsis thaliana columbia
gtgatattcacggaagagctagaggcaaaagacctgaaatttctagtagcagggtggcgagtagagatggcttggaggggtgggttagtacgcgtaaccgaaatttaaatatggaacatgaaatgaatcatagggatgagagtaacacacgcggaatttgtagttctgttaccagacttgatgtgcgtgaaaccaggtgtag

SEQ ID NO: 105003 - DNA, 185 bp, Arabidopsis thaliana columbia
agatcacaccatgaacctttcctctaacgaccaaccaagccaaggccgtatcaaggccaaggattggtcgactgatttgtgtgaatgttggatggacataaactcatgctgcttgacttgttggtgcccttgtgttgcctttggacgcatcgcggaggttgtagacagaggttccacatcgtgtg

SEQ ID NO: 105004 - DNA, 118 bp, Arabidopsis thaliana columbia
ccacttcatcactcatcacgagcttcgcatcatcttctccggcttgatcttctcgcgttgctagatcgccgacgatcggaatatgaaatcggatcgatgaaatctgtcaatcacacaa

SEQ ID NO: 105005 - DNA, 127 bp, Arabidopsis thaliana columbia
caaaaagaataatggcagcaagtgcatctccaatggagagccagctaaggaccagcttgtccaccgcttctcattctcagcgtcgcgccgtccccaagggcatctccggtgcacctttcagtgtttc

SEQ ID NO: 105006 - DNA, 191 bp, Arabidopsis thaliana columbia
gtttcaatggcttcagctacttccgtcatagcctggggttctggagaagatgggcaactaggacttggaaccgatgaagaaaaggaattggcttccgtcgtcgacgctcttgagcctttcaacgttcgctccgtcgtcggtggtagccgcaattccctcgccatttgcgatgatggcaagctgtttacatg

SEQ ID NO: 105007 - DNA, 197 bp, Arabidopsis thaliana columbia
ccagaagtgaacacgatactctccctcccttcccttgttcaatttctttctttgttctcatcattaaatttctttgacccaaagtttcaatctttttcagtttctggaatctcttgcttcgatcgaatcactctcatgtctaacgaagactctcttccgcctttcactttgtttggtttggatgatgtcgaaaatta

SEQ ID NO: 105008 - DNA, 205 bp, Arabidopsis thaliana columbia
acgcccacgcgtccgaagagagacatttgaaaactacttcgttagagattgagggaatttataaaaaaactgaggccgagcatcctagcattgtggtcacatatacacggcgtggtgtccttcagaaggaggtcattgcccaccccacagactttaggccaacaaatcccggaaacagcccaggcgttggacactctaacgggcg

SEQ ID NO: 105009 - DNA, 201 bp, Arabidopsis thaliana columbia
acgtcaaattcaaggataaggattggtactaggagaaaattatcaattcaataaggaggaggaatagagagctaaagaaaaagaaaaaagactacatttctacaaggacgttggttcttttagtcgtcgtcggtcgtcgaagaaagatcttctccttctttcttcgccgtacgatcgtcgtctaatgggagaatcatcaaa

SEQ ID NO: 105010 - DNA, 196 bp, Arabidopsis thaliana columbia
ctctggcggtggtggtacccgttgggattctggtggtgggtttggtgggcgtggtggtgggtttagtggccgtgagggtgggtttggaggccgtgagggtggatttgggggccgtgagggtggatttggaggccgtgggggaagatttggaatgagagatgactcatttggacgtggcgggaatcgtggtcggggt

SEQ ID NO: 105011 - DNA, 198 bp, Arabidopsis thaliana columbia
atcgatctctctagaaacaaatttcccaacttccttcttagagctctcttgtcagtttaagctatcattatgtcaaacgaaccggaatcctccgactcgaaaactaagaaggatttcagtactgcgattctagagaggaagaagtctccaaaccgacttgttgtcgatgaagctattaacgatgacaactctgttgtc

SEQ ID NO: 105012 - DNA, 195 bp, Arabidopsis thaliana columbia
gataaaccgatcgagaactgctcgatctgctgtgaagaccgtcagtctgagatgatgctatcattgaaatgcactcacaaattctgttcgcactgcatgaaaacgtacgttgaagggaaagtaaagacttcagaggttcccatcaggtgtcctcaagtgcaatgcaagcattatctctcagcagcggaatgcaaa

SEQ ID NO: 105013 - DNA, 198 bp, Arabidopsis thaliana columbia
ttttgatttaaattccggggaggaattagggtttatgaaagtaaaagaagaaactttgaagaatttgggagatggagtggttttaagacctgttgatcattgttctagcatttggagtatgaagatgaacatgaagaactttcttaagaaacttcatatctcgcccaatcaatcagatgaagctgaaggatcaatttc

SEQ ID NO: 105014 - DNA, 202 bp, Arabidopsis thaliana columbia
aagaggattaagtagcttctctcaacaaagcttcgaaattgatccgtaattagtgttcaatttcgtgttttttcctacattggattctcacttttagattttgtggggagggaaagataaaaggttggatttttatttttccggtgaggaaaaaatgacgacgagaggaagcagatcggagaaagtcaagagaattttccag

SEQ ID NO: 105015 - DNA, 193 bp, Arabidopsis thaliana columbia
aaatttcaaaaacttttgaatgttttcatttggaatctgaggttgtctgctcgagaattttggtgggtttgtgctgaaatctggaataggattagggttttttcgtgaatttgaaaatggcggagcagaagagtaccaatatgtggaactgggaggtgactgggttcgaatcgaagaagtcgccttctagtga

SEQ ID NO: 105016 - DNA, 209 bp, Arabidopsis thaliana columbia
ggcgttgaaaaagaaagcaaatgcagaaaaagtcctggcggatctggagaatagagagagtcctcaactttctgatattgacaaggagggtattactaatgatgaaaagtacatgctccggaaaattggcttgaaaatgaagcctttccttttactaggtagaagaggcgtctttgatggaacaatagagaacatgcatcttcactgga

SEQ ID NO: 105017 - DNA, 199 bp, Arabidopsis thaliana columbia
atcgtctaaagattatttaaaaaaacgatgtctcaactgaaaattggatcttcacaatgcttatggacaagtatttgcattgtgttatttgtattgtcgatggctcgtggagctgtctctagaaattatggagacgctctcacaaagagtcttttgtatttcgaagctcaacgttctggaaaattgccttcgaaccaaa

SEQ ID NO: 105018 - DNA, 160 bp, Arabidopsis thaliana columbia
ggagttctcttccgcaccggagctcttcttaacggtttcgcaactgccgtttggatgctcatctctggtcctttgttactcggtttcggtatccgcttcaccaatcagtctgtgccgttgtaactctcggagatggcatcgtatttctacaaaggagcat

SEQ ID NO: 105019 - DNA, 191 bp, Arabidopsis thaliana columbia
gtaatcttacatccaatacatcaatgacaacatctctacacatggtaacgcacgtgtctattgtaatgttttacatggctcgtcaaattttctcccaagaaattgatccatattcacatgaggtgccaattgatgtggccatatctccatcttcaaggtttggtatttacgtcgaaactcctgttgaagct

SEQ ID NO: 105020 - DNA, 210 bp, Arabidopsis thaliana columbia
cccacgcgtccgcggacgcgtgggcggacgcgtgggcggacacgtgggtgatgaatcgtctgcttgcaggttagctacaaatgaggtcgaattctttgacccgaaagatttctcgagaggaataacatcccggatcatagttcctgggattgctgcatttgagctttctaaaacgccaacttcgcatgttgctgtgtttgttccagaatc

SEQ ID NO: 105021 - DNA, 174 bp, Arabidopsis thaliana columbia
ctttcataagaggtgaagaaggctaactaaaccatgagcagtaagaaaacttgtgtttcagtcaaacatcttccgtctgtttctgatctaaaaaacaaaaaaaaagctagaaaagctttgttagggttttaactttattaactctcgtgtttaatataattttacagatttaat

SEQ ID NO: 105022 - DNA, 201 bp, Arabidopsis thaliana columbia
tttcgctatttttatttttaattgatactttttttttactatcattcccagatcaaggtttgtttctcgatcgaattcatgcttctctgatctgagatcagttagatacgactgcgttttcctcctcgaatttgatcatcggacattctctttttgtttcctgggtttatagtgccgcacgtcaatggcgtgaaccgcggt

SEQ ID NO: 105023 - DNA, 222 bp, Arabidopsis thaliana columbia
acgcccacgcgtccgcccacgcgtccgtccgaattagaccaaagtccagacaatggaactcaattgtgttcaatttcttcgaaacaagacgattcttgtcaccggagctaccggtttccttgcgaaggtttttgtggagaaaattctgagagtgcaaccaaatgtgaagaagctgtaccttttggtgagagcatctgacaatgaagctgccactaaacgctt

SEQ ID NO: 105024 - DNA, 203 bp, Arabidopsis thaliana columbia
acgacccataataatgtaccatctccttatcattatcactacactctccttctcttcaattaacataaccttcgccgtcgatgaagctttcccttcaattcccactaccttcagcgtcgcaacgaaacaacactacgacgtaaaaccaatccaccatgaagtttatgacggagaaaggaagatatacgacatcagccaccagt

SEQ ID NO: 105025 - DNA, 217 bp, Arabidopsis thaliana columbia
gatatcttggatccgtgctccattgacgaacaataatcattcttctttttcttaagttcaaccattttagctccttcactggagcttcacgtcgggtacaatggcggccagtaggaagatttgtcattctctgatcgttttcctcatagcgatttctacagtctacggtttccgcggattcgataaaaggctgcggtggttttgtcgaggcgagttc

SEQ ID NO: 105026 - DNA, 217 bp, Arabidopsis thaliana columbia
cccacgcgtccgaaaaaattatattcaagagaaaaaggaaaaaatgaatttcatctccgatcaggtaaagaaactctcaagctcaacaccagaggagccagaccacaacaagccagtcgaaggaaccgaaacagctacaagaccagctaccaacgccgagctcatggcaagtgccaaggttgtagctgaagctgctcaagccgcagctcgtaacgaa

SEQ ID NO: 105027 - DNA, 192 bp, Arabidopsis thaliana columbia
ctaaattttgatacaagaatatatatgtgtgtgtgatatacatatctacgccatggatatccccaaatctcatatatacacctcgtgtatctctggctctagcgctgctctccacaggtgtgcattgagcacagagacaacagctgtgcatactgtatctctaccccagtttttgaaaacacactctcctga

SEQ ID NO: 105028 - DNA, 215 bp, Arabidopsis thaliana columbia
ctcactcaatcggtgactcgctatagtctgtgaagaaaggccaatttcgccataaagttcacacctttgatctcctttgtttctgggtttctcctaaatcatccaaattggtatcgaatttgcccttctccgattcaatttcttcacgatctcaaaacccagaagaaagaatcatgctttcgttatcatgctcttcttcttcttcttcgttgctt

SEQ ID NO: 105029 - DNA, 197 bp, Arabidopsis thaliana columbia
accaatttgtgctcgaacagcatgggcctatgggaaggctggtggccgaatctcccatgctttatcggtttatagttgtcagattcgccaaccaaatctggttaagataatctttgacttcttgaaaaatggattccaagaaatcagtaattcactggatttatcttttgaagatgaaactgttgctgatgagaaga

SEQ ID NO: 105030 - DNA, 220 bp, Arabidopsis thaliana columbia
cggacgcgtgggcggacgcgtgggcggacgcgtgggaacgactcgaacaacaacaacaacagcaacaatagcaacaacaacaacacaaacacaaacacaaacaacaacaacagtagtttcgttttcctcgattcccacgcgccgcagccaaacgcgagccagcagttcgtcggaataccactctcaggtcacgaagctgcttccattacagccgccgaca

SEQ ID NO: 105031 - DNA, 201 bp, Arabidopsis thaliana columbia
ttctgctgttataacacatggatttgtattggatgagaagggtatgaaaatgagcaagtctctaggtaacgtagtggacccacgtttggtcattgaaggagggaaaaattcaaaggacgcacctgcttacggagctgatgttatgcgtctttgggtttctagtgtagattacacaggggatgtactaataggtccccagat

SEQ ID NO: 105032 - DNA, 225 bp, Arabidopsis thaliana columbia
agcaccttcaagcactcaagttcgtgcaacaagctgtggggctcagaggatatgcgcaacgcgatccactcatcgagtataagctcgaaggatacaatctatttctggaaatgatggctcaaatacgaagaaatgtgatatactccatatatcagtttcaaccagtgcgggtaaagaaggacgaagagaagaagtctcagaacgggaaaccgagcaaacaagtag

SEQ ID NO: 105033 - DNA, 217 bp, Arabidopsis thaliana columbia
cccacgcgtccgcccacgcgtccgatcagttggagtcgaagcacagcttactcatttggcttcaatcactcagattattgaccccaaacttcaccatcacttagagaaattgggtggtggtgactatctctttgctattcgaatgataatggttcagttccgaagagaattctccttttgtgactccttgtacctttgggagatgatgtgggcatta

SEQ ID NO: 105034 - DNA, 161 bp, Arabidopsis thaliana columbia
aaatccattcttcgtcaagtgacgggttctcgggtcggatcttcgaagtctagctaaggatagcggctactgtcaatactcatgcctcggtctcgattttccgatcttgtacttcaaaaccaagattcctcaccggttcttccggtaggtttaaccgcgac

SEQ ID NO: 105035 - DNA, 241 bp, Arabidopsis thaliana columbia
ccaaaacccaaaccatttttgtttcgcaaaatcattctaccatggctacctcatcctcggtggtcagcagtgtacctcagcagcaccaagtgttcctcaatttccgtggggacgaacttcgtaataatttcgtcagccatctggataaggccttaagagggaaacagatcaatgtcttcatagatgaggctgtggaaaaaggtgaaaatctagataaccttttcaaggagatcgaaaaatc

SEQ ID NO: 105036 - DNA, 288 bp, Arabidopsis thaliana columbia
agcggaagcgtgggcggacgcgtgggcggacgcgtgggcgcgagcggccgcccttttttttttcttttttttttttagtccaaaaatgtaaacataaaactgtccataaaacaaaggattaattttacatttgaatcccaaagatgagttataataatattagatatatataagattttaatccccagacctcagcttgttgatttggttcaaagctggctgcaagatattgtacagaacccaaagtagtgccggtgtcacaacaatcaacaacaactgtcctctgct

SEQ ID NO: 105037 - DNA, 204 bp, Arabidopsis thaliana columbia
cccacgcgtccgcggacgcgtgggcggacgcgtgggctttcttctctcactctccggcgactgttacgagtttttaacacttccgtcgtcttctcagttgttgttgttgtttatgacaagatcttgttctatccattaaaaccaaagaaatggaggaaggtcataaagaaccattggtgctaagagttgaaggatcacattgtt

SEQ ID NO: 105038 - DNA, 292 bp, Arabidopsis thaliana columbia
acgcccacgcgtccgaaaaacctatctctctctctctctctcgccgccttcctctcaccctcttcgcatagcttcactttcgccgatggctctacctaaccagcaaaccgtggattaccctagcttcaagctcgttatcgttggcgatggaggcacagggaagaccacatttgtaaagagacatcttactggagagtttgagaagaagtatgaacccactattggtgttgaggttcatcctcttgatttcttcactaactgtggcaagatccgtttctactgttgggatact

SEQ ID NO: 105039 - DNA, 343 bp, Arabidopsis thaliana columbia
acggacgcgtgggtgtttctgtacgtctctctgggtaagaaagaaaaagtgaaggacgaaacgggaaaccctctgcatatcaagtctttgaatcacatctctcttcactgtcgatccgtcgaggaatccattagcttttaccaaaacgttttagggttcctccctattcgcagacctgactcttttgatttcgatggcgcgtggttgtttggacatggaattgggattcatcttcttcaatctcctgaacctgagaaattactcaagaaaacagagattaatcccaaggataatcacatttctttccagtgcgatagcatggaagcagtggataagaagctca

SEQ ID NO: 105040 - DNA, 166 bp, Arabidopsis thaliana columbia
acttagattctaattttgtgatgagaggcatcttctgacaagtttactattgggtgtgatgactccaatattgagtcttctcatgggacaaccgcatcagctaggaaagatggatcaactttttctcaggataagaagcatgagatttcagattcagcagctcaga

SEQ ID NO: 105041 - DNA, 332 bp, Arabidopsis thaliana columbia
acccacgcgtccggccacatcaaccaacccaaacatcgaaagagagacacttttctctctctctttctctatctccttccaatctctctagggttttcgttacaacggcgaaaagatgttcggtagaggaccctcgaagaagagcgacaacactaagttctacgagatcttaggtgttcctaagagcgcttcaccagaagatctcaagaaagcttacaaaaaagccgctatcaagaatcatcctgataagggtggagatcccgagaaggtgaataatttcttagatccgcttagattctctcgaattcgattgtttgattgtgttttttttt

SEQ ID NO: 105042 - DNA, 375 bp, Arabidopsis thaliana columbia
agagactctatatgtttggaagggaaagcaggatcagtatctgagatatcacgattaactggaacaagcgtacaaattctagctagggaagaaattccccgatgtgcttctatcaatgatgttgttatacagattactggcgagatcagagctgctcgggaagcacttgttgaattaacattactattgaggagtcatatgttcaaggagctctctcaaaaggagacaccaccagcttccacatccacaactggccctctcgaaggtgttgcaggagtaatggaggtagcttcatcaaataacacaattcaatctcgtgaaggtcctactagttcgaatctgaacttgcagcaagttagcacaatcttgccacag

SEQ ID NO: 105043 - DNA, 193 bp, Arabidopsis thaliana columbia
cccacgcgtccggtaatcgtcagtcaactgtagaaaccaaatttccggtagaaaaatcaaaatgcttcagctcgtggttgtagcgtggctcttgattttcacggcggagacggttgtacctcaccaggaatccggcgaatggagttgtgaatcggactcggagattcaggtcttagccgatttcagaccgggg

SEQ ID NO: 105044 - DNA, 377 bp, Arabidopsis thaliana columbia
agacgaagacggcgatgaattcgttaaccgttgaacaagtattgaaagagaagaagaccaatgacccagattccgtcaaggaacttaatctcggccataaagctctcaccgacgtgtcttgtttgagcaagttcaaaaacttggaaaagcttgatcttcgtttcaacaatctaacagatcttcagggactcaagtcttgtgtgaacttgaaatggctttcagttgtggaaaacaaattgcaaagcttaaatggaattgaagcactcactaagcttacggtgcttaatgctggaaagaataagctcaaatccatgaatgagatctcttctcttgtcaatttacgggccttgatcttgaatgacaatgaaatctcctcc

SEQ ID NO: 105045 - DNA, 344 bp, Arabidopsis thaliana columbia
agaaagataataccaatcctgttcattcaattccgtgagcttcgaatcaacaggattggtattatctttcttagtagcagtaggagaagatacggagagaggagccacgggagatgttgattcgaagctcacggaattgaatgaatcaagggctgagttactaaacaggatccagaatctgaaacaggacttgcaaagttggagaggtaaattggacactcaagttaaagtctaccgtgaggagctctctgggctaaagaagactctgaatcttgaagttgagcagcttcgtgaggaattcaaagatctgaaaactaccttgaatcaacagcaagatgatgttt

SEQ ID NO: 105046 - DNA, 378 bp, Arabidopsis thaliana columbia
acccacgcgtccggttttcttcgattaagttttgagctagattctctagatctgtttcaccgatttggttgatttctccgtcaatctgaactcgcggtgtgcatcttgttgtttgcagtgtttttagtttgttttacgaagaatcaactatggcgacgaagagaagcgttggaactttgaaggaagcggatctgaagggaaagagtgtgttcgtgagggttgatctcaacgttcctttggatgataactctaacatcaccgatgacaccaggattcgtgccgctgttcccaccatcaagtacttgatgggtaatggatctagggttgttctctgcagtcacttgggccgcccaaaaggtgttactcctaagtacagct

SEQ ID NO: 105047 - DNA, 324 bp, Arabidopsis thaliana columbia
acaatcgctaagattaggaaacgtgaaacatttgatcctctgtgtatgattttgtaaacttgccttgatgggaagctcagaaattgcttcagagctttgtacctgtcaagggctcaccatcatcgctgaaactctacggacttcctcttccgttgggtctgtggaggattattggctcaagttactggtttcgagaatctgtgttgaagatggttacttcctcaagctcttctctaaattatacgaagatgctgaaaatgagatattttcatcagagcaagcctttcttgtgaggatggtgtctgatattgctaatgagcggat

SEQ ID NO: 105048 - DNA, 361 bp, Arabidopsis thaliana columbia
  unsure (1)..(361): unsure at all n locations
atcaggtggtacgtaccatgttatgacttcatatgttcaacctctgttactatggttaggagctctattcatctgcagggcattagatcctgttgtccttcctacagaagctagcaaaattgtgaaggatcgactgttgaattttgtgacgtcattgtcaacggtacttgcatttgcttactgcttatccagtcttatccaacanacacaaaagctattctcagaaacgagtaatccgagcgatacaagaaatatgggatttcaatttgctgggaaagcattgtattctgctgtatgggttgctgctgtatcacttttcatggagttgctgggtttctctacacaaaaatggctcactgct

SEQ ID NO: 105049 - DNA, 386 bp, Arabidopsis thaliana columbia
  unsure (1)..(386): unsure at all n locations
acggacgcgtgggcggacgcgtgggcaaataccanaaacaagtcataagaatcaaatggagttctctatcaatccttcaactctaaagatgattcggacaagtttttgtagattagtagttttggcaattagtagtttttcgatgatggaagctcgggatctagctagcaaaggaaagacaaatattgaatatatggcgttgaattgtcgaaaacataccgcagttttgacagaatttggagcagttggtgatggaaagacctcgaacacaaaagcgttcaaagaagccataaccaagcttgctccaaaggcagccgacggtggagtgcaactcattgttccaccaagaaaatggctaaccggaagtttcaacctcaccagccatt

SEQ ID NO: 105050 - DNA, 411 bp, Arabidopsis thaliana columbia
cggacgcgtgggggaacatgaacatgtattagagagagacgtacaacagtgtgagaccatagaatctgaggctgttgagacaaaagaagacacacaaccaagtctggacctgaaagaggataaagaaacagaggaagcagagacattcaagaccgtcttttcgtctgatgaggtaagatcttctgctgttcaagaagaacaatttggtgaacatacggaaccttgtagctcggagattaaagatgagagccatggaaaagaagaatctgttgaggtcaaatctcaggagactgttcaagacgaaaacactgaggacaagcatgatgtacttaaagttccatctacagaatcagagaagtatcaaagcaactgaaccgagacagttctagtctccaatacaggaagctatga

SEQ ID NO: 105051 - DNA, 372 bp, Arabidopsis thaliana columbia
acccacgcgtccgggacgattttctgagtcattacaactatacaagaaggccttgcaagtatttcccggttgtcctgcagctgtgagactgggaattggtctttgtcgttataagttggggcaactagataaagcacggcaagcgtttgatcgcgttttgcagctagatcctgataatgttgaggctcttgtggcacttgggattatggatttgcaagcaaatgattctataggaatgaggaaaggaatggacagaatgcagcaggcattcgagatttatccctattgcgcatcagccttaaattatttggccaatcacttttttttcaccggccagcactttcttgttgagcagctgactgaaacagcatt

SEQ ID NO: 105052 - DNA, 376 bp, Arabidopsis thaliana columbia
atcacggacgcgtgggcggacgcgtgggcggacgcgtgggtgacgcaggtgaagaatctacagaagataaacgctagggaatcagatttaggaatatctgatgaagcttcatggcacgctaagtacaaaaactctgcatatgtctacgtcggaggcataccgttcgatctcaccgaaggtgatcttctcgccgtcttctctcaatatggtgaaattgttgatgtcaatcttattcgagacaagggaacgggtaaatctaaaggttttgcttttcttgcttatgaagatcagagaagtaccattcttgctgttgataatctgaatggagctcttgtgttgggacggaccattaaggtggaccattgtggggcataca

SEQ ID NO: 105053 - DNA, 357 bp, Arabidopsis thaliana columbia
acccacgcgatccacccacgcgtccgcggacgcgtgggcggacgcgtgggcggacgcgtggggatagtataagcttctttggggttctcagaacagcggtatcagaatcgcatataggagtaatgggaggtaccggaaagtatgtgaatgcgaggggattcgcgattctgaagacgtttacaggatctagcgggacgcagcagaatcagccgcatcagttcactgatgggcttgagactgttgttgagtgtaccgtttatctttcttactagttttagttttcttcttttgttggggtttgggaatgtttggtgtgtaggttatgtgtgtcatttgtaatctaaatatgaaatttgt

SEQ ID NO: 105054 - DNA, 404 bp, Arabidopsis thaliana columbia
acccacgcatcagctgagaaccaagaaaacaaaataataataaaaaaccctaattccccgctccacttctctctctcacgctctctctgtgattttagtatggaagcaacggcggaggaatcagttagtactcttgttacgacgatggttgatgagacgtatgagttcttagcgcctcgatggtttgatttcgttaatggagagactgaagatgagtctcgccgagcagaactctggtttcaatcggccttaagctgcgctccttctccttcggttcctagaatcaaagcaaggagatcgttcaaggtagaggccatgtgcaacttcaatgaagctgaagaagagacgctcaaggataaagagccgttagaaccagtagttccaattgtttctttacaatcgca

SEQ ID NO: 105055 - DNA, 144 bp, Arabidopsis thaliana columbia
cggacgcgtgggcagacgcgtgggcctgcgaccatgatcttgcagcacatgttcacgtctacttcattgaacaggggaagaaatgaacgctttgctacatgtctccttgtcgtgttactgacttattccgatcagacgttgctc

SEQ ID NO: 105056 - DNA, 310 bp, Arabidopsis thaliana columbia
acggacgcgtgggatcgcgagcggctgcccttttatctatggtgtcgatgcttatcattcttcttttacacagagcctgtcacaaattacaatacttaatttcaactttaaccccatgatttgaggaattcctacaaacgctttgatacaaagacacaaaatttaggaatgagttatctctctagcatgcttttccgacccggaaagccaatgatctggcgtatttggtaagcttagataccgccataccattttagggctatatcacccgttgccgaaaatgcaaacacttgaaatgaggatttccaga

SEQ ID NO: 105057 - DNA, 355 bp, Arabidopsis thaliana columbia
gaactaccttttcgtaacctcccctcctcgtgacttccacatacaaaacatgcaaatctagttcttttcctccaatcacaggaatcatgaacttagtggacataattgagtgaaaccgcctgagagtatcccagaagacagaagaatccttgacgacaacttcatgtaaagccaatggttctggatactctttaatcttcgccggcgaagtcgccatcatttctaccgtcgcttgagacggtgtcgattcgttgtccgatgacatcgctatagagagacttttagtagagacagatatcttttttttgttggggaagtcacgaagaggggaggttacgaaaaggtagtcgtagag

SEQ ID NO: 105058 - DNA, 324 bp, Arabidopsis thaliana columbia
tgactgaacttcaacctgttactgatgcccatgtcccagtcatgaaatttaagttccaaggaatatcaattgatcttctgtatgctagcatatcgcttctagttatcccacaggatctggatatctccaactcttctgtgctgtgtgacgtggatgaacaaactgtccgcagtcttaatggttgtagggttgctgatcagattcttaaacttgttccaaattccgagcacttccggacaacattaagatgcctgaagtactgggctaagaagcgtggggtctattcaaatgttactggatttcttggtggtgtaaactgggcac

SEQ ID NO: 105059 - DNA, 368 bp, Arabidopsis thaliana columbia
tatgatggtcatggaggagttaaagcggctgagtttgcagctaagaacttagataagaacattgtagaagaagtagttggtaagagagacgagtctgagatagctgaagcggtgaaacatggttacttggcaacagacgcgtcgtttcttaaggaggaagacgttaagggtggttcatgctgtgtcacggctctggttaacgaagggaaccttgttgtgtctaacgccggtgactgtcgtgctgttatgagtgtaggaggtgtagctaaggctttatcttctgatcaccgcccgtctagagacgatgaacggaaaagaattgaaaccacgggaggatatgttgatacgtttcacggtgtttggagaat

SEQ ID NO: 105060 - DNA, 173 bp, Arabidopsis thaliana columbia
tggtttagtcaccggaaagaaagaccaaacgtctcaaagctaattgtctctggagacgccggtaccaggcacagagttctaatggagaagagggaaaatggtctcgaaggaaagcaatcgggtcgggtcattaacggacccactaacccgatggtcacacctctgcgcaacga

SEQ ID NO: 105061 - DNA, 279 bp, Arabidopsis thaliana columbia
aacactttgtttcttctaaaagctctttgtcttctttgttttaatgtatgcttcacattagcttccgaccctgatgccatccaagacttctgcataccagaacctgtgacatctccttaccatgaccatcacttctccaccaatctcccttgcaaaaactcctccgaagtaaccaccgaagattttgtcttttccggtctaaaaactgccggaaacttcacggagacggggttcgccaccgtcccagtaggcccagaaaacttccccggccttaataca

SEQ ID NO: 105062 - DNA, 203 bp, Arabidopsis thaliana columbia
agatgaaatacagtttcgtcttcttcctccggaggcgactcgtactctaacaccatcaaacaatgaatctgctaactgatcgtcaatttcaccatcagtctcttcgccagcgtcatcctcgcatccatctccgtgatcgccgtcgatgaatcctccggtgacagcgtttcggtggcaagatcttggatcgtgtgatataaggg

SEQ ID NO: 105063 - DNA, 316 bp, Arabidopsis thaliana columbia
agattctactgagttcttgcatggttcagggtcaaaccaacaaatatggaaagaaaagtattatttagttacaacgtgaaaacacaggcttattaattctctgcagataactgcagaagaaagaagaaagaagaagaagaagagattagagcttgagccataatatataatcccttgatcattagtctaaagaaccacatagaaagatgggattctggtcgttgttggaggtggcttctatgccggttattcaagttcttttcatgagtcttgtgggagctttcatggcctctgatcgttgcaagctcttccctgt

SEQ ID NO: 105064 - DNA, 284 bp, Arabidopsis thaliana columbia
gacgcacttacaccattatgcgaggtcgtcacatagacaagcgtgttccttctaaagagtttctctctgctttggataaagctgaaactgcagtacgtcttcctactgggacgggaaaagactgcgggaatccttcctggaagcgatctctgcctcacgtgctcgttgcttctctgacttcgcttttattcggctatcatctcggggttgttaatgaaactctcgaaagcatatcaattgaccttggctttagtgggaacaccatagctgaaagtcttgtggtt

SEQ ID NO: 105065 - DNA, 319 bp, Arabidopsis thaliana columbia
aagctaaacaaataatcagaggaacgaaggagacagcttctgcgaaatcagcatgagagccaaggttagtaatgggttttgattgtttaatggattttttagtgatgagaaattgaagtagtgtgtaggatctttatggtttgtgtgtttgtgtgttgcagtggaagaagaagcgtatgaggagattgaagaggaagagacgaaagatgagacagcgatctaagtagattcgggagtttgttttgtctttcttctttttagaaccaactcttatgtgagttttgttggttttgcaattttcaatttgaatgttttgttg

SEQ ID NO: 105066 - DNA, 290 bp, Arabidopsis thaliana columbia
gtaatgtgcttgtgcctcctcagctcaagggaaggagcaatgttgctacagaggatatgagcaggctttttgtgaaaaaacggcaagactccaccaaggcaaaatctccagatcaggaatagtttggtcaaatttgaatggttttatttctctgactaattacgtaacattttgtgcaacataatagtggtatcttagcagaaataacagagtatgcaactttttttgttttttcatttatttggtactatttatacaaaagaaacaaaaaaagttctgatatttccatt

SEQ ID NO: 105067 - DNA, 295 bp, Arabidopsis thaliana columbia
caagagagataggacgaccaagtttgttcgatctcgttgccgcaaaaaggtaacagcagtcatcagatcaagaacctgagaaacttctcttttgcgctgtttttcttcttctccaaaactcgtaaaacctataaaccacaatggctcgttctctcgctaacgctaagatccaatccgtcttcggctccgaaaagctctcgaacgccgttttcagacgagggtttgccgccgcagccaaaacggcgttagatggaagcgtttcgaccgcggagatgaagaagagagctggggaagc

SEQ ID NO: 105068 - DNA, 328 bp, Arabidopsis thaliana columbia
tttgggaaaaagtttcagcatttggttcttgtcaattcttatcaatgctatcttaactcttctttgtgcatttctgtttgagttctgtggctaagctgatttaggaagttggtgatcaaattacatctagtgtttgtttccgccagctgaagtgaatcaaaatgtttagttttggccgagcaagatgccaatggaggcaaaacagatctatgtctcttggaggactggattatgcagaccccaagaagaaaaacaattacttgggaaagattcttttgacagcttctcttacagccttgtgcattttcatgctcaagcaatctccaac

SEQ ID NO: 105069 - DNA, 324 bp, Arabidopsis thaliana columbia
gtgacgcctaaagcattagcaagctgtaaatgtggtacgataatttgcatatgcctcaagtcctgtagctcaattggaaatgacgtatgttcgttagcggattgtcaattaatgaacatttcaggtgcacaagcgagcgagttagatgctcaatctaatgggtctgacacttcaaagaacgagataaatggtagtctcaaatctcagcttgataaaccttcaaacagtgatctgttgggtaatgagttgaaaactgcttttcctgctctgccgccggtacctcatgagaaagctcttcgtgctgcaatactcaaagctcaatat

SEQ ID NO: 105070 - DNA, 325 bp, Arabidopsis thaliana columbia
tttactttgtgctgcactactcaacctcaatggccgcctcaacaatggctctctcctcccctgccttcgccggtaaggccgtcaagctttcccccgcggcatctgaagtccttggaagcggccgtgtgacaatgaggaagactgttgccaagccaaagggcccatcaggcagcccatggtacggatctgaccgtgtcaagtacttgggtccattctctggcgaatcaccgagctaccttaccggagagttccccggagactacggatgggacaccgccggactttcagctgaccccgagacattcgcaaggaaccgtgaactaaa

SEQ ID NO: 105071 - DNA, 340 bp, Arabidopsis thaliana columbia
aaattgaaggaactcaactctatttacactcaaactagccgagatcttgctgaagcgaagttagagatcaaacagcagaaggaagaactcataagaactcagagtgaattggactcgaagaactctgcgattgaggagttaaacacaagaataacaactttagtggctgagaaagagagttatatccagaagcttgatagtatttcaaaagattatagtgctttgaaattgacttctgagacgcaagcagctgcagatgcagagctcatcagcaggaaagagcaggagattcagcagctaaatgaaaatctggatcgtgcgctagatgatgttaataaaa

SEQ ID NO: 105072 - DNA, 260 bp, Arabidopsis thaliana columbia
actcgccgcggattattagtttcccgtttaacatgattcttgcttttgatagtccaagaatataaagcataccaaggtttcagactatcaccattcccctgatgttaactctgttttaggttcagtataggggatccgaaaaactcggttcatgatgtaacaatcttatctccttgtaactgtagctgatgtacttaggctgtaaaaacaatcacttttcagacgttttaagtgatcttgtgggaagtttttttccagac

SEQ ID NO: 105073 - DNA, 313 bp, Arabidopsis thaliana columbia
acccacgcgtccgaaaaaaaactcactccctagaaaagtttgacaatggcgaaggcagataagaaaccagcggagaagaaaccggcagagaaaactccggcagccgaaccagcagcagcggcagagaagaaaccaaaagccggaaagaaactcccgaaggaaccagccggcgccggagacaagaagaagaagagatcatagaagaacgttgagacatacaagatctacatcttcaaggtgttgaagcaagttcatccagatatcggaatctccagcaaagccatgggaatcatgaacagtttcatcaatgata

SEQ ID NO: 105074 - DNA, 318 bp, Arabidopsis thaliana columbia
cgcgtgggcggacgcgtggggagccacaaaccatagaatctctaaatcttttgaggatgaggaatacagagttcattgttgcattgaataaggtggataagctatatggatggaaaacatgcaagaatgctcctatcgtgaaggcaatgaagcagcaacataaagatgttataaatgaatttaacttgaggctgaaaaatattataaacgagttccaggagcaaggacttaacactgagctttattacaagaataaagacatgggagacactttcagtattgttcctactagtgctattagtggagaaggggtcccag

SEQ ID NO: 105075 - DNA, 353 bp, Arabidopsis thaliana columbia
tactcagagaagatggattagtgaatcgagaggttgatatcgttaaatgcggggattttgcaatctagggttcttaagcattgtaatcgatgaaggctcaaaagggaagctcgaagaagaaaggtacgaattctgggttagtcgctgtagcagtggataacaataaaggaagccaacatgctctcaaatgggctgctgatcatcttgtctctaaaggacaaaccattatcctcctccatgttatccttaggtcatcctctgattcaggtgagattactgcagagaaacataagcaagctgaaaatctttttgtgacatttcattgctactgcagtcgaaaagagatacaatgc

SEQ ID NO: 105076 - DNA, 355 bp, Arabidopsis thaliana columbia
agggagtgttacgtctggtacaagagagcggtatgactgctgattgcaaactttacacaactttaatatcaagttgtgctaaaagtggaaaagttgatgcaatgttcgaggtgttccaccagatgtcaaattctggagtggaagccaatcttcacacatttggtgcacttattgatggctgtgctagagctggacaagtagctaaggcatttggtgcgtatggaattttaaggtctaagaatgttaagccagaccgggttgtattcaatgccctcatctctgcatgtggtcaatcaggagctgtcgaccgtgcttttgatgtgttagctgaaatgaaggctgagacgcaccctat

SEQ ID NO: 105077 - DNA, 352 bp, Arabidopsis thaliana columbia
acttctccttctctcgacggattaagcttttacacagaagaggagagatatggatcagatactgaacaaagttggctcttactggttagggcaaaaggcaaacaaagagttcaattccgtcggtgacgatttcaattcattgtctagcagtattgaaggaggtaccaagtggttagtcaacaaactcaaaggaaaaatgcagaagccattacctgaattgttgaaggaatttggtctaccagttgggatcttcccacaggatgctacaaactatgaattcaacgaagagacgggtaaattgactgtattcatccctgagacatgtgaagttgggtacagagattcatcggtt

SEQ ID NO: 105078 - DNA, 358 bp, Arabidopsis thaliana columbia
aatcacagcaaaaaaaactcactccctagaaaagtttgaaaatggcgaaggcagataagaaaccagcggagaagaaaccggcagagaaaactccggcagccgaaccagcagcagcggcagagaagaaaccaaaagccggaaagaaactcccgaaggaaccagccggcgccggagacaagaagaagaagagatcaaagaagaacgttgagacatacaagatctacatcttcaaggtgttgaagcaagttcatccagatatcggaatctccagcaaagccatgggaatcatgaacagtttcatcaatgatatctttgagaaacttgctggtgagtcttcgaagcttgcgaggtacaacaa

SEQ ID NO: 105079 - DNA, 354 bp, Arabidopsis thaliana columbia
acttcatcttcctcgtcttcgtcgtcttctgtgtacagacatacctccattttatagagagcgagaaacagagagatcagaagaagaagaggaggacaaaattatagaaggaaacgtttcaatgcgtgcatagaaatcgattctcatatactctgagagattcatatagaagtttctgttagttcgtagctctaagttcttcgttcgttgagagcttggaaaattgtcgcggagtctgtttttgttctcctagatctttgggtggaaacaaacaagctcgcgaagacgagaactctcgccgtatttgggatctggttccgtttagaagattttccaggtttcgactggttctag

SEQ ID NO: 105080 - DNA, 354 bp, Arabidopsis thaliana columbia
atcaacggacgcgtgggcggacgcgtgggcaaatttctcaaaaatctccagtgactctgagagttatcaagagctccggtgctacattctccggcgacgaatcgacgatttccgtcgttaccataaatttgtgagctttatgaccagtttcttagactactctaaggacttatgcattcacatacttaaactgtcgtttgagataaatcaccgtgatccatcttacatgacgtggtggatccacaacgcggttatgcgtttggatcttgtatgtgattggagttatttggttgctatgaagatggacccaagcgtttacacacctgtgagactctggtatccttgaaactaagg

SEQ ID NO: 105081 - DNA, 349 bp, Arabidopsis thaliana columbia
acccacgcgtccgcggacgcgtgggcttgaggatcttctcacattaatgggtcaaaccttttgctcttccttttgattaatttagtgtttgacaatctcctcctccttctccttcttcttcaaagttttgtcgcagtatctattgttcttacagagagaaaggtaggcttttgtgtccatcactcattttcgctcgtttggttaagcttcatctgccatgtggttcactgttttgatacttttgggctcttatacctaatgttgatgtaacacaacgatacataatctaatttgttttcgagtggaaaatagttgaacccagttgagtatttagccaatacgattagag

SEQ ID NO: 105082 - DNA, 341 bp, Arabidopsis thaliana columbia
agtgaggatgaggctatgatcgatcggtgattgtttttttctggatttttgtcacgcgttttctctaggatacgtcttcaagcgaattctgatccgatcttcgtcctcgcgtctgagttttctcttctcactgattaattgattttctaggttttggtttataaactgcatcaagtggtctttctaattcatgttatttgctcctcgttttattgttgatttagattgtggaggatgctatgattgatcggtgatggctttgattgatccttgtcacgcggtttcttaggatcttttgtcccttctattccaaatttttaattcctatgccgtttttttct

SEQ ID NO: 105083 - DNA, 267 bp, Arabidopsis thaliana columbia
ccaataataaattttacaaatgctgtgttcttgattggcttttttaatcctcactgagatttgtgcttgaatcttgattatcttggtaaaagttttggttttagacaatgtatatatgtgtttgagaatacaagcttcttctttattttaatccaacattaatcagattgtatgaatttgaataagtctattaaattacaagacattgttttcgttttctgttgataaagtactttgctatcgattcttattttgatgtgtctttga

SEQ ID NO: 105084 - DNA, 344 bp, Arabidopsis thaliana columbia
acgcgtccacttcagatgatactccagaagacatttcccctttctgacaactgcatcactgcaatgatggagttgtcagaaaggtgacatggcttctggtgaaaccactccaacatccgcatgaaacgacgttggaataccgttctgaactatgtacgcatgtaacctgtctatcagcaactgctgttgaggacattgagaaggtgctagaaatgatgccgtctattacagtcgacatcacatgtgaaacagaaggggaagaggggatccaagagggagacattgtgacccttcaagcttgggtcaccctgaaacgacccaatgggcttgtaggcgctcttcct

SEQ ID NO: 105085 - DNA, 306 bp, Arabidopsis thaliana columbia
aaacagctccctggttttagattactgaattggcacttcttttttacagcaatgctctttgtatatggtcgaatacttagtcaacggctagtcaacactgtgactccagacaaagtcctatatcgactggtcacaagcctcatcaaataccacatggcaatctgttactccttgtatatttctggctttgtttggtttattctcacgctgaaaaagaagatgtacaaatatcagtttagccaatatgcatggacacatatgatattaattgtggtgtttactcagtcctcattcactgtcgccaac

SEQ ID NO: 105086 - DNA, 352 bp, Arabidopsis thaliana columbia
agtgtgattaataatggcgctttctctcagccagactcgaccaccaagccttagccatagccatacccttagcgtcatcgttcctaagagaacgttcgtttcgatccgatgcggtccacgagacaaccgcggaccacttctcaaaggccgaatcctaagcaccgaagcaatccaatcaatccaatctctcaaacgagctcatcgaaccggtgtctccctctcccttaccctccgtcctctccgccgtctcataaaatccgatctcatctccgtcctccgtgagcttctccgtcaagactattgcacactcgctgtccatgtactctccactctccgtacagagtatcctcct

SEQ ID NO: 105087 - DNA, 255 bp, Arabidopsis thaliana columbia
aagaagaaagaggagaagaatcagaagggaaagcgaaggtacaagagttgaacgaacagagaatcgtcttcgacccataaatatttttcgatataggagagcttggattggggccgtatgtgtatatatttatacggtttagggttcaaataagaaaaaaataccaaaaagacgttaattactttatccaatttatatgtttttttaacaatgtagctttcagtctatagattttatttcaatccattaataggt

SEQ ID NO: 105088 - DNA, 381 bp, Arabidopsis thaliana columbia
acccacgcgtccgcccacgcgtccgcccacgcgtccgcccacgcgtccgcacacagcaggacctaaagagtggcttaaagatcagaagaagaagtcttcaagattcttacttgctcccattgatgcaactcgtcaagctcttcaatctgcttatctttcgttaactagtgaatctgattatacagagaaagatttggagaatctgcagaatctgtttaagtcttctgcaagagattgtgttcctaaagaaagaagctctcttgttgattttcaatctaaatccggagttgaggtttctagaatcttaaattgatcttaaagttttgggttttagttatgaatgacattaaagttttgatttttatgatgatgatgatgatg

SEQ ID NO: 105089 - DNA, 379 bp, Arabidopsis thaliana columbia
cccacgcgtccgctgcaagttccaaagagcaaagctatgacgctgatccctcaagaccaagaaaacgagacaccgcagctcaagcgcaagttaagaagcagagaaagcttcaagaggatctaaccgatgaaatggtggtacttgcgagacaacttacggagagaagtcaaatgataagccaatctgtgcaaaatacagaaaagatacttgattctaccgaggaagccattgagcaaagcttagcaagcacaggacacgcaaccgtaagagccacaaagatttattcagaaagctcaaagacgagttgcttccagtggctcttgatcctcgccatgacatgtgtgttcatcatggttgtcatgttgattcgagtcacata

SEQ ID NO: 105090 - DNA, 356 bp, Arabidopsis thaliana columbia
acccacgcgtccggtaatcttaacacaagcttgatcgtcctcatctgccaccaaaccacagacataacttcttcggtgacttccatggctccgcctgtctctgatgattccctacagcctcgagatgtttgtgttgtgggagtggcgcgaacgcctataggggacttccttggctccctctcgtctttgactgctacaagacttgggtccatatccatccaagccgcacttaagagagcagatgttgatccggtccttgtggaagaggtcttctttggcaatgtcataactgccaatcttgggcaagcactagcaagacaggctgcacttggtgctgggattccctaatctgtgat

SEQ ID NO: 105091 - DNA, 370 bp, Arabidopsis thaliana columbia
acattaacattacattagcttcctcatttttattcttattattattattcatcagaccaacaacaaaaaggagataaagagaagaggattcatcatcatcaatcaatccttcattttatggatctactcatatcttgattcttccttctatctctcccttttcttccatctctttttctctgggtttccccggattgagttttttaatctctgattgacagatttgaagagcgtgacaaaggaagaatcttttattaaaacaaattcttctgttttaatcttgggatggcctcggtgggcatagagcctagtgccgcggttagagaatctactggaaacgttactgatgctgatagattacccgaggaga

SEQ ID NO: 105092 - DNA, 377 bp, Arabidopsis thaliana columbia
agagaatttcaaaggagcattagagctgatgaggcgtgctacagctgtaccgacagtagaagtcagacggagagttgctgctgatggcaatgaaccagtccagatgaggctgcatagatccttgaggctttggtccttttatgttgatctggaagaaagtctggggacgtgagaatcgacaagagctgtctatgagaaaatattggatttgagaatagctacacctcaaattataatgaattatgcttttcttcttgaggaaaataagtactttgaagatgcgttcacggtgtatgaaagaggtgtcaagatattcaagtatcctcatgtgaaagacatttgggtaacctatcttacaaagtttgtcaagagatacg

SEQ ID NO: 105093 - DNA, 341 bp, Arabidopsis thaliana columbia
tttgatgagatggggaagaagaaagggaaagcgatcatagtaggaggaagtatagcaggcttatcttgcgcacactcgctcacgttagcatgctgggatgttttggttctcgagaaatcttccgaacctcctgttgggagtcctactggtgctgggctcggactcgaccctcaggctcggcagatcatcaaatcatggcttactactccacagctcttagatgaaatcaccttgcctctctcgattgatcagaatcagacatctgatagtgagaagaacgtgacaaggattttaacaagagatgaggattttgatttccgagcagcttattggtcagatat

SEQ ID NO: 105094 - DNA, 355 bp, Arabidopsis thaliana columbia
cttcaagccacgggagagctcgaaaacgctcgtgctgctatccgttggggtacggattatttcctcaaatgtgcttctcgcaagaaccgcctctatgttcacgttggtgatccaaacgcggaccaccagtgctgggcgagacctgagaacatgaagacaccaaggacggtgttggagataagcgataaagttccaggaaccgagatcgcggcggaagccgctgctgcattcgccgcttcctccatcgttttccgccatgtcgaccacaaatatgcacgccggcttctcaacaaagccaaattgcttttcaagctagccaaaagccacaagggtacatacgatggagaatgcccct

SEQ ID NO: 105095 - DNA, 371 bp, Arabidopsis thaliana columbia
cattgtttcagtcttgttacggaaggagttgatttttccagagaagcttattttatgactcggtcttacttgaagatgatgtggagaaggattgatctcctaaggtctgttctcgagatgggatacaattttgttttcacggatgctgatgtgatgtggttcaggaacccgtttccacggttttacatgtatgcagatttccagattgcttgcgatcattacctcggaagatcaaacgacctacataatagaccaaacggagggtttaactttgtgcggtccaacaatcgaactatacttttctacaaatactggtatgcttcaagactcatattcccgggatatcatgatcaggatgtgcttaactttct

SEQ ID NO: 105096 - DNA, 415 bp, Arabidopsis thaliana columbia
  unsure (1)..(415): unsure at all n locations
aagaagacagtccatctcaagaccaaatagtccattaccaagaatcttcatctgaatcatctccagcagagtcaactgttgagcaaacactggacccaagtaatgactttcttgaaaagaggctaatgagaaagacaaatgcgaggaagctacctcgaggaatgccacctaagtacctgtgggatcaacctaatctattatctgaagaaatggtgagatgtatgaagaatatcttcatgtctcttgctgatccaacagcaacttcaaaagcttcctcaaacgaaagccacctctcaccagtatcacctcgcgggcatctatcaagctcagcatcctggtggccttcaacagaacggtcaatgatctcctcatgggtgcaaagcccacanatagatatccanaataacgccaatgt

SEQ ID NO: 105097 - DNA, 354 bp, Arabidopsis thaliana columbia
agacgggatattcaacgcaatccttaggggacatgttgatttctcaagtgatccatggccatccatctcgcctcaggcaaaggatcttgttaagaagatgctcaactctgatccaaagcagagactaactgctgctcaagttctcaaccatccatggatcaaggatgatggagaggcaccagatgttcctcttgataatgcggtgatgtccaggctcaaacaattcaaagcaatgaacaatttcaagaaagttgcattacgggtgatagcatgctgcttatcagaggaagagatcatggggttgaaggagatgtttaaaggtatggatactgatagtagtggaacaattacact

SEQ ID NO: 105098 - DNA, 344 bp, Arabidopsis thaliana columbia
ataaaaagaaaaatggcgtttgcgatatcaaagcgaaacgcaaccttgtttcttgtaacgctactactaatctccgttccattgtcttcctccacgctacaacaagatttcgtgaagtgccttgtcgacaactccgacgtctccttccccataacggcgtcgtttctctcaccggaccaaaacgctactttgtttaaagaggagcttgaatcaacggcacagaatctccgttacttgacgccgtcaaacccgaagcccgtgttcatattcgagcctttgtacgagacgcatgtccaagcagcggtcgtgtgtgccaagaagcttcagcttcacctccggctacg

SEQ ID NO: 105099 - DNA, 364 bp, Arabidopsis thaliana columbia
acggacgcgtgggcggacgcgtgggcggacgcatgggcggacgcgtgggcttgcagctatgggtaaagagaagtttcacattaacattgtggtcattggtcatgttgattctggaaaatcgaccacaactggtcacttgatctataagcttggtggtattgacaagcgtgtcatcgataggttcgagaatgatgctgctgagatgaacaataggtccctcaagtacgcatgggtgttggacaaacttaatgccgagcgtgagcgtggtattaccatcgatattgctctatggaagttcgagaccaccaagtactactgcacagtcattgatgccccaggacatcgtgatttcatcaagaacatg

SEQ ID NO: 105100 - DNA, 296 bp, Arabidopsis thaliana columbia
agcatcagcctcatcagaagaagcaagggagattcatcggttcctttatccccaagcaacagtttcctcatcatggccatgacaacagtcttacaactctcaacaacaacaaccaagaaagcatcacctttcatcatgcttctactaaccgaagacgaagctagagagatgcagcatctcttttcacttagtcaatcaagattattcgaagacatggatttgtgtcattaattcagaactatatataattgattattgatatttatagattttatattatgtttgtaaaatcagca

SEQ ID NO: 105101 - DNA, 305 bp, Arabidopsis thaliana columbia
acgtcagctcaatgaatgccataagacattccacaacgggtttaacacaaatatgcacaactcaggtttggatgagctatttgttatcacaaagacaaagatgaaggttgctgttatgtggcaagatggtagctgcaatctgggagttgattcccaacagctgcttcctgttggtgctgttaatgctcatgatttttggccctaaaagtttgttgtggaaaaggaaacctgcaacagcatggcatggggaattgtgaaggctgtcaatgctaaggaacaaactgtgaaggtacaatggacaatac

SEQ ID NO: 105102 - DNA, 274 bp, Arabidopsis thaliana columbia
tttgcagttcatgggaggtcaagccgctggatacgcggctgcagactctgtccaggcacttcctcttgtaagcacattttggggtatagttttgttcggagagtatcgaaaatcgtcgaagcgaacttatgcccttttagttagcatgttggccatgtttgtggcggccgtagctattcttatggcctcttccggtcaccggaaatgatgatcttatcatagttgtattatacatgtaagattataagtgaatgaagaatatatgttctgtttc

SEQ ID NO: 105103 - DNA, 220 bp, Arabidopsis thaliana columbia
gagtcgtattatggatggttggcgtcactttgtgtagcacggtacacagctattgcagtgagaaaaatggtgaaaaccgaaatgacggaagccgagcctatggcagggccatcaccattttcaacacttgagctatggagttggagtggaatctttgttgtgtcatgtgttggtgctctgttttaccctaattcattggggacaagtgcaataacttctc

SEQ ID NO: 105104 - DNA, 355 bp, Arabidopsis thaliana columbia
  unsure (1)..(355): unsure at all n locations
agcgagctttttgatcggagactttttctctcatcgtcgttgtttgaattctccggctgagagatgcttgcttgacgacgaatctccaccgatcttttaccttttcgcacaacaagtaagagaaggatgtcgactccagcgaggaagagattgatgagggatttcaagaggttgcagcaagacccacctgcaggaattagtggtgctccacaagacaacaatatcatgttgtggaatgctgttatattcgggcctgatgataccccttgggatggaggtactttcaaattgtcactgcagttttcggaagattatccanataaaccaccaacagtgcggtttgtttcacggatgt

SEQ ID NO: 105105 - DNA, 318 bp, Arabidopsis thaliana columbia
aacacacgtccgcaaatacctttaattttatttgattccataccctaatttttgtatattccatgtcaatgaacgtttcaggagaaatgggtcaaaagttttgggagaatcaagaagatcgagcgatggttgaatccaccataggctctgaagcttgcgactttttcatctcaacagcttcagcttccaacactgccttgtccaagcttgtctcaccaccaagtgattccaatctccaacaagggttacgtcacgttgttgaaggatctgattgggattatgctcttttctggctagcgtccaacgttaatagctctg

SEQ ID NO: 105106 - DNA, 144 bp, Arabidopsis thaliana columbia
tgggagaaaaggtgtgaaaggagcacagccaggtcctgtcttgtcatggtaccaacgagtcaaaaatgcagttggagctgcatgaggccgtgagtacatgcattaaaaagctaatcctcatatcattcaccgtgacattaaatc

SEQ ID NO: 105107 - DNA, 195 bp, Arabidopsis thaliana columbia
tgagtcgtattacaaacggaatgctttcgtcgggaagtagagccgacggtgctacggcggcggctgcatcgatggaatgagtgacgacggaggcgatgaaactgatggggtcggcgtcaccaacttgaaaatcagctgtggctaacaatttattgatttttgttctcggttcaccgcatcttgttaccggattgt

SEQ ID NO: 105108 - DNA, 168 bp, Arabidopsis thaliana columbia
acgtcgtattacatcaaccttaatcagccggacttggtcttgtttgttggtgaagctcttgttggaaacgatgcagtagaccagctctcgaagttcaatgaggaactttcggatctctcgacttctgggaagcgaggactgatcgatggaatcttacgtacaaggttt

SEQ ID NO: 105109 - DNA, 361 bp, Arabidopsis thaliana columbia
  unsure (1)..(361): unsure at all n locations
attctcgacaaagaaccagggaacaagaaccgtcgtggtcgaaaacgaagaccttggcggcaggtcatgtacggatctacggggtatgtattcttacattcgatcgccatttattctactggatttattttcctgttgcctgattggtattaatcgatttgtgttggaaaatcttgaggaatttagagggttggtgtatangaagaggatctggaatcgattattgtcattttgctacttgttgttatttgttccattaggtatataatcgatatgagtgtcattggtcgttgtttaggttcggtatttgtttgtgtggtgtataattaagaatgggtcttacttactatacaacatatat

SEQ ID NO: 105110 - DNA, 167 bp, Arabidopsis thaliana columbia
tcgtttgggaaagtcctcacatcttagatgaactccaatcgcttcgagtaactctaattcctcgggagtttccgatagcatcatcgggaaattgcttttccgttgaatactcaccatggatggtgcctgatatgacgcgttgcattgcctatacatcggcaaggttg

SEQ ID NO: 105111 - DNA, 259 bp, Arabidopsis thaliana columbia
agtagctgtaaacccgtccgcagtgggtgggtgcagttgtaaaagctccttcatggtgaaactctgaatcattgactcaactttcttctttacatggactagaaaccaaatttgatcatttgtttattacatgtatgatgtcagaagttttgctatgtatcaaaaatgcataactagggaaatatacataaactctgtatgcttctagctcatcaaatgatttgtccatcctatttttaaacaataatggaaagattta

SEQ ID NO: 105112 - DNA, 314 bp, Arabidopsis thaliana columbia
acggagatatctccccgccggtgacttcaatcccagttgttgaagggaatgaagaattgaggaagccacagaatctgattccgccgttttcaaaggtggtgtctcattttggcattagcggaatctccgtcgcattggccactggcgtgactcatcctctcgatgtagtgaaagtgagattgcagatgcagcatgtcggccaaagaggtccgttaattggaatgactggaatctttcttcaactgatgaagaatgaagggcgtaggtctttatacttggggttgactcctgctctcactagatcagtgctttac

SEQ ID NO: 105113 - DNA, 342 bp, Arabidopsis thaliana columbia
cccacgcgtccgcccacgcgtccgcccacgcgtccggaaaagctcaagccgagagagacaatggcatcaacattcacgagctcaagcagtgttcttaccccaacaacattccttggccagactaaagcctcaagctttaacccccttcgtgatgttgtctctctcggatctcccaagtacactatgggaaatgatctttggtatggacctgacagagtgaagtacttaggacccttttccgttcaaactccgtcttacctcaccggagaattccctggcgattatggttgggacaccgccggtttatccgcagaccctgaagcctttgccaaaaacagagct

SEQ ID NO: 105114 - DNA, 324 bp, Arabidopsis thaliana columbia
acccacgcgtccgctccccaagtagagaaatataaaaacttagacaaatattgccacaaccggtgaaaatggagatcccggttcgagaggagagaagatcctcctcatcctctgccggaccattacaacaaaccatctccttagcagctgacgacgccatcgatagcggtccatcctctccgcttgtcgtcaaagtctctgtcttcgaaacagagcatgagacgaccaagcttatccacgcgccgtcaactctgctcggtgaaaccaccggagacgctgattttcctcccattcaaagctttagagatgctaaacttgtttgtg

SEQ ID NO: 105115 - DNA, 142 bp, Arabidopsis thaliana columbia
agggctcttggagttgtctccgttcgaatttttgcatttcatcatcctttacgtgtgtctcagaacttcatctctctctcgagagaagttgcgtcaacatttcaaatcatttacgcacagtttcagtttttagtcactttcg

SEQ ID NO: 105116 - DNA, 373 bp, Arabidopsis thaliana columbia
acaaaagcacgctacagaagaagaggaagaagaagaagaagcagagacaacaagaagaagaagaaacagtctcatctcgccggagaagaagaaagatgtcgtggcaatcatacgtcgatgaccatctcatgtgcgaggtcgaaggcaaccacctcacacacgccgccatcttcggccaagacggcagtgtctgggctcagagctcagctttccctcaggtttttcttccttcttcttcgcgtttcttccgatcctctgtctcaaataagttcatcgatctgattcaatcgtctgatttaggtttattccttgtgatccgatctgaggaaacttggatctggttttgatttgctagcttctgacttgttctctc

SEQ ID NO: 105117 - DNA, 374 bp, Arabidopsis thaliana columbia
cccacgcgtccgtttctcctgaactctgtagaaagatccgaattgaatatttcggacccgaaacctgacccgctttgatgggctggattccgtgtccgtgctggggaaccaacgacgatgaaaacgccggcgaggtggcggatcgtgatccggtgcttctagtatctggaattggaggctctattctgcattctaagaagaagaattcaaagtctgaaattcgggtttgggtccgaatatttctagctaaccttgcctttaagcagagcctctggtctctctataatcccaaaactggttatacagagccgttggatgataatattgaagtattggtccctgatgatgaccatggactctatgcaattgacatt

SEQ ID NO: 105118 - DNA, 412 bp, Arabidopsis thaliana columbia
  unsure (1)..(412): unsure at all n locations
gtgatgtcgttacttaaggttcagtgcgtttacaaagaccctgtgacgaaagagacggttaatttgaataattccggcgaagtaaagattctcaggccaatagtgatgacagaaagaagacctgtagtgtcagttgaagttgacagacagaggatcagattacgtgcggcagaagcaatctctgaagctagggttttagccgagcgcggtgatttgactgaagctgtgtcggttctcgagacttgccgtgggttactgaccgagtccgtgtcgggtcgagccggagatcaattgtgtgtcacactgtgtgcagagctgaaggagatgcaagagagaatggcgagccgtcaagtatatgaggcttcgggtanggcttacgtgctcgccggtctgagctcgcactcctggcagc

SEQ ID NO: 105119 - DNA, 370 bp, Arabidopsis thaliana columbia
aggacgcgtggggttgtgttcttctccgtctgtgaagccgcagagattgacttatccttcggtgttcaaagcttatggtagacttggccaagctcgtgatgggaggcaattacatgggatggttattaaagagggacttgaagacgactcgtttatacggaatacgatgttgcatatgtacgtgacttgtgggtgtttgattgaagcttggagaatctttctggggatgataggttttgatgttgttgcttggaattcaatgattatgggttttgcgaaatgtggattgattgatcaggcgcagaacctgtttgatgaaatgccgcagagaaatggagtttcttggaattcgatgattagtgggtttgtg

SEQ ID NO: 105120 - DNA, 382 bp, Arabidopsis thaliana columbia
agttttgtcttctttagctttttctcctctttttttcttctctttgccaaatttcttctctttcgcttttacattttctccagcaaaataagacaagatctcaatcacttcttcttcttcaattctatcgaaagctgtcacgagaaagccagagaatttctcagcttctcattttgtcaagcaaatacaaaaagaacacacttcttttttatttccgggaaaattcgtttttatgtagtggtcgtactaaacacgcttcctttatgtggaatcttaaagcagtccctttttttagttgaattcaacagtttttttctttttttttttggttccggatccgaccatctctgcaacatcgtactttgagagacaacactgtcga

SEQ ID NO: 105121 - DNA, 379 bp, Arabidopsis thaliana columbia
agttttcccttaaaaaaaccaaggacaaaggcataatgccgtattcacaatcttgactcttcgttatctggatctagggtttctctcgatttttagaatgccacagaacctaataaacttttcccagatacacaaacaaactcatcatcaaccaaggaagaagaaagaaactagggtttttttttctggattcatcatcggtattttacagatctatattcaaagggaacaaaatcttaaggaacaaacactaaattttcattctttctctgatttacccatttatcaaaaatcttccttttgttttcctgattcttgctagagaaaaaaactcggatccaattcataaactagtgtggactggtgatcaatctatcaa

SEQ ID NO: 105122 - DNA, 287 bp, Arabidopsis thaliana columbia
aatcttctgtggagtgtttgatggacatggtccatatggtcatatggttgcaaagatagtcagatacaatcttcctctcaaattaattgattactgggaagcaacattaccagttgaaggtgttcttaaggcaatcaccaccgacactgtcaataatgtaaccaacattaacaaccctgaagatgctgatgctgcagctgcttttgtcactgctgaagaacaatctatgacatctgctgacatggtggatgagaacacagaaacccaaccggaattgtttcaaacgc

SEQ ID NO: 105123 - DNA, 357 bp, Arabidopsis thaliana columbia
cggacgcgtggggtcttccccattttgacaagaactcacttaagattttgaagtcatggaaatggggaacgggacaggacccgggatgtcgggggcttttagtggaggcggcaacgagattttgggaatgggaggtggcggcggcataatgggaggcggtgatatttcacatatgagtcctgaagtaaaatggatatttgagatggcttggtatggtgaaactgtaagatatgatgggttaatttgtgaggagcatccccctaagctctcttcagatggtatttgggagaaacttattattaaatcggcaggtctatatttttggcaatatcgtcttccgaagctcgagattgtcat

SEQ ID NO: 105124 - DNA, 376 bp, Arabidopsis thaliana columbia
  unsure (1)..(376): unsure at all n locations
tggacttctttcctctcatcttctccagcagaaacaaaaaaagctgaaagatgtggttttttggatcgaaaggagcatctggattctcgtctcgttcaactgcagaggaagtcacacatggtgttgatgggactggtctcactgccatagtcacaggttttcttctatcaacactttcatgccattttgcgacatggggttgtctaaagttgtagactttttttcttataatttccagaacttttgtcctctctgattctgtcttcgaattgatttcatatctagtaaaaagacttgacttttattgtttagacaattggaatttaaggtttttatcatcanggtctgtctttgattcggtcaactctaataaata

SEQ ID NO: 105125 - DNA, 317 bp, Arabidopsis thaliana columbia
ctaccaggacggagtgactgttatgtcgaagcaggagtatattgcgatggtgaagaagataacagatcttgaggagaaatgtaagtccatggaagctcaggctgcgttttatatggagagggagaagactctaaacgctgcacttcgtcgtattgaccagctcgagcttcagttgtctgaaaccaacaaggcactagacgagacaatgacgaggcaacatgagataatggctttcatcgagaagaaaaataagaagaagcggaagttcttattattctagaagactgcatcagaggctaagaagcctggaaaataaa

SEQ ID NO: 105126 - DNA, 389 bp, Arabidopsis thaliana columbia
gggaatatgatttacgggcaaacctcttgcaaggaggatgaaaggtttgattctgaagtaggacaaggaagcttatttgtagaggttgataccattcctattccaggacctccaggatcatttttaccaagtcctagagatatgggttttgatgaaaatcttgggaactcgtcggttattacaagccaggttcaatccttccatgggttagcttgacagaaactcatctgaatcacctgtttccgctgtttcaaactttgcagctggtagattgaattttcctgctgagttatcttctttccgagaaaatttctccccggatattgccatgtcctactcaacaaccccgatgagcttttgtgttccatctcatcatgggacaatcactg

SEQ ID NO: 105127 - DNA, 381 bp, Arabidopsis thaliana columbia
aagccacgcacttgttctctttatcacagtgccctctcgctctctgcaacaacactcttaatatatatatatatatattcatcaatccctatctctcatcgaattctcttccgatcgtctttttttcttcccgcggtttcttgcgtttccggtcagtttgcggcaccgtgttttgttatttggttgaatgatcaaacgatttggttttttatcctgattcgattgcattctgattgagctgctatgtttgagaaatcgtgtgtggaattgtgttgatttgttctgggaatttaattagtttctggaattttgccgattgttttggtgttttcatgaaaagtttgctactggaatttgggattatctcaaagcttattcaat

SEQ ID NO: 105128 - DNA, 386 bp, Arabidopsis thaliana columbia
aagatttcacaacctccacacacttccaaacacaattaaagagaggaaaaagaatcaataaccctataaataaaaaatcagacaaacagaagtttcctcttcttcttccttaagctagtaccttttgttcttgaaattagggttaatttcttttttccaaataccatcaattctccagaccataaaaactcaaaaagatcagatctttcctctgaaaaagagatacccaacttatgtttttgtgtgtctgtatatagataaacattacatacccatatttgtgtatagacataaaaagtggaaattaaggtaacaaaaagaaatgggaagaggaagagtagagctgaagaggatagagaacaaaatcaacagacaagtaacgtttg

SEQ ID NO: 105129 - DNA, 395 bp, Arabidopsis thaliana columbia
agcccacgcgtccgcacatttctctccctcttccgattctcctgttgttccattcatcaaaaagctatggatttcaatagaaaagctcatccagattgcgtatatgcggataatcctttccatgaatgtgcttcagcttgtttagagaaaattgctcaaggccatgtcaagaagaacactaagaagcaaagttcaaggcttcttagcttctcagggagtttcggtaggaaaaagaaggagtcgaattcacaaccgcctacaccgctatccgcaaggccttatcaaaacggcagaggcggttttgcaaatggtaattccccaaaggttcatcattctgtagctccacctgcttccgtgaagaagaagattgtttctgaaacgaaaaattctttcac

SEQ ID NO: 105130 - DNA, 407 bp, Arabidopsis thaliana columbia
cggacgcgtgggcggacgcgtgggcggacgcgtgggcggacgcgtgggcggacgcgtgggcgttttttcctggaagaagaagaagaagagctcaacaagctcaacgaccaaaaaacttcggacacgaagactttttaattcatttctcctcttttgtttttttcgttccaaaatattcgatactctcgatctcttcttcgtgatcctcattaaataaaaatacgatttttattctttttttgtgagtgcaccaaattttttgactttggattagcgtagaattcaagcacattctgggtttattcgtgtatgagtagacattgattttgtcaaagttgcattcttttatataaaaaaagtttaatttccttttttcttttcttttctcgtttttttttttttccccc

SEQ ID NO: 105131 - DNA, 370 bp, Arabidopsis thaliana columbia
gtccacggacgcatgggcgggtaaaccggtttttgaattcagaggagcgaattacgctagtttgaagttgcatccgggtttatcggcgtttgctgatgatcctgatggagcgagtgtgtcattgacggagctggttgagtttgcgaaagggagagttccgaaaggaatgtggattgagactgaagttaggttaatggcgacggcgggaatgagattgcttgaattacctgttcaggaaaagattctgggagttgcaagaagagttcttaaatcttctgggttcttgtttcgagatgaatgggcttctgttatctctggatctgacgagggtgtatatgcttgggttgttgcaaactttgctctcggttca

SEQ ID NO: 105132 - DNA, 391 bp, Arabidopsis thaliana columbia
acgtcatcttccctgttttgctgtttagtctgcaagagaaatttcagattccggcggagaaagctataacgattcttcaatggatcccacttcttcttcttcctctgctcttagatggaaaattcttcgccaagcgcttctccgtagatctgattctcaatctcaaactgagaccaaacggatttcaaggaaagcaactcaaggattcaacttgattccttgtcaagtggtggactcttctcctcaatcggataagtctcgtgaagcatccgtttgctacacacttcccatcactggctctcccaaactctatctaacacaaagagtggataattgtagtgatctcaatgacttcgagatatctaatcgatacaacattgataatactgga

SEQ ID NO: 105133 - DNA, 406 bp, Arabidopsis thaliana columbia
agaaagtgtttgatgaaatgcctgagagaagtcttgtttcgtggaattcgatgatcgatgctctggttcggtttggggagtatgattctgcgttacaactgtttagagagatgcagagatcgtttgaaccagatggttatacgatgcagagtgttttgagtgcgtgtgctggtcttggatctttgtcactaggtacttgggcacatgcgtttctgctgcgaaaatgtgatgtcgatgttgctatggatgttttggttaagaactcgttgatcgaaatgtattgcaaatgcgggtcgttgagaatggctgagcaagtgtttcaggggatgcaaaaacgtgacttagcttcatggaatgcaatgattctagggtttgctacacatggaagagctgaggaagccatgaa

SEQ ID NO: 105134 - DNA, 251 bp, Arabidopsis thaliana columbia
ggcgtccaggttttttagtgccacatcaacggctgtgagtggttagtcactaaagaaaagtcacaggctgttatatagtattggcttcgctatttattttcgtctaccacgagaaaaacaagtcgtaattcttctatcttgatatcttcaccgcctgccgatctctctcaatctccgatcaaccatgagcaaaggtccaggactcttcaccgatatcggcaagaaagccaaagatctgttgacgagagact

SEQ ID NO: 105135 - DNA, 405 bp, Arabidopsis thaliana columbia
agctttaaatcaaaatgtcccaaagaagaagaccaattttccaaagagtttcgaaactactaaaaatctcgatcttgagaagacccatcatcccaagactcaagctaattcccataaaacaaagaagatccaaaagggtcaaactccttcagcaacacaactataaatttctccaagagtatcaagtctctccttcaagtacatcctttatcaaatgctatgggaagagcattcagatatctagatcgggtcttaaacgcatttacgggttattgtttctttctcagtgtatcggccggtataatgaaaatgatgacacaataacgcaaagttggatggagatggagccttttcattatgccctcggagttgcttctcctgcaagggagcatctgcagccgttcg

SEQ ID NO: 105136 - DNA, 415 bp, Arabidopsis thaliana columbia
acggacgcgtgggctgtaagcggatttcatcagcattcagcagccagacgaaacttttaacgatctaccatcgaaccaggtctctcatatcttccgatcatcttctccgattacgattctttccttctcgtttttagattagctcagaaatttttctaaccttttcttctctgtcgatctaacacctgacctcgatttttcgttaccgataccaccattttcgaggtcagagctaccgttttcgtatctgtgttatcatatccggattaggttttgattttatgattacatttgttataatcagtgatttgttgtttattcgcgatcctcggattttcgctggatgatcttttgtgcttcctctatacgttttctaaacctagatttggatcgatttggtatatgagaagctgtg

SEQ ID NO: 105137 - DNA, 265 bp, Arabidopsis thaliana columbia
aggttatgttgtgagtttatgaagttgtggtctagtgttgtattttgtttttcttaaggataatgcatctgtgtgctttgcttatctaaaatctaaataaagtgggtttctgcattgtgactttgcacaaaaaaaaaaaaaaaaaaaaaaaaaaaaaaaaaaaaaaaaaaaaaaaaaaaaaaaaaaaaaaatcaaaaaaaaaaaaaaaaaaaacaaaaaaaaaaaaaaaaaaaataaaaagggggggccccccaaaaggttaaaa

SEQ ID NO: 105138 - DNA, 430 bp, Arabidopsis thaliana columbia
  unsure (1)..(430): unsure at all n locations
agtcacaaaatttggagaaatcgaacagacgatcgagatcgaggaaaatggcgtcgtggaattcgattccgctggagatctcgtacgaaatcgttggatggatcgcgtttgcttcgtggtcaattagcttttacccacagctgattttgaatttccgtaggagaagtgttgttggattgaacttcgacttcgtgatgttgaatttgacaaagcactcgtcgtatatgatctacaatgtctgcctctactttagtcctgttattcaaaagcagtactttgacacttatggcgataaagagatgatacctgtggctgcaaatgatgttgcattctcgattcatgcagttgtaatgacagctgttacactgttccagatctttatctatgaacgtggacctcanaaagtatccagacttgctataggtattgt

SEQ ID NO: 105139 - DNA, 422 bp, Arabidopsis thaliana columbia
  unsure (1)..(422): unsure at all n locations
acttatttctctcgaactttctctctctaaatattttgtttcgttttctctctctctctctatttactttcgttctctctattttttttgtttggtttagcttatttgtgaagtgttaaatcttcttcagtttctggggaaattangtggggaggtgaaaaagggggaaatataattgaaattgggttctctctgctgtgcaataataatttctgagaggattgtgaagaagcgcttttatgtaagaagatatctcattattagttatttacatgagaatctgacattcttaacaactgtctgtggggttagttttgtccaaagaactatacagagatgtctcagaccaactgggaagctgataaaatgttggatgtctatatccatgattatctggttaaaagagatttgaaagctacagc

SEQ ID NO: 105140 - DNA, 304 bp, Arabidopsis thaliana columbia
aaaatatatatattgaatcttcattcattaaaaaaacaatttttatttttccctattcatcttcggttcctcaccgtccgatgctttgactctgaccaatcagtcaatttgagcttcacaatcaacggtcatgggtcattgttacagccggaacatctccgccgtcgaggacgacgagatccccaccggtaacggcgatgtttcgaatcaaccatctcaaaatcaccggcatgcttcgattcctcagtctccggttgcttctggtactcctgaagtcaactcatataacattagccctttccaa

SEQ ID NO: 105141 - DNA, 446 bp, Arabidopsis thaliana columbia
ccacgcgtcagatattgttgttgttttcttctgcgacagcttcgaagtcgtctcttggatttttacaagtcaaaagctgagtaagacgttaaccacgagtcttctcgccggcgaccgtcgtcaacggcggagattttgttagttatgtcccgcatttccaccacctccactactccttcacgcgtgagagctgcgaattcgcactactcagtgatctctaaacctagagcacaagacgataacggtctcaccggaggtaaaccgaaatcgtcaggttacgatgtgaaaaatgatccagcgaaacggcgatcaattctgctgaaaagagcgaaatctgcagaggaggagatggcggttttggctcctcagagagctcggtctgtgaatcgtccggcggttgtagagcaattcggttgtccgaggcggccgatttctcgaaaaagcga

SEQ ID NO: 105142 - DNA, 208 bp, Arabidopsis thaliana columbia
aggtaattttagttttcttttataaaatgcccttaaataaactaaaaaagaaaacgacaaaaaaaaacagggcgttgagtttgttttcattatgtttgatttctctgtcattttctttaatgtgtctagcgagtctgcctttgtcccaatggtttagtatctgcatgtatccacggatctctatttgtcgacgaatgttatttacaat

SEQ ID NO: 105143 - DNA, 327 bp, Arabidopsis thaliana columbia
gcgatcaaattcaatccgaaggtttcggctctggtgcgttttctgacgttgttgttaaagctatgggatccagttaccatctccaccgcttgattctatctcgcagctcctacttcaggactatgctgcaaggtccatggaaagaagctagctctcctgttgtgaacttacttgtggatgataaaaatgttaatggagacgcaatttctgttgctttagcttatctgtatgggtaccatcctaagctggatgatgataatgcctttcgtgttttagctgctgcttcttttcttgaccttcacgatttgtgtgcgatatgcactgatt

SEQ ID NO: 105144 - DNA, 375 bp, Arabidopsis thaliana columbia
aagacgcatgggcggacgcgtgggcttctgtctttgtcgtataagagcaagagagtggtttgattcaatttttaaaattctaaataaaactccaaccgtgaatccagccatgaaactctttttagaaaatccttttttataacaaataattcctctgcttcttcttcttcttcgtttatttcaccttttttggtttctttagctcagaaaaagcccattctttttttctattcttgtttattttaatcatactgtgcgtttctacaaagtttgttcctttcttcttcaactctctcactcacagtcacagagatctgtttcttttctttttttgctttcactcttctcttccagtgagagagagtgagagaaaat

SEQ ID NO: 105145 - DNA, 438 bp, Arabidopsis thaliana columbia
agaaaaccctaagcaagcttctctcactcagcaatggcacccattgatccacactctttcaccgattcctctcatcctctcaccacgcatgtcgctctctccctctacctcgatttcaacacctccataatccatggctccgctctcctcactctctcctccgccttctccggcgaactctctcttgatactcgctgcatttccattgctatggtcctcgatcctctcactctcgagcctatcccttactccgtctccaccacaccggatcgaattcggggcaccgaagttgtcgtagtcctctccggtcaatcttcactgctaattgtctactccacttcgccttctgcttccgctctccagtggctttcgccgcttcaaactttctccaaattgcatccttatgtctacacgcagtgtcaagcgattcacgccaga

SEQ ID NO: 105146 - DNA, 404 bp, Arabidopsis thaliana columbia
gaaactaccaccagagatctttgataaagatctcgacgccatcttcttgaacaacaatagatttgagtcgaccatccccgagacaattggtaaatcaacagcttccgttgtaaccttcgcacacaataaatttagcggttgcatcccaaaaaccattggccagatgaagaacctcaacgagattgtgtttattgggaacaacctaagtggttgcttaccgaacgaaatcggttcgttgaacaatgtgactgtgtttgatgctagcagcaatgggttcgtcggaagtttgccatcgaccttgtcgggcttagccaacgtggaataaatggatttctcgtacaataagttcaccggatttgtcacagacaatatctgcaagttgcccaaattgtcaaacttcacat

SEQ ID NO: 105147 - DNA, 397 bp, Arabidopsis thaliana columbia
cccaagcgtccggaagtttttcagattactcaaagaccaaatttgcaatcgcagaaagttcctgaagcattagattttcctcaccttaacgaaaggctccttcgttgtatatctgatcaatcatatgaagttcgtcttgcaacactgaagtggtttctgcggtttttgaagtcagaagattccagtttctcagagtcgagcagtatttggaactgggcaaaaaacggtctccaggtgatattattagagctgttggacaaggagaaaaaccataaatgtgagaactacattttaaggattcttttccagtggaatcttcttatgttcaaaaaatcatgtaacaaggaatctgttgaaggcatttacgttggttcgttgaactatgattcggtgtttc

SEQ ID NO: 105148 - DNA, 367 bp, Arabidopsis thaliana columbia
aaggattacacagaccctagcctcttccccaaatcccaattctccattgctttagaagaatcacacaatggatctagagattgttggtcgtcacgctctctttttcgacgatgattcgatggcaacgtttgtcaactctccgacggcgctcgttgactggaacagcctctttattgaccgctacgatgttcgtcatctcctctcttctcctcctcctccacgtatcaaacgccgtcgtccgaattcaaacgatgctgacttggaatcggagctcgatcacgagcgttatctagatttaccgtcggaatctccatctccgtcggatgatgatgaacacgatatgaatgaggattcagcaaatacaaat

SEQ ID NO: 105149 - DNA, 337 bp, Arabidopsis thaliana columbia
acaaaaaagtttcaatggccgcctcaacaatggctctctcctcccctgctttcgccggaaaggctgtgaacctttcccctgcggcatcagaagtccttggaagcggccgtgtgacaatgaggaagactgttgccaagccaaagggtccatcaggcagcccatggtacggatccgaccgagtcaagtacttgggtccattctctggcgagtcacccagctaccttaccggagagttccctggagactacggatgggacacagctggtctatccgctgaccccgagacattcgcaaggaaccgtgagctagaagttatccacagcaggtgggccatgct

SEQ ID NO: 105150 - DNA, 391 bp, Arabidopsis thaliana columbia
tcctcctcagtgttccgtctagccaacgaccttgtaacctcaccggatgaattggcgagaggagacgtctgcaaatccatccaatgttacatgagtgaaactggagcatcagaggataaggcgcgttcgcatgttcgacagatgatcaatgacttgtgggatgaaatgaattatgagaaaatggcacatagctcttcgatactccatcatgattttatggaaacagtgataaatttggcacgcatgtctcaatgcatgtatcaatatggcgatggccatggctctcccgaaaaagccaaaatcgttgatcgtgtcatgtccttactcttcaatccgattcctttagattgaacttcatattgattacattaaatatcatatggttttttga

SEQ ID NO: 105151 - DNA, 250 bp, Arabidopsis thaliana columbia
acagacactcgggctaacgcgtcagcggtcgcctgggtcttaatttttgcgaaatgtcacgaatgcttctggttaaggtgagaaagtagattcgcaagataccactactaacacagtgagcgaatcgtgttcgattgactttgtggatgattcattatcattcaccactatgtttgagttgagctagagttatgcatcattcggaatcgtaacatgtcacgtcccgttgatcgattcgcaatatcatgtt

SEQ ID NO: 105152 - DNA, 383 bp, Arabidopsis thaliana columbia
aacttctttctgcaaattttattttcccgagaaaatcatcactgagaaaaatgctcgctgtgtttgagaagacggtggcgaatagccctgaagctttacagagtccacactcgtctgagtctgctttcgcgttgaaagatggatctctcgctactcatttcgcttccgtgaatcccaactccgtcacgcttaacttcggatcttctggatttgttgcttactctcttgataatcctgatcctcgtgttcctaggtcaatttcaagtcctcttctctttgattatatgcttgatctagtcaaatctttgttgtttctttgatttctaagtagtagattttgaatctccgatgttttcggtttcgattttgtttatttctggaat

SEQ ID NO: 105153 - DNA, 322 bp, Arabidopsis thaliana columbia
actgaactccgcttctaagatccttcgacggatagaaagatatttcagatctgatcggagagaatcattctcagaatttctccattctaatttctctttctcgacagagtgaagagagacaacaaggaaggaagaggaaaaatggaggaattcttagataagttgccgcagatggatctgatgcgttcggagaagatgacgcttgttcagcttatcatccctgttgaatccgctcatcgttccatcacttatctcggcgagctcggacacgtgcagtttcgcgacttaaatgctgataagagtccctttcaacggacatttg

SEQ ID NO: 105154 - DNA, 314 bp, Arabidopsis thaliana columbia
ttttatgcattctaaggagaagaggtgatcgaaaccaaccacacgggaggagcttatgccattttcctccccgtggaaggtctaacaatcacacgtctcctaatctcgtacgtcttcttaggttttgaagaatggaaaatttaaggaggttgtcaaacccgggaaatttcggattcattggaagatcacaatcacgagttccccaaaaaaacatggaaaataacatttctcctcctaataatatgcaccaccatagtgcttctttagatgatcttttcacagaagaccaaccagcttggctcgatgagctccta

SEQ ID NO: 105155 - DNA, 372 bp, Arabidopsis thaliana columbia
atgacgcgtgggttcttcacacgaaaacctctcgcagtcgctaaaagccttgaaccatctcatgatcactagcttccaagtaagtgtgtagttgaatcatttcgatcaaggtttagagagtgagaaagcatggcatcaacctttaccgcaacgtcgtcaatggggtcatctttggctccgccttcgaatcgattgtcatcgtttgtttcgatctcatcaagctcttttggaaggactcagagtagtgctcagaggaaagcaaggtttcctaaaatatatgcggttaagcaattgcatttcaatgacgacgggactgcgattaagaagcttcaagctggtgtgaataaacttgcggatttagttggggttact

SEQ ID NO: 105156 - DNA, 256 bp, Arabidopsis thaliana columbia
gcgtccacggacacgtgggcggacgcgtgggctctcctccctaaaacgcgtttccgtgacaccgccgttatcctcatgctcatccatcagtttataacgttcgggtttgcgtgtacaccattgtacttcgtatgggaaaaagcgatcggaatgcaccacacaaagagcttatgtctaagagcgctggtgaggctaccggtggtggttccgatatggtttttggcaatcatctttccctttttcgggccaataaact

SEQ ID NO: 105157 - DNA, 297 bp, Arabidopsis thaliana columbia
cccacgcgtccagtgaattttcccgtgaattttcgcggtgcttttcaaagctaaagctcctgggaagatcatacttgcaggggaacacgctgttgttcatggatccaccgctgtagctgccgccattgatctctacacttacgttactctccgctttcctcttccatcagctgagaacaatgataggcttacacttcagctcaaggacatttccttggagttttcatggtccttagccagaatcaaagaagcgattccttatgattcaagcactctctgccgttctacgccggcttc

SEQ ID NO: 105158 - DNA, 199 bp, Arabidopsis thaliana columbia
tctaatcaaaaagcttttaacctcagccgttaaatctttctccgatcatgccgaccagaaacatcgccattggtggagtccaagaagaggtctatcaccccaacgcacttagggcggcgctcgctgagtttatctcgactttgatcttcgtcttcgccggctcaggctccggaattgctttcaacaagatcactgacaa

SEQ ID NO: 105159 - DNA, 311 bp, Arabidopsis thaliana columbia
gggaatggagggagtgcttgggacgatggtgcttttgatggtgttagaaaagtgcttgttgggcgaaatggtaagtttgtgagttatgtcaggtttgagtatgcgaaaggagaaagaatggtaccacatgctcatgggaagagacaagaagctccacaagagtttgtagtggattatcctaatgaacatattacatcggtcgagggaacaatcgatggttacctttcgtcgctgaagtttacgacatcaaaaggaagaacctcccctgtttttgggaatgtggtcggtagtaaatttgtgttcgaagaaac

SEQ ID NO: 105160 - DNA, 347 bp, Arabidopsis thaliana columbia
cccacgcgtccgcccacgcgtccgcccacgcgtccggtcagcaacagtctcagcaaccaagcagtggtggtagctcagccccaccaacagataccacagggtacaattactaccagcatgcttctggttatggccaagctggtcagggataccagcaagatgggtatggagcttacaatgcctcgcagcaatcgggatatggtcaagctgctgggtatgatcaacagggtggttacggcagcaccactaatccaagtcaagaggaagatgcatctcaagccgctccaccatcgtcagctcagtctggacaggctgggtatggtacaactggtcaacagccgcctgct

SEQ ID NO: 105161 - DNA, 372 bp, Arabidopsis thaliana columbia
aacgacggtcctccttctcccggagaaaacgtttcaagccctatcgaaaacacatactcttcccccggcggaattcaacgtcgccggcgaggaagatcctctactcccacgcaattcgcaactcctccaccaccgccttcacgtctcgcatcatccaattccactcctccaacatctcgtccttccgccgccagatctaaaggaagaaatggacacggaggtggcggtggtggcggtggtggcggagaccaaggacgccaatgtccactgacgagccactgccttcttccgatgacggtgaagaagacggaggcgacgatactactccgactttcgtttggggaactaacatcagtgtgcaagatgttaaat

SEQ ID NO: 105162 - DNA, 379 bp, Arabidopsis thaliana columbia
acccacgcgtactgaaaaaaccactgggagatcaatatggtggtgagcaagagttaccggattacaatcctgcattcatcaatctaactttcaaattcacagcatacacgattgcatacatgcttgtttatattcgggatagtgtcaacggtaacattgtctgcaacgttgttgagaaacacattgcggtacagttgcgggtgaggctgaaagaagaagaagatgaaatggaatataaagctcaatctcacgttcacgctcaccttttcgtcacaatcaatgtcgcaatagatgatgacatcactgagcatattggtattgatatagatgttgatcatgttgatcaggattttctgatgagttttcaaatccactttca

SEQ ID NO: 105163 - DNA, 526 bp, Arabidopsis thaliana columbia
gtaaattagatatgatggtaacatttattagataagatatagctttttcttttataataagtatagttttcttagtgcagatagacagtagatgtggttgtttcctagtgttttttgagaatgtggatagattcattcgctcatcacgtttcatagacattatttgtcatatgatagctgtaaattagatccgataaactgcaacgacattccaaaaggttggtagagttagaaacttagtttgcaatagattcatcaaaataaacgacaaaatttgcttttgtggatataaacacttcaaataaagagagcttgaatagtatcaacgattttattttattcaatcaattttaatgattgtattaagataagatacatcgaacgataatgtgttttcttcttaattttctctgtccattttaaaacaccatccagattgatcacgatttatacgacaaataaagttttcacttaattcgtacatattccaaacgcattcatcgcaaattggatattttccaaatgg

SEQ ID NO: 105164 - DNA, 505 bp, Arabidopsis thaliana columbia
tttaggaggtcctatggatttcggaagatcgaaatcgaagtttcaggaagtgcctgaaaccggtgtgacatttggagatgttgctggagctgatcaagctaagcttgagttacaagaagttgctgatttcttgaagaatcctgataagtatactgcgttaggtgctaagattcctaaaggttgtttgttggttgtgtcaccgattacggggaagacgcttttgtcttgagctttggctggagtatcttgagtactctacttttatatactagatttcacattttgaagagcttctttttttttcttattgcttctatcttcttattttgtattttatggttgtttttatctctattttatatctatgtttattggttcgtttgattttatgtttactatttatactatgcttttttatttaattttatttactttatttacttattttttttatatccagccattcttgtgtttttggcttttcaatttattttagtttatttat

SEQ ID NO: 105165 - DNA, 566 bp, Arabidopsis thaliana columbia
  unsure (1)..(566): unsure at all n locations
cccggaanttcccggtgtcgaccccatcgcagtccgagataatatatagataataacaataatgggcttcgatgtctnncttctcttctttttctttcttcttaaaccacttttagattccttttccataggctatcgcgagctcaacatgggtcaagcatgggtcaagcatgtttccagatacgaagtagccatgctcagaccatagctcatatgtcgcttcgtagccagtcatcatcgtactagaatgagcagagagctggtcgcattcgagagtgtagggatccaccacagctcctcagcttccgttagctcagagtagtctcctttgcacagttacattcatcgaagtctaagagagtctctatcttagccctctnnttctttaacaaccagcgatagctcttctttcgtaggctatagaggacgaagagtcttatgaggataaagtggatccctaggatgccgccgaaaccattccaagactcatcagagttccaaccacgccttcgaaggtcaaggtcaaagccagaggttccggacatgcaccagaaagtgggcacatt

SEQ ID NO: 105166 - DNA, 524 bp, Arabidopsis thaliana columbia
aagaaaatgagtaagctcatgaatctcctagaagcaaccttgtgagtgctagttgcacttaacggatgcctgagaaagcagtcactaggggttcctactaagctacatgaacgtgggtaacctaaacaacctaaaggccagacatgcaaccgaaacgatcaagagggtagccgcgcagaccgagtactgggtcctcatccacccttagctccgatgagccgatgggcccgtcgctcggtatgtaattgaacaaggcggtcttttcttgcgcaccttcttcacttagagaaaaatctcctacgtcattcacggaacggctatgagcggaagagacatacgcggatgtgcctagacctttatggactcacagacgacgcaaggacgacaacacggccaaccatggctaggacgacaggtgctacaaggccaaccatgggtaggacagggacatcagggacatcaaggaagacaagggctaccatgtgaaggacagggacaacatggacaacaaggtcgtcagggac

SEQ ID NO: 105167 - DNA, 522 bp, Arabidopsis thaliana columbia
tatttggatgcctcattttacttaggacatcaacctgcaatgccgcaagaataagtcaaagctcctccacagcgaacactataaaatcaaaactacagtagaactgtgtttcaaagtcccctttttcgtagaggcagcagtttgtgcacaataaaccagtaaacaatgatgatgaaactaaacaagaaatttcactaataatatgtcaagaaaatacctcctgttgatattctacagggccttgcgaactgttaggattcaacatttttatagccacctgagtatgacgcagtaaaccaacgtagatgcttccatatccaccttccccaatcttcagggtcgaatcaaagtgattagttgcttcctcaatctcggagaatgagaaatccgcgagagtactgaggcaactgtaggggttgaggttctgcgtgactccttaactcctcagcttctctgagtgctctagcacgttctgtctgcaactcctctcgttcatccctcaacttttgcaacaacttcaca

SEQ ID NO: 105168 - DNA, 386 bp, Arabidopsis thaliana columbia
agccccacgcgtcccacaaacaacaagaaaatctgtgcctcacctgtgttctctttccccatcggcctcttctcgggcgaggttcttccttgaaggcagcactcaggtccctacttactacagaacttgtgttacctcaccaacctagatgtcctccaagccaccgtatctatcatgagtgcatccggactgatcgcgtactgctaccacatccaccctcagcttcgatgggttacatcattcttctctccatttctaattctacaaggcgttctttacttaccctctatattcactttctcatatatttcctacttcttacatcgttcttgtttcaacgtaagatttattcctgtatgtgccttctacctttattgactcgcatt

SEQ ID NO: 105169 - DNA, 488 bp, Arabidopsis thaliana columbia
gtaattttttttatttctgtttatgtttaaaaaaatttttcgaaaaatctcttcgtttttaaaatgatgacgtatcaaaaaatccagtaagactttaccatactcatcttacttagtattagatagattgaattttggttgaatttaattagatttctttttttatttttaaacaaggccgtacacatagcataaaatggcaaacaagttgttcctcgtctgcgcagctctcgctctctgcttcctcctcaccaacgcttccatctaccgcaccgtcgttgagttcgaagaagatgacgccactaaccccataggcccaaaaatgaggaaatgccgcaaggagtttcagaaagaacaacacctaagagctcgccagcaattgatgcttcaacaaggcaaggcaaggccgttgcgatgagtttgatttcgaagacgacatggagaacccacatggtcaacatcaggaacaacagctatttcagcagtgc

SEQ ID NO: 105170 - DNA, 337 bp, Arabidopsis thaliana columbia
ctttagctcaaccttcattactaatctccttttaaggtttctttcgtgaatcagatcggaaaaatggaatcttttttgttcacatctgaatccgtcaacgagggacatcccgacaagctttgtgatcagatctccgaccctatcctcgatgcttgccttgaacaagaccctgagagcaaagtgcttgtgagacttgtccaagacaacatgtcatggttttggagaatcaccacaagcaacgtgttacagcaatgtcgaaacatcggagatgatcgattgtgcgtgctaatctgcatgcagtctgtacatacacaagctgctgacaggtatgcattac

SEQ ID NO: 105171 - DNA, 408 bp, Arabidopsis thaliana columbia
acccacgcgccccgcgtccgcatgtacacgtgtaaaatcatgattggatataaaagaaaatcagttattttagagataaattatgaattcatgcatatattataccttttggagcatatatttttcttaatttggttaaaatattcattgcactgccaactaattatgagctgtaaatatttgaaactagaaatttgacaagaggtttagagcacttccaatggttttcacatatcccaaaaaagtatcccaacttttaaagtattaatacttttaataattttaatttaaaaataaaaatgaacaattaaaaagagacaattgtaaagttctagttagtatacccaaagttcttatttgagaaattttctcttctttctatcttataattttttttaggtatgatta

SEQ ID NO: 105172 - DNA, 404 bp, Arabidopsis thaliana columbia
cgatcgtctttttttcttcccgcggtttcttgcgtttccgggaattattgcttaatggttgagaagcaagaagaaatgaatgagtttggtgctgtcaatggtgggaaagtggggacgtcttcttcagtgtcaccaccgcaagataaaggaaggaagaacaagagaaagttagctgatccttctccacaaaatgctgcttctttgactgagttccctcgatatgagttacattcgttcaaatctcaaagccctttgtgtgaaaaagactctcaacggcagctgaaagccgaagagtctgattctgtgggatgggatgatccgtttgcttgtcaccttgaaggactattatcgtcaaatttgctcacgctctttcgtagtgcaatgaatcagattatggattgtgg

SEQ ID NO: 105173 - DNA, 403 bp, Arabidopsis thaliana columbia
  unsure (1)..(403): unsure at all n locations
cagaaaccctctccctgaatcttgattctctcacaatcaagatttgaagcaaacgttttgagaaaaatcttttgacaccatcaaatttggttggcggattgtgggaggaattccagagcaatatagcaggtgatggttgtacaacaatggctaagaagaaaggcttgttcactgtattgaaaaggatttttatttcagaagttaattcagaaaagaaagagaagaagagaaaatggacattttggaagcttaggattaaagaaagattaccttncattacagcacctncagagcacaggacaagtcatgaatcgcatgangaaacagaggagggaatgtgtcagattgtggtggatcagcaagtgtctgagtcacagtagattcatagagagtcaaagtcaca

SEQ ID NO: 105174 - DNA, 516 bp, Arabidopsis thaliana columbia
aagacttcaagaaataacaaaatgatacttctcatcagatctcgagctttcatttaaacaaagactcttcttgagcaaaccaaagaacatatattacctttacgacgcgggtcaccttttagacatttcacatggagtttgaaaacaatggtgttcttttcatttggctgatcgttttctatgacacaaagataaacaacaacaaaattaagcgtgacacaaagagtttatatgcttaatgagatggatcacattccacagaatatttcttaccagataaatattcaaagagtctcggatctgcggcaattggaataagacccaacctgtgagcaagaacttcgtcttgaataaccgatgtgttgtttgctacatacactttttcaatagccattgaaggaagctgtaatcaaagaaacactattaaccaaagattctaataatcagagattcatcagaggtagtgagacagtgggcagacctcagctaagaggattcttcggaaagcattagcga

SEQ ID NO: 105175 - DNA, 467 bp, Arabidopsis thaliana columbia
gcgtccgctctgtctgtttattcgacgatctctttcgcaccgctcaatcatcctcccgattccgcaagtttcggttttgaatcggttcttctcctctgccactatcgtcttcttctcggatctctatatcgttttagattctttcaccgtcgattgtattctctcccacgctcatgcaattttctttccctaaagaaccggcatctagtgtctgtgtgtgatggagtccagttgagtagtagtgggtggtgggctgcccttggcgaataggaggtactctagctttgccaaacccaaaatccaacaagggacttttggacctgtatctcggatcaatgatgtctctgccctccaataaagctcccttgacaccaatccaaaccccatgttccctcttgttactcgccgcatgagccagactaaccctgtttgcggtgtcttcaagttgggggaagaagatgactctt

SEQ ID NO: 105176 - DNA, 472 bp, Arabidopsis thaliana columbia
agaaaacgttggaggaaggattgatatttgttggacttttggatcgaaaaattgaaaggtaaaagaggtagagaagctctggattccgtctcttcccgtcgtcggcgacggtggttttgcccgttggctctgaggttatatcaggcttcaatttaagtggattgtcatcttctgagatatggaacaagtttttgtctggccaagctgctaccactatcggcttttctcattccaagaagcgctcgattggcggtttcttgtacgttctgatttccttgtgggctctttcgttaactgcacttagtggtcaaaccctcttctatgatctttaggggaaggtgtgaggcataattctgagacagggctgaagtctgcaaattcttccttcgcatagtcctagagaaacctctttgttcctctctttcatatcttggtcttatgggtgctggttgaagaaagatacatcaatttc

SEQ ID NO: 105177 - DNA, 510 bp, Arabidopsis thaliana columbia
  unsure (1)..(510): unsure at all n locations
gctcaatcgttagtgcaccttttgcttgagtttcctcaacatcagcagcagaattatccaccacattcgagctctgatcagaggatagcactacataaaccaatgcaaaataaaattataaaaaatttgttcaagcatataaacctgattgtttaataaaggatacatctaagctactttgaatagaaattgctttagtatattgaaccgaacctgtaggtatatttatccaagaagagagaggctgatcatcaacatcatcaacacgtatagtatcacttgtaccgttgaccccagcctttgaaacattgcaagtctcatctacaagttntaaccaaggatatgataaagtttggcaagaaacaaagaataccaaaactaatatgcccaatgctgattttagacataccagtttcattcaggttagaggtttgatttgttctcttttcctttcttaactttttcgatggtattctgctcctcaggcatctgcattcaaaaacaattaac

SEQ ID NO: 105178 - DNA, 301 bp, Arabidopsis thaliana columbia
gaccacgcgtccggataggaagattgtagctgctaagtgtgctaatgtatccgtaaaaacgctatggtgctaccgcaatggaacgtaaacgcaaacgcggcactctacgtgacaaacggaaaggctcatatacaaatggtgaacgacaacggagaaagagtgttcgaccaagagatctccagcggacagttactagtcgggccacaaggcttttcggtcatgaaacatgccataggcgaacagttcgagtggatcgaatgtaagacaaacgaaaacgcacaggtgaacacactcgcgggcc

SEQ ID NO: 105179 - DNA, 310 bp, Arabidopsis thaliana columbia
aacaaaaagaaaagtttaagctcagcaatcttctcgtgcatctttttgcggactcctcaccacgaggggtgttctttttaggcacacacatattgttccttctcacctacagaaggtgttttacctctacaacctttatgttctacaagccaccgatcctattatgagaaaaacctgttctttcgtgttctgggtccacatctacctttgagcgctttgtgtttgagcctcacggtgcttgtcttgccaacttacaatgctgtcattacttgcctaccttcttcatttccccaaaaattttctacgtcgt

SEQ ID NO: 105180 - DNA, 382 bp, Arabidopsis thaliana columbia
aaagagatgtgtcaggctgtctccgaagacatgagatttatgaatccaaaggaagtccagggacccctccaactataacaaaatcctcgttttggaatgtcttaagacattaattcattatatttttagcatattgtaatttagtatcattgatattaaatttttgtggtcagagatccacgtacgatattgcatgtaatttgtaatcgttttcgcattcatacaagtaaatgtgtacacatggtgtaaaaacgatacaatattaaagttggagtttatataattcatgaaggtgacacatacaatatttccaattgaaatgtattttttatctcaacatagtcgaaataaagtaaaagttgtcattagtatatttggcaat

SEQ ID NO: 105181 - DNA, 425 bp, Arabidopsis thaliana columbia
aggagatccgttttcgtcttcaccgtacacattactctgtttctttcccaagctcgagcacctcttcaaaatttgcttgatcatcgccgtttgcgttagcttgtttgcttttttcatcgccattctcttcaaaaaggatttgtcttgtgtgtggtttgagttctcacaatgaagggtgagtgtgaattagagtgagggagaggtttcatagacttatggttgggggtatttattgaggactagagcgagtggaaaatctttttatttattttaaaatgaatatacggattacagaattatgaaaaatgtacatatacgagtttatacaccaccacaacatgtgtatagagagagagagggggatggtaatatcgaggcgttgaggagattatgatggtgttgatgccttgaatatgaatttgcgt

SEQ ID NO: 105182 - DNA, 470 bp, Arabidopsis thaliana columbia
gttagtgcatcccagtcaatgtcttccacagctctgctgccactttcatcaaaaactttgctaagcctcaaggcagtggctcttctagaatgcaaatttccaacatttgcattcttaggttttgtaagatcattccctcggctgtggccttgaattttttcaaaacgcttggaacgactatcacgtcgcttcttttcctcggcagaaccagcaagtgccattgcactggaatagtaaggtgtcaaatccttgtcactatcactagatgcctcatcatcaatggcagtagctgcaccaccagaaaaacgctgtcgcttgacaggccgctggaaacttttttttgcagaattttgcccagaataagtgggcttgaagccagtggcagcatccaccttttgaaaactctcagagctcttgcaaaattccgattatcagaacgactgcaaaaaccgagttctaacagctaaaac

SEQ ID NO: 105183 - DNA, 423 bp, Arabidopsis thaliana columbia
atttttgtgaaaatgacaaatacattgatgtacgtggatactcgtaattaaataaggggtttgagttagtgacttagtggcagaccaatagaccatatattacaattcttcatccgtccgattcaaatcagctcaaaatttcaaacaagatctacagataaaatgatagggaagttttggaaatatttttcgaccactgcgaaattaattaatgaaatttaaatcagatacgaataaaattaaatgatttacagaaatgcataatcaggcagtctataatttccttttatttttataaagttagaaatttaaacacacatactgacatacactatacattcatgatttttgttttctactcaaacaagaatattatatggatgacaaccgattaaattaataacataattctaaaataattct

SEQ ID NO: 105184 - DNA, 291 bp, Arabidopsis thaliana columbia
cgacccacgcgtaccgaaaaattggtttttaaaccattttttttttttagtcccaacatgtccaataaaaaaagtttatcattgtaattttcaaataaaactaagtatatcattgtaattttcaaataaaactctaaattaatatattagattcatccttatgtctatctgcaaccctacacttcaacacacagatccttcatgatattaattattttatgatattttccctctcatctgtgagagcaacaactcaacaaggacaagttcaaatgttcaagcatgctcaag

SEQ ID NO: 105185 - DNA, 380 bp, Arabidopsis thaliana columbia
tcgggagacactcgtccggtgattttgggcctcaatttgtttttttataagtctacaacactatactcgagcatgggtttttttcactggaggacaacctaccaacctgtgcttgttaggtctactgactactccataaccataccaatatacttatatccaaccttgtcgcttataggtcttttaacaccatccacactatcttcgtaactaagaccctgccttttacctattctttattcttcctcacttattaccctcgcccactttcatgatctcctgcaataatcaatcttgtatttcacaccagtgatctaatatgaagaattatttccaaatgcgcctagtcgtatatgcagtcaccttttttcagataatgt

SEQ ID NO: 105186 - DNA, 247 bp, Arabidopsis thaliana columbia
cctgccaatagtcatattcctggcttaaaggtttaagccttccttgtttaggtttgaccgatttaaacctgggaacctgcaattggttaattaattcagttttagttggttggatggtaactcctactcggataaccgtagtaattttagagctaatacgtgcaacaaaccccgacttatggaagggacgcatttattagataaaaggtcgacgcgggctctgcccgttgctctgatgattcatgat

SEQ ID NO: 105187 - DNA, 428 bp, Arabidopsis thaliana columbia
aaagaagtctcagaaaccaattcatgggatttcaatggtgaattctctcctccttcgtctcttaatccttctccgatcaccaatcaccggcctccaccttctcctcatctttcttcactctcttttataactctctgttccttcagaattttccccaatcttcttcttcaaattgaagcagatctagtgatctctttaatggcttcagtgttcttgtatcatgtggtgggagatttaactgtaggaaagccagagatggttgaattctacgaaacagagacggtggaatctgcaattagagcaatcggagaatcgacggagtgtgggattccggtttggaggaagagaacgacaccttcgcttcctgggtttgttgagaatagtgagatgagacaacaaagattcgttgggattttgaattctttaga

SEQ ID NO: 105188 - DNA, 431 bp, Arabidopsis thaliana columbia
atactttctctttaaccacgtaaccatttcctattcccattattcttataaaaatcgttccacatttctgtatgtccgttaatgattctatgcaatctaaaaaaaactatactattttatattgtgagttgttgttttattcaattaccaataatgtactatttagttgtttttaaaaaatggctaaatatgttaggcacaaaattaaagataccttctactatcatatttgccaaacacatatttcctttccttatcctctttaaaccattactcaaacacaccttattttgttcttatatattttgaatatccaaatttagtttttttcaaatatctctattgattattaccatatatgatttgttgaaatttatgtacatttaatgcctttgattttttaaatgcactctacatttctatataaaaca

SEQ ID NO: 105189 - DNA, 319 bp, Arabidopsis thaliana columbia
  unsure (1)..(319): unsure at all n locations
cacgcgtccgattacacttttgaaatttccattactttttttttttccctaaatcnctaatttatggtagggctttttactaaatgaagcccccctactccttttctatactttattactaatattgcatgcaaaatggatcccataaacatatgtccaccttaagttacttaatttcatattacctctcaaaccactacttcaaaatctttttgtcatgtaagacatcatttcaactatacaaataccttttgttttccatatatctcatctctatcacaccttaaacaaagagagccgtagagtgtaatatctcttt

SEQ ID NO: 105190 - DNA, 421 bp, Arabidopsis thaliana columbia
ttcgaaaaagaaaagaaacggaatgatcgagacgaccaaaggcggttcaggatcgtatccgatcaaaaccatcgtcgttttggttcaagaaaatcgttcttttgaccacaccctaggctggtttaaagaactaaaccgggaaatcgacggcgtcacgaaatctgatcccaaatccaacacggtttcgtcctccgacacaaactctcttcgtgtagtcttcggggatcagtctcagtacgttaacccggatccaggtcactccattcaggatatctacgaacaagtgtttggtaagccatgggattcaggtaaaccggatccaaacccgggtcatcctaacatgtccggttttgctcaaaacgccgagagaaacaagaaagggatgtcctccgcggttatgaacggatttaaaccgaatgct

SEQ ID NO: 105191 - DNA, 309 bp, Arabidopsis thaliana columbia
aaactgagaatgttttgtatgtgtaagtgcgaaacaacaagtcaagtgaaatattagctgcatatgaagatacaagctgatgcaacgcacctttagtagttttagggattttatcaaacactcgtattgggagtgttcgacaagtaacgggttttagttttattttacttagcgtttcctttattgaagggaaaattacccatctcttgtagattacattaggattattcttctagggtttatctggatctcttatatatagggatcctagagaaaccttgtcattttgtgattttctagagaaattat

SEQ ID NO: 105192 - DNA, 430 bp, Arabidopsis thaliana columbia
cgaaaagagagagagatgagactcgtcgtctcaagctgtctactagttgcagctccgtttctctcctctctgttacgagtctcactcgccactgttgtcctcaattccatctccgcctcttttgccgatctcccagccaaatttgacggctccgtgaccaaaaacggaatctgtggagctctatacgtcgcagatcctctcgacggttgctcaccgcttctccacgccgtcgcatccaactggacgcaacacagaactactaagttcgctttgataatcagaggcgaatgttcttttgaggataagctgctcaatgcccagaactcaggttttcaagctgtgattgtctatgacaacattgacaacgaagatctcatcgtcatgaaggtgaaccctcaggacattacagttgatgcaagtcttcgttcaa

SEQ ID NO: 105193 - DNA, 429 bp, Arabidopsis thaliana columbia
gagaaatcaaatggaagtagaaatgcatggtgatgtctccaaatgggaaggctacgctgactggagaaacaaagccgccttgagaggccgtcacggcggaatgctcgccgcctccttcgtcttggcggtggagatattggagaatctagcgtttttagcgaacgcaagcaacttggtgttgtatctcaagaacttcatgcacatgtctctagccagatcgtcgagtgaagtgaccactttcatggccacagccttccttctcgctctcctcggtggcttccttgctgacgccttcttctccacattcgtcattttcctcatctccgcctccatcgagtttctgggacttatcctgctcacaatccaagcccggcgtccgtccttaatgccgccgccatgcaagagctctgccgcattgcgatgcgaggt

SEQ ID NO: 105194 - DNA, 261 bp, Arabidopsis thaliana columbia
cacgcgtccgcaaacagaaaatggctaaacttttcaatctcctggttacaacattcgggggggtggtggtccttaacgggtgagtcgcctagcaatcactcaatctccggctttcaatgccgttctgatccaaatcttcgcaggttagctgttctccaagccaccggagctatcaagagtgtatccggcctgatcgagtactgggaccacagccacccttagctacgatgtgttggcgtggacgatgctcgttctgtaatt

SEQ ID NO: 105195 - DNA, 420 bp, Arabidopsis thaliana columbia
gatactttctttgtcaaattcctgaaggggaagagagagtgatgctccaaattaatatgaatcattaaggtaaatacaacagaggaactctctactgaaataacatagcacaaaccttcccttgttgtatttgtaaaagctggcctttcactttatcttctacatctttaacctacaaaaaaatggttcagattgatgcagactaaacaattgaaatgattcatacactaccaaacatcatccaaaaacggaggtagcaaacagaaagtaaaaacaatctagcgttaccttcctcgagacttgctttcccattttcacccacttgttttttccagcttgagaacagccgatcttgaagactgaggagctaactttttctgaaatagcacgaattttacagtagttgttttagcatatgac

SEQ ID NO: 105196 - DNA, 428 bp, Arabidopsis thaliana columbia
aacctagatgttctccaagccaccgaaactatcaagagtgaagccggtcagatcgagtactgggaccacaaccaccctcagctccgatgtgttggtgtttccgttgctcgttatgtaattgaacaaggcggtctttacttgcccaccttcttcacttccccaaaaatttcctacgtcgttcaaggaacgggtatcagcggaagagtggtccctggatgtgccgagaccttcatggactcgcagccgatgcaaggacaacaacaaggccaaccatggcaaggacgacagggacaacaaggccaaccatgggaaggacagggacaacagggacaacaaggaagacaaggccaaccatgggaaggacagggacaacagggacaacaaggacgacagggacaacaaggccaaccatgggaaggacagggaca

SEQ ID NO: 105197 - DNA, 385 bp, Arabidopsis thaliana columbia
cggacgcgtgggcggacgcgtgggcggacgcgtgggcaaacagcaggtctttaccagaactctcgccttttatcgtctcatattacagagtaattacatgcagccaatctgacgcttcctttactttaccatatgcaggcctcttaatcaatcttccccaagtgaacaagatagagctggaccatcagaactccagtcattttcggaatcacttaagtctcgattaaacgctgtctccacgaggtatcctgcctatatctggcagctttggcttgtataataattttatcaattctaagtgattccccatgcacaatgtagatacaaagaatcgatatcaaagaatacaaggaactggaaagatagacttttttctcgcaacacg

SEQ ID NO: 105198 - DNA, 436 bp, Arabidopsis thaliana columbia
aaagaaagaatcaaaaccaaaggcaaagttcatagaagagatcttagatgcataaagtagagatttttcatatataaagattatgagacaacattaccaatatgatcaagcgtagtagctaacttcgacctctcccaagttctctgctcaagaacgaaccaacaaaaatgagaaacacaaaatatatagttacaaaagattcaaactttatctaacaccagattgagagttaacgaaagtagaaaactttttaacaaaaataaacttgaatgtgtgatctgaaaacttaaaggcagtgcacaaaaattcgactaaaatttgccaaactaagccagatccgacacagcgatattacagagaataaacagagatactgaaaaagagacaactatggaggaacctggatcatgggtttgccgaggattttcacgagagg

SEQ ID NO: 105199 - DNA, 139 bp, Arabidopsis thaliana columbia
  unsure (1)..(139): unsure at all n locations
gataaaaatggttcgagtctcttttcttctttcttactccttaacacttttgatccgtttctatggctacgcggctcaacagggacagcagggncagcagtttccgaactatgtccattttgaccagatcaattctctt

SEQ ID NO: 105200 - DNA, 429 bp, Arabidopsis thaliana columbia
  unsure (1)..(429): unsure at all n locations
ctgagttgttttccaaaacgattgagcaaagtatgcaaaacagggtcatcagcatatttaaatgcttttgtcaagtcaatatgagagtaacataaagggtccatggcacacttattgaacattgtgcagcatgtagaagcttgcattagggactttgtatcaaccatcgaaaatacctgattatgatgcatgaatccattagacatgtggctaggaacaatataattaagagaaatccatattgattggttaccttaacggtgagttcagaagggaggaaccaggagatggaattgtggagtgtggctcgtttctgagagcaacgtttggtggattggagaaaaagcgagagtcgctcgagagtacgatcgacgagtttgtattgaacggagacatcacangaggagagaagattatcaagtactcgat

SEQ ID NO: 105201 - DNA, 437 bp, Arabidopsis thaliana columbia
cttaattctctttttttttcatttcatgcctattggcgttccaaaagtaccttttcgaagtcctggagaaggagatacatcttgggttgacatatacaaccgactttatcgagaaagattattttttttaggccaagaggttgataccgaaatctcgaatcaacttattagtcttatgatatatctcagtatagaaaaggataccaaagatctttatttgtttataaactctcctggtggatgggtaatatctggaatggctatttatgatactatgcaatttgtgcgacccgatgtacagacaatatgcatgggattggccgcttcaatagcatcctttatcctagtcggaggagcaattaccaaacgtatagcattccctcacgctagggtaatgatccatcaacccgctagttcgttttatgaggcacaaacgg

SEQ ID NO: 105202 - DNA, 279 bp, Arabidopsis thaliana columbia
acacacttatacaacaaaataaattttttttttccacaaacaacatacactctgggagtgtctaatttcactagcggggggaaacacagatctctaatccactatagaaaccgcgttttctgaaaatgctgttgctttttccgatcaaatcttcctttttagctttagctatctttctggtgttaattccactgatttccttcataatactgatgatttctttaagacttaccttcgtatccttcaccttctgaaatattctttatcttacctctttct

SEQ ID NO: 105203 - DNA, 395 bp, Arabidopsis thaliana columbia
gaaaaagaacaaggaagatcccggaaaatggcaacggcgattgtccgttcagctctttcccgagcagcgactcgcgcagctccgaagacatccgtcgctcctaagcgaaacttttcctcttccgccggccatgacgatgcttatgaagctgcgaagtgggagaagataacttatctgggtattgctagttgcactgctctagctgtctatgttttatccaagggccatcatcacggcgaagaccctcctgtaagcttctcttacaactcctccattggtttagtattataacttctgatttggaatctcacctagtgtgagacaatgttaatatcaccagtgaaaacggatagaagtatgcagatgatgagaatgttacgaaagctacatttttt

SEQ ID NO: 105204 - DNA, 429 bp, Arabidopsis thaliana columbia
  unsure (1)..(429): unsure at all n locations
tttaactaaacacaggaaatttcaggtttttttcagctttttcctaccctctagtggtgaaacttttgcacacaaaggtggaaaggttatcatttgcaaaagtggagcacnnaagtggatagtgtttgcttcaagtatttagtaccagaaacctagtanntggcgtgataccagttcaacggactcgatnngtctcaactgatnnggtgacacagatcnatagagatctgggngtctgatagaagggcatantgcanttgctgctgccttctgattccagtgatncgatcaaaagggataagttggatcnaaaagaacccttcgtagggcttgcttcaaaatcgtgaagggcagcaagaaaaaagcagattgagggaagagtgcgtatgttcagcaagctggagaatagtcgattaaagctgactcaac

SEQ ID NO: 105205 - DNA, 441 bp, Arabidopsis thaliana columbia
cgcaaaagtacaaggacatgttgaaaactagaactgctcttcctatatctgaagttaagaatggcatactccagcatctgaaagaaaaagatgtcttggtggtatgcggagaaacaggctctggaaagactacacaggttcctcaatttatattggatgatatgattgattcggggcatggtggatactgtaatatcatatgcacacaacctcctcggatagcggctatctctgttgctcaaagagttgctgatgagcgttgtgaatcctctccaggcttagatgactcattggttgggtatcaagttcgtcttgaaagtgcaaggagtgacaagactaggctgctgttttgtactactggcattctactgaaggaaactcgctggggatagaaccttgaacgatgttacacatattatagttgatgaagtgcatgagcgg

SEQ ID NO: 105206 - DNA, 386 bp, Arabidopsis thaliana columbia
  unsure (1)..(386): unsure at all n locations
tccgaaccggagctgcgactaggcgtaccgccctngttccactcgtttttcaacgtctgttgttaattccaacggattagcttcaagcgtctgcaagccctgatcatttctgttcccaaactctccttcgtcaatagttaaagcagctcttcttctaagggagaaagcagttccagcatacaagattactaaaccccatgaagaaatctcgtagcaccaaaacaaaggcacagaacagctgcttcctaatgtgaggaggcttgagccgagaaatatagcaaggagaccatagatgatagcaaacacaacattcaaaattgacagacaacggaccccacctgtgaatttattggacattgtaaagaagatcaataaccctattttga

SEQ ID NO: 105207 - DNA, 381 bp, Arabidopsis thaliana columbia
acaatgttaaattaaccttgaactgaagtttaataagctatattcttcaaatcttgagccaaggattcctgtttttttctgtttgcaggagaagattaagggtttaaaggaagcttcgactcagaaccagaaaaataaaactaggtgtgatgtttctttccagtcagattacaacccttcagatgcgattatccccaggttagatcacattagagtgttgtgaatttgtactagttctctagtcaaaaatttagatattgtaaattcctttttgcagagccactcataaagagccaaatatggttagacctcttaatagttatgttcctgaaatgctaccaagaattgtgtatgaagctcagtaccagaaaagtgaaacta

SEQ ID NO: 105208 - DNA, 427 bp, Arabidopsis thaliana columbia
caaaaatgtgatattgatcagaaataaccttttcgataagatcgagaacatcttggttatccacaaattcaatgtagctccaatctattgcttcttttgtgtattcctcctgttccatcttgaaaacgtgctgaaaacagcaatagaaacttgtaaaccccaaaagcctaatctgtgaaactcaggggaaatggtttacactacaatcaagaaattacctgattgaaatgttgctgcaacttctcatttgtgaaattaatacagaactgttcaaaactgcaagagatcgctattagcagtggaaacacaaaaatctaacggaagtttagttctgaaccttggcgcagtagacattccttacctatttgttttaaagctctcaaatccgtatatatccaggactccaatgagtgatctagaagtcgca

SEQ ID NO: 105209 - DNA, 432 bp, Arabidopsis thaliana columbia
ggacttatatcatgactgcatggttctttttcggtgctgagacgactgcgaacgtgttcatcagccaaactacgaatatcatgtcggttttggtggctatggcggttatggtgctggttctgattataagagtcgtggcccctccactaaccaaatcttggcacttatagcaggagttcccattggtggcacactgctaaccctagctggactcactctagccggatcggagatcggcttgctagtctccataccccttttcctcctcttcagtccggcgatagtcccggcggctctcactattgggcttgctgtgacgggaatcttggcttctggtttgtttgggttgactggtctgagctcggttctcggggttcttaactacctccgggggacgagtgattcaatgccagaacaaattgtctaccctta

SEQ ID NO: 105210 - DNA, 475 bp, Arabidopsis thaliana columbia
  unsure (1)..(475): unsure at all n locations
cgatccttttgttctctaaccaccggtttcctctttaaccggtctctggataatcatcataatcattaggatcatcaagataaggaatctttttgagtatatctctacaccaaatcgaatctatggatcaaaaagttagacagtttgaggtttgcactcaagacggtagcgttgatcgtcacggcaatccagctatccgagctaataccggcaaatggctcactgctattctcattctagtgaatcaaggactagctacgcttgcgttcttcggtgtaggagcgaatttggttctgtttctgactcgagtgatgggacaagacaatgcagaagcggctaataatgttagtaaatggacaggaactgtctatatcttctctttgcttggtgctttcctcagtgactcttattggggacgntacaagacttgtgctatctttcaagcaagtttcgttgcaagtgtgatgatgttatc

SEQ ID NO: 105211 - DNA, 502 bp, Arabidopsis thaliana columbia
ggaatttttctttttccttctttcgacaaaaataaatgaacgaccaatcagagcctgccacgtaatatgagactgagtatcagaagtctcaatagactgatacggctcagcccagttttttgtggttggtccattaaaaaattgtaaacgggctactgatactctaaaaatatgagctatgtacatggtctaagttgagtctgccacaaaaaacctagtacagttgggctacaaggcccaatataaatgtaagccctttaacaaagagggaaccgcctgctttgactgttgagaacaacttgctggattcttttttcttcccggaaaattgagaaaccaagaaaatcaaacaagtactgcaataagaaagtgttgaatctgattttggaaatattatttgactccattattcccttcataaatatatacagtcaagcatatttatttgaacaagaaaataaagtcatactaataagcctagagataaagtagatcataaaat

SEQ ID NO: 105212 - DNA, 529 bp, Arabidopsis thaliana columbia
ccaataggtacccaatgacttccctcagatctctcaacatgttctgatgtaaggacatgagcctctttaaaatccggggaagatacagaccttgaccttaaataatcgaccgcaggcgaatcaataaacgggttttgaccagggaaactatgtctgatcggtccatcttcttgcttcaagtaacctttataaagttgctttgaatcaacatgtttttttgggcctcgaataaactcaaaggcacaaataatcccatcagtccaaagatcactcttcggaacacctgaatgatttttactctcttgagagactgaatgattctccccattttcacccatggtcagtcaaatagaaaatctaccagcttcttctacggaacttatcacgtgtgagacagtgagagtcaattcacatcagcttcaatatactttcttcgcaaactcaactcttcaagatcaaacaggaagctaacttaaactgatgcacttaagatctgtcacatataacacaaatttattagaaccaaaac

SEQ ID NO: 105213 - DNA, 530 bp, Arabidopsis thaliana columbia
  unsure (1)..(530): unsure at all n locations
gtgaaaacgagataacgaccaaaaaatagtatagaattatagctcaaacgagacaattccaaggaatattatttatatatgtgatataatacggtttggtgtgaattttctgcaccaaattatccgctttacattaccactagatattgatccgtggtataccgcgggtaaatatgttcattgaaaaagttatatatatttttgtaagaataatatattcttgatacataatttttatctatgtaaagcttgggtaattcatgttttattttctgatattagtgtatattagtttaatattataattcagtattttttttgtggtaaggattttttagagttaataaagatttaaacttgtattatttagagattgacccgcggtacaccgcaggttgatatttttgttagaaagttaaagatttttattttatttatattatttatatataaaacatagtcaaaaggtacatcatatgcctatattnttattaaaaacaaaaattcatctatagataccatgctatttg

SEQ ID NO: 105214 - DNA, 391 bp, Arabidopsis thaliana columbia
cccacgcgtccgaaataagcttcccaaggccccgtgtgatgagggggtatgtaaagtatgtggcgttgacgaagatgatgacagtgttctcttgtgtgatacatgcgatgctgagtatcacacatattgtttaaatccacctcttattagaattcctgatggaaattggtattgtccatcttgtgtcattgccaagcgcatggctcaagaggctttggaatcttacaaactagttaggcggcggaaaggtagaaagtatcagggggaactcacccgagcttctatggaactgactgctcacctggcagatgtgatggaagaaaaggactactgggagtttagtgctgaggagagaatcttgctgcttaagcttctatgcgatgaactgctt

SEQ ID NO: 105215 - DNA, 466 bp, Arabidopsis thaliana columbia
cataagtaaaagataagacatctacattcttctaatttgataattggctcaatatgaaatgcttaatgtatgtcaattttgggccgaaccaccataacattaacactgcttttcttttccaattctcttttggtaagaagtgggttaaattcatctacaaaatgataacgtataacatactctcctcacactgttttgataccaaaaaacatgaaaaaaacatgaaaaaaacatgaaaatgctagcaatggcagagatgcagagtgtttaggtagctcaacatattcattgcggtacccttagataatgatatattactaaaagcaaaatgtttatcttattatatcaagtacagatttaaaagttagtacctcatgagatcatgacacatgacaagtctaacgataagatgtttgtctgtgtcattaaagatttaactttatttgtactaggtgatcacccgcgc

SEQ ID NO: 105216 - DNA, 269 bp, Arabidopsis thaliana columbia
aacgaattttcatcaagcctgaaagttaaggaatacaataattacaaaccatcttgtaatcaaaattgtctactttaaatcaaacaaagtgaacaaaagagagaaactttaccaggcgaaatagtccataatctctgccaattgaaccgatgcagcaaaatcttggagtcctcagtaaccattgccagtaaatccttctccgggttccactcagctatcttaatctaatgaaattgaacatatataaacatctaaatccttaaaagcat

SEQ ID NO: 105217 - DNA, 365 bp, Arabidopsis thaliana columbia
gctgtatacagttaagtgacacaacaccttgtcttcaagagctttatctcatggctcacactgtcggactcagtgagcggagatgcactgagcctaacaggacctcgtacactgagaaggagatcgatcaacttgattggaacggacacatactccaagctggagtgacagagaaggacttattcaaagacggtcactaacagtttgagaatccaatcttgagcaacgtcgatgctcacttatgaggactactagctaacgtctctctcgaggaagattgcactgcgaaacctgctcaatcgactgatttgaagctttcgtacctaggagcaaagagaatcgctgtgatcgggctaggacagtct

SEQ ID NO: 105218 - DNA, 482 bp, Arabidopsis thaliana columbia
cgcccccgcgtccgcctaatgttaacacttgacatacatcagaacttcttctaaatggcaagcacattactttgtgttgaccttcaaatggatcgtatcctagaaagatatttatattattccagctcaatctgggtatgggtaaagttatcaactgtctcttgctagggttccaaactatcggcattcttgatgtcttaaagcagatcaagccctggacagattccgtagaggaataaatactacatccttctggtaattccatatgataacgataaagaggctgagaagaagagtaagaccttttagaattctgaagtgaatgaagatgttgcggaattgaggacacaaaccacctggtcatttttttttgaagcaaaccaaaagactcggccgtggggaccgagtttcgaacaagttgatgaaatatggattcggggggattgataaccaaagctttgacacacaacgaaacctctcaa

SEQ ID NO: 105219 - DNA, 398 bp, Arabidopsis thaliana columbia
gagccttgtttcatcgtctcttgtcgaggcgataatatttagatctgctcaccatttctccgccatcgccgacggaagaagaaagatgggagacaacaaccctaaccgatcagaagcagaacgtcttctcggaatcgcggagaagcttctcgagtcacgagatctaaacggttcaaaagagtttgcaatcttagctcaagagacagagccactcctcgaaggcaccgatcaaatcctcgccgtcgtcgatgtcttactctcatcagcaccagagaatcgtatcaaaaaccaaccaaactggtacaaaatccttcagatcgaagatctaactgaatcatcaacagacaacgatctaatcaagaaacaataccgtcgtcttgctcttcttctccaccctg

SEQ ID NO: 105220 - DNA, 216 bp, Arabidopsis thaliana columbia
tcccgtcgacccactcagaatggtgctcaattctggccctttgttctgtcttaacggctgcttgcaggcacactggtctctactcagaacgggtcctgcacctaagttcagccaccgaaactatcaagaggaccggcagatcggtctggaccacccaccctagtcatggtgggttcgtgtgttgtatgcagggctttactgccaccttttattcca

SEQ ID NO: 105221 - DNA, 356 bp, Arabidopsis thaliana columbia
atttgatagagtcctgcttatacacaaaagaccattttttttcacaaggcatttagatgtttatatccgggatcaccatctatataagggagactaaaagttcgtgaaccggacaccgatatatacatatcagcataaaggagaggctgcgatgatagaaaattcatgttaacctcatcattccaaaaaactgccataccaacgataagccctttctgattcacaacataatggtgggcatatccaagagcattacatagactttgcacatatactagaccgttcttagcttctatgaggaacaatacatcacgtttagaaaactgcctgatgactcttaaatatggaattgtcag

SEQ ID NO: 105222 - DNA, 346 bp, Arabidopsis thaliana columbia
  unsure (1)..(346): unsure at all n locations
cgcgtccgcaaggacnagagcaacagccacagaagaacatcttcaatgactttttttttctaggccattggtcaagcttggcaggggacgccttatatgttgggaaaactataccttccttaaccacataactgtctattcatatcaaccttacgtccattatcttataatagaaactccatgctacactcattcctccaagaggaggaagacgaagaagaaagacgacacggactacacggtaatggcttagatgattccatctgcagcgccaggtgcacctcatattatttgactattcttagttttttatgagggatcaatatcacacgctcggttacatcag

SEQ ID NO: 105223 - DNA, 463 bp, Arabidopsis thaliana columbia
gtaataaccagttttgtgttacccatatcagacttctccaatagttttttcttcacatactcttcttgtgacatgtacaatataagcccttgcttatattgatcttattttcctaggtcttttaccgcaaactgataagagttttacctttaacttgctaatctcatgcaagtctgctcccactatcaacatatcatctacatacaacaacaatgtcaagtaggactctccacacttcttaagataactacaactcagtctcacacctaaagaaagtcacaaagtacctctcgtactaatctcaaagtatgtttccacccgcacaaactcttgtaaagcttgcaaacaaacttctatttaccattaatcttaaaatcttagatgtcataatgtaaatatcttcaaccatatgattaagaaaaaaaacagcatttacattcatatattacacatatgtacactt

SEQ ID NO: 105224 - DNA, 379 bp, Arabidopsis thaliana columbia
aaagaggtaatcaaattctcttaactttcttgttatgaaaacccatttggttcatcatacatcaacaaatgacgatcaagaacaattagtgagtgattcagcttgtactgaaactgtgttatgtcaacagtctaccgacatatgaatcatcacatgagttccagacaaagaaaaaacggcaacagatgcgtcataatgaggaagcagccaaaaaacagaaactgcagcatccacagcagcaacattctcgtttacctccacagcaacacggtgttggccagtctcatgccgctccactttggcctgctggaccaaaccaccctatgaacaacaacgcaccaccaccccaaatacctgctggtggccattactatggagg

SEQ ID NO: 105225 - DNA, 275 bp, Arabidopsis thaliana columbia
cacacatggcaaacactgtacacttggtcgaaccgcggcagctcagctgtggctctgtgttcacttcagaccatcgctagcatctaccgtacacgtctaagggacaccatactatgacgcacgctacaccgatatgccctataatgaggacatggcgacaggagacatagagagaacaacacctaaaagcttgccagcatatgatgctagagcacgcatggcacggccacaacgatgcgtcagatttggaagactacatggagaacgcacacgta

SEQ ID NO: 105226 - DNA, 453 bp, Arabidopsis thaliana columbia
ctccttatgaaactgctgcataccatctaagtagccaaatcttaccttaaattagtttctccaatgcaggagctgcatatagaaaaaattcaatctgtcattagtaataatacgattcctaaatcagaaaacgaagatacgagctacttcaacaacacagaacattatcatcatcaacataagagctaaaatacagatcctggatccctaaaaaccaaattaagataacaaaccctatctatctatatggataagttgagaaatgttgttaaactgatttcaacctctaaattcttcaattaaacttagatcctgaacattcaacgagtaagactatagaattcaacaagcgaatcatgaacaataacgaacacgatccagaatctgtacttcctaagcaatttctcaattcgaataacgaaaacgaatcaaatcaagagttgagagaaaaac

SEQ ID NO: 105227 - DNA, 245 bp, Arabidopsis thaliana columbia
caatgtcattcatgggaaggacagggtcatcagggacaacagaggtctacagggacaacaaggacaactatggaaaggacaggtacagcaagtacaacaagggttccgtgacatgcaccagagagtggaacatgtgagacgcatacacgtgtatgacaacacttcacagtttgatcactggatctacaacgtaagagaacaggcgctcgtcatgataactcttatcgacattgataactatcaaa

SEQ ID NO: 105228 - DNA, 372 bp, Arabidopsis thaliana columbia
accagagggcggaagcaagagtcaactcttggctacgtattctaactaatatttcccctgtatttccatggctccagggaacgccactcagaggggcctttaacaaaaccctgccattttagccaaaaaaactaactggagcccgctcacgcgaagaagttcgccacccctagatcgaagtgtatgaccacatgctcccgtgagcctccttgcgccagtgtgacccgagctatgattaacctttagaccaaatacattttgttgtccgctctctttagaccacctggccttggttacgttgtgcaaggagaaggagttatggggacgaatggttctgcgtgtgcttagacttatgcaaaaaatgtaggaaca

SEQ ID NO: 105229 - DNA, 249 bp, Arabidopsis thaliana columbia
tgaagatcaatgacttcgaggtattgggtggggtcttttccagggaaagactttgcttcttcgttttggagattgattacaagagcagagctctaaacattcctttgatactccacgtaatggggtcaacattcctaatctgggagtgggaaccttagagagtctactcgttctcggggagaatctgtgtaagaggaacacatttgtggaaggggttttgcaaaaaatctggagacacatctcggaatt

SEQ ID NO: 105230 - DNA, 426 bp, Arabidopsis thaliana columbia
ctttctctctcttttgtttctcgctaccatggctaagtcttgctatttcagaccagctcttcttgggctgttagttctattgggtcatgccgagtcacgcccaacaggtacagccaaagattcattatgccgacagaggaagctaacccggctgaccaagaccaagatggagtcggcacaagatgggcggatctcgtacatggatcttctggatatggaaactacagacaccagactgacttgtgtcacacatatcacatgctcagaaacggccgttctaaggctgacaacatcatccttatgatgtatgatgatatcagaaaccacacacttaattctcgtactgttgcttatatcaaccatactgacagtgacgatgtttacgccggagatcctaaggactattactgaatgcacattaccgct

SEQ ID NO: 105231 - DNA, 233 bp, Arabidopsis thaliana columbia
cgaacaagtgctgaagcaagcttcgccaggaagagccagtttgtgtttgcccaaccttgagacaggctgccggggccgttagcctccagggccaacacggcccattcaaatccaggaaattttacaggacagttaagtccttgcttaacattggcaggatcaaccaggttggtgaatgccctttccagaccacaatcctttttttccttccttactaatagattccaaacaaa

SEQ ID NO: 105232 - DNA, 386 bp, Arabidopsis thaliana columbia
caatttcatcatcgtctacatcgaatgctggattgcagagacatctgaaaagtctaccaatcccctgtaaatgtcaaatcaagaatctaagtttctgtttttacattattattcatagaaatgacttgaaaagtgagaatctattgtacctgagtaagcagaggagttctgtatgaaagtggttgtgaagaatcgtcatcgctgctactgtcatcatcgtcgctgtcttcatcttcttttcttgatgttgtaccgttcttcgattgcttttcttgctgcacaagccaacaacaatcttgaatcagcacaagaaacataaacagatcagataatgtgattatggtaaatgttattgaaaacctgaaaaatcttcccaagaatcttga

SEQ ID NO: 105233 - DNA, 187 bp, Arabidopsis thaliana columbia
cggaaggaagatggatagcatcagaccgttcccctaagaacctttctggctattcctcaatgtcaccgctattcacgcgacgcgagaagcgagtgaatcatcatatgttcacggcggaaagcgcctaatcactcgagaatcctacaagagccactcaaccatcaatatctgacacatggtcagaact

SEQ ID NO: 105234 - DNA, 328 bp, Arabidopsis thaliana columbia
ggcggaacccgggaccacgcgtcaagaaaggtagctcacatctctggcccttggctctgcttaacggctgccttgcaggcagcactggggtctctactacagaacgaggtcctacacctaagtctcaagccaccgaactatcaagagtgaaccggcaacggactggaccacaaccaccctagtcatggtgggtttcgtgtcgtggaattgaacaggcggcttacttgcccacctttcattccaaaattctcgcgtaggacgtatacggagagggtcctgatggcagactcatggctcagcgtcaggacaacacaggcaccatgaggca

SEQ ID NO: 105235 - DNA, 466 bp, Arabidopsis thaliana columbia
aaaaaaataaaaatagtagacatatagctcctatcctcctcctcttcttttgtcatttttatattagcctctgctgagaatgaaattcagattttattcaatctgaaagttgtgtgtgttttagatacaattgaaaaaaacttgaatctggacttatgtgatactaaaaaacttcctcatcattttgttctgcaaccatttttacaagttggaactaataactgaaaacttgattcaaagaatcaaactaagtgagttgaatattttctaaacatgttaaataagaccaagaaactttaactcattgatcagactggaaccagtaaggcttgcgtgaggttcacaagaaggcttatgtgaggttgacgctggattatgatacgtttaatggtgcaatcaagactggaatcatctttaaaagttcatgtttcagccttttgtcatataaattaactagcaagagaca

SEQ ID NO: 105236 - DNA, 447 bp, Arabidopsis thaliana columbia
cgcgtacggagcgataatggtgatgaggggcgtaaacgaagcgatcgctatgacgacgacggtgacgccttgggttcaaagaaatcagcactggcggtgtgtgatgccgaccctgcagcggccatagcgaatatccgacatgagtttggggagcacgggggagtaaacatgtccatcgaagcctccgccaccttcaccgtcatggaaccggataccatgaggcggatgttcaccggagaactgggaccggacaacgacttctacgtatacagccgacacttcaaccccaccgtgctcaacctcagccgtcagatggctgctctcgaaggcacccaagctgcctactgtacctctagcggtatgtcggcgatatcgtcagtgatgctgcaactgtgcagcagcggaggacacgtggtcgcggcaagcacgctctacggaggaacacac

SEQ ID NO: 105237 - DNA, 418 bp, Arabidopsis thaliana columbia
aacgaatggatgacgaaaaggctaagaagctgcagaagaaagaagcaaaagttatggccaagaggcagcaggaagaagctgctgctgcagctattgaagaagagaaaaggcgaaaagaagaagaagcaaaacgtgcggcagaggctgctcagctgcacaagagagccaaggaaagagagaagaagcttctgcgcaaagaacgaagtcggctcagagttctctccgcccctgttctgtcccagcgtctgcttggcatatctgatgaacatgtggaagatctatgcatgtcacttaacaccgagcagttgcggaaactgtgtgacaagatggaaaacaaggaagggatggctttggcaaaggtgatcaagaatgggagcaacattgatgatgatgaaatagagattgaagaagaagaagt

SEQ ID NO: 105238 - DNA, 469 bp, Arabidopsis thaliana columbia
ccggttcggggttcgacgccacgcgtacgcgaatcacgatcccggccaccgtcacgccgatcactacccaaactttgggattcgaggcattgctttgaatcaaagaaagcgtattcgacataacgcgatctcacgagaaagagagagagagagagagagagagagacaagggttttaggagggtttaagagagaaaaggggaaagaaaaataggagagagatttggaagaagcaaacacagatgctatcgtgcgccactgtgtctaaaccctttaattacgagtgatgacttggccagccgtgaactcaaagtcgtcttgccaaggcgaatcttctttttttgaatgattaataattggctttaccaaatcgattaagaaattaaaaaaaaaaattaaattaagaaaaaaggaaattttaattttaattcctttatttattagaattactcggttcaattttttttaat

SEQ ID NO: 105239 - DNA, 460 bp, Arabidopsis thaliana columbia
gagtttctttccacgttcgtcttcgtctttgctggagaaggctcaatcctcgctctagacaagttgtattgggacacggcggctcacacggggacaaacacgcctggagggttagttctggtggcgttagctcatgcattggccttgttcgcggctgtttctgcagccatcaatgtctctggtggccacgtcaaccccgctgtcacttttgctgctctaatcggaggcaggatctcggtcattcgagctatctactattgggttgctcagcttataggtgctatactggctcgcctcttgtcgcactttggcggttagaacctgagtcttgagggcattgacattggaggtcatatcaaatggtttccagatctttcccgaggaagctaggaagatcaagttcaacacacttgagaccactttgacccgcgcttgccgtaggcaacaacaacagttgatc

SEQ ID NO: 105240 - DNA, 452 bp, Arabidopsis thaliana columbia
aagatttccatctctaaacaaagccaaattagtaagaacacattcaaattttaatcctaaaaattctcacttccataccctttatcttttctctccattccttataatgaacaaacaaaagagaaatatttgctctgaaactttaaatgtattctctgatgaaactctttctatccttctctctttttttggtaatttatatcatcttatagctctcatcactacatattatttaacatctccatggccaaattttaaatttctcgatttttgatataatattttgtgcaggagtagtaatcaatggagtaatgggttcaaaccagcttcttcgaccaagaaaagtaccgaagctctttgtgttcggagattcttacgcggatacgggaaacacaaagcgcgacacagaggctagggctatcccttacggtatcactttccctggtaaacct

SEQ ID NO: 105241 - DNA, 466 bp, Arabidopsis thaliana columbia
ctcatcttctcctgaggatgaggaatgtgttgtggctgtcaagttcttgggacctcaactcagcttttgcagacctgctcaaagtaactccaagtggatcaacatcagaatcgcaaacccttgcttctactcctctcgtgtcatgttttcgaagaaagatgagatgtttcgcatactcggatctggaggccatatcattggatcatgggatctccacacacacaatcaaaaaccgtttcaaagattgcggttcaaaaaccttcccaagctgacaaaaaccaaacaagagctgatggattcgtgctacaaaagcgaacacttggtggagtcaagaaccaccggtgaaacatttttggttaagtggtataggaaggccgtctggagaggtatgtcgaaactgaaaacaaaagctttaatggtattcaagctagacgacaaaggaaacgctgtttacactcaagatatt

SEQ ID NO: 105242 - DNA, 456 bp, Arabidopsis thaliana columbia
cgtcgggtaaaattttgaacacatttcttcaggaagatttatgccagaatacctgattgttagaacacgttgatctccatggtttcttgtgaacacaaaaattgtattcgaaaattcacaatagacgcttgcgaacaaagtgatgtcgtctcttcgagcaagcaatgcccggttccgagaaatttttaataccaagccggagcgacgcttccgttgcagtgaatgaatcaataaagcaatagaaagtgcaaactaagtcgtgtaccacaacgcgaattgccattttcttgctacttaccggagctttttttttgctatgcttcttgtcttgagatgctggatctgttgagaatacacacaagttgaagaattactatgtttattagctttagaaaacgaacttaaaaactaacgctctctttgtgtctgtaatatatcccttacaaatcttacacg

SEQ ID NO: 105243 - DNA, 617 bp, Arabidopsis thaliana columbia
  unsure (1)..(617): unsure at all n locations
cacgcccgtccgcttcttcagttaacccccagagagacnnctatcaactcggctttcctactttcnntttctctaggccgnnctctcaccaagcnnntctccttacaccgagctcnnatctctcaccaanntggctcnntgaaaacctcgcgtnnctctatacccacgcnntttctctcggcttctcaananntccacttcnnntccacgcacccangnntggcacctnnatctcnnttctctcgtcgacccgaaaccgctnctccacngnnatcacgtcaccttctcttttccgcccctcnntggttcngtngccacgcccgctcccgtagagcgcatnnatcgtngaccaacgggttctgggattcgtccccctcggttggataacnnntcggtgaaccacccgatcacggtttctcggcccaatagaatgccggttcggagaacggccgannaatcacgcgtcatccanggtctnnntcctatgggcctgtnngctccgatgtctcacnattttcgtacccgatgaagnntcatgaagtataacccccaaagaatcccttactcggtttaacccgtgatccgtttcgttctctcttgctggaccatggatgcat

SEQ ID NO: 105244 - DNA, 463 bp, Arabidopsis thaliana columbia
caacaacttactacacactaaaacctccaataaatttgcttagagaatctatttttttttacatttctgaaatttgaacttgagacatgacatacatatttaaaaccgttgatcaacaattcgatcaagatatataatttatgaggtattttgcacgaattgcgataattctacgaatattgtagtttgacaacatatatccatttaattaccaaaattccttacgtccactattaaagaagtcttcaactatgtagactcacaaatctatcacaatttctttataaaataagagaaagcacttgattagcacctttcgtgaaaagcatcttccagttgaagtatgttatacccccgaagttatctgatctttgagcctaagcaaccgtagtttcaatgggtcagacaaacaacttaagaaataacgataatgtgttaaacaaaagtctcattagtttaccat

SEQ ID NO: 105245 - DNA, 314 bp, Arabidopsis thaliana columbia
ctatatatgagaattgagaatcttacaattaaatattttgtactaataaggcttttattttgtttacaactcatgtgtttaactaagtgctaagctaacactagattttttttaaaagaaatttggttttcctccacagtatttttattgttttttgtggacttgaccactaaacttcaaaagactcggaagaaaactaaacaaatattatgcacactttcgcaccactcaatgccttgccttccctacctaaaatgttgacaatgtcgacttattctttatgttttataaaataagaggaagcacttgatttg

SEQ ID NO: 105246 - DNA, 421 bp, Arabidopsis thaliana columbia
gctttagcgagcgatgctgcgttcgctctatctgtatcaatcttgaccgagcttgtggatccttcagggattggtttatatccatagatattctgagcaagcatccctactataggaggagcaaaagaagctagaatcgactcgaatgatctgtctaacgcgtagatgctcgttcgcgctctctcaggaacaatctctgcaaatattggactgtataaaaccatttcaagtagatgcttccggaagtaaagaaaagccaaaatattttgaatatgattgaaatataagtattaaacttacccgtttgtagctgcaccgttccatgagatgcataatcccatgatgacaagaaccaggccatggctaaaggccgtgaagggatcatcaggtaatcccgatagcaaaattgcagctaaaggaa

SEQ ID NO: 105247 - DNA, 466 bp, Arabidopsis thaliana columbia
ctcctttatgccttcagactctcttgcaccatgtcactgataaatgcggggatgcttgtgactgcgtctctcgggaggagaaaggtcgttcactcaaatcttgtccagtaaaagtgttagagattaaagagtttcaaggaacaatgaaagagatgcacatgataaaacatttcctggactatcttccgtgtttgaaggagatgaaaatctcctatatgaaaaagaatgatcatactacacagctcagagtcatccctgaagttattgaagagatggtggaacactacaacaagttatctaattgcaatgtccagcttgtagtgagtggttaattttataaaaagttgacagcacattgattcagccatttatgatctcgcttgtggtataatctttcacttccctagcattttgctttgagttctctttacattttagattttgtggacgaatcgttaagagtgaa

SEQ ID NO: 105248 - DNA, 463 bp, Arabidopsis thaliana columbia
gccatgtgtgggactagcaatggtgtagctgggtgtagcctaagggtctcaaggacaatgttctttagatatggtagctcgctaagatctgcttcttcgataagccggtctaaaccaacccggttatcgatttcgtctctcgctttagatattacgtcaggatggttaagcaaattggaaagtgcccattctagagtgactgctgatgtgttagtccctgctattaccattatctgcattaacataataacatcagacaatttatcttacttataatcaaagttaacaaaagatctaataattaatagaaaaaaataaaggaagaagaaataaaccagtatgatgcctttgatgatttgatcagtgtaatactcaatatcagaattttggaggacaagcaaatgatcgatcattgtagtaccggtttcttgttgcccacgtttatcgtcaatgagaccttgta

SEQ ID NO: 105249 - DNA, 183 bp, Arabidopsis thaliana columbia
gttttatatcatagtcaatcgtctttgcatatgtagagccattataatgtggatgcatgattaccggacacacctattcttctatgaacaaaacttcttcacaccttcaccaaattctttgacttcaaaaatcttataaaatttatatatctccaaaaccataaaaccaaaacgagttttcac

SEQ ID NO: 105250 - DNA, 397 bp, Arabidopsis thaliana columbia
ctgaaacaagtatataattccatctcttcaatatctataaaaaaaactctctaagaaaaaaaaaatcaaaaaccaaaaagaacttcacatactcagagaggtagagagtgttacatccagctgcattaacctcacgcttgccaatattttcctgagaatcaaaacagaaaaatcaaagtattattggttaattttccttcggaaaatactcagaggagagaatcagaagttaccggaggtgaagcgtaggattcgaaagcaaaaccagcgagaataacggcgagattgatatcgaacggagaacgttcatctttctcaggtaaacttacttccttcgtttctgattgagcgaagcaacggagcgaattaggtttagctctgagtctgaaagtgattt

SEQ ID NO: 105251 - DNA, 376 bp, Arabidopsis thaliana columbia
  unsure (1)..(376): unsure at all n locations
attcgtgccacacaacttgtagtcaccataacaggaaatgtcctcaaggttgaaagatggtatagagctagggatcgatccttgtccttcggngttttcaaggtttattcatcaggattcctcaagaaccaaaacggatttattcttcaaaggtcaatggttcttaccaagtttcactcatacatgatgttgatctcaacaatgttttttatatataaaaaaatcattatatattttaatgatgatctcagtttatatttttggaaaacgatctatttcacccttacaagtttcacatagcataaaatatgattaatagataaattcattgagtttaacagtaatttgccnntaaaaaaataaaaattttaaaatt

SEQ ID NO: 105252 - DNA, 462 bp, Arabidopsis thaliana columbia
gtcggggttttatagcccacgtgtttcgtgtcgtgttatatcggattcgggttagaaaccctacccaaagagtaagtaggcagaaagaattatcacgagtcatgtgtttggtaaaacgtaatgtgttatgtggacttagtcatataatgatttcgtttccttttcttctttgtttctagaataaacacattacaaaagattactacaatttttatttaatccaattattatgtgaatatatcgatagagagacaatatttgcaaaactgttgaaaaagtaaaacaataaccaaaagtttttcaaaatctagacctatatttgcttcaaactaatttttttagcaagggacattggcaaacatttgattctgaacaaacgttttagattacattggaagaccagtttggcttcattctcgcatcaaaggaagaaagacgtatttagttttctttttattttcg

SEQ ID NO: 105253 - DNA, 466 bp, Arabidopsis thaliana columbia
gtctaaagaaggagagggagagagtggctcactacctacactcaagcagtgagccaaagctggttgagaaagtacaacatgaattgctggttgtgtttgcaagtcaacttctagaaaaagaacactcagggtgccgtgcattgctaagagatgacaaggtggatgatctctccaggatgtataggctttaccataaaattttgcgaggcttggaacctgttgcaaacatctttaagcagcatgtcacagcagagggtaacgctcttgtccaacaggccgaagacacggctactaatcaggttgcaaatactgctagcgtccaggaacaggttcttatcagaaaagtgattgaacttcatgataaatacatggtatatgtcaccgagtgtttccagaaccacaccctcttccataaggctttgaaagaggcatttgagatttttgtaacaaaacggttgctggaagt

SEQ ID NO: 105254 - DNA, 507 bp, Arabidopsis thaliana columbia
  unsure (1)..(507): unsure at all n locations
tcggaggagaggagaaacgtttccactctgggttcggggtcgtgtatagaaagtagtaagaacgaaactccgaagaagcttcgaacgaagaaccgaaggggagattcttcncctttccccaacgatttttcgtttcgaacggaacgaatcgaaaaacccttagatttttcgcgttttggcttttcggacggttattcnngaatttcgaaatatctcgaatctgttcgattcaatttaaattctccgcatcgaagctcgtgttcggtggaacgtttttcggacgatttagcggtttctcgaggttgttctctccgtttggttcggtggaataaacggcgaagatcgaaccgtganntgcgtcgtcttcaacgagcccattgcnnttctgggtcggaccccctccattttcttcggatctctggggtggggacctanttgcgttgaagaagagggctatagctggatcttaagagaaccgacccaacttnngtgtgttgatccaaatgc

SEQ ID NO: 105255 - DNA, 411 bp, Arabidopsis thaliana columbia
caacaaatattaaaccatgtactaggggctgcactactcaacctaaatggccgcctcaacaagggctctgtccttccgtgccttcgtcgggaaggccgtgacgctgtccgccgcggcatatgaagtccttggaagcggccgtgtgacaaggaggaagactgttgccaagccaaagggcccatcaggcagcccatggtacggatctgaccgtcacaagaactaggggacattctctggcgaatcaccgagctaccttaccggagagatccccggagactacggatgggacaccgccggacatttagatgaccccgagacattcgcaaggaaccgtgagctagaagttatacacagcaggtgggctatgctcggagccctaggctgggtcttccctgagcttttggctaggaa

SEQ ID NO: 105256 - DNA, 322 bp, Arabidopsis thaliana columbia
gctcttttcttctctctgaagcgatgtcatcgacgtttcgagctcggcgggagccgtactggtttacgggatcaaagatcaactggaggctgccttgagatccttattctgtttctaggaagatatggaccgggggtccggtctcttcgttttgcggttcttgctattcaagccgctcactctgcagcctggactgaccaacgggcaaagcaaattatagggaggtatttataaggatcttgacgggagctttacaagctcaaagtacggtagcggcgttatcaagtcacggagtcaacgacacagagacgggggagactac

SEQ ID NO: 105257 - DNA, 460 bp, Arabidopsis thaliana columbia
gctaacctaatgagtttgtttcggtttagatagtgctaaaatatagatgcaattttaattgggaacagtcacgtctagaaacacatgtgaaacaggatccaaactggtagttgtgggcatgtgtctagggttcctgcatatgcttttggctacacgagactttttcagtgtgtatcgcctgattcatttgacaatatgccttctcgcctatgattgctcttatcatacttgttacctcaattactcaaatccattttccgataacaaattaagaaactcaaaataccgactcatatccgttattaccaaaccctttatccgaaatgtacgtagagagatagttttagactatcacctaacgcaacaaagagtatagagtaaaaaagaaagtcacacgcaagatcccattccatgcaacaatctaaaccttctctaacttaacctttgacatcatttacca

SEQ ID NO: 105258 - DNA, 445 bp, Arabidopsis thaliana columbia
acttggtgtagaaggtattgagttacctatcttttggggagttgttgagaaagaagctgctgggaaatatgaatggtctgggtacttggcagtagctgagattgttaagaaagtgggacttaagcttcatgcttcactttctttccatggatcgaaacaaacagagataggtcttcctgattgggtggcaaagattggtgatgctgaaccagggatctattttacagatagatatggacaacagtacaaagattgtttgtcgtttgctgttgatgatgttcctgttcttgatgggaagactcctatggaggtttacagaggtttctgtgagagcttcaagtctgctttcgcagattacatgggcaacacaatcacgggaatcacattaggtttgggaccagacggtgagctgaaatattcttcttattaacataatgccaagctc

SEQ ID NO: 105259 - DNA, 425 bp, Arabidopsis thaliana columbia
agaaaacatgcgcgaatagataaacacggttaacatgctctgcctcgtctgctcaacatttggcctctggatccttcttaccaacgcgtgcatcgaccaggaccgagggcgtattcgaagaagatggcgccggccgccctgcaggtccaagacagaggtgccaggcggagctgcagcgatcacagcatctaagcgcttggcagagatggatgagcaagcgaatgatgcaaggacgggcggggggtccaacacttgacgaagagagaccggtgcagggcagcacgtacggataccagctactgcagcagtggtgcaacgagctatcgcaggaagagccagctggcgcttgccgcaccttgaaacaagctgacagggcagttagcctacaaggacagcacggaccattccaatccaggaaaatttac

SEQ ID NO: 105260 - DNA, 459 bp, Arabidopsis thaliana columbia
taaacatatatattatatgttaaatatttagtataatatggctctagtattatttttcaatatatattaattctttatagagttcaattttaatatttttactacatcaaaaaaaaaaattgtttttttttaaactcaataaatgtattctatttgtaattaatttagaaagattattgattataggggtgtcagaataggttaagattcatgggtcaactcatcttaacttaattcaattcatgaattctgatgggttgaaatttttgactcaaatgggttgattgatcaaatgagttattgggtcaaatggttttatgaatgaaatgagttgggttgtaatgagtcaatgatttatctatttaaacccatcaatttttgtaaaattgaatcaaaccaagttaaatctctaaaccaatgttaatttgagtttaaccaaaatctataaaccaattgaat

SEQ ID NO: 105261 - DNA, 437 bp, Arabidopsis thaliana columbia
tccaaattaaaagcaacttacttaattacatatcgttcgtgtttttttcttcaaaaaatggcgtcaaagcaactgagcagagaagagcttgatgagaaggcgaagcaaggagagaccgtcgtcccaggtggcaccggtggccacagcctcgaagctcaagagcatcttgctgaaggaaggagcaagggagggcagacgaggaaggagcagctaggacatgaaggttatcaggagatcggtcacaaaggtggagaggcgaggaaggagcagttagggcacgagggttatcaggagatgggtcacaaaggtggagaggcgaggaaggagcagctagggcacgagggttttcaggagatgggacacaagcaacttattagtggtaaagaagactcagctaacaatttttgtccgcgggcattacaccattgggaaagaga

SEQ ID NO: 105262 - DNA, 449 bp, Arabidopsis thaliana columbia
acgaacttctacatcatttctcttttctctcatctctcggtgaattcgaggatcctcgagctttttgatcggagactttttatctcatcgtcgttgtttgaattctccggctgagagatgcttgcttgacgacgaacctccaccgatcttttaccttttcgcacaacaagtaagagaaggatgtcgactccagcgaggaagagattgatgagggatttcaagaggttgcagcaagacccacctgcaggaattagtggtgctccacaagacaacaatatcatgttgtggaatgcggttatattcgggcctgatgataccccttgggatggaggtactttcaaattgtcactgcagttttcggaagattatccaaataaaccacccaccggttcggtttgtttcacggatgtttctattcaatcattttatgttgtttgcaggatatcgct

SEQ ID NO: 105263 - DNA, 461 bp, Arabidopsis thaliana columbia
tttgaaatttggtaggccgtcgattattagttcttcggttacacgataatgtaaacaaatccatatcatcacattaatgttactattcatattttataattagccaatgaattatcttgtttttcttttgctctaaaataacgaaaatatggaatcaaactgaatgaaatatttctaagtcattttcaaagcttcacaaaatagtgatcactgcagaaaatattaaaaaaatacactcgatcggataaaaataatcgtggaagttagttcgggaaaaaagaaggctcactatcgtatcgcgtggagttgtctagagcacatgggtcagacaattctttcgcaattatatattacgtatttgttatatatgtgtaacccatgtatgtgaatcacacaagtgcataatatataatatagtatttttctcaaacatctatattatctatctacacacgtaagta

SEQ ID NO: 105264 - DNA, 452 bp, Arabidopsis thaliana columbia
gagtgacactgttgtttctgagtggaatctcatatgtcaacataaatttcttgtggctgttccttccacactattcttcatcggatctcttttcggttctggtgtgtatggatatcttgctgattcatggtttggtcgaaagaagactttattactctcttgtgtattaactttcgtcacggcctttgcgatctctttttcaccaaacgtttgggtttatgcattcttgcgttttgccaacggtttctttagatcaggaattgggtcttgttgtatcgtactcgcaactgagattgttggcaaaaagtggcgaggccaagtagggcaatacggtttcttcttcttcacgttaggttttctatctctaccactcatggcttacttggagagaaagtcctggagaaatctttaccggatcatatcctttcttcctcttggatacgcggtttgtc

SEQ ID NO: 105265 - DNA, 448 bp, Arabidopsis thaliana columbia
aaataattttctctggcctatgttcttgaacctttttgcctagtttgaccaaaatcctattgtgttctgtcattgagatgtagtatctggtcctcttattcgttggacctaaaagtagaaatgatttatctctgtctatatgttttgtcattggaatgttttatgtatttctgatattttgatctctgcttcttgttattgttgctgtttggttcaggttctctaagtatgaaactcttgaaattctagttgtatagtatttaaatgtggatgctgtttctctgcaagatttaaagtctatagcaaccaagtagccaaaactttactataatagaaagctctgtattattctcattgacatgccttgaggtttcaaagtttgatgaaccagtttagctatggtacttggggatgttttacttgcatcaaggttttactaaatgactaa

SEQ ID NO: 105266 - DNA, 464 bp, Arabidopsis thaliana columbia
cttttcatgagaagcatggcttgtggccatgtatggtagcaccaacaaagattatagctggacttggtatgtcgctcggtattgacattttagaagctccgggagctactggagattaccggacgcttctgacatcgaaagcaactgctatagctaatgctctctcagctcctttgaatccctgccctaatgtctttgtaccgggagaggacgggcataaaccaggaaggtcagatggttatgatttcgggttccttcacataaaggctatagatgatgcaggtcatgataaggcgacaatgttcaaagttcgaggtttagaagctgttgataaggcaatacgtcagcttgctaagcttttatggcaagctgagtcttctacacattaccagtatttcttgtgtgtgaccggtgatcattcaactcctgttgagtatggagaccacagctttgagcctgtccca

SEQ ID NO: 105267 - DNA, 454 bp, Arabidopsis thaliana columbia
tttcttctgaatcatatttgatttttatcttctctctcattttttaaaattattttttctttatggatctttgtagctttagcaaaaaccgaccagctgagaagatgtcttcatcgtacaacacaattgctttgtcctccactccgaccttcctcctctcaagtgccgctgccggacccggaccaaacaactttaaccgtcaagaggctgcgatgaccatggttcaacaacaacccacttcctccgttgctccaccacccaagaagcgaaggaaccaacccggaaacccaaatccagatgctgaagtgatagcgttatcgccaaagacgataatggcgacgaacaggttcctatgtgaagtgtgcaacaaagggttccagagggaacagaatctgcagctccacaggaggggacacaaccttccatggaagctgaaacaaaagtccaacaaaga

SEQ ID NO: 105268 - DNA, 470 bp, Arabidopsis thaliana columbia
agactcctttgagattgttacatcgcacatttgcattgtacttaagaaacggattctcttattggaaactgatttgcttgcttttggcatataacaaaattgggaaaaagaaaggagtagtgcatgaatacctcggataagcgcattgatgatcctccaatttgcatcttctccagagctatgtctctaattgacgacgcaaaggtatcccgcctcattcgttcacttgctgacactccagtatttatcaggtccatgtcaatggtcccttcaccaacataaatacaggtgtttattgttagattggtattgaatgctactgtttatctttatcctgatgataataatgggtctgaaagttactgtgaaaaaactacctgtggcgtgatcccgtgctgattgctgcattgcaactctgagaagtcgaaatgcctcgtccacgtcatgcttttcaacctttatcacaaaaa

SEQ ID NO: 105269 - DNA, 234 bp, Arabidopsis thaliana columbia
tttatattataacgaaagataataaataatttagtatcctacacattggcatcacgtattacacgcgtttagggtatatttggtatgactagttttaccatttttattggtctctataaaaaaatgaaaaggacaattacattttcattttcttaaggagaccggcaaaatttcataacaagtggcaaatggtataatcttcataacctatacttataaatcgaaaacgtttag

SEQ ID NO: 105270 - DNA, 250 bp, Arabidopsis thaliana columbia
gcgagattccggaagcaacacctaaatttccaaggccgcatgggagaagagaagcttgttagtcggttccttcctagaccttgttcgttaccgaaaccttcatggggtgggaacaactgtcgcaatcgcggggaacagaagcggcgttaccaatttgcgcttcgagcgatagagacggggaattcataacgcgaaggcgcgagcgactccatggttcggggtccgagagagtgatcccctcctgccactg

SEQ ID NO: 105271 - DNA, 188 bp, Arabidopsis thaliana columbia
ggaaaatggtagctacaatctctgtgcaaccttgggttctgtcttaacggtgctgaggcagcactgggttctctactcgaacgggtacctgcacctaagtctcagccaccgactatcaagagtgagccgcagatcggtctggccacaaccaccctagtcatggtgggttcgtgtcgttgaattgacag

SEQ ID NO: 105272 - DNA, 376 bp, Arabidopsis thaliana columbia
gaagagcataggcgaattgagttgcgatgattatgtcaaagctgggttgactttggaagacgccaaggaatttgacaaattggtgagcgatgtgattacaaaggctatagagactgatccaagagatcaatggaaagctttggtagatgagagtgtgcttaagccatggcatccacatcatctgcatcagcttctctactactctgtctattcaaactgggactcctctgttcatggccctcctctctattggtttccttctctatctcagtcaaagtccaccaatctggggaagctgatggaatatcacggaccaagacttcttggtccttcatataagaaccctcttgaaagttttgaacttttccggagattc

SEQ ID NO: 105273 - DNA, 363 bp, Arabidopsis thaliana columbia
atgaaatagatttacagaaacgggtataaggggaagagtttcccatggaagcgccgagaccttgaaggattatcactcgaaccagggacagcaacacggccaatcttggctaggactacatgaacaacaaggtccaccacagggacggacgagggcaacgtgaacagcacggtatacaaggacaaccatggaaaggacaggatcaacagggacaacacggacgacagggacaacaaggccaatcattgtaaggacaggcacagcaggaacaacatgggttccgggacatgcaccagaaggttgaacatgtgagactcggcgacgtctaaaggaacactccaggatctgtccactggatctaca

SEQ ID NO: 105274 - DNA, 392 bp, Arabidopsis thaliana columbia
accgagaatcttaggaaagaaatctattactgtatactatgatgctgtcaaagacattatagtagccgatacgagttcgagttatgaactcccacagggttctcaggggaataaaatccgaaatgtatcggctttgagagaattaggcatgccttctcggttgttattacccttgctcgtctccaaatcgcagcctgtgtgtggaaaagaaaattttgatgcatcccttaagaaggttgttgagatggggtttgatcccaccaccactaagtttgttttagctttgcggatgctttaccaaatgagcgagaaaacgattgaagaaaaagttgtagtctttagaagtttaggttttactgtggatgatgtgtgggaaatcttcaagaagactc

SEQ ID NO: 105275 - DNA, 262 bp, Arabidopsis thaliana columbia
ggtttagcctatttgtttatcatataagacatggcaatggaccggatcggggtgcatgtagaccgctgacaacggtcatagcaactacaaatgatgcgttggggttgggttggtgttgtatgacgggccctcactacattgcctatgcaggtcattggggacactgtactagtggctacttaccggtgggacggtgtgttcatccctttctctttagtcgggtgccggggttacttggctgtggcgaattggttggtgtggt

SEQ ID NO: 105276 - DNA, 221 bp, Arabidopsis thaliana columbia
cggcgaccactcgcaacaggcaccatgggaaggacagggacagcagcacagggtcggacatgcacaaggggcatgtgagacgcgggactttgcacactagttgcatgttacctaggaacagcctgatatgttttgcatgcactcaacaatgccgacctaggtcattggcgaacaaccagaggggttggcggtaagacacagacgaaactggggggtcgcgc

SEQ ID NO: 105277 - DNA, 388 bp, Arabidopsis thaliana columbia
gttagagccctataaaggacttgttttgttggtcgttgtgtatttctcatgacatgagtgtgtgtaccttctcaggttcttggtgttaaccctatagagggatttgacaagatcaagcaaacttatggaaggaaacttaaagatgctcagaggagcggtgatgaagccactgctgctctagtaagttacgttacctctctctttctttggagtcctgtaagtgattttttttttttttttttttcttgttaacacgtctctgttttaccttttgatagcttgagaaagcatatgataagctcatgtatgcccagttgatgaataggaaaaagggtgtgacttttggttcgtttaaggtgtgtatcgtatcctctttcttgtcatatgc

SEQ ID NO: 105278 - DNA, 228 bp, Arabidopsis thaliana columbia
gttatggactgagcagaggacaacatcaggcaccagaggacgacagggacaacaggcaccatgggaggacagggacacagacacaggaagaaggcacatgggaggcggcacagacacggcacggcacaggcacatgggaggcaggacgagacacaggttcggcatgcaaagggacatggaaccagcgcttgaacatcagttgcatgacaactagagacagcatgatat

SEQ ID NO: 105279 - DNA, 394 bp, Arabidopsis thaliana columbia
ctctcaatgagataactcctgggatgatagacaaattgcctccaacagattcaagactgagaccagaccaaagacacttagaaaacggtgaatatgagtcagcaaatgccgagaaactgagacttgaacagttacagagacaggtacaaaatctataggagaatatgttaatcttgactatatacataattgtgcatgaccacaggactgaatatagaagagtgtgccgtttgtgtgttgcaggcaaggaggctgcaggagaaaggatggaaaccaagatggtttgaaaaagatgaagaaggaaattatcggtatctaggaggttactgggaagcaagagagaagaaagattgggatagaatcactgacattttcaagaagcaacaacagcgta

SEQ ID NO: 105280 - DNA, 124 bp, Arabidopsis thaliana columbia
aacaacaatgtttacttacctagtagcataaaccgaaatcattgctaagacaggtatcaactgaacctaaggtttgtgaacggctactggatcttggcagagttgaaaggacaagctattaact

SEQ ID NO: 105281 - DNA, 388 bp, Arabidopsis thaliana columbia
gaaatctgttgaagcgtatgttacacgctccggtggacacgtcatcgaggtacagttaccttttccggttatttcggcggatgagattattgaccggtttaggattggtttagagtctggtaaagcgaatggtaggagagttaggttagctttgattgatcatgtgacttctatgccaagtgttgtgattcctattaaagagcttgtgaagatttgtagaagagaaggtgttgaccaagtttttgttgatgctgctcatgggataggttgtgttgatgttgatatgaaggagattggtgctgatttctatactagtaatcttcataagtggttttttcgcaccgccttctgttgctttcttgtattgtaggaaatcgagtaatggtgg

SEQ ID NO: 105282 - DNA, 333 bp, Arabidopsis thaliana columbia
gtttactagattttaacccgcggtacaccgcggagacaattcattttttaaaattaatatatataaaatttgtaaattattttatagtttacaattgttactaagtaacgtcctgccaaacccgtcccgccaaacccatccacaaaaaaaatatttattttattaatgttgatcttatttataatatgtttatgaatcattgtcaaaagattttattcgttacgggatgttgaacccacacatttttcgccaattagttaatatatgttcattcttaaaatttcgaatcataaaatatgacgaattttttttttgagatttttttaaactcta

SEQ ID NO: 105283 - DNA, 186 bp, Arabidopsis thaliana columbia
accggcaacccggggacccactcggaaaaatggattagttgattctgttcctgctttgatgactggctgaaccgctttgggatgggacacagactgtcattaatgtacaaggtacaaaagtatagcgctcagacctacggaaaccttagacttgcagggtttacgctcagggtttgtgggcttgac

SEQ ID NO: 105284 - DNA, 233 bp, Arabidopsis thaliana columbia
cgggtccccacgcgtcgatctaaacacttatctatacacacaaggagaaggagaggagagacaatagggacaggcggttctacaccgaccattggttatagcgacgactatttctctatcacgacggtgttcaaacctgtagatattgtaagtacagctagaacatactcgcgtccgcgctgttacttctgtgcccgtgtgtggtcaagattctgtgagcgctacggactgaa

SEQ ID NO: 105285 - DNA, 393 bp, Arabidopsis thaliana columbia
cttccccaaaagcgactgctctaatatagccattgtttcttaaacttgacgaaagacttttgagaacaaaaatagaaaatgtggccaaaatatcaacaagcctatacaaagtttgaagatgacaaaccagtcccggtcaagaatttcgatattatatttatataggttgcaagttgaaactgaggtggggttttccaaatgtttattttataactatgagaacagttctactgataaaggttatataattaattatcaattaatgaaaatgtttaatgtgaaagatttctcaaattcaaagaaaattaaacattgcaaagacttgttaatgttataatgctaaaagcaaggaaaactaagggaggttggttttagagttggatgatgtgacct

SEQ ID NO: 105286 - DNA, 407 bp, Arabidopsis thaliana columbia
gccaatctcagtctcatcatctccgatgggaaaacccggcggcgcaaagaccagaaccgccgtatgtttatcagacggtgttttctttctcgccggagctttcatgtctctcactctcgtctggtcttacttctcaatcttttcaccttctttcaccagtttacgtcacgacggcaaaccggttcaatgctccggtttagacatgcaattcgacccatccgagcccggtttttacgacgacccggatctaagctactcgatcgagaaaccaatcacaaaatgggacgagaaacgaaaccaatggtttgaatcacacccatctttcaaacccggttcagaaaaccggatcgtaatggtaaccggttcacaatcctcgccgtgtaaaaacccaatcggagaccatttat

SEQ ID NO: 105287 - DNA, 195 bp, Arabidopsis thaliana columbia
atgaattctaaaaccttcttactttttggaccccgtatgtatccaaaaaatattaatcttacggttgctaaacaaccaaattatggtgggaaagggtcacccctttcttttttttccttcaaaccttccaggcaaatccaaaccccttttttaagggggggaatcgaaaaacaagcctgttgaagggggggaacc

SEQ ID NO: 105288 - DNA, 133 bp, Arabidopsis thaliana columbia
taaaccctactcttcttcttttacctccagcttttattataccattccttggttgggaaggggttttagttggtaagggttataactggataccagacccccagggcacatggtcttatgaggttttgggcct

SEQ ID NO: 105289 - DNA, 399 bp, Arabidopsis thaliana columbia
gttttacaaaaaaatttgaattgaaaaacctaaatctagttttctaattgtgccttacatctgtgaagtattctgattttatattcttatttagtataaggttaaacaatttattggattatttctttggttttaaaccttttctttcctttttttttgggtcaacaaaacttttattttaaaataacttaattttagggggtatttaaaatttggttggctcatggcatacatatggtttttcttttttagagattttattaaatattaggttatttttttcgaattaaaaggcccggaaaggcatggtacccttttattggccaaatgggcttttaaaatttaggtttggaggtttattggcccgggccggcttggttttaaattttgaaggttgga

SEQ ID NO: 105290 - DNA, 400 bp, Arabidopsis thaliana columbia
ggcatggcaaaccgaggaggtgtaatgggtgcttttcaaaccgggataagtggcgtgtgaggtactaggcagatgcaccccagctcagctggtctttccatgttggatcagaacagagctaacctgcagcgagctgctgctatgggtaacatgggcccacccaagctgatgcctggaatgatgaatctttacatgaatcaacaacaacagcagcagcaactccagcagcaaccccaacaacaacagttgcagcatcagcaacagttacagcagcctatgtctcaaccatctcagcagctagctcagtctccgcagcagcagcagcagctacaacaacatgaacagcctcaacaagcacagcagcagcagcaggcaacagcatcccctcttcagtctgtac

SEQ ID NO: 105291 - DNA, 409 bp, Arabidopsis thaliana columbia
aaataaaaaagggaaaagtgggaaatcgatgcgtcaatcttaggtctccgaggtctcaattatttcatcttcttcggtgatttctggggaagatgctctggatttgggaaagcaactctgtcgatggatgaatctcttttcgaaacttctgggtgatatgcttaatgttgattatctgtggaaaatgatggtcttcttagcatgatcaaggtgtctgacttgtgaagtttgttagatgacggatgatgatttctgagaaaccgttgggagaagaatctatacggcaggatctggaggttttaaccgtttcgaggaggcttgtgaaaagtgttagccagaagttgaaaaaaaaaattcataaaactgaggtggtggaagatgaagaggttgcaaggggagcggtgaattg

SEQ ID NO: 105292 - DNA, 407 bp, Arabidopsis thaliana columbia
ctattttaggtggacattacttccttagccttcaaagttgtggttaaggtgttttatgaacatatgaaacttgcgcataatgcttacttgaatttttattgacaaacgacattttagttgttaggaatttcattacttagataattgctattacgaaactaggataactttacaattgtgttttgaattcaagaacggttctaaaagcttctcataattaatataaatttatttcataattccttgatgatttgcgtttattgaatgctttttgttatattttattttatcacctggaatattgaaaactcttgtttattttagctttattcacattgcattgcttggttcctgtaaactcgatcctaaattactactgcaattgttaccgtgcacttgcggtaaat

SEQ ID NO: 105293 - DNA, 413 bp, Arabidopsis thaliana columbia
gtagggacaaaagggttataaactctaaacctgtatattagtgaacgataaccattgatgctgttattcatatggtaaggtatgctacttttaatgtcataattgtaaggaataccataatgacatcgtacccattcccctatagtctcctgcaatcatagatcctcctataagaatgacattgttctcttaccaagaaacattgttcccttaccaagaaaattaaaataaattgttaccttcttgatttgaagagctttgcgtacggtttcgtcattggcccaataggcagctagcaaaaaacggtaaatctgcaaaagcaaccttgtatacatatatttttctcaaatggtttaacagagggcaagaataagttgtatgaattacttacatagcaatttggagtttcagtt

SEQ ID NO: 105294 - DNA, 270 bp, Arabidopsis thaliana columbia
aaagaaatggttaacttaaccatcttcttggttgaaccctccggggttttcttggtcttgaacggttgctttggagggcagtaatttggggttcttcttagttccgaaaggggggtaactcacacctaaatttctcaagcccccgaacttcagagtgaaccggcagatcggtactggacccaaccacctaagtcgatgggttggtgtttcgttgctcgtatgtattgacaggcggctttacttgccaccttttacttcccaaaatttcta

SEQ ID NO: 105295 - DNA, 342 bp, Arabidopsis thaliana columbia
ggaagattaaataaaaaaagagaaagaaatataatagcttcctcaatcgatcttccatttttcttcttcttcattgtgaaatttgagtccaatgactgtcactggtcgaattttccacctgtagtcaatttgaagaaatttaaccagtttgttctactggaaaaatttctggtttcacacttgtgttgactctttcactggaaaaaagaaacgaaaaaactccgaagagtcttctctgggcagtgttaaaaggtaaggagcaatgttcagggaagctggcttaagaaacataagagaggatgttgattcgaggtggacgattggtaatcggaaattggatgc

SEQ ID NO: 105296 - DNA, 412 bp, Arabidopsis thaliana columbia
cttttaataaaaaagagcacgaagaacatgcgtcggactctctctcttccttgaattcattcaattggccacggcgacaaaacagggagccgatacagcgaaactgatacatctttttttattttctggattcttagggttctttttcggggaatttaggtaatttgtttgtccattttggtggggtttgggagatttaaaatttgtttttctttgcgtcggattctcaaaaatctgattttgaggagaaaatctcggtggaagagacttgcttcaaatcttctctactggggcaagatctgagatctctgggtgttccatgcaaaactgttatactccgccgtatattcgcatctgggtcacacttctaaaccctatcatttgacttaagaatcgatttctgaagatctgg

SEQ ID NO: 105297 - DNA, 265 bp, Arabidopsis thaliana columbia
cctaaacaaaatgaattacgttactgcttcaaaataagatcaagccgtacaacaaaagctgtttgccagtcatgacaatgtatgatgtcgggttttttgccggactgaagaagcaactctagtgcagctcggctaaaatacgagaagcgtctgaaatcatcttgctctccataaaactgtcctctccagaagaatttgcttggatgttgaggttcaatgaaatgtacaggtaaacctgtcaatagagagaaacttctaacattac

SEQ ID NO: 105298 - DNA, 404 bp, Arabidopsis thaliana columbia
gcgattttaaggatcgatctaataaaattacctttcgattcttcatctcaggatccttgagtctcttagctccgagttctgatgagcgcgcgaagcttttcctgggaatttgaatttccttcatctctctccaatgttttcaaatttggagcttgtcagttttcgaaaatgtgaaatagtgagtgaactacaaaactatcaagcaagataattttatttgtagtacgcttcttagatgggcttaagggccgataactatttttattcaaggcccaatatagatcgttctcgctcatcgcaaaattaacctactaaaccggaattcggttcggttgtggtattgtttagccggtttggttccagcctcacccgatagaattagcctttagggtttctaacgtcga

SEQ ID NO: 105299 - DNA, 261 bp, Arabidopsis thaliana columbia
catcactgtaatgagaaaacagaagaaaaaactgatatacaagaattggtatgctccagaaataacaacttacccgcaattaatcatttcagaagtgtttcaactcctacctggcatggattctgaaggatcttttgtatgaccaccgatagacaaaagctggttatcccatggtatctacataacaaacaaagaaggccagtatgtgatttcaagaggagattactgaaccgaaacctgcccctgatgtttcaaggctag

SEQ ID NO: 105300 - DNA, 373 bp, Arabidopsis thaliana columbia
acgtttgacctgactcgaggatatgggccttagactaaaacaaccaactaggacatggttggctacaaagactacatcaacatcgcacggaacaacatcgcgaatggaattggacccagccatatagctcaggcattgaagactcatcttcatacacctaatctactactgtacacagatgacacccgtggaaacattggccgagcccaaagaccgaatcgagagattaaagcggctcatatgggccaaacacctctggaggaggaagaagaacaagaaggacgactccggcgacacactgatcgcttacatgaaaccatctgcaggtgcaggtgcaccgataacctaggacatccgtcttgggctgacgaat

SEQ ID NO: 105301 - DNA, 304 bp, Arabidopsis thaliana columbia
  unsure (1)..(304): unsure at all n locations
ggacggaanggccggggcgacgcgtgcgtacgatgaatggagtctgatctatacagcattttcctcgcgccactcgggtactcttttcggtggatacactgcctgacatgggaggaactaacgccaggtttctcctcagctacagaacgagcgtaacctcgacaacctagatgttcttcaagccatcgaggagtgggaccaccatgcacacgagctctggtgctacaaccacgcctctgatcagatccggaagtgagcctcatggccttttctgtgaccacaatcttgaacgcgggctttactt

SEQ ID NO: 105302 - DNA, 232 bp, Arabidopsis thaliana columbia
ctcggattcaacgatgttatttgttattagtccagaacttccgacgattagaaggaacgggtgatcattttcagctaggagaacaggtccaaccatgagaggtgaagggacagcatgtgcaacaaggacttctgggacatcaatggcaatacattagcaggactggttctgtgtgaacaaaaaggctaactgtgacatgcaccataaggtgccacatcttgagattgctgag

SEQ ID NO: 105303 - DNA, 422 bp, Arabidopsis thaliana columbia
cttcgatcccacttcagactctgtcccctccgttgaccgatctcggccaatcatatctcctagcgatctggtcaagctgaagttgtcgagtgtagctaaagagagaggagctctttgtttggatggaagcttgcctgggtaccactttcatgagggttctggatctggctcccaaagctggcttgttcatttggagggtggaggctggtgcaacacagttgcgtcatgttctgctcgagcattgactaaattaggttcttccaactactttgaacaagaagtggcctttcaaggtgttttaagtagtgacccatctcaaaatcctgaattctttaactggaacaaggttgcgataaggtactgtgatggtgcttctttttctggacgccctgaagctgaattcaagaatggcacacggcttt

SEQ ID NO: 105304 - DNA, 350 bp, Arabidopsis thaliana columbia
  unsure (1)..(350): unsure at all n locations
gaaaaaagggacgacccacgcgaacgcaaacgaggaagaanacaaagacaaagaggaaaaaaagggcaaaaaagcgcgcccgagggggcgcaacnaaggccggagggacaccaaaaaacgcagacaacaaccgcacggaagacgagggcgacgaagacgacgccagcaaccccacgggccgaagacagaaangacagaaggagaggcaggaaacacagaaccgaagagcgggccagaaaaggaagcgcaggcaaaagaggcaaggacgcggaggagggcccacacacgacgaagagngcgacaaggaagacgacagcgagaacccacaaggaccccagaagggacaccag

SEQ ID NO: 105305 - DNA, 396 bp, Arabidopsis thaliana columbia
  unsure (1)..(396): unsure at all n locations
ccggggcggcccacgcgnccggccaccgnaacnancaagagggaagccggncagaacgagnacggggaccacaaccaccgggagcnccgaggggaggggggggccgaagcncggcagggaaacgaacaaggcggacnnnacgcgcccacccgcnncacggccccaaaaaaggacgacgcagggaaggaacggggaacagcggaagagaggaccccggangggccgagaccgccacggacgcgcagccgaagcaaggacaacaacaaggccaaccagggcaaggacgacaggggacaacaggaggaacaacagaagggccagcagagcagggacaagaagggacaggaagagacacaaggggagggcagggaccagaaggacaacaaggacgacagg

SEQ ID NO: 105306 - DNA, 300 bp, Arabidopsis thaliana columbia
  unsure (1)..(300): unsure at all n locations
gacccacgcgancgagaaaaagganaagcgcagcaaacgccgcggggcaaccaacggggaacaccacgacccgaacggagggcaagcgaggcagaaaccnggggnnccnccncagcnacagaacgaggggaaccgcgacaaccaagaagagcgccaagccaccgaaacgaacaagagagaagccggacagaacgaggacagggaccacaaccacccncagcnccgangagaaggagcgnacgaggccacgaaaggaaacgaacaaggcggggcggacgggcccaccagacgcaanggccc

SEQ ID NO: 105307 - DNA, 419 bp, Arabidopsis thaliana columbia
cgatcgtgtacctgatgaacgatgaaattattcatctccctaagtttgagacgacgaacaaaagaaaacttcacggttttttcttcttctttatttccttcattttttatattttgggaaagtatttttaattttccaagatatctataatcatatcattatatatgtaatattttttttaatgtttgggtgagtctttaatttatgcaatttttcgggtgtaaaattgttactatgtgttattatatgtttttaatgcactcaatccgaatgtggatttgcagtggctatatatataaataaatatatatcccgttgtaattttagtgaaacgtttgtgtgtattgtacccatatataaaaatgtaattcactctttttagtttatatatattttggtttataaatatgcgtttcttt

SEQ ID NO: 105308 - DNA, 324 bp, Arabidopsis thaliana columbia
  unsure (1)..(324): unsure at all n locations
aaaaaaaacagaacacaaacaaaaacacacgggaacaggaggggaagcgagaagcggcgggacggcgaagaagaagaaggcggcgaccaccgggaaacaagaaacgacgacggcgcgggaagacgcaaacacaaggccgacggagcaancggcggaaaccggaccaggaacaacgagggcgccgacaccgagacccgccggcggancaccggcgagaagaacggggacgggagnaaccgggaagcacccnaanagcagggggaggcgacaacggaacggaaaaaggggaacggagaanagagagccacgggaaacgacaagaaa

SEQ ID NO: 105309 - DNA, 329 bp, Arabidopsis thaliana columbia
cgccgctgccggaactaccgaccttgccgatggccgtggtgcatatctgcgtacgaggggtcaaggaaatgataagattgttgtggcttgtgacataaatgagggtcttggaaactttgtctcggcccttaacagattcattgcggaccgctatttgtcgaaccattcagtcttagaataccatgtctatgagttcttcaagatatggaactgctctcgcaacgaatccgacttacgtggtcatgaattctttaagacatcatatatcaagaaagggttccctcctctttcaggtgccctaagactctttacaagctttcaaaatattg

SEQ ID NO: 105310 - DNA, 235 bp, Arabidopsis thaliana columbia
aaaaaggtaaagttaaagatatatgttgttgtacacataaatgttcttatcaacttgaaccgatgtgtggctacgaaataaatcgaagatggtatatgggtacataaggagggtatgatttgcaatcatagaaataattcaggccggacgaacttataaagagtggcacacgcgaaacatctacgagaatggtgaccagatagcagagatgaaactaggaatgtagtatgtgtaa

SEQ ID NO: 105311 - DNA, 270 bp, Arabidopsis thaliana columbia
  unsure (1)..(270): unsure at all n locations
ggaaaaccggggcgacccacgcgnccggaccaaagcaggggangganccanacaacgcaaccccgcaagagagaaaaacgaaagagagagcnccggncncaagccaggccgcngagacgganaaaagaacgggcggnccgaaancaggaagcncngagggacgccagacnaccaaccgaccagcgggggcagggcaacggaaagccggccgagcnncagggcccgcaaacaacaanganggggcaccgcaccccggggaaagaagcaaaa

SEQ ID NO: 105312 - DNA, 430 bp, Arabidopsis thaliana columbia
gaaatcaacttccgaaaggaaaagggtttccctggtatagcagtatctgttcgtcgtgcaactataccaacagctaatgcaatagagttgtttaaggatgatgactctcgcactggtgaatttcatttgaagtggggagaagcgaatagtggctgtgattctgatgacatgaaagaacttttcaactctacagattctactgtcataccaagcagtctaggtgattctccctggcaagcgatggccagttttactagtagcattatgtccgaatcaacagatgaggaagttagtttattcagtcccagggtttttgaaaccgtttccaatgcccttcagaaggctggtgaccaaggtctgagcattgaagaagtccaccgtcttattgatatcccaagccaagaaacttgtgactgcattgtagatgtac

SEQ ID NO: 105313 - DNA, 421 bp, Arabidopsis thaliana columbia
cacattgagcattgtaaccacaattaggatattgtaccaagcgttggtgtatatagtgaccacacgtatcaagcaacacacagaagacaatgacatgtaacaaacagtgtaaaatattgaaaataacttatcaaaaaactttagttcataacacagaaactttcggctattttttattgacttctatgtagtctttttgttgcactgactatttttaaaagcaatatgtatgtttccagcggattcttaggttttacaaaattttggctttaatattttttttgatatacattgccatgcttgatttcattttgttctacactagtatcaaaattggacaaaatgaaacttcaggacacatacgaaaaggttaacaaatgttcgaacagagaatgattttaaaaaggacttaaatgtggag

SEQ ID NO: 105314 - DNA, 422 bp, Arabidopsis thaliana columbia
cttcaaaatttatctataagtgggttccttgagatatgttgttctttgatgatactacagacgtagcttaaaatattacatgcaacaacgagctcagaatgatgaaattggctcagtttctgtcacaggcgtttctatctttgtactatattcacaaaaacttgattcactcttttaggttcaaattttcttatggtaatttagaatttggagctgattgggatgctactaacagaattatgttgttaatctgccagttctgcatgttgacgtgtgttagatgaatcacttatctttttggaccaacatgatataactaagaacctgttctgtcaatagaatttatgtcatgaaccaaaaggattcttgtgaatttcataacatgacgctggctttctttttttcttctccagatgctctca

SEQ ID NO: 105315 - DNA, 319 bp, Arabidopsis thaliana columbia
caaaaggaaagagggcccgaccaatagtgtgagcacaggcaccataccggcgttattcgtagataaacagtgtgaatgctgggcaggtcgcttggagtttctacacactttgagaacctgctttatccagaccacctagcgatagtgctagcaaccatgactctaacaagggtactccttaaactggttctaggggcctgctacaaccttgcattgcaactgtctatgacgatctcgaccaagtatgtaaatggactatggggctcgcaatagatgacaaagatgacttcgactgtatattccaccgtaagttacttga

SEQ ID NO: 105316 - DNA, 218 bp, Arabidopsis thaliana columbia
gcgaaagctggacgaggctcccatatggttcacacactggctactctgacacggactccatgcgtgtttatcgtagttacgatcgcagagttcgacaactctcaaagcccatgtctcattcattacagagcatagtgcacgaacctggcgggtatggcggagagactccttatatggtcgagcaatgaacagagcgatgtgcgatgggctcaactgat

SEQ ID NO: 105317 - DNA, 422 bp, Arabidopsis thaliana columbia
gcacactgttgaatttgatgttctgattcgtttaccgcattttgcttctggcgcgtgctatctttttggaggctgacattgtcaacaccagccaactgattcgagtacttcatgtcgatcaagtctggcctttgcttccatagtgagatatatttactgcatgcttcactgatggaaccattccaattcaatcaaacaacaaagcatgaaagataggtttcatcaaatgaaaagtagcaaaacaataaaaggcttactccaaatgatgtgcactaaatctatcagcaaattgtttgagttcggaaacagtatgagggtcgaaaccgctagctgatgcatgagaaatggacgttgtcaagtcctttttaatagcttcaagtcttaagtctatagcctttaagagctccttcctgaatatagag

SEQ ID NO: 105318 - DNA, 346 bp, Arabidopsis thaliana columbia
cataagcaatcatgcaactgatgaatgatgatagagcagaggaaatgagatgatgtagcaattatttgtgtttagaagaagagaactgaccaatggtggggatggtggtgacaatctcaccaagcttgagcttgtacaaaatggtggtcttaccagcagcatcaagacccaccataaggatgcgcatctccttcttggcgaaaagcctgctgaaaagctttgcaaatgaaagccccatttttgtgatattgcagagaagacatttcactcaagatttagcatgaaaactattcgcaacaaaatacaaatagatctaaatgaaccaaaatatgagcatgcccaaatg

SEQ ID NO: 105319 - DNA, 298 bp, Arabidopsis thaliana columbia
aacaaaaagaacaagattaagctcactaataatctcgccgcaaccttcggggggctgcttgaccttaacggctgcctcgccaggcacacacttgaggatactactcaactacagaacaagtgtaacccagacaccctagatgttgttcacgccaccgaaactattaagagtgaagccgggtagatcgcagactgtgaccacaaccaccctgagcttggatgtgcaggagctttcgttgctcgtcatttaattgatcatggcggtctttacttgcccacctttttgagtgccgcaaaaa

SEQ ID NO: 105320 - DNA, 428 bp, Arabidopsis thaliana columbia
ctaaatttactcacagatgcaattctatatcagtagcaagcaactaataagaccaagatttagtgatacattaagcaaccatagcaacacaaatgattaagaaaaccctaaatagaaagtttcaatttttatactcagaatcgaattcagactctcagacttgtattagacctaaagctcaatcattttcagcaataaagatgattcctttatctcaaaggttatgactttatccgatacagaagatcccaatataagattaaaggaagaaagagaaaaccctaaaatcaaaatcactaaatgagataattgatcacagaattaagcagctaacgaagtaatcgaacctagatagataattgaaaggacagagcaatcaaatggttcacaataaccgaaacttaatcagagtgatttagataaagatt

SEQ ID NO: 105321 - DNA, 428 bp, Arabidopsis thaliana columbia
caatcttcttgactctttcaacgaacattcgcgccataagctcctaagttcctctcatccaatggatcacaaatgacaaagaaaaacaaaagacagagaaaacagagacaaagcgagaaacaagacaaggaatacagaaaaattagtaaatcgaatcaccaaaaaaaaaaaaaaaactactttgattaatcaaaaaaaaaaaagagttgcttgaaactcccggcggcctagctccggttaagtaaatggccgtggcttggctaatctggccaatcgtgctatctctaacagcactttctgcgaattcgataaccgaatcagaatctttattgaaattcaagaagtccttaaacaacaccaagtctcttgattcttggacaccagagtcagaaccttgtggagcaagccaacgatggatcggattactc

SEQ ID NO: 105322 - DNA, 417 bp, Arabidopsis thaliana columbia
cgaagatcaaagctatacacagaagcaaaacgagattcacctccatttttgacgacgcttaaagtaactcaaaatttcatctgaaattcatcaaatttcgcaaatcaagagctctgttgttgtgttattaagtgaagaagcaaacatcagaaatgaagatcaaaaccgacctcgcaacaattaaactcggattcttctgattttcgaatggttttgttcatcggtttgaatctccgttttgtgattctcgagaattggattggctcgagacttgtgtgagtcaccacgcaccactagagaagagaagagactcacgttttgacttcagtcgtcgttgtgcatctttttttacttcgtcccagactcacagtgtttctaaacgacaccgtttggattttgataaaaactagcagactt

SEQ ID NO: 105323 - DNA, 261 bp, Arabidopsis thaliana columbia
ggaaacaataacatgtccaacaggaagctctgcaggctctggacattgcattgcgagagctgtcgatctttaggtatattctggcggtacgaaccttaaatttcaatgatataggaaaaaaacaatcattggagcatggctaggagagttggcactgatactaccaaagcataggtcttacacagatagtgttatcacttaagatcgatatgtcaatgacagggatcataggacaggccacactgtgatactgagtgtatg

SEQ ID NO: 105324 - DNA, 396 bp, Arabidopsis thaliana columbia
  unsure (1)..(396): unsure at all n locations
gtctgttgcaccgacctaatgagtcctttgaacggttgtctttggacctcgccttcaccaaaaaccgaatgccgtgcactagttgttggctgaaattgttccacctctagattttcagaaaggctacttggcaccaccatttctgtgaacgtgcttgcaagtcataatactcgagtgccctagtcccagttcccttatgctcgaatgtgaatatttgagcagacacttttagattgcatccatgtaacaganacagaaagtttattcacatataagaaaccagtaaaaaattaaaacaatactgcatatgattagctactcatttttactaataggtcgaaattatttggcataaatgaacggggatgctaaacattctagagtgatacaaaggta

SEQ ID NO: 105325 - DNA, 433 bp, Arabidopsis thaliana columbia
aactccctagtttatattttttttttttcccctttaacttttcattttatcaaaaaatgtttttaaaaagagtagaggactcataaagcttcgtacttgttttatttatataattaataactcgtatcaatgtcaataactatcatccatcccttttttcttcctagttcaaaaaacttttaatattgtttgtataaatatctagttatctactattagaccattaatacaagaaaacaaaacttttaaactgtaaatagtggcttgattttgaatgacgagacttgtatgtatacgagtggggtctagaatattagtcgctgtctagtacatggtttaatggttcggttggtgcaagtaattaattatgagaatctttgcttattttttaaaactaataattccacaagtaaatagtttaatacgtcaatta

SEQ ID NO: 105326 - DNA, 430 bp, Arabidopsis thaliana columbia
tgctgactaattttacgcttccggatgtttaatcgtcgaatttgaaggtaggtaggtgtctttgaaacaaggacgaatgattcactgcacatgtgattccttgagagagccagatcgaactttcaactttctacagaagcggctgtgatatctcttcttaagtcctcccctcttcttcttcttcttcttctaagaggtgggggtagaagatgactacagaagatgatgatcagatgctaggaccaagcggcacccaggaaaagatctatgtttctgttcgtatgcgacctttaaacgacaaggaaaagtttaggaatgatgtccctgactgggagtgcatcaacaatactaccatcatttacaggagtcatctttctatctccgagcgttccatgtatccttctgcttacacatttgacagagtggttag

SEQ ID NO: 105327 - DNA, 436 bp, Arabidopsis thaliana columbia
  unsure (1)..(436): unsure at all n locations
gagaaaacagatattcctttaccaatgtacatttgaagacgtagaaaattgtagcccctctcagcatctaatggcattagggtagtaagaaatctaaactaaactgcattaggtttcttcttttgactaacattttacctccgtaagaatcctagattaattgtaactcctaatcctagtaatcaggagaagaaaattcacaaaagtcaaaaaacaaatctgactaagttgttaatgtctaaggtcgagctaatcaaagcattgacctctgtttttgtctattgaaaaggttagagggacaaacaaaacaaaaaaaaaaaaaagggcgtnagatccataattacagtataggaaacattcttcgtgttaagggacctttccaggttgtgaggctccctttaagacagccctactagagcgaggagttgtgacaccc

SEQ ID NO: 105328 - DNA, 340 bp, Arabidopsis thaliana columbia
gtgaagaaaaaagccgttttccgtaatcgtttcttcaattatttttcttgtcttttgattgattcgatttcgtatctgtttcaaagattcgcatcaaaccctaagaaactgaagatgaggccgatcctgatgaagggacatgaacgtccattgacgtttctgaggtacaacagagaaggagatctgcttttcttctgcgccaaggaccacacacccaccctctggtttgccgataacggcgagcgccttggaacttaccgtggtcacaacggtgctgtttggtgctgtgatgtcttccgtaagtttctcaatttctcttcaaatagtatcgagtcgatga

SEQ ID NO: 105329 - DNA, 159 bp, Arabidopsis thaliana columbia
aaaaaattttttacccccctttcatttgggggcaaccttcggggttctcctcgggcttaactgatgtcaagcgaggagcaatgggaccggatcgggtgtcatgtaaacagtactgacaaactagatgttcttccagactacgaaactataaagagtgaa

SEQ ID NO: 105330 - DNA, 316 bp, Arabidopsis thaliana columbia
  unsure (1)..(316): unsure at all n locations
gctggctacaacagggcccgctggaacgcctgggacgggcattgttattttnnnnnnnnnnnnnnttgggcttttggagaatgggttttgtagagatgcgtttaggatgtttggggatgctagggtttctcggtctgggatgaattcggttaccgctgctagtggtttgggggggttgtgggggatatttgacgagggatgcaacttgcattgttttggcgattaaaatcaaggttttgagatggaaagtttaacgttggaaacctccttttgtttcaaatgttttccaggatgtggaagagtggggtttttggct

SEQ ID NO: 105331 - DNA, 357 bp, Arabidopsis thaliana columbia
  unsure (1)..(357): unsure at all n locations
aacaaaaagaaaatggttaagctcagcaatctcctcgttgcattttttnnnnnnnnnnnnnnncttaacggctgccttgcgaggcagtcacttggggttcctcctcagctacagaacgagtgtaacctcgacaacctagatgttctccaagccaccgaaactatcaagagtgaagccggtcagatcgagtactgggaccacaaccaccctcagctccgatgtgttggtgtttccgttgctcgttatgtaattgaacaaggcggtctttacttgcccaccttcttcacttccccaaaaatttcctacgtcgttcaaggaacgggtatcagcggaagagtggtccttggatgtgccgag

SEQ ID NO: 105332 - DNA, 292 bp, Arabidopsis thaliana columbia
  unsure (1)..(292): unsure at all n locations
acatagcaaaaaatggcaaacacgctgttccttgactgcgcattatattttnnnnnnnnnnnnnnttgctgagcaactttagccctctgattgctcctgagcaacgctaacatgtaccgcactgactgcaagttccgacgaaaatggacgccagccgcacggagtggcacaaagaacaatgtcaaaaagagtgtcagcaatcacaagctccataaagcttggcaaggacttatcgaccagccaaatgaggaaggcccgatggagaacccacagggacaacagttggaacaac

SEQ ID NO: 105333 - DNA, 322 bp, Arabidopsis thaliana columbia
  unsure (1)..(322): unsure at all n locations
cggacgcgtgggcggacgcgtgggcggacgcgtggggactcttttnnnnnnnnnnnnnnatttactctagcaagaaagtcaatgcgacggagcttgacaagaatatttcctcatctgctgtagactcagagcagaaagggaagttggatgatgcacctaattcagggacagagaatggcaaaacaatacggaaggtaacaagaatgattccacgtcccaaacaaccgaaaaagaaaattttgcttaagaagaagttaaaaatcggngatgtgtcagcaacttacccaacaaaagacgatgaagaaattgttccttccttgga

SEQ ID NO: 105334 - DNA, 419 bp, Arabidopsis thaliana columbia
  unsure (1)..(419): unsure at all n locations
aacaaaacaaaatcaagaaaatttaaaggcaagatagttttttttnnnnnnnnnnnnnnnnttagcatcataaaaattagcaatcaagcttaagttgtttgagatttattataataccgtgtgaatataacatagtaataatatttaaaggcaaggtccatgagatgatcaagttgagattgggttgaaggaatagaaaaattacctcaactttggataagaatcttgctcaagattagagaattttgtgtcaccgatctacaagtattagctactggataatcgttatatagcaacaaaatgaaaagtcagtcaaccttgaagcaacgcggaaataatgtagatcttgtcacgtctcataatgcggagaagaaaatttaatattggtatgagtataaatgtacttaaatccaatagtc

SEQ ID NO: 105335 - DNA, 231 bp, Arabidopsis thaliana columbia
  unsure (1)..(231): unsure at all n locations
gtctgttctattctttctttctccttaacactatcgatcctttttttttnnnnntnnnnnnnnnaaggtcagcagggtcagcaggttccgaaccagtgccacgtcgaccagcttcatgcgctcgagcctttacacccactctaaagcaaagctagtgacgtcgaggtgtgggagcaccaccctcctcatgtccgctgcttccgtgtattctttgtacgtttcattatcgag

SEQ ID NO: 105336 - DNA, 386 bp, Arabidopsis thaliana columbia
  unsure (1)..(386): unsure at all n locations
atggatctgcatcagatcgcttggcctcagaaaatgaatatnnnnnnnnnnnnnnnnnnncagaaggaccagtttgctgtaccttattctgataataaaaattacccttcgactttatctgggagtgagcatccttctgcttctgcagctaatgggagtgtgtatagaagtgagttctataattcagcatcacaaaaggaaggggaagctagtcagcagcatgagatccctgctgggacttaccatcacccagaagcatcaacagtttccaatactacaaagtccatgcaaccagatatgcaggcagttagtgttgctcaatctcataccgagacagctggctatcctacaccggcacatggtgaagcttcacaaccacctgctgg

SEQ ID NO: 105337 - DNA, 523 bp, Arabidopsis thaliana columbia
  unsure (1)..(523): unsure at all n locations
cggtccgcaccaaacacaacacaaaattctctggaaggtaaaatggacggttccctttctcttgnnnnnnnnnnnnnnnnnnnnnctttggccttcatanttcgttaccgcatggcccattcgacctcanngcatcatccagatgccaacanngggaaccattgtccgtacccacggtggttggtcaatgacaagggctgtctttnnctccggagtcgacaagggagatcagatnncagcattggtttttgggcgatgccntgtacggtaacaaagggtggtatgcccaccgaaacctaagggggtttgggtaaagaaggacnncaggnngggttttgggggaaggttggttcaacgaaccacccattccaaagtcaagaggggtcaatggtttgaaatgacnncctatcttgctctcttctattatcaaccgggaatggggacccgacggtttgggtccccgggagtcnccattgaagatctactcagaaagggttcaaagtcccgnnttaaattcgatttc

SEQ ID NO: 105338 - DNA, 424 bp, Arabidopsis thaliana columbia
  unsure (1)..(424): unsure at all n locations
gaaatcggaaatgatattcattgtgaattatctgtgaatcttnnnnnnnnnnnnnnnnnntttatcgttctctttgctttcgtttgattttattatttatttgtagataatagaaacaacaaaaatgcagaggctgagttgaaaaaacacaccgtcgtttctattgcctgagttcaccatggatgtcgttctcaaaagtctcagctattattattgtagatgaatgagggtaaatccgtcatttcgcaagaacaaaagtacctatttctataagtcattacgcaaatgcctgtttgtataagtttcttattttttagggttattcagacaattaattctatttttattaataatgctttaaaactttttttgctcgggaaaatagttgcccactactgtatttcttgacctttttcccaaacca

SEQ ID NO: 105339 - DNA, 280 bp, Arabidopsis thaliana columbia
  unsure (1)..(280): unsure at all n locations
gatgcaacctgcataccatacactgagatcgttgagattcttatgttttnnnnnnnnnnnnnntcttgtggccgacaatgaactgaatcttgcgagaggatggaatcggccggtcttcataactgctgactatgtacactctgtacggctctacacgagtggcacctacactgatagtcactgactcagtgctaccatggatcagaactacaccctgtcagcctctgtttaactagttgccaatagcagaccatatctgtgtattaaaagctctttgtga

SEQ ID NO: 105340 - DNA, 362 bp, Arabidopsis thaliana columbia
  unsure (1)..(362): unsure at all n locations
ggaatatcgaggtcaaccctgctgagattactgatagccattttttnnnnnnnnnnnnnnnaatcgatttaagggaccttatcaggtactgaggtcacacattatacatccctacaagagcttggatgtggagacccgcacctgtcctacatggcagcggacatggctggactatatgctacatgtggtcctacgagggcatttacgatcctggttggggctacgcgttcaagccctgtcttgtttgggtgcacagcgtgaacattgtataccttgaccatgttgactgtgtcatgcttcactgcccctaggatcgatcttcagcgacatacgatagcgctttatatagacaccatgaacgc

SEQ ID NO: 105341 - DNA, 399 bp, Arabidopsis thaliana columbia
  unsure (1)..(399): unsure at all n locations
cacaattcctcttatcaagtaagtaacaatgatataacaaatnnnnnnnnnnnnnnnnncatgatttgaaagctaataacgatactatagctaagattgtttgtatcacttgtgatatagaaagtagcgatagatggcgctaaagaaaagacaagtgaagccatcctaaaaaacctcgatctcgaactcctgaaccgtaattctgatgcaaatatcctaagaattgcggattttggttgttctattggacccaacacgttcgaagtagtccaaaatattatcgatacggtgaaacagaaaaccctaaaagaaaacaatgcctatattggtgctcctctcgagttccaagtttgctttaatgatcaaccaaacaatgattttaacacactttttagaacc

SEQ ID NO: 105342 - DNA, 406 bp, Arabidopsis thaliana columbia
tgatgacattcagtctgttgaggaagtaggacatgagatacagccggagggggaattgctggaggatactcaaccagttgaggaaggtgctcaggaggcacaactggtggaggaaaaccatgatgatgttcagctagttgaggaagcaggacatgagacacatgcagtagaggggatactagaggacactcagccagttgaggaagtggcacaggaggcaaggccagtggagcaaattcccgaaaacagccaaaacccacaagagtattctcgtgaaggtgaatctgtacaagaagagcagcaatcagagcaacatcctcaatcacatgcaatgccacatgaagaggaagcacaacatgattctcagtcacatgcaatgccacaagaagaagccacatttacaatc

SEQ ID NO: 105343 - DNA, 382 bp, Arabidopsis thaliana columbia
caaaaacgccaaagtgatctgcaatggagatttagtgttgtactttatgtccacaagctttgatgatgtgaactagtaacttgtctccggttatgcttctgactcgttggattagttcgctccgtgtaattctcctattctgttaaatccaaaggaaagcaacaattagaatgtgaaatgaaatcacctcaaaagataattgaagaggaaacaaacaaaaaaaaacacttacttgttgatctttgtaatgtttctgaatgacaagtatttgagaaggggggtagaaacttggacaatgctttgatcaatacaggaaatgccatccatggtgatctcaatctctttggacttcctgcaaaaccagttataactatgtcaaaaa

SEQ ID NO: 105344 - DNA, 183 bp, Arabidopsis thaliana columbia
  unsure (1)..(183): unsure at all n locations
aatnggagggtcgacccaggcgtacgctaaatacaacatagccaaagtctgactctttaatatgcgaaaggccttgatgaaacaccggggggaaaacatggagctcttatccataaaccgcattcaatctccttgtctagcaagcgctctgcggactttaaaaacttagctaactgtaacatc

SEQ ID NO: 105345 - DNA, 274 bp, Arabidopsis thaliana columbia
  unsure (1)..(274): unsure at all n locations
aaaatntgaaaatcctcaaacgcanagatctctagcagataaaagagataaacacttatatctgaagagtcagcgagagaggaccttaattccagatctaatgccgatataaaaaaactcgacctataataaatcaggaaggtaaaaactgggttagttcttaggagaaccctaatcaaaaacccttaataaatttcgatttagcgcagcaatgactcgacacgcttccattaagcatttgtggaaggcgatcttaaaggctgcgcaacgattt

SEQ ID NO: 105346 - DNA, 191 bp, Arabidopsis thaliana columbia
  unsure (1)..(191): unsure at all n locations
atcgtctaactcaactaagcggattaactgtgtgttttttntntataacaagtacgcgtggaatcccttggggagtcttgattgttgctcattttactatcgtgcacatccttccttctttggctaataagattcaataggtctatctatcccagtagctgcctattcatattatgcatattctatttatt

SEQ ID NO: 105347 - DNA, 419 bp, Arabidopsis thaliana columbia
agagagaggacagtcgcatcctgcggccgcctaaacagaagatcacagattcggatgagcttgccgagtacagactccgacgtcggaaggagtttgaggacaagatccgcggcgcaaaaacgaactcacaagtttgggtgaggtatgctgattgggaagagtctcagaaggatcacgatcgtgctcggagcgtgtgggaacgagctttggaagacgagagttacaggaaccatacgctctggctcaagtacgcagagttcgagatgaggaacaaagacgtcaaccatgcgaggaacgtttgggatcgagccgtgaagattctacctcgcgtggaccagttttggtataagtatattcacatggaggagatacttggtaatatcgacggagctagaaagatttttgaacggtggatggat

SEQ ID NO: 105348 - DNA, 293 bp, Arabidopsis thaliana columbia
aacgagcacacagaaactgcttaagctcagcagtctactaggtgcaaccttcggggggctcctcgtccattaactggtgccttgcgaggcactcacttggggttgcttctaactgcagaacgagcgtgccctgggacaacctaggtgttctggaggccaccgaaactataaagagtgaagccgttcagatcgagtactgggaccacaaccactcatagatgcgatgtgttggcgattccaacggtcgatgagttatagcgcatggcaagatgctcttggccatctattgaact

SEQ ID NO: 105349 - DNA, 417 bp, Arabidopsis thaliana columbia
cggacgcgtgggtgccacttctgatttaccctttctctgcttttttctctcactctctcagttttctcctccttgattcctaaagtcttctcctttgcgtgcatttcttcaatttcagattcttcctaaggtggtagaatgatgaaatgagaatcgatagataagagtttaaagagcaccagaatctttgttatcttgcaatgtcgacgacgtctttgcaaacgattggtgctattaagtcttatcatcatcaagctcagcatttggttaagaattatctcttagctgatccttttattccttacacttctgtcctcaccggcattttcctttgcaaagtggtttatgatctttgtcattttatcagcaactcacattctaagacttatatcatcctcacgaaaattcaaagaatcg

SEQ ID NO: 105350 - DNA, 369 bp, Arabidopsis thaliana columbia
aaatcatacacacatagcaaaaaatggtatacattttgtttctcgtctgctcacctctcggtgtgtgttttctcctaaccaacgcttccatttaccgcaccgtcgttgtgatctaataatatgacaccactaaccccatatgcccagaaattatgaaatagcccatggagtttcataaagaacaacatctaagagcttgccagtattgatgcttcatcacgcaaggcacggccgtatttattagtttgatttctaagactacttgtaaaacccacatggtcaacagcaggagcatcattttttcctatattgctgctacaagctttattaggatgagccagattgtgtttgccccaccttgtaactagc

SEQ ID NO: 105351 - DNA, 367 bp, Arabidopsis thaliana columbia
caacactgctcacagacatggcgtcaaagtattggggactttcatcacagaatgggacgaaggaaaagctacctgcaaagagttgttggccacaaaggaatctgcgcagatgtatgcagagcgtttggctgaacttgctgctgctcttggctttgatggctggctgataaatatagagaatgtaatagatgaaattcaaattccaaatttgatggtttttgtaagccatctaacaaaagttatgcattcatttgtacctggaggcttagttatatggtatgatagagtcactattcgatggtcatcttgcttggcatgatcagctaaccttataataattaacctttctttgatttatgctatggta

SEQ ID NO: 105352 - DNA, 224 bp, Arabidopsis thaliana columbia
gtcggcttgatcaaactaaagcgcttggaccatccgcaaatattaaaaaccaggggggtcggattcaggtctgggaccaccatgcaccccaactccgttgcttcggctttggctatgagcgtttcgtcattgagcctcaaggtctttactttgcccacttttcttgaaacgccgtgcaaacatcacgttttggtggttcaacgggaagggggtcttaaatgggg

SEQ ID NO: 105353 - DNA, 207 bp, Arabidopsis thaliana columbia
  unsure (1)..(207): unsure at all n locations
aacggaaggncggcccagacccacccgtacgggaagatgctcatcatttgccttgctgttaccttctaagttcatatcgagcatcacggcagcactcgcgtggagagtaacatcccataccccacacatccacatgccgagagtagcctttgccccctctatgtttctcatacctcagaatcgttcaagagtaatgccttatcacaa

SEQ ID NO: 105354 - DNA, 386 bp, Arabidopsis thaliana columbia
ctcacttcccttctccaacctttaaacatttctctcaaaatggagtcgtacactttatccacctcttccatctcctacgccaaacctctttcaccgctcctcctcacggcggagcaaccttccttcatcctccgcaacatcactctcacctctcatccttcccaaatcctcgccattattggccctagcggcgccggaaaatcaactctccttgatatccttgccgcaagaacctccccgacctcaggctcaatacttctaaactccgtccttattaacccttcttcttaccgtaaaatctcctcctacgttcctcaacacgacaccttcttccctctcctcaccgtctccgagaccttcactttctccgcctctctcttgctccc

SEQ ID NO: 105355 - DNA, 291 bp, Arabidopsis thaliana columbia
ggaagttacgtctttcgagcaaaactattgaaatctaaatgtagattgagaaacaggccaacaagctttttagaataaatcccataccacacaatcacaaatgcggagattcgtgaatggccaagctaaaaatttcatagatcagaggcggcgttgtcaactggatcatcacaaaaaactaacctgtgcctctcttattccttcgtttcttgttcctgtccgatctgcatcttgccacttgtcttacttcttattcttcttctgaaatgtctgcttatgactttctttatc

SEQ ID NO: 105356 - DNA, 379 bp, Arabidopsis thaliana columbia
aatataaatagtgagcgcataacatcttctagacatgagactaacactctcgatcctgtttcatggttacgcggtttatcaggcgaaggatggtgatatggaccaaaacaagaaggagatcggccagctcaatgcgctcgagccttcaaacgtactgaggagcgaggctggtgcactaccagcgtggaagaaccacgctattaaggcggggagttcaaatgactgctgggctcagagcatcatgaggtctaagggtttctacttgcgatacattattaacaccgcgaagctgtccatcgttgctaaaggacgaggtcgtattgtaaaagggatcctttaatgcgccgaaacatgaacagacttatgagagatctaacca

SEQ ID NO: 105357 - DNA, 265 bp, Arabidopsis thaliana columbia
aatcatacacacatagcaaaaaatggcaaacatgtttgtcctcgtctgcgcagctctcgctgtgtgcttcctcctcaccaacgcttccatctaccgcaccgttgttgagttcgaagaagatgacgccactaaccccatatgcccaaaaatgaggaaatgccgccaggggtttccgatagaacgacacctaaaagcttgccagcaattgatgctccagctaagcatggctaggccgtatcgatgagtttgatttcgaagactacat

SEQ ID NO: 105358 - DNA, 327 bp, Arabidopsis thaliana columbia
aacaaacacaaactgaggctaaggctgttaacatgaacgccacaaacatagaagctcgtgtcgcgattggggcgcacagggcctatgtcacgcattggaaagtgaagtatatgtgcatgagcaccttcttagcggactatattgcagaggctacatccatagggattagggaccattttatggcatgtggcccaatttacaacaccactactagagctagctatgctgacgcctttaacactcacaagggtacagggtcgaggagactctatagtgcctgcagattcaccagaacactagctactgtgatcggtctgacgggtacaa

SEQ ID NO: 105359 - DNA, 323 bp, Arabidopsis thaliana columbia
ctcttctaacatcggtcttgtattggtgcttattggatatctccggcgaaagaaacgagtttcgcggttagattttctttatcgcttactggcgaggaggatgatcgtttcttcggtaaggtcgattaatcggttctgttttcgaagatgttgttgttagagttagatccgcatggttttggtgatcgttttggatcgaagacgtggttccacagacgcaaaaaatgccgccgtctcttgctttgagatttgtcttctgaaatctctcctctttactctttcgtgctcgttgaatcctaaaatctttgtttttttttagaaat

SEQ ID NO: 105360 - DNA, 235 bp, Arabidopsis thaliana columbia
acgcgtacgcatacacagatcgcagatcgtggctaccaagctcttactcgtctgtgcaacgctggcccgctgtttgctcctgaccaacgcttccatgtaccgcaccgttgctgcagtcctagaacatgactccagcgtccctgtaagttcatgacagagatgccagtaggagtctaagcaatcacaacgcctaggaggttgccggaggtggattagccagcaaatgatgcaagga

SEQ ID NO: 105361 - DNA, 282 bp, Arabidopsis thaliana columbia
aaaaaatcgaactcagattgagaagcctaaccaaattaccaatatatgtcttgtagtaaagtactttgaaccagaaaattcggtaatgaacacaaattttaactactgttctagaaccagacttttgcgtaactgcgaatttatactaatatctcctatgaaaactagatcagtacaaggagtggatagtaaaagaagcgtacatgcccattttatacttttattattaaccacgataattactaattacttggaaaaagatacattgagggctctgtattt

SEQ ID NO: 105362 - DNA, 343 bp, Arabidopsis thaliana columbia
cacgcgaaaacatacacaaatagcaaaacatgcctgacaggctcttcctcggctgcgcaactctcgccctctgcttcctcttgaccaacactgacatctaccgcaccgatgccaaattcgaagaagatgactccagtaaccccgtaggtccaagacagagatgccagaaggagtttcagcattcacaagaactgctgcctcgagctacatcagggagagcgagtatgaggtagggccaccttggaacaagttgcctgggcagttagcctgcatggacaggacggcacattggaatccaggtaattcaaccaggctgctacgagcttggccaacaatagccaga

SEQ ID NO: 105363 - DNA, 306 bp, Arabidopsis thaliana columbia
taaaaaatgaatctaagaccgtttatcgtgttaagagctcgaattcagacactgaagatctgcaaaggtttgtggatcagcgcctagagagcaatgaaaattcagatggtgtcgttgcttcgcctcctttacccacaaaagtcattaaggaaaatattttggatgatagtgactctggagaagtgaaggatataaagactgatgttaaatcaaaggctgattgttcatttgacttatcaaaaagagtagcatgctcaattgctaaccgaatgctcagtatgtatgtaaacggtagattttgtgtct

SEQ ID NO: 105364 - DNA, 319 bp, Arabidopsis thaliana columbia
tgttattcggaatccaaagaaagccatagatattgagatttacagtgaaaatctacagaggaagagatagcgaaggacaattattaatttattttcctattttagttttcattacaaccttaatcttcgtgttgtgtgttctgtaacttcccagattttttctttctctttgctgggcttcagtgccttttcccctttttttctctttcctctgctctcgattcagtttagggcgagaaaaagttgctgtttttacagggtttattacaaagatcctttctttgttacttgaagctttgtcatttttttttagggtttt

SEQ ID NO: 105365 - DNA, 411 bp, Arabidopsis thaliana columbia
atgattcaagctcttcaagccaaactcaagaacggctggtcgaatgatgttccgtcgtggaagtcatgtcactttcaccaaaaggcctgtccaaatctgtatgcttctgaaagcattgatctcgcctgcaagtatgcttacaggaacgctactccggggactactttaggagatgagtatttcctttctcggttacccgttgtagagaagagacttgcacaaggtgggattcgcttggcagctactcttaatcgtatcttttctgcaaaaccgaagctcgcaggattatgaatctaagaaaaagatccttgagaacccacgtaacaactctttttaagtgttttttataacactgtgaatggttgagtcatgactaatgagtgaacctccaaaatctttatgcaaaaattt

SEQ ID NO: 105366 - DNA, 416 bp, Arabidopsis thaliana columbia
ttaatttccccttactcaagaattttcatttttcttttaacttatattttttaattatattttatctatttgactagataaaatccacttaaataggcgggcgtaagaaataaataaaaaatttcttataatatttgaattctaatagtaatccaaacttttttcattttatctaaatattcttaaaccaaattttaatcttatccattccattttgcagtaaaatttaattatttacgtcatgacaacaaactgaattttaattctatatattttatcttaatggataagagcctcaaaaaaattaattctacatattccatcttcttgtttttattttttatgatatttaaattctaaatagtaacccacacagtttttcaatatttagtgttcttaatgttatctcaatttat

SEQ ID NO: 105367 - DNA, 417 bp, Arabidopsis thaliana columbia
aaaaaaagctctctctctctctcccatcccatcacaatctctccatctccatcttcatctcccatctatgtctcttgtataaagataatcccacaagtcttaaaactattcctttctcttcctctctctctctctcttcaccatgactgatccttattccaatttcttcacagactggttcaagtctaatccttttcaccattaccctaattcctccactaacccctctcctcatcctcttcctcctgttactcctccctcttccttcttcttcttccctcaatccggagacctccgccgtccaccgccgtcaccaactcctcctccttctcctcctctccgagaagccctccctctcctcagccttagccccgccaacaaacaacaagaccaccatcacaaccatgaccaccttat

SEQ ID NO: 105368 - DNA, 298 bp, Arabidopsis thaliana columbia
cttcccttagagatcaaagctgaaaatgactttgataaattcttcaatttcagctttgatctctaagggaagagttgcgacaagaggtgcacatatttcaggtgtcagggaagcacctgttggtaaaaatattgtcttgaccttgtcccagttctcctcgatctcaattccttcacactcagaaaagcttaaattgaagaatttatcaaagtcattttcaccctattccaagatcttgttttcactttctttggtatgaaatcttttcactcttttcgttggaagtccatatttcttt

SEQ ID NO: 105369 - DNA, 367 bp, Arabidopsis thaliana columbia
tgaaaatttcacgaaccctagttaataacgataatgggttcgagagttttggctgtggttctttgttttcttaatcttcacggtcatcacattgcctcccacgatccaagcttgcactccttgtactcgtcctcatcctccggttccgaaacctccacaacacggcggtggtggaggtggtggtagcaagccgactccacatcacggtggaaaaggtggtgggcaacccccacccgacggctgaaatggcggtggaccgccacatcatggtggaggccgctgtctttagcccacctgcccttgcttacgttgaccaacgagaaggagttatggggacgattgcttatgggtgccctgagacttttgc

SEQ ID NO: 105370 - DNA, 419 bp, Arabidopsis thaliana columbia
atagaaaatggttaatcttaccaattttctcgacccaaccaacgggagcatccggggtcttttcggctgagtggcgaggctgctattaggcgcgcctcaatatttactgatcgagacacacctccgcatcttatttgtcgtcgaagcgaacgtaactatgactagcgacgtcgcgcataacgagtcatgacaccaccaccacactcaaagtacgtgaagctatggtgtggaaggttcgaatagagtgtcactgagaaagtcgagaagtgcactgagtcaatatcatttgataaggtgctatacaagcagagacattatgggttgcaaagctcatgcttcaatgcttgctcaccaggggctaataactgatagcgataaagattgcattttgagaggtcttgatgatattgagagacaaa

SEQ ID NO: 105371 - DNA, 224 bp, Arabidopsis thaliana columbia
ctaaacgcaaccttcacaactgggcgggtgcttaacgggtggggtgcgaggcagtcacttgtggttactgctcaggtacagaacgagtgtaacctatacaacctagatgatctccacgctaccgaaactatcaagagtgaagccggtctgatcgagtactgagaccacaaccacccttagctgcgatgtgttggcgcgtcctgtgatcgaaaaagaagagaaca

SEQ ID NO: 105372 - DNA, 375 bp, Arabidopsis thaliana columbia
gaaaacatacacaaatagcaaaacatggtttacaagctcttcctcgtctgcgcaactctcgccctctgcttcctcctcaccaacgcttccatctaccgcaccgttgtcgaattcgaagaagatgacgccagcaaccccgtaggtccaagacagagatgccagaaggagtttcagcaatcacaacacctaagagcttgccagagatggatgagcaagcaaatgaggcaaggacgtggtggtggtccttccctcgacgatgagttcgatttcgagggcccccagcagggataccagctactccagcagtgctgcaacgagcttcgccaggaagagccagtttgcgtttgccccaccttgaaacaagctgccagggca

SEQ ID NO: 105373 - DNA, 197 bp, Arabidopsis thaliana columbia
  unsure (1)..(197): unsure at all n locations
ttaccaaccaaaagttaatatcactcttctccacactgctcaacaacaaacatcggggttatcttaacactagctgggtatattgcnacttatacacctagcaatcttccttatccacctcacaactacaactagaacattctattttttctacaacattccgcacctattatttatctttatctttaaacaacgac

SEQ ID NO: 105374 - DNA, 447 bp, Arabidopsis thaliana columbia
ggaaaaaccgggtcggcccaccccttcggcaaaccaggaaaccttccccaattggcaaaccttggttaacaagtttttcctggtttgggcaactttcgccctctgtttcctcctcaccaacgcttccatctaccgcaccgttgtcgaattcgaagaagatgacgccagcaaccccgtaggtccaagacagagatgccagaaggagtttcagcaatcacaacacctaagagcttgccagagatggatgagcaagcaaatgaggcaaggacgtggtggtggtccttccctcgacgatgagttcgatttcgagggcccccagcagggataccagctactccagcagtgctgcaacgagcttcgccaggaagagccagtttgcgtttgccccaccttgaaacaagctgccagggcagttagcctccagggacagcacggaccattccaatc

SEQ ID NO: 105375 - DNA, 331 bp, Arabidopsis thaliana columbia
gctcatgaccgtgacacatgttatatgtaacgacgttaaaacatacactctatgtttttctcataacatgggcgacgcatgagatcaatcactagtgaagatgtgatatacaacacgaaaccatctaccaaagccgaactgaaccgcacacataaggcaactcattcgtcctgtaacagactatcacaaccactttgtctgtttactgaaccatcaagaccaacaaaacttgcacagcagtgacgtaactcacgtcataaacgctgtatagcaagaagtctcataggatgatcaatacgttgacaactaacaagactgcaacggaaacatc

SEQ ID NO: 105376 - DNA, 359 bp, Arabidopsis thaliana columbia
tttacaccaacacattttcaacgtttttatttggcctgcacaaaacaacatgagcggtcacctgaacaagggctgtgttctaccacaccttaggcgccaaggccgtaacgacaacccacacaacatgtgaaaccaacagaagcagacgggtcacattgaggaaaactgacaccaagccaaatgccccatcaagcaccacatgaaccggatctaaccgatccaagtactaacttacatactctcacgaatcaccaatctaccttaccgaacagttctcttgagactacggatgggacaccgcacaactttcagctgaccccgagacattcgcaaggaaccgagagcctagagttatccac

SEQ ID NO: 105377 - DNA, 417 bp, Arabidopsis thaliana columbia
catgattcaagcatcattgtcttcttcttttttaactcaaatcattgtctttttaacgtgttttaaactattaaatccaaaactcgaattaaagacaagaaaataaaaattgtaagctatgtcacaaatcaactctataaaaattgatttgataaaatgatttatactccttttttgacaataacatttaacgtttgattttagagtacaatattaataatatttattttttaactaccgccttttatttgataataaagctgtccgtgtaccgtatgtgtacgtattggttagtgtgcatgtacgtatgcaaatataatatacgttaaaagttttaagagtgttgaaagatacaagaggcgacaatcttgttctttcagatgcattctggttttttgacgatttatgttaattgct

SEQ ID NO: 105378 - DNA, 443 bp, Arabidopsis thaliana columbia
accgggggcggccaagctggaataggaagaccaaaaagagagagatagccttacttctaccaagactttctcaaggcgtggtttcaattgttgcagtggtgatgctccaccacaataatctgttcctaatccaagatgaactcagcatctgataaaagaaaccagacttttctctctgctgctgtgagttcagaggaggctctgcaagtagcattgggtgctccgtgggatcaatcattagacaattccttgaataataaacatttacacagatgaaatcatgaatcaactataaatggaaacgatgaagattaaacagttgaagacataaactaacagattatgcaaattacctaaaagcatgatcccatacattgtgcaccatatcccaatcagttacaatgccattctttgtaggtgacaatatctggaacagacaaatg

SEQ ID NO: 105379 - DNA, 288 bp, Arabidopsis thaliana columbia
ttctctctgaaaatctcttctactttctcaaaaaccgatactctcttcttcaatgtccgtctcttatctctccaagctaattctacaaaccggcttttctcaaaccctaacgtacggattagggattttgatcgtcgattccaaaggatacgactatgaatttctacaccaaacactatgtaaaggcgacgctgaatgagaaaggcgaaaagacttgtcctgtatgtactgaggagatggacttgactgctcaacatcttacaccttgcaactgcggttatcacatct

SEQ ID NO: 105380 - DNA, 263 bp, Arabidopsis thaliana columbia
gtatctctaagacttcgtggagcaatgaagagcctatgcatcgcccatgtcttgggatgggatgttgtgggagcaaaatggggaacagaggtttttcagaccgcatggtttcacttcataacttgctttctataccgaatcggatcattgggcacgtactgaacagcaatgcttgcattttaactcaacagcgacacaaggttattcatcagcacgcaatgattgtgtctgaagattttatctcgaatgatgctaccttttcc

SEQ ID NO: 105381 - DNA, 384 bp, Arabidopsis thaliana columbia
tgatcccactcgtcttaaattacagtacaagtcctagtaaaaccgaacatttttgaaatccaaagagtataagaattgggacagaataaaacatatatataaccaaaaacctgtaattagttggaacatcaatcatgttccctgctaggattgggtaaattttgtctgtaattagtaaaaataaatctccgttgccgggactcgaacccgggtctctcgggtgagagccgagtatcctgaccagctagactacaacggatttgtaataaataatattaattagtcaatatgttagtaacaccaaattttttgaaaaaaaaagaaagaaaagaaaacattaaacaaggagaagatataacatccaaatcgtaaaggaaaacaaca

SEQ ID NO: 105382 - DNA, 383 bp, Arabidopsis thaliana columbia
gcttctttctctttcctctctgattttttttctttctctatatacctcattcgtgggggatataaagagtgcgggggttgggacagaataaaacatatatataaccaaaaacctgtaatgagcgggaacatcactcatgttccctcctaggatagggtaaattttgtctggaattactaaaaataaatcttcgttgccgggactcgaacccggatctatcgggtgagagccgagtatgctgaccagctagactacaacggatctgcaataaatgatattaatcaggcaatatgtgagtaacaccaaatttttcgaaaaagaaagaaagaaacgaaaacattaaacacgagaagaaataacatccaaatcgtaaaggaaaacaa

SEQ ID NO: 105383 - DNA, 242 bp, Arabidopsis thaliana columbia
gactttggctatcattcttgcgttttttttattattatccgattactcgattggcgtacttgaaccgattgatgactttacgtaaattaaaccttacctcgtatgagatccagatccgatagatactgttcggatgcttaatgctgcggcattgaaccacctaccaaatatgatcatacagataattatccatctgtgttcttctgcttgttatggtcacgagcctggctctcagacctaat

SEQ ID NO: 105384 - DNA, 220 bp, Arabidopsis thaliana columbia
agagaagcttaggttaaaaaaaaaaaacgggaccttaaaatctccacaggaattttttatccttgaaaggggtatgacacccatcctgttttttggatttagacggaatcttcttgattctgtcaggcactttatgaattcagaaaacgacggagttcgcctccgccaggcgtttactgatgcttggttctccatgataaagccttttctatacatactc

SEQ ID NO: 105385 - DNA, 388 bp, Arabidopsis thaliana columbia
gcaagatctggaggaaacgacggacatagagccggcgacaatcggctctcgaagaggcaacgacttcctccttctcccgatgaatctgaagaggaattagacccagagttgttcgaagagccaagtaatttagaaggatacgaagatggagaattcgaagaagatgaagaagaattcgaagaagaagaagaagaattagaagaggaagaagacgaagaagaagaagaagaagaaaacgttactactgatgaacaatctggaagtcctaaatcatcccaaccggtgaagcttcagagctcagatgttctcgattgtcctacttgttgtgaaccactcaagagaccaatctatcagtgtagtaatgggcatctagcttgttcggcatgct

SEQ ID NO: 105386 - DNA, 151 bp, Arabidopsis thaliana columbia
attcggaaatataagatataacaaaatggcttttgtcttttttctacgggctttcttcttaacactattgatcctttctacagggttactctagttcatcagggttatgtagggtcagctagattcgaacgagttccagctcgtccagctc

SEQ ID NO: 105387 - DNA, 404 bp, Arabidopsis thaliana columbia
ctctttctctcttcgaccagtttcttccttcaacttacgtttccgccattttcttgtacgatgatcactcaaaccaagaagacatccagaggctcaaaagctcactctctcagactctgtctctcttttatccactcgctggacaaatcaaagatggagtcactgtccattgcaacgatgagggagctttgtttacagaggaacgggctgatatatttctctcggattttctgagaaccccatcagatgctgatttgattcaaaagttcattgtctctccggaccatgcagatccagaaacatggccgttgttgcacgtcaaggtcatcttctttaaagacaaaggatttgcggttgcagttagcgtgtcgcacaagatatgcgatgcggcctcgttgtcaacg

SEQ ID NO: 105388 - DNA, 412 bp, Arabidopsis thaliana columbia
  unsure (1)..(412): unsure at all n locations
cagatagtgattatgtaagagtgaaaccagtatttaagtacccgaaaccagaacggagaccagcgacccagtcttccttgtaacacaaggctcttcctctaagatctgctactatacctctgaatagcctcttcgagctatccactctttcttcctccatatccagaatccctcaaagactccagaactcgtcgcctctggtctactctttatatgacctaaaccacaaaaacaggaagctatatattatgtatgacatctagcaatgactntaaatctagcattttgctgactacatttaatacaaaataatcttcatattatatttttctaaatttgtgacgattccagtctttttccacctctcaatagaaaaagaagcttatagctgntttatcttttggtacttact

SEQ ID NO: 105389 - DNA, 148 bp, Arabidopsis thaliana columbia
atatgtaagagtgaaaccagtatttaagttctctaaaccagaacggataccatctaccggagtctttttgtaacacatggctcttcctctaatatctgctactatacctcttgaatagcactcttctgagcttatccacttcatttct

SEQ ID NO: 105390 - DNA, 154 bp, Arabidopsis thaliana columbia
tcggaaaaacttgtggtgcggattccacgcacaggtcatagctcaagcattgaaaatggtcgttctgttgacttagcagctccagaacctacttgacatcatatgtaacatcttcttgtgtcacggtacctatccaggtattgtggccaccttt

SEQ ID NO: 105391 - DNA, 227 bp, Arabidopsis thaliana columbia
gtggaacatgtgagacgcggagacgatttttccaacactccatgttgtgcccactggagctacaaacggggggatcgggcggtagtcattatcgctcttttcgacattgccaaccaccaaaaccaacttcaccgcatccctagagcgtgccatctgaccgtttacaacctaaatcgaggctatcgagtgctgttgccacaacttctccaagttactatgtgttgctg

SEQ ID NO: 105392 - DNA, 306 bp, Arabidopsis thaliana columbia
cagacagccaagtacttgcccaacgtttgcgacgttctcctcgtccataacggttcgtctagcatgccttcattcccttctttctacctcagctacagcacgcgcttaacgcgtatgacatagatgttgtccaagcctccaaaactatcatgggtgcataccgccccatctagtactgggaccacaaccaccctcagctccgatgtgttggggttaccgttgctctatatgaaaaagaacaaggcggtttttactagcccaccttcttcactgtcccaaaaatttcctacgtcgtccaaggatacg

SEQ ID NO: 105393 - DNA, 316 bp, Arabidopsis thaliana columbia
aaagaaaatggttaagctcagcaatctcctcgttgcaaccttcggggttctcctcgtccttaacggctgccttgcgaggcagtcacttggggttcctcctcagctacagaacgagtgtaacctcgacaacctagatgttctccaagccaccgaaactatcaagagtgaagccggtcagatcgagtactgggaccacaaccaccctcagctccgatgtgttggtgtttccgttgctcgttatgtaattgaacaaggcggtctttacttgcccaccttcttcactgtcccaaaaattatctacgtcgtccaaggaacg

SEQ ID NO: 105394 - DNA, 191 bp, Arabidopsis thaliana columbia
agagcgaggagtttttacacccacgtattccacattccaacgcggggtgatgagactatggggaggatgaggacccactagaacatacaccacctttgcttgtgctgtcgagttcaagcccattctaggttgtgagaccagcgataacagacttaccttgcctatataggatgatgtcatgcttaatgcct

SEQ ID NO: 105395 - DNA, 409 bp, Arabidopsis thaliana columbia
gtcccgtgaagaaaagggttgaacgagacagagatgatccgagctttgtgataacaacttacgagggttcccacaatcactcaagcatgaactaagactcgaactaaggctcaaggagaccatgctatattcagcacatcttattttctatggttacaaacgatacttaaaactgcttctagttctttatattcattgtaaactggttgcaggttcacaaattttgagaggtttatgacattctaaatctgtagtacttctatagcatcttattttgctacaagtgagaatcgatggacgtaacagtccagagaacctcatatcatatcataaactagcaatcttagaatatcaatgcaaatctaagcagataattaccagaacaattcccaaaccactaatgaacaca

SEQ ID NO: 105396 - DNA, 210 bp, Arabidopsis thaliana columbia
caaaaagaaaatggttaagctcagcaatctcctcgttgcaaccttccgggttctcctcgtccttaacggctgacttgcgaggcagccacttggaggatccacgcagacacacaccgagatgcaacttgataacctatatatagtgtcagctaacgacaatatactgagcgaagccttacaacgcgaggactgggaccaccaccacgctaa

SEQ ID NO: 105397 - DNA, 253 bp, Arabidopsis thaliana columbia
gtgtcataaaaaaaaatcgaaaggctttggatcatagaacagttaccatttcaactggcgattgacagagagtgttaggaaggttattatatggctagatacacttatacgttataacatttatcgagagtatgatgtggccactctgatctgtggtatggtaattgtcacatagcacgcacttgcttgttggagagagatcagacattcagacattggatgttaagtttacttgaaatgtcatttgcattat

SEQ ID NO: 105398 - DNA, 206 bp, Arabidopsis thaliana columbia
aaaatacttacgagtggatattatattaaattcgagattttctaatcaaagtatacaaacgcataaacctatctctacatgtaaaaaagagggggagccatttagaggatccaagcttatgcacaccgggagtcaacttgataacctatatgttgtgcaagccaacgaaaatatcaagagcgaagccgtacaaatcgagtactggg

SEQ ID NO: 105399 - DNA, 225 bp, Arabidopsis thaliana columbia
  unsure (1)..(225): unsure at all n locations
gggggacccacgcgnccgcggacgcgtgggcggacgcgtgggaagagattgaagacgaaacaggagaaagatggaaaattgaaagctgataataacaataacaatgttgatgcgttttctgatgctggatggactatgagagttaggtccgtcttctgagatctctgagaagagaatctattgggaagaatcgagttatgattatggagtgtttgtgaaggaatt

SEQ ID NO: 105400 - DNA, 236 bp, Arabidopsis thaliana columbia
aaagcaaactactatttatccagacactatttcacagttctacgcggggctcatggtctgaggaggtgagccgttaaacaacactacatagtcacgtattggtttcatgtgactagatgctacacgcctcagacagacattctcgcatggatatgtgccctacgtttttgcttaagcttggaagaccgatcataatacagtgtagcaactttacaaccaataggacttccgtggaa

SEQ ID NO: 105401 - DNA, 215 bp, Arabidopsis thaliana columbia
gacccacgcgttcggtcctttgagaatacttcttttttagcaatgctctgttcatatgaaaaggggcgatctatgtgaagagcctgtatagactaaacactaatacagatgcttgttcgcaatttaaactaatcagtctagggaagataccatcatttgaaccaagcgcttttgctgcctaacgtattaccaatgggtgcttcatcacatcttta

SEQ ID NO: 105402 - DNA, 422 bp, Arabidopsis thaliana columbia
agttagttaaagaaagaaaaaaacctttgaattgtgaattgaatacaacaaaacaatgcacgcattacaaatatttagtcttttttattatttttatttgttgttctttttaattgatccaatccaatccaaaactattgttctttttcttgtttctgcaaattaattccttaaaatgaaacaaaaagtaaaaggggggatcacattatcataaaaaaatctattctacaattatgcatatgcaatgaaaatgaaatttataaatttttcattcaattaacttgggaccatatgaaaatttgcttcatgaattattagaattagaaaccaacttcttggattttcattttatctaatctttagtttattttctagtccaaaacgaataaaggatcaaagcccctatagattacagtaatttg

SEQ ID NO: 105403 - DNA, 417 bp, Arabidopsis thaliana columbia
gaaatattaagcataaatattatcattcatgtgaatgtcaaagcatccaaattgtattcagtactacattcacatcgttaaacatatcttctaaaattaatacccggataaccaacaatctaactaacaagatacactttaaaaattggatatgttgaaaacaaaaatgctacaatcaatcaacaaaaccgtataaccagtttgagaatgtattacgaatttttctttttttataaagaagaattattttgttattcctatttatcatgtaaaaatataagttatttaaagaaattgagcttagtattaagaattgcgtatgtcaatattttgatattttttaagtcgcatattttacattatggggaagaatgttcttttatttgcagtgaacgtcttcatttagcactttacgca

SEQ ID NO: 105404 - DNA, 247 bp, Arabidopsis thaliana columbia
agacaataacaaacctttagttgtagttcgttcctttatttgctgtcggtattactcttttaagtctttttgtgttttactcttcagatttatgctggggctgactttattcttgtaccgtcgatatttgagccatgtggactgacacagcttatagtcatgagatacggcgctgttcctgttgtttgaaatactggaggtaactgttcatgagtttggttagatatctaagcttttcttattttat

SEQ ID NO: 105405 - DNA, 170 bp, Arabidopsis thaliana columbia
  unsure (1)..(170): unsure at all n locations
aagaaagaagttgagctcacttancaatttgctggaagcaacctggtggggttcgctcttaattaacggctggctaggcaggcactcactggtggctccttacttacataccgagcgtgtgcatctacaaccatacctagatgttatgccagccaccctaactagagtga

SEQ ID NO: 105406 - DNA, 434 bp, Arabidopsis thaliana columbia
gttcaatgtttcatatttctcaaaatagatgatcgtgatagtaaggtgccctcgtaattcaatgaactcgttgtttgatccctcaaaaactatacattttaatcttttaagtatgtttgatccgctatcagttttagatagctatttttacataaatctcctacttcaaaaatttagaaacaatttttttttgtttttgctgcttagtagaatttttccgttattgcattggccacaccttcttctgcatatgtctcaacatatattggaaattttaacatttaattgtatttgaattttaacattaaatcaaaaaaccatattaacatataatcacgttcgtgagagtatctacaaaaattgaaatttagcaaattgatgattatttataggttgggatgagattaatatcttagaattaagaaattttctta

SEQ ID NO: 105407 - DNA, 274 bp, Arabidopsis thaliana columbia
agaggacaacaagtggcataagcatcatataagaactaaaggaatgagacactctgggagctgaaaaaaggaaacagtgtgcaacaggggacgaccaagagccagaacgataaaagagtgaacgcgaaccatcaaagaatacagagcgagggtggtcgataaggtacgggaccaacacgcacgcagcttcaagctacagtttgcgatgaggggcctgtattgagcctagggaattgttgacacgtctcaacgccgaaaactagcttagagaaac

SEQ ID NO: 105408 - DNA, 168 bp, Arabidopsis thaliana columbia
cgtatggacatcttagatgttgacaggtattgtccaaaggcagtatataagagcatagctctttaatcttacaagtaacccatatataaagatggcgactagggtggctgtttctattattatagcaattgaaagaatacaccgtgatattatgctaaatgtcattta

SEQ ID NO: 105409 - DNA, 389 bp, Arabidopsis thaliana columbia
gacggtaaaaatcaacagatttatattttctcagcttccaagtcatggacgaaacagatagggcaagtcgaaggcatatttttgctaacttcatgaagtactatcgtttccaaactttccattgcaagtttataagcactactaatttgagttctagtctccagaataggattgctagacttcaattgttttcggatgcgatgcacatcatccattagcaaggcaatgttatccttaagcgcggatgtacccatgacctattaacattcaagaaataacattaattatgatattaaacaaacgactttgtagccatgaaagagttaccaaatcgataagtttagtatgaatcgcagtaatattttgaattcagataatccccaattctc

SEQ ID NO: 105410 - DNA, 242 bp, Arabidopsis thaliana columbia
taccgcaataagaaaatggatcattttatatttctcctcgctgcaaccgtcggagttctcctcgtgcttaacgggtgacttgcgaggcaatcacttggggttcctactcctctacagaacgagtgtaacctcgacatcctatatgtttataaaacctctcgtaactatcaggagtgtagacgatcaactcgtgtacttggaccacttccaccctcagctccgaagggattggctgtttcctt

SEQ ID NO: 105411 - DNA, 372 bp, Arabidopsis thaliana columbia
ctttagtgtaatcattagcaacgcaaagaaatgcctaaacgacaggctcagcggcgtttcactcgcaagactgactcgaaaacaccatcccagcctctggtatcccgccgctctgcaaactatcaaccgcctctttggcagcacgaatatctcctctcgctcggtaatacatatgtgaaagaggacaacgtcgagagagttacgctattgaagcaggaagtgtgtaaaatgctcaatgaaacggaaggtttactcgaacagctagagctcatcgacacttttacaaaggcttggagttttttaccattttgtacaagaaatcaagaatacactaacgaatgtgcatgttaaaaaagtgctagcacacaaaaa

SEQ ID NO: 105412 - DNA, 410 bp, Arabidopsis thaliana columbia
atcatccccgacgacgtgatggaaacagaagcggtggttaataccgtcgccggcgtcgactgtttcgtctcactccctcgggaattactacacgcgcttcaatccaccagctcctgtgctctccctccgcttctccctgtcgagctacgctccggtgaccgccgttggtcagttgcttggtccggctctagctcctcctcttctgcgatcgaggtcgctcgagtgtttgcggaaagcatttcgttgccggatggtacagttgttaaagttcgcgttcttcctaatgtgcccaaggctactttagtaacagtcgagccagagactgaagatgactgggaagttcttgagctcaatgctgaacttgccgaggcagctatacttagtcaggtgaggatactacatgagaccat

SEQ ID NO: 105413 - DNA, 277 bp, Arabidopsis thaliana columbia
gtgacagaacacaagatcggtcatagagtatgatgtctgaacagactccacatggattctgtattgatacagctgctggtcgacattaatgatgttacttctgagctaaatatcaatgacggatgtatcaacatcttaggaagtgtacatgagacacacactctaggtcttgctccacatatttgtatgagccctcattatctgggtactcaagcacgtgacatcagagatgcttagaaaacatgcaccctgacctgcctatatgtattcaaaaggc

SEQ ID NO: 105414 - DNA, 219 bp, Arabidopsis thaliana columbia
gtctttttttttttctcaacacttgacttcatggctccggtaacagggtcagcagggtcagcagttcacagtgccactgccagctaagcctcgagcctacactctgaagcgggtgtccatggggggcccccctctactcgtgctaggttctgccgtctatggttagggtttctgcctttttacaccggacttcttgggtaggcgggtatgggaaggtct

SEQ ID NO: 105415 - DNA, 367 bp, Arabidopsis thaliana columbia
aaacaaaaagaaaaaggttaacctcagcattctcttctttgcaaccttcggagttctcctcgacctgaacagctgccttgcgaagcagacacccggggttccctctaaccttcagatcgtgtgtaacctcgaccacctagatgtccttcaagccaccgtaactctcaagagtgaagccgggcagatcgagtaccgtgaccacacccacccccagctgcgatgtgttggtgtttgcgtccacacctatgtaagaataacaaggcggtctgtaccttcccaccttcttcacttgcgcaaaaagttactacgtcgtccaaggaacgaggctcagctgaagagtgggccctggatcgaccgagaccaacat

SEQ ID NO: 105416 - DNA, 294 bp, Arabidopsis thaliana columbia
gttagaactagatttactttgtaacacattatgtttcctcaatactctagataatcaggctagtgttccatatatgataactaatgaacaactatgagtattcatatgcatacatatctcctttatgactaattgccctttacttcaattctgtatctccttactcctctttcttaatcattaaccacctctctaatctcttctaatccgatcttatatcttttctcttattccatttctatccgtatatcaataccaatctcctttcttattacttcactgttcttttttctt

SEQ ID NO: 105417 - DNA, 176 bp, Arabidopsis thaliana columbia
gagaaaaagggtcgagtctatctatttttcttgcacttgatcctttaatggctacactgcaacaggccccgggccctgacataagcctgaaccatcaatataagagcgaggggcctgggctggccaccatgcacccactcgtgtcgttgcttggcgttgatgcctaggcttttgca

SEQ ID NO: 105418 - DNA, 411 bp, Arabidopsis thaliana columbia
ctcttactctgttctcgctacagaatctcctgggaaaaaaaaaaaagaaacttgatccacccgaattccccaaatcttcacaatttctggaaactctctcgatcgtgaagcagaaaagtgaggttccaaatgggttctgtttcgggtcaaacccgaattacaacgatgaacctctcgctctcaacagcagagaagaaccctaatttccgctcgtcgcttctcaattctaaggtaattgttatcacttcgtcgagcttcaccaaaaaaatgactccttttgcttgatttcttcttctcctctttcgcttgtgtttagaacgcaatttcagatactttaggggtctcttccaaatgcagtacattcctcaggggtcaatttcaaagaatacatttttcttggctacaacacac

SEQ ID NO: 105419 - DNA, 303 bp, Arabidopsis thaliana columbia
ggtcgacgcgcttgccgtgttgatgattcatgataactcgacgatcgcatggccttggctggcaccatattaaatttgcctatcaacttgatggggatgggctaccggggtacggtgacggaatagggtcatccggaggggcggaaacggtccacatcaagaaggcgagcgccatacccaatctgcacgggggtggacataatacatccgggctcttggttggtattggatggtcactaatcctacgggatccatggggcagctggtgccgcgcgggattcagctcaagcgatttaagtgtgc

SEQ ID NO: 105420 - DNA, 409 bp, Arabidopsis thaliana columbia
ctaggcttctaatccatctcatgcttaactccacacaaatttcagcaaagtttcttaaatgacttttcttattcttacctcgccatggtagtttgttgggataccacccatgttataatgaaccgtgggtaagacaggaattggctctttggtaacatcaacaccagcaaagatggcagcggtctcagagattccaggaagcctttcttttagaacttctggaggaagatgattcagatggagatagatatgatccttatgcggtcctggaagatatcagcaaaaagttgtccagggtgagaatcaaactagacggatcacaatatcaaagcatatcatgtaatgagagttcactctgaaaataagaagtagttttcagtggaacatacctacaccacgaccttccctg

SEQ ID NO: 105421 - DNA, 359 bp, Arabidopsis thaliana columbia
ggccacgcgtccgctacaataagtttattctgccccgtaacccccttttgtttttctgcactagtaagacttacgtgtaggggaaaatagcaattagactcttattcttcctccccagcttcaaaacgagagtaacctctactacctagttgttcttcaaaccacctaacgtatatatctgccacactttcacttaataaaaaacccctctgtatcacaacagtcatttataaaaatatagtagtgtaaaacataagcagataaagaaattattatatcttggttcctgacttccaccattatacccacatttatttgccttacgatcactatttttaatgtgtatgtttctctcttcc

SEQ ID NO: 105422 - DNA, 227 bp, Arabidopsis thaliana columbia
ggaattcggtcgaccacgctcgcaaaacacatttgtttgttcattaagcttgaagacggagcagctacaaaaggtgatgaaactgactgaccgctaaggacaaatcgtgattaaccccccctttctgcaagttatggcggcgctatgacctctacacctctgccactcgccggtttagatatgtgacaacatgcgaggatggatcattacgtcgggggtatgggcag

SEQ ID NO: 105423 - DNA, 150 bp, Arabidopsis thaliana columbia
gacagagagaagcttggactcatgctccgtcgtggattctccaagtcttccggattttatcaccggcagattcactggggcctacaagacgcctggccgttggcgtatcaccttatataacgctgcggggtccggggctgcggtccgtat

SEQ ID NO: 105424 - DNA, 394 bp, Arabidopsis thaliana columbia
  unsure (1)..(394): unsure at all n locations
gcggacgaaaaaagataagttcatctatctcctcttttcattttntttttcccnccaaggattatctacgtgagatgccttttataacataatcggaggcttgacttttattttccaataagtcgcctgcaaaagtaaaattaaaagccgtcacgtctccgataaataatagagcatcgtcagataggtagcttcatcgtaaggaatctaaattggctcatctcataaaacgaaaacgatgtgttccatcgaataagaagcaagacctttcatcgaagaaaggttaattttacagtaagtgaaattgtatgctgaaaattgttcaatggacttttatggaatcccaccattgtaggagataacatgaaacttgcaagcttgtccttctattctt

SEQ ID NO: 105425 - DNA, 279 bp, Arabidopsis thaliana columbia
gcggaaaacatacacaaatggcaaaacatggttaacatgctctttctcgcttgcgcaactgttgccctgtgcttactgctcaccaacgcttccatctaccgcaccgttgtcgaattcgaagaagatgaacgcccgcaaccccgtaggaccaagacagagatgcctggaggagtgtgagcactcaccacacctaatagcttgcccgagatgggtgtgcgagcgaatgaggcatgggcctgggggtggttccttgctcgacgatttgtacgatttcgaggg

SEQ ID NO: 105426 - DNA, 381 bp, Arabidopsis thaliana columbia
atgctaccacataataccctctatggatctatgctgaaggtagatagatcataatggaaaaagaagtctgacgagaaaaatcggaatgatcctcaacggttatccgaggaatcatccgatagcatgctagagtccaccaacaaagccatgatgagatgctaaggcatgttaaccccccacttgttatcactgagtacatgacctccatgaacaagagtgacacgacacacagatcaaatttgcaccgtatgcaaaacgtgaaactggacaagagcgttcagtgtggagaaaggccagtcactgtctcaagtctgaatgcacccactatacatccaatctagcgaggatcctgctaagtttactgtctcggcctcatgctgg

SEQ ID NO: 105427 - DNA, 187 bp, Arabidopsis thaliana columbia
gatataggaagtgtctaacattagcaatcttgtcgtctcagcccaatgagatctgctcgtacgtaacggacggctttctacgctgtcactagagaggcctttacagctgcgctagcagtggaagcttactctcctggatacgttgcgagctctcctatctggactgagtgtatcctgacagattcac

SEQ ID NO: 105428 - DNA, 273 bp, Arabidopsis thaliana columbia
acatatcagatctgttgaaaaaggatgaaatgagacggcattttgtcaatacgtccttatcttgaatgtattaacgagttttttatttttcgatcgcctggaaggtgcaaaagaaacatctcgtgcttactttaacaagtactggtgcctagtggacccttcacgaggagttggacccagatgaagatctgaccatctgtcagagaaaaaagaacgaatggctcttgtgggattgccaagaaattcttagctttctttcggaagcagaagatt

SEQ ID NO: 105429 - DNA, 439 bp, Arabidopsis thaliana columbia
  unsure (1)..(439): unsure at all n locations
ccggaacggaaggcccggcccgaccgacgcgttcagggtggaggatgtaacggttcaccagctccagatccagcaagataaccgtggcaacatcgtcaaggtcaacggacctttcggcgtcattaggccacccttgagacgcggcgaaggcggccaacaaccacatgaaatagctaatggtttagaggagactttgtgcaccatgcgatgcactgaaaacctcgatgacccgtcggatgctgacgtgtacaagccatcactcggatacattagcacacttaacagctacaatcttcctatcctcagacttctccgccttagcgctcttcgtggctccatccgtaaaaacgncttggtgctaccgcaatggaacgtaaacgcaaacgcggcactctacgtgacaaacggaaaggctcatatacaaatggtgaacgacaac

SEQ ID NO: 105430 - DNA, 309 bp, Arabidopsis thaliana columbia
ctcgttcgcttcctcaaacctggttcacatcacaacaacaagtttttttccatcaccacacatgacatttacatcctctattatatataacacaactgtctattttgaatgtttgtattgtatgtatgaaaaaaacttacctcttaagattgttgtacagtaaagtgagtcccctagtgataccacttgtctgcactctagcaactccttctgtataagtgaatagagaaggaaggaaagccgcaaggatcgtcgcaggatcatgaaggtacacacctgccccccacacacactttttaaaatatattt

SEQ ID NO: 105431 - DNA, 408 bp, Arabidopsis thaliana columbia
tagagagtagtagaccctctggctcacacaccgtttcaatgcgccgggtgagggtaaacggtgtgagtgcggtgagcttgaaggatacaagcacaatgaacagattgtagattcaaacaaccgctcatgacaagtgaatgtctgcctgaacaagtgtggagagcagggaatgtatcacagacagcttgaacagctgaaggtgttaggtaagtgcattgactaatgttaaggcttcttagtccttcttcatcgaattttcctttctttaccgctcgccacatctcgtgtttgttcttgactccgctctgagctaaagagtacattgctctgtctgtaatgtttctgcagtagtataaccccaatgacctcaagtgaatgcaccgattcgccaaagccacaacactctca

SEQ ID NO: 105432 - DNA, 269 bp, Arabidopsis thaliana columbia
gttatatgataaagatctattttgatgttactatttggaatctataataatggttcatgagtttctttatctggaatgctgaaagtaaaaagacaaaataagatggtataaaaaaatggctaagcgatatttatggtttaaaaatcccggtgaactctatcaagatttatgatcaatattttattatttattcaatagttggttttgctgatactacatctaattgaaactctgtatgatgtgtcatactttttattggggggactata

SEQ ID NO: 105433 - DNA, 412 bp, Arabidopsis thaliana columbia
gccgcactagatgttataaacattattattgcccggcactagatagatagtgtttgaaatttataacgatcaaccagacagaaccagtttggtgcagtataagtaaacatggacaaagaaggctagaagataaaggtaaggacaagaaatcaacactcacaagtaggtttataggatgagggcaaagtggagctttccgtgacgtagtctagtcccctgcgataacaagatgaaagaccattataggtcccaaacatacccatattaggactctgtcgttctgaagaattctggtagaagtcattgccacgtgacatctggttagaggcgttgtaagaatcaaaagcttgatcctttggttcctcttgcctggcaaaagaaaaccgggattgattatcctcaactttactgg

SEQ ID NO: 105434 - DNA, 415 bp, Arabidopsis thaliana columbia
ggcagaggaatactacagcctccgctcggagagagtaactcagcttcttgtccctaactcggagtctgactcagtgagtgacaaaagcaaagctgagcaaagcgagaagaagactacacgtgggagagactccggtaaacaccctgtttatcgcggagtaaggatgaggaactggggaaaatgggtgtcggagattcgtgagccgaggaagaaatcacgtatttggctgggaactttcccgacgccggagatggcggcgcgtgcacacgacgtggcggctctgagcattaaaggaacggccgctatactaaacttccctgaactcgctgactcattccctcgacccgtttcattaagccctcgagacattcagacagcagctcttaaagcagctcacatggaaccgacgacgtcg

SEQ ID NO: 105435 - DNA, 320 bp, Arabidopsis thaliana columbia
ctcgcaccctagccgtttactttgcattttgagattgtgacagcttaaccatgggtaaagagaagtttacatcaacattgggcattggccactatttggaaagcaccaccactggacacttgatctacagtggggtttgacagcggtattgaaggtggaggggtgtggaaacagagtcttagtccatggttgacaactaagtggcgtggcgggatcaccattgcattgtcttggagtcggccccagtctctgactgcatgtgctctggccatggattatcaagacatgatcactgtcctccagctgattggctgcctata

SEQ ID NO: 105436 - DNA, 412 bp, Arabidopsis thaliana columbia
atttggtcagcgatcaaaacatgggtcacagagtactgttcaatctactacaagaatgacatatccgtgcaaacggatacagagatccagtgatggcggaccgagctccgaaccaaaagccacaggtgacaaacaacacgagtaatgggggccttgcatgcaaacccgcgacgacctaatcggaacctgcgcgatcatgatctggatcgactttgctgtttacgcaacagtgaatttcatacagaacccttacggccgttgtgtccctaactcgcctaccgataggcgccggtttatgcctgaaccgggtacggatgagtacgctgagctggaggaagatgctgacataacggtcttgaagacgatcacgccgaagttacagactgtacttggtatatccatcataaagata

SEQ ID NO: 105437 - DNA, 327 bp, Arabidopsis thaliana columbia
caaaagtgaaaagggtaaccttaacaaactttttattttaaccatcaggggtcttcaagatcataactgttatcatggcagggaagaaattgggggttctactaaagaaccgaacgcggggaaccttaagcacctaaaaggtaaccaagcctacttaacttttaagagggaattccgaacacatacacacctggaccacaaactccatcagatacgaaccattagcggttgcgccggttattacgccattatatcagggtgaacttaattaggctacatattcacatctctaaaaaacattctcttccttcaagggaccgagattac

SEQ ID NO: 105438 - DNA, 417 bp, Arabidopsis thaliana columbia
cattgttcccatttgtgagaataaacaagtcaactaaatagcgcatatttattcctcaaggtcatcttgataacttactgggaaacgataaaccttccaatagaaactggaagaggaacatacccaagagtccagatccaaacacgtataggtaagcagcgactatagtggtgccatgaaacagaaagtgtttcttttattaacaccttcatgttcttgagcacatttagttaacgtgtgattttatttcgtacctgatgctgtctcaacctttgaaaacgctgaggaaagtagaaaggctatggagatttgtagatttatgtagacgaaatagaaactgaattgtaagctgaagtcattaagcagaaagaacttcaatcctgaaaggaaccataactgttatagcaggttctataa

SEQ ID NO: 105439 - DNA, 410 bp, Arabidopsis thaliana columbia
cttctcccaccgccgtatgttcttccagcgctccggaccgccgtctggtctgactttaatttgagatctattccgatccctaacagctacttctgcaagtttcaacttggaaagaaacaatgggaatcattgaaaacggaactatctcgggtaacttgcctagcaaggaggcgtttgtggttcactatcctggctatccatcatctatttcccgagccgtggagactctcgggggaatccaaggaatcacaaccgcaagagaatcaacgtcaaacaagcttgagctgcatttccgccctgaagacccttctgcacatcctgcctatggagaacgacgtcattgtaatggttttctgttaaaaatttcgaaggaggatgttaagaaagattctctgcctgaaagtcaacct

SEQ ID NO: 105440 - DNA, 423 bp, Arabidopsis thaliana columbia
gagaaaatggtgaaagcagctgagaaaggagaaatagtgaagtgttgttgtttcgggtaattaatttcttctatttgtttttgcctcatcagctaaacaaaatactctctgaaaaagaaagctctctcacaacatttactttacttatttatttccgctttttctatgatatttattccttttttaattaaaatattcaatgtataacgccaagtcatcattagtatggtaggtccaaattaaattccagggacaatattttatcattttagtaatatgatatgtcgcatcaattttttagttgcttgcctcatagaatctctcccaactttttgtcacactaatgctagttgacaatattaatcttcattttatatttgccacaaagctttaagctttaggactaccatcccccaacataaa

SEQ ID NO: 105441 - DNA, 425 bp, Arabidopsis thaliana columbia
caataaactcctccgagaaccatcagcacagggatcaccaataagatgaccaaaccaataagtagcggatgtaatttctttttttcctctctaggaacgggggcctgttcatttctaggaataggagcctgggggagtttagagaggtccagagactgcataaattctttgcttttactaaaactccacccaagtatatactggttactggtcaatctcccatttgatccagagaacccaatatacatcttatcttgaaaaatttctgacagattgatgtctcttgatataagaggccggtttggtttctgaatctctataggggccagtgtaacatttagcaacgatccatcataatcaatccacacctgaacaggctccccactcacgagatttatgcttatattcttccccaaagcgtcaga

SEQ ID NO: 105442 - DNA, 352 bp, Arabidopsis thaliana columbia
aaagcaacaacaaacaccacaaaggcaaaagaagaaacatacgcaagagttctcaagcaagctcaaacatggcactaatgaagaagagtctctctgctgctcttctctcatcaccacttctgatcatatgtcttatcgcattgctcgctgatcccgtttcagtcggtgctcgccggttattggaggatcctaaaccggagataccaaaattgcctgagctcctaaattcgaagtccaagttgcggagttcctaaccagattgccaagtacccgattcaaagctgagtgcaagatccgagatcaagcaggtccaagtccggatcaagctggactactgaatatcagtgatgca

SEQ ID NO: 105443 - DNA, 285 bp, Arabidopsis thaliana columbia
agaaaacatacacaaatagcaaaacatggctaacaagctcttcctcgtctgcgcaactctcgccctctgcttcctcctcaccaacgcttccatctaccgcaccgttgtcgaattcgaagaagatgacgccagcaaccccgtaggtccaagacagagatgccagaaggagtttcagcaatcacaacacctaaaagctggccggagatggatgagcaggcaaatgaggcagggccgtggggggggcccttccctcgacgatgagtccgatttcaggggccccaagca

SEQ ID NO: 105444 - DNA, 254 bp, Arabidopsis thaliana columbia
gaacggttacgagaggcctgatgtccgagactatggactcagcgagaggcacacaggcacatgaggacacggacacaggcacatgggaggacagggcaaggcacaggaaaggcacatggaggcgacacggcacaggcacggcacaggcacatggaggcggacgaggcacaggttcggcatgcacaaagggaatgtaaccgagactttgaacatcagcttgcactgactaaactagaacagcatgcatatgtttt

SEQ ID NO: 105445 - DNA, 440 bp, Arabidopsis thaliana columbia
taccgaaccgcgtttcgaccacgcgtccggagatttttgtcttttatacttggtgagatcaatatcgtcgggtcaagtgacgtcatggcgtctatatgtctacatcacctatcttgacgtggcgcttttgttgatgccctgatggctaactagccgacggcggcttccacttttttttttacttatcctcatattttccatcacgtgattgttcagcgcgtgcaacacacgcccgggactcagaaaaaattaaaacagtcattatttatccgatttgacgacaaccattgaatgttcaaatggtatagatatctctatgttgtcaattatttaaatactggttaaggggttattcaagtagatatactataataacaaaaatatgactatcatcagtttagtcttgtttataaaagttaatactaaaaactccacattgg

SEQ ID NO: 105446 - DNA, 282 bp, Arabidopsis thaliana columbia
aaattttgtaaactcagatttactccaaaattctgtctatttttaaccatgagctaagtttaaaatctacttaaacatataattatatcaaaaatatttggctgttttaaaataaaccattacattcacagtatggcatatattggtaaagaatttgtacaagtaatcagagagattattttatttcaaggtttggtggtcatgattgtattattgagttattaatttaagtatataacatctctcatgtgattgcctaattaattaatagtttcattacac

SEQ ID NO: 105447 - DNA, 331 bp, Arabidopsis thaliana columbia
accagagaacgcttattctcatccttcgccacggttcttttttctgagtctttgttgctagaaaccgttgtcttgccaggcattcacttggagatgccacttaatggagaacgagcagctctcggacaccatcgaggtaccaccttgctaccgcaactgtgtatggtgacaccacccagatcagatcctgggtcctcatccacgctacagtaccacgcgatgttacttcggttgcaccgactccgataggtcaagggcgggacgcagttgcccatcttgtcgacatgcacccagatgtcccacgtttctacactaacaggtatatcgggca

SEQ ID NO: 105448 - DNA, 405 bp, Arabidopsis thaliana columbia
gtagatttgaaaataccaacgatttgttgttgagttttagacacgagtaaataaatggtgggaaatcgattaaacacacatatgaagcgatgtatgaaaacgacatgcgaattttatataaacaaatatcagctcatattgacccatgcgatcccaaaatgaatggagaatgacgacgtctgatctgaccatatcatatgtatggaaaagaccatttatgttcaagcttcgaaataaacttgatgatatgatcttctctatgttttgatttggagttgttcgattgctcattgagagagataattaataaatatggtgacactttctctcttattcgtcttagtcatatcatatattcatatctcatgttgatttgttattttgctatccagggagaccacaacg

SEQ ID NO: 105449 - DNA, 409 bp, Arabidopsis thaliana columbia
gcagcctccttcaacataaatcagtttaatttattttcttgaaatataacaatggttcaagaaataaaagtcaccaatccttactcaaggtgtgattgtaaaagtgagtataaagtggatgaagagagaagtagtaaatatccttttgtgggtgctctatgtatgaatggtggagatgtagacaacagttacaccaccaattctcttcttcagaaaagagttttatcaataaccaatccgatcttagttaaaaacacagaggaaatgttgacaaacttggactttcctaaatgcattaaggtagccgatttaggttgttcttcaggacaaaacacgtttttggccatgtctgagatcgtcaacacaatcaatgtattgtgtcaaaaatggaaccaaagccggccggaga

SEQ ID NO: 105450 - DNA, 406 bp, Arabidopsis thaliana columbia
cggacgcgtgggatcactatcactctctctttctctctctatctctcaagaactgcacggacaacgacatgcttttaatttccatgcaaatctctcctttcttctcaagtcatttttgaaaatcaatcaaaaaactgaaacttggtggagcttttatcattcactcatcaatggtggctggtaaggttcgtgtaacaatgggttttcacaaatcaccttctactaaaaaaaccaaagacatgccttctcctttacctcttcctcctcctcctcctcctccacttaaaccaccttcttccggttccgctactactaaaccaccgattaatcctagtaaaccgggtttcactcgctctttcggtgtttatttcccacgcgcttccgctcaagttcacgccactgctgc

SEQ ID NO: 105451 - DNA, 399 bp, Arabidopsis thaliana columbia
aacaaacaccacaaatgccaaagaggaaacagacgtcttgagttctcaagcaagctcaaacatggcactaatgaagaagagggtttctgctgttattatgtcatgaccacttatgatcatatgtaatcatgggcattgctcgcctgatctcgatttcagtcggcgctcgcccgttcttggaggatcctaaaccggagataccaaaattgactgcgctacctaaattctaagttgctaaggtgcctgagttgcactaaaccatgattgcccatgttgccctatatttcaaagcctgagttgccaaagatcccgtgtattccaaagccaaaggtcccaaaggtaccggagatgccaaagcctgatgcaactaaacagtccgagattcataagcttgaattg

SEQ ID NO: 105452 - DNA, 404 bp, Arabidopsis thaliana columbia
aagaaaggccatattggttttgggaggacataaaatcttaattcacctttgtcacgtgtccgtcgtgagctctccaggaggaaataaaaccattttccctcaagtcaaatagcctacactggccagaactaaaaccagctgcaatccaagaaggtgatactgaagctccgtctccatgttttgtttgagaccctcctgaacaaagagcagatacgagagaagtgaatccagattcaatagcttctcctccccaaagttcaagcttctggcctcgtgctagatcgataaacctgaattgtgcagtggaattgagcaaaaattgttgcatattatctctaatgcttaattagtttgattttttagtgtagtggatactattttacctgagggcaccaaatccggtt

SEQ ID NO: 105453 - DNA, 286 bp, Arabidopsis thaliana columbia
gccgagactctagattcttacttgcagcttgggtaaagagaagtacattcattgggcattggatgtgattctggaaaatcgaccacaactgcactgatctataactgggtttgacagggtatagaggtggaggaggctgtgaatgaacaagagtctagtccatgggtgttgacaaactaagcggcggagcgggataccatcatttgttatggagtcggaccaccaagtctctgacagcattgtccccagacatggattataagaacatatctgtcctcaggctgat

SEQ ID NO: 105454 - DNA, 399 bp, Arabidopsis thaliana columbia
caatttcgtagcatttcgttcaagactgagattggctataagtaatttaatccgttggagtgttttgaataattaatagtccacttgaagtatcttgcaaaattatgacttttaataacaaaattggttaagcgttacaatgaagtgatgtcatggtcaaaagacatcagcgcaatatcaaaacacaatgccagttgaaactataaatttcgaaaatttaggcataaactgagattgaactacttatgtcaagatcaagatcaaatgaatagtctacacattatatacaatctagtaactccaataatatcttctgaggtaaagcaaaattccataccaaatctcttgtttatatactttagtaaacacatacatatgttttctactttgatcctctca

SEQ ID NO: 105455 - DNA, 398 bp, Arabidopsis thaliana columbia
catctagtcactagatcataaaacgtttatttattttaagtatatgattatatacccgttggaacgcggtccgacctgcatagataaacaagacatgttagtttcatacaaggtagtacttagttaatcatatataagttatttcagctatcttaattattcatcatgtacaaattagcccgaacgtacgtaccttcttcgcctgcagaattactggatgaagaatccatagatggaaacaactaaacaagagatcagagatatccgtgaatacgaagcttgttttttttattttatttttattttttaatgttcttaatttcaaatatatagagagaaaaattattattcttgttctcttagggacgacgccttgtaattggtctgctcacaaagca

SEQ ID NO: 105456 - DNA, 406 bp, Arabidopsis thaliana columbia
aaagaccggtctgattacctgtggcataagacaagaataagcgtatctgaagatgatatctcgttctggaagaaaaatggacctaactcaacagtgtcgattgatagcatgagggatgtgttacgtgtgtttgttaacaaacaactcgcaggcagtattgttggtcactgggtgaaggcagtgcagcctgtacgatttatacagggaaacaatgatttacttctgttgactcaaacagttggtttacagaattatggtgctttcttggagaaggatggagccggttttagaggcaaagctaagcttactggattcaagaatggagatttagacctgtcaaaatcgtcatggacgtatcaggtgggattgaagggcgaggctgataaaatatatactgttgaacaca

SEQ ID NO: 105457 - DNA, 171 bp, Arabidopsis thaliana columbia
gaaaccatggttatgaaatgaattattaaacgagcagactgatctgttatgaatgactttatatcactggttgcttcatactagggtgattgatataatatctatggcttatttttgactttccactaaagtcatgttatgaacatgccatatatactgaatctcttgtat

SEQ ID NO: 105458 - DNA, 399 bp, Arabidopsis thaliana columbia
ggcaaagtttaaagaatccatcttaaatctttacttggaagccaagcaaacaagaaacaaagcatggcatcaggacaacgggaggcagagaggtccgccaaggccgagagagctgaggctgcagcgagtctagcggctgaagatttgaaagatatcaacaaaggtgatgtgacgtacaaattaacggagaggacaacgacgaccgagcctgagaggcctggcctgataggctcggtgatgaaggcggtgcaaggaactaaagacgcagtcatcggtaaaagtcatgatacggctgagtcaacgagggagggagccgatattgcatcggagaaggcagcggggatgagagacaccaccggagaggttagagacagtactgcgcagaagactaaagaaact

SEQ ID NO: 105459 - DNA, 407 bp, Arabidopsis thaliana columbia
aaaaaaaaataaaaaaaaaaaaaataaaattttaattataatacaaaaaaaaaaataaaaggggtgatttattaaaaaaatagggggttaaaaaaaaaataaaaaaaataaaaataatgggggggcctttttataggtccctatttatctttcccgtgtttccaccatttttttttttttatgttgtcccctaatataaatttccttgcccttcttttaacaaccttgtttttggaaaaacccttctattccccattttaaattctttgaattaaatcctcttttctctttttgctgtatttgaaaataggtcccatctcattcgccttttctaacattatttacaacttttatgtttattgtatcccccctttattagttctttaaatcccggtggtttttttttt

SEQ ID NO: 105460 - DNA, 398 bp, Arabidopsis thaliana columbia
cactttagtaccatttccaatatcaaaatttcttttttattgagaagaatttctgcagcaaatttgatctcaaatcgaaatctttcaaccatttcttctactgaagatcccgagctcagagattttgtgggatttttagaatctctcaaaaactatgagaaatcaggtgtaccaaaaggagctggaactgattctgatgatggattcgatctgggtcgaatgaaacgtctcatgcttcgcctccgtaatcctcattacaaatacaaggttgttcatgttgctggaactaagggaaaaggatcaacttctgcttttctctctaatatcttacgagctggaggatattctgttggttgttattctagcccacatattctgagtatcaaagaacgtatttc

SEQ ID NO: 105461 - DNA, 111 bp, Arabidopsis thaliana columbia
gaccactcaacacccggtgtcacagctacctgcaggaaccacttgatgaggttcatctacgacaaaccagtgccgacccaggcatacttaccgaaacccacagagtggtca

SEQ ID NO: 105462 - DNA, 403 bp, Arabidopsis thaliana columbia
gttgagtggagtgccaacatgttggatgaagaagccaaaaagaaattgaaagctacagaacttcaatgcaagaaaaaccgggtgaaaatgtgggcaaactacgtccctccagctagcaactccaaggcaattcatgaccagaattttaccggaaaggtagtggaagttgtgagcggggactgcttagtagttgctgatgattctatcccattcgggagcccaatggcggagcgcagagtttgtctttccagtatcaggtctcctaaaatgggtaacccacgcagagaggagaaacctgccccttatgcgcgcgaagccaaggagtttctgagacaaaagcttatcggaatggaggttattgttcaaatggaatactcaaggaagattagcccaggagatggtg

SEQ ID NO: 105463 - DNA, 401 bp, Arabidopsis thaliana columbia
cttgttactatcctaacttcagagcctgcagaagataaacatgaaaacaaaactacttaaaaaaaactctttaaaataattttaaattgtccttctcttttagaaaactaattaataaaattatatagaaatataacataagcaggagcgtgatcctcgacgatagacattgataatacctcatctctgtaaatataaaactatggaagaaaaacaattaagagaattgatatagattcatgcttaccttgattgatcacatgaactaacatagattctttaaactatgtaaacgcgtgatattggcacgggtcaatcaaataaaccggtctttaaaacaaaagagtacggttttctgattgaaccgcaccaatatctcgtatttgatgtccgatagtgcg

SEQ ID NO: 105464 - DNA, 335 bp, Arabidopsis thaliana columbia
gaaaatggttaagctcagcaatctcctcgttgcaaccttttgggttctcctagaccttaacggctgccttgcgatggtagatacttggggttcctccttagctacaaaacgagtgtaacctagacaacctagaagtacttcattccaccgaaactgttactagtccagaggcattgataataccccatctcttcaaatacaaaactatttaaataaacaatttatagaattgaattagattcatgctttacctctgattgactacatcaacttaacatagattctttaaactttttaaactcctcgatattggcacgggctcaattaaaattaac

SEQ ID NO: 105465 - DNA, 423 bp, Arabidopsis thaliana columbia
cggcagggtccggcccaggccacccgtcacgcaaatctcaacaaatgagcgagagagccacaaagtgggaacataaacaaacaaacctaaattcaaaacttgaagaagcgatcaaaaacctgaaacttgagcaggcgtgttgctctcaacaactctcaccggcattttcttccgtctcctcctttccgtctgataaaaatccgatctttggtgcgaccaaatcaaatcgtggagcctaatcaataaccacatctcatcatacccggttcggttttcttaaccgaatcaaattatacataaaacggattaggcttctccggttttcgactgcgttttgtataaaacctctcaaaaaccttttcttctctccccgtcagaccgatcttctctttcctcgccggcgccttcaagctttttttccac

SEQ ID NO: 105466 - DNA, 273 bp, Arabidopsis thaliana columbia
  unsure (1)..(273): unsure at all n locations
agcgtcccaaagaaaatagttaagctcaacaatcttttcattttaactttttatgtcctnctcttccacagcggagatcctctctaataacgacactgcccaacattctcaccaactagaaccatctctatcaactcatattcactcgaaccaccccaaatcattaatagcgagagtgttcgcattcagatctattaccaccattcaccccatctccattgctccgtctttgtctttgatcattttagatatttaaccttaatgtcttttttt

SEQ ID NO: 105467 - DNA, 173 bp, Arabidopsis thaliana columbia
ctcaaagaaaatggaagctcacaatcttctgtcacctggggttctctgtcttaacggctgcttgcgaggcagcacttggggtcctctactcaaacggtacctacacctaagttcagccccaacttaagaggaaccgtctatcggactgggacccaccccctactcgatggtgg

SEQ ID NO: 105468 - DNA, 276 bp, Arabidopsis thaliana columbia
cacagatgaagaacaaaaagagcacaatctttggaacctcagcgaaagactcgctcttgcttatggagcgtgatgagtactcctgaaggttctacggttagaatctttaaaaaccttcgcatatgcagagattgtcactctgtttataagtgtgttagtagagtcatcgcacgtagaatcgtgttgagagatcagcatcggtttcaccattttgagagaggttagtgctcttgtaaggatttctggagaaagaagagaagtctgacagcatctagc

SEQ ID NO: 105469 - DNA, 251 bp, Arabidopsis thaliana columbia
caaatttctaacttgtagaaaaaggagtttccaccgcattaaattagcctcttatatatagggatagttatataaaagtgcgaacacttacaaagaccaacaaagcgattaaggaataatgttttcgcagattatgtacagttgatatagattggatgtattggaactaaccatcagaagctagaaatatcagaattagtttccaaacaaaaatgccactccttttctgaataaaatctttctttccgttc

SEQ ID NO: 105470 - DNA, 318 bp, Arabidopsis thaliana columbia
gagccgtagaacagatatacgaaaacaagaactaccgctgcaacgcaaaccaaagcaatcagtcgcttcttttgccctccatctgatcttcctttcattgccttcttatttgagataaagccaaacggagacccaacgttccgagttaaaggatgcagactactaagtgaagacttcagctttaaaaattgatgatttctcactagttacagatatttgaatctgttctatatatataaaaaaaaaagacaatgcttagtatctgtaagaatagtaacaaaaagaacacacgcacatataccaatcttaaccacacac

SEQ ID NO: 105471 - DNA, 397 bp, Arabidopsis thaliana columbia
aaaaagagttagaaagaaaaaaaataacttaagatggttgatgtttatgagttctgggctgagatagtttcactcatagtggtgaagctgtgtcactggatctatcagtggaggaatccaaaaagtaatggagaacttcctccaggatctatgggttatccaatcattggagagactttcgagttcatgaagcctcatgacgctattcagttaccatcattcgtgaaggagaaagtactcagacatggaccagtttttaggacaagcttatttggaggaaaagttataatttcgactgatattggattgaacatggagatagcaaagacaaatcatattcctggtatgccgaagagcttagcgcggctatttgggtcaaacaacttgttcgtgaata

SEQ ID NO: 105472 - DNA, 399 bp, Arabidopsis thaliana columbia
aaggaagttgatcatggattatccataaagttagaatagattcttcctgggtcgatgcccgagcggttaatggggacggactgtaaattcgttggcaatatgtctacgctggttcaaatccagctcggcccaataattagctgtctacataaccattttttttttttttgcataaatgacagagaaggggtaagaaaaaaaggtcaaatttcagggtatagggtatagttcgactttacttttttctttatttcttatgtttagttactttttttttccataaaaaattccgatcttgatcttgctaaggattccgatatggatcctttaaagagaaactttaatgaacagagtcgataaaataatctatttttttgtaaaaaatagattatcaattga

SEQ ID NO: 105473 - DNA, 406 bp, Arabidopsis thaliana columbia
ccggagccgataaggcccgagtcggagaaggtgcgacttggcgtcatagatcgggaggcgagtccggcggcggaagtaatcaatgaggaagcagaggtagagttagaacgaggaatgagacggttgctgagatgagaagaagaagtggaagaagcgggacttggaggtctactgcttctagttctcgatgaggatgaagccatccactaacctcgaaactcgagggtcaaactcggtcgcaggaatcggtgagaagaatcaaaccaaaacaaaacttccgaagatgcagagaatgtgtcagtgggagctcacatggctggagacataagaagaataaagcattgttgtgaccctctcttcttcttctcgtcttcttctttggctaggagatggtagacagagatgg

SEQ ID NO: 105474 - DNA, 405 bp, Arabidopsis thaliana columbia
aaacaatttctcattagcttacaatggcggatacacaccgtgtcgaccgtactgatagacactttcaatttcagtcgccctatgaaggcggccgaggtcaaggtcagtatgaaggtgaccgtggttacggtggtggcggttacaagagcatgatgcctgaaagtggcccatctagtacccaagtaatgtctttgtctttatatttatacattctcttaatctttatacatacaaagttaagaaatgattctttacggatcaatggagtctatgttcatggaatcttgaaatatatgttcaaataaattatgaataattttgacactgttcgatttatatggttacatgcataaaacttcttcttgatcttctttttgttattgcgagttaaatatgaccttcaaa

SEQ ID NO: 105475 - DNA, 323 bp, Arabidopsis thaliana columbia
ccatcacaaagaaaatggttaagctcagcaatctcctcgttgcaaccttcggggttctcctcgtccttaacggctgccttgcgaggcagtcacttggggttcctcctcagctacagaacgagtgtaacctcgacaacctagatgttctccaagccaccgaaactatcaagagtgaagccggtcagatcgagtactgggaccacaaccaccctcagctccgatgtgttggtgtttccgttgctcgttatgtaattgaacaaggcggtctttacttgcccaccttcttcacttccccaaaaattttctacgtcgttcaaggaacg

SEQ ID NO: 105476 - DNA, 391 bp, Arabidopsis thaliana columbia
aattaatggttttgatcttccaaccagatcttcttctctatctcttcgacaaacccttttttctgggttcttcggagaggtgatttatcaccaaaaaaaagattttaaaagtctaaatccttttttctttctttccttcaacatgcctttaccttggaagaaatctaaatctagtcggatctctagattcgtatcagactttcaacaatctcctaaacatggtggatctctcgttgttgaaactggtttcccaacttctttaatcgatctctttgttaagaatcgcgatcgtctcaaataaaaaaaatatatcagaatttattaattaaattaatataataatttattaaactatataattattactttattttatttttctttgggcggc

SEQ ID NO: 105477 - DNA, 475 bp, Arabidopsis thaliana columbia
  unsure (1)..(475): unsure at all n locations
cttgaatctactgttngaagttggtactgtctcctgtatgcgattatccacatntttcaacgtctcaccactttagnctccatcgttcctcttcccttgctcacaaagaggnttcaattagtattcacacacacgaaacatcgtaccgacanaactaattatgcantgccatgttttttagaataaatatattcgttaatgaatcatgatcagaaaatganagttctttgtgtaaacgtcctaataatggttgcgtttcaattanttatacggtttatctgttcttaatcggatgtgcctctaaacggacaccaaaaattattacctataggctatgaggttgagatgtagacgttattgcatgatctatgcagcagattggccggtcattaattagtaatttgacacaaaaaaaacagctctttcttgtttccaaaaggtttcaatcaaaacgctaaagtcaaacaactctcct

SEQ ID NO: 105478 - DNA, 460 bp, Arabidopsis thaliana columbia
gtctaaagaagaatggcattgatcactctttgtgtgaactttttttacgtatgcaaggtttcttttctagcatgattcattgattttactaacacaacttcaacacataccaatctgattatattctagctaggcaaaaagattacgttaatgtgtatctcacgtgtttagtctagtgtagaataagatatcaaaactctgttgattttattgattcacaaactattggaatttatacacaatgatctctatcaagagataaacataaatccctaaaatataggttataaactctatcaccaaagatattgtacgaatcctaagatattaatatctcaagaattaccaacagctaaacgaaataatattgtttacatcgcttggacaggtctatattattcaaaagaaattagcactaatcagaagaaaaaaagtttcaaacaacactgatttgaataat

SEQ ID NO: 105479 - DNA, 366 bp, Arabidopsis thaliana columbia
ggtcataatcaaatttggaccacccatggatttatatgtcaattttcatttccatattcatgtaacaacactaccgattgttggtccccaactttgtgttatttcaaattactttttatacgtacgtgtcacaagtaactatgagttaatccaaaacaaaaaagttgagacaagaacataagaatatataattcgatgaaactgaagaggtaaacataagaaagaaaagcataagatcatactaataaattttgagaatcataatttgatatatatactcaaggaccatcttgatttattcacttgtgggtattatgttaagttctcgggaatcaaatacaaaattttcttttacgcacgtacact

SEQ ID NO: 105480 - DNA, 444 bp, Arabidopsis thaliana columbia
gaaaaaagtctcttggctggtcaatctccacgatatcatcactaagaatggagaaaccagatttgtacgatttcgcctgcaaacagagttgaagaacatctggatgcaatgcagtcaaacgcttggaggagacctgaagcttctgaacagcgtttaacagtggccctactcctcgcaacggatctcccagtgctataacatggtctttcaatatcttacaaagagatacaactgcaaaatcaatataataacatcatccatctccccaaagaaaaaagaaaaaaaaacacattaagacaagataagctctcattaagtgtcagtaaattacatttatagctcgccaaacgaatctgcccagcatcacaagaattgatgaaccgtgcaattatcggtatctcataagcagctttctccttcgacactggaccacaagtaagaacc

SEQ ID NO: 105481 - DNA, 319 bp, Arabidopsis thaliana columbia
aacaaacaaaaagaaaatggggtaagctcattaattttctcggtgcaaccttcgggggtcttcgtggttcttaaccgctgtcttgcgaggcagacacattgggtgtctcctcagatacacaacgcgtgtgacctctacaacctatatgttttccaaaccaccccaactctctaaagtgaaacccgtcacatctcgtactcggaccacaaacaccctcaaatccgatgtgttggggtttccgccgctcgttatgtaatagaacaacgcggcgtttactattccaccttcttcacttctccaaaaaaattctacttcgttc

SEQ ID NO: 105482 - DNA, 254 bp, Arabidopsis thaliana columbia
cggacgcgtgggagcgaattgaacttgcttttactttcgttaacagaagagtttccaatagcttttgagtttgaatgcagtccacaatctgcaagcaactcaaaatgcataagttcaagtagacacgtctttagacacataaaaaacaatattggaaatgtgatataccttttggcccatgagcatctatatctttgatgcaactcatacaatgccaccatctaaactttggaacacgataaaagtcgaagagt

SEQ ID NO: 105483 - DNA, 451 bp, Arabidopsis thaliana columbia
gggagaggaagagagaagatggaagagaattgcgaggattgcatgaaatgggaagaagaactctactggactcattttcaaactctccatttcactcagctcctccttcctggtttccacaatcgcctcgtcatacctcgaaagttttcaacacactgcaaaaggaagctgcctcagattgtgactctcaaaagtccaagtggcgttacatataatgtgggagtagaggaagatgatgaaaagacaatggcttttcgttttgggtgggacaagtttgtgaaagatcattcgctagaggagaatgatctattggtcttcaagttccatggagtgtctgagtttgaagtgcttgttttcgatggacagactttatgtgagaaacctacttcttatttcgtcaggaaatgtgggcatgcagagaagaccaaagcatctcacaccggttatgagc

SEQ ID NO: 105484 - DNA, 466 bp, Arabidopsis thaliana columbia
gtctcctactacaaatgcaaattcaaaatcttgtcgtcagactccgtttccaagtaataaaaagcctaactcgtgctcattttccaacaaaaaccaaaaccaataatcatctacatcaccatcttaacaccaacaaaatttagaattttttaaacaaacaattaaaaagcacagagcaacacacctgcatcagtcaataactaaaaactttggatttatcaatcaaaataactaaactgtcacagagcaacaacacattattttattagtatttcaaatttatatccattatcaaatacatcttccaacactttttaagctcccacaagaattcaaaaaactttcctatgtctacattacaaccacgttgctactttggaaccccatcaccctaattcctctctttcgtcttcttcttccctcgtctctctctctccgcaactcctcgttgcatcactttacattg

SEQ ID NO: 105485 - DNA, 454 bp, Arabidopsis thaliana columbia
atctgaagaaaaaaaaaagagtcaacaaattaaataaaccaatggaagaagaagatcctacagcaagcaatgtgataacgaattcgaattcttcatctatgagaaacctatcgccggcgatgaatactccggtggtttcacttgagtcacgaatcaatcgattaatcaatgctaatcaatctcaatcaccatcaccatcatcactatcaaggtctatatactctgatagatttatccccagtagatccggatccaatttcgctcttttcgatctatctccttctcctagtaaagatggtaaggaagatggagctggctcttacgctactctgttgcgtgcggcgatgtttggtcctgagacgccggagaagagagatattactgggttttcttcttccaggaatatttttaggtttaagacggagactcatcggtctttgaattcgttttctcc

SEQ ID NO: 105486 - DNA, 325 bp, Arabidopsis thaliana columbia
gcggaagagtggtccctggatgtgccgagacctttatttttcttcaaccgatgcaaggacaacaacagggccaaccatggcaaggacgacagggacaacaaggccaaccatgggaaggacagggacaacagggacaacaaggaatacaaggccaaccatgggaaggacagggacaacagggacaacaaggatgacagggacaacaaggtcaaccatggtaaggacagggacagcaggtacaacaagttttccgtgtcatgcatcataaggtggtacatgttagatacatagacatcttttttaactctttcttttttgtttttat

SEQ ID NO: 105487 - DNA, 326 bp, Arabidopsis thaliana columbia
gggcgaccacgcgtcgtagaacagcactgcatatcgtctttgcatgcactccaaaaccaactgccgaccctaaggtcatttggcggaaacaaccacaggaggcttggggtacagacacagaacagaaaaacttggggcggttcgccacagtatagtagcatgaaaatgacgcagtggtacagttagaaccaacagacagaagaaacatgtcggtaagggacctttcaggcggggcaccttaaacagcctcagagcgggggggcacccactgccaaggcaacggctgaggagctttgagatgggtccacggacatgacacctgtcgg

SEQ ID NO: 105488 - DNA, 454 bp, Arabidopsis thaliana columbia
cactaatctttttttggtgtttattaatacaagtttaatggaaatctatgctaatacagttacaacatgccaagctcccactcaatggaagatggctacagaatcagattcacaggtctgatcctgttttaacggtctgattctgtccctctagcaaacttatttgtcgcctcagtttcgcaatatgagcttgaacctatccaacaaagaaccaatccaaattcatcaaaacatagaccaacaaaaatagtctaaacttaatatcaaaaatttagaaaagaaagttaaaatgttttcaagctacaatttagaaaacaacaatttcttttagtttcaagttacctgttgacgagcagctgcgagctgtaacaactcatccgcttcagagaaactcatgaaccattgtcccaaactatgatctttcgtatcacctctcttctttttcccggtatct

SEQ ID NO: 105489 - DNA, 278 bp, Arabidopsis thaliana columbia
accgccggaacccgtgacccacgcgtcgcaaagaaaatggaagctcacaatctctgttgcaaccttcggttctctgcttaacggctgcttgcaggcagcactggggttctctactacagaacgagtgacctgacaacctaatgttctcaagccaccgaaactatcaagaggaccgtcaatcggtctggaccacaccaccctactcgatggtgggttcgtgtcgtatgaatgacaaggcggctactgccacttttattcccaaaattctcgcgtaagga

SEQ ID NO: 105490 - DNA, 480 bp, Arabidopsis thaliana columbia
  unsure (1)..(480): unsure at all n locations
ggccgccccacgcgtccgacgaaccatatttggtgggaaataaaaaccaaatttatttgccatggaagacgttaaccagtggttcgatgctgctttcgagttcgcacactatcccggcgctcaaaacgaaacttccgttaaggaattcctcgatcgcttccctcttcctgttatcttcaatgctttgcaaaccgatccggatataccaggatttgaaaacacgttggtgacttgcttggagaggttgtttaagactaagtatggcgcttcacttattcctcagtatatgcctgttctgcaagttggtctcaaggcagattctgcagttgtgaaatctctggcttgcanaactgttctgtgtctcttggaggattgcgatacaaaacgacgtttcttctgttcaactagttgttaacaatggcatataccctcttctacttgactatatcattaacagcgatgatgaagttgcaaatgctg

SEQ ID NO: 105491 - DNA, 293 bp, Arabidopsis thaliana columbia
accggcgaatcccggtcgacccactcgcgaacagcgagtggatcgaatatactcaacgcacaggtcaacacactcgccgacctagcatgagaggttgccgtgaggatccaatgggtaccaatcttcggactaaacgagtaagtacacgagaccacactgcccatacagcatggctcgaggctggctgggtgaagccgggaatcgtgatctaagcgtgtcactgatatgaaatttgacagagttcctaagaactgttgttggctgatagcgctggaacacaacgtggttacacg

SEQ ID NO: 105492 - DNA, 455 bp, Arabidopsis thaliana columbia
gtttgttaaaacttgacatttattgtgttataaataaatttatagaagagaagagacagagaaagaaagactaatcataattgttctttgtttagattcatagctaaaattagtaaattagtcttgatttaataatttggtcgatttgaattgacattgcatataccaaagctttttcttggctccaaatgtataaatcatcttttcatttttcctatttcatttatgaatttatctgtattactaaactagtgatactttaaataccaaaaagcaacaaattttgtcaaaccctctatttttagtgttgtaaaggtcaatacgggttgacaaaagaaaaataaatagaggctaattctgaaacgaattaaagagttaagctaatttaatgtgcctagttaaaaaaaaagttggcagcgagaaccatgctaaaaaaatcgtatcgtattattcac

SEQ ID NO: 105493 - DNA, 462 bp, Arabidopsis thaliana columbia
gtctatagtatatatatcttatatacactggtatttaacaagtcgactctcgacaggcgctaccattcattaactgcttgaaccaaggaattaacaagacccccaatcgcggtaacgatgcctatgaacatagtatgaaatacctctactgcttcattaaaaagctccttatgcatgctagtgcggcgattacatcaacaaacaaccatgtctatcaccggaactacatgggaggggaatatgcaattctatcaacatgaatttcttgcactggccacaacactcaaaatgcccaaggtcagtgtaaacccatatatgaatctgacaaactctacgatcatctgcgtgattcatgactaacctccgagatcaacaaacctgatttccgtgagctagaccttggttcaccggatactccgctacgttctcagccacggggactcaccaccaccactactacta

SEQ ID NO: 105494 - DNA, 438 bp, Arabidopsis thaliana columbia
  unsure (1)..(438): unsure at all n locations
gccacgctacgactattttcacattctattctgtctcagttttttataaacagccttatttaatggatctctgtctctgtgtttcagatgtgatattcttgatatacttataccaaaggtgggtttacccagtggataagacacgtgtgaacgagttcggttttggaggtgaggatgaaactgcagagaagaagttgatcactgagaaagaagaagaagacatgaaaacaaactaatctcttctcttgttcaaattttattacagntcaagtatagtgttttaatttatttttgttctcactgtnggaaattgtgtggttcaagtttaatgtcaaccgtcaagacacattataaagcaactgctttggttttttgtgaaaaaggaaaaaaacaacattttctctaaagctctgagattgctaaaatccatgggaaaat

SEQ ID NO: 105495 - DNA, 456 bp, Arabidopsis thaliana columbia
ctctctgctctcggcggctacggccgataccttcaacggcaatgcggcggatcaaattcctgctccgttacagcctccgggaacggatatgactggaatttccttcagggatcagctctggatcaattcataccctcttgatcgtaactacatcttcgattacttcgctttgtctcctttctacgatacaacttgcaacaatgagattcttcggagaagatccattcaccctctcgatctctctcacctctcgtaagctcctcctcactgctctacagatagggttatgttgaaactcataaaggtttcaactttaggtcgaattagggtttggtctcacctgggatactgttagagaaatggagatagatttaggtggagaatttagtgacaatgtttgattgaaaccattgtgattatattatgtaggaagatgacaggtctagaatatatgtt

SEQ ID NO: 105496 - DNA, 458 bp, Arabidopsis thaliana columbia
tcctaatccaaaaagtaacacaactagagtgaatttaactatctacattagatatattttaagagcatcctcattggacaaataatgaggatatctttaattataataagaataaaaataaaataaaagtaaagtctattggagaaagaggagagagggtgtcttcccaccgacactaaagacatttttatagacacatgtttacatttggcactcattgattggttaatatttttttaataactaaataattaattaaatgataaaactgtatgaaaattaatatttttattggctaggctcttaagtgtgtatgtcaccaataaaactcagtcactccttaagagagtgtcttaaaatataactaaaaagaaatatcaataatgttagataattttctaggagaatgtgagccaccatctcttcacttttatcaagtttggtatgttttaagacac

SEQ ID NO: 105497 - DNA, 308 bp, Arabidopsis thaliana columbia
  unsure (1)..(308): unsure at all n locations
gaaagaacctaatactaacatggcttgattcatattattagacttcatgtacctgggtattggaggcaaatcgaacccctgaagcataanatctttttaccacttccattgatcctcttgttccttatatactctgagcagcctacggctgatttactgacaggaaaggtctaaattttgtgagagggggtgagttacaaattttgagtgtaaagggtgccttatcttaggcccaggggtgagtatatagctggatgtcaattgtctaggtctttaatataatcgtgacagattatcgatctgattat

SEQ ID NO: 105498 - DNA, 258 bp, Arabidopsis thaliana columbia
gcgccgccggaatcgtcgacccactcgctcatattatctttttttgacactcttgatccttaatggctacactgcaacagggcccaacgagtgccagtgatcaactaatgctgaaccatcaatataagcgagggggcgatgggctgggaccaccatgcacccactcgtgtcggttgctgacgtcgcagacctaggcatttgcccatttgaacgcgcactacttgtgtacggagggctaaggaggtattcgatcccgag

SEQ ID NO: 105499 - DNA, 251 bp, Arabidopsis thaliana columbia
atcaaattctcttctttagcgtttattttgctctgttcttctacctttatttttttttcagttttaaaaaaacacttatcagtggtgtaaatattgatgtggcaaaacttggtctgatgcaaacattcatgttcggtaggatctagactggtaacttactgctttaccagaccattgtaactttcgcgcttcttctggttatgttctaaatacttctagctatatatttcatacctatatttaaactttct

SEQ ID NO: 105500 - DNA, 422 bp, Arabidopsis thaliana columbia
aatgtttcttatctccgtccccaaaacaatctgcttcaccgtgaatctctcaccactctctggacccaatccatctcctagcgcgtcaaacaacgcgctataataatgcaaagcctccacgaatcttcctaaaaagcttcctccatcgtcgtagctcaattcttgctccaccaccgtgatcagattcggtttcagcctccgtagaatctccaacgtttcgagattgttccctgtaacatcatataaccggtgttgcatccaatgaaccaccacagcttctccttgtctcgttgcgagttggctcggatcgattaggtttccgattatgccttcaattggatgaaattcgaaagggaggtttaacgatgatgcgaaatcggcgagcctccggccagttgaagcgagtagatcggaggaggaac

SEQ ID NO: 105501 - DNA, 369 bp, Arabidopsis thaliana columbia
  unsure (1)..(369): unsure at all n locations
agaaaacccgaaaggagaagagcgagaaagcccgaacacaagcagaaacacacaaacgagcgggcacacccaaccacaagggccagaaaccggacaccacgnccagnggancgcagcaggcagaaccacgaccaaacccaggccagcccaaaagcgcggccaacggnccacgaccaaaganncaaagaaacgagcaggccacacgacgacgaaggcgaggcgaaggacgccggagaaaccggaaccaccgcnnacgacggcggcggcgagggagnnagcnccaccggggaagaagaancgnnaaacggcgccgcangnggcnggcaccgnaacccccaccgagaagagggaaacccggagaacggcggc

SEQ ID NO: 105502 - DNA, 442 bp, Arabidopsis thaliana columbia
gggccggatctgtcgaaacaatcgttttagagccgaggatattcgtccggaataatgaaccaccgtgcctgaagcaaaaaccagagaaagattagagaagaaagaagagaaatcagacagattcttgaaacctgcagatttaatgaaaaccaacttgaacattcttttcttgacaaatggatggatttcgttgaaactgtaaggtttgaagaactcaacggtttctccgatcaccggaaaccccattgaacctggaggtagtttgccggagcagttagggttagcccatctatagagccagagactgatcttgacgaccactaaagctataacaaaacttagtgcaacaccccacatttctttcataatatctaaactaatgagattgttcatatttataaaaagctacatattttgaggaagcaatatgcaagaaaaccaa

SEQ ID NO: 105503 - DNA, 295 bp, Arabidopsis thaliana columbia
ggaattcccgtcgcccacgcgtcgacacttgatgagatttatctatcgcaaaccagtgccgacccagcattttacttagccggaaaccccacaggtcaagtggtacagcagagccagacagaagaacatttaatggattggacccggtattgtaagcttgaatgtcttaacagcaactcagaccaaaacaccgggatcattgtcggtcagcgtcggataggcgcttgagggcggacctaggggagagagaaagcaccgcacacgaggtaaggagaccattgaggcgggcccgata

SEQ ID NO: 105504 - DNA, 376 bp, Arabidopsis thaliana columbia
gtgtgttcgaatgggaatgttgggtctctttgaggtttagggtttatcaatcacaagttaagttcatgcctttgaagtatttggatgttcgaatgggaatttggggatgttgggtctcttagagatttagggtttattatagttcatgcctttgaagtatttggatcgaaatctgtctcatacgaattccttttggttgcagaaacttctgcgagcacttggtatgtttgcaggaggagtcgtcctcatgcgtagctatggggatctcatgggagtttgagaagaagaatggaggatcattgggagtttgtgaagaattgatgagcctttttttagttttcactctctcaaactcttgtattttctactctagaat

SEQ ID NO: 105505 - DNA, 392 bp, Arabidopsis thaliana columbia
cgcctgatgatgaaccgacgcctgaactgaatactttttttaaaattcaacgaatattacctgctgatgatttacctacgcttgaactgaagacaaaaaccaaagttcaacgaacttttcctcctgatgatgaactgtcgccccaactgaagtcaagaaccaaagttcaacgaatatttcctcctgatgatgaactgacacctgaattttaaacgagaaccaaagttcaacaaagaataccttctgatgatggcagagcccgtaagtgcaagcaacctgtgaattatgtttctaccagcggatcaaaaaagacggaaataccgctttacaaggaagtagccccaagctgttatgaacaatttctattataaaacacatgctgttttttttaa

SEQ ID NO: 105506 - DNA, 426 bp, Arabidopsis thaliana columbia
atttcctttaaggaaactctatggctttccccttaccacattttccggtacgtctttaaatcatcttcgtttaaaggccactaatactttaaagggtgatgatcaagagagtattcgcaagttcaagaagttaccaacttccgaatggactcactacttccactcgtttgtcgtcgatgtctcggtgagtccatatatatatttggtgtttgtagatgtatagaagcttaagtgtgtttacatatcttactttgaatttaggaaatggatgcgcttaggaatgagatcgatgcactaaagccgaaagtgaaaaacacaatcatgtcttcccaaggcattgactcgacaaagaagagaatccttatgatatatattgtggtgattcttggccttgcacatcattttgaggatgagatctatgagact

SEQ ID NO: 105507 - DNA, 267 bp, Arabidopsis thaliana columbia
  unsure (1)..(267): unsure at all n locations
gaangaccgggccgaccgacccacgcgtcctcaggaattattagacgacagccacaatagttcctacctagagtctgacgtagctaacggcggggatgatccgccgcaagcactcatgaccatatcgcgggattatcgcccattcccctcctctgatgtactgtcacacgaactgaagtcaagaaccataagccaacgaatagtacctactgatgatgaactaacacccgaattgaatacatgaactcaaagtcatcttataatacc

SEQ ID NO: 105508 - DNA, 165 bp, Arabidopsis thaliana columbia
gcgccggcgttcccgtcgacccactcaagaaaggttaagctcaaatctcctgtttcaacctggggttctctgcttaacggctgccttgcggcaactgggtctctactcagaacgagtgtacctacacaatgctcaccccaactataagtgaccgcaatcggtctg

SEQ ID NO: 105509 - DNA, 176 bp, Arabidopsis thaliana columbia
gtcaacagaaccatgaaggcaggctcaggcaaggaaaaggcaatggaggcaggcaacggacaaggaccaggccaggcaccatgaggacagacagagcacagggttcggcatgcacaaggaacagaaccgggctttgcaaatcagttgcatgactcactagaacgcatgatatgttt

SEQ ID NO: 105510 - DNA, 293 bp, Arabidopsis thaliana columbia
cgcgcggccggaacccggggacccacgcgtcagaaaaatgggtcggttcatctatatcttttttgcactctgatcctgtgtggctacactgcccaacagggcccaacaggccctgacataatgcgctgccatcaaatataagagcgggggcgatgggtctggccaccatgcaccatcgtgtcgcttgcttggcgtcgtattggctaggctttttgcactttgacgccgcaaccacttgtgtacggagggttaatgggatgtattcgatgccggacgtcatgggtaccggtttg

SEQ ID NO: 105511 - DNA, 422 bp, Arabidopsis thaliana columbia
gatctagtgatgaactttttttgctgtttttgtgtgttttgtgtttctcaaactttttgtgatgaactaatagaatgcatgcattctttatataaacaaaatcttttttttttaatttcctttttatgattaataaaataatatataagcacatccactggttataaacatacctcataactatcttctgcgtttctagaggtttttgaaatacgcaccctgtcttttagctattagtaagccacaatattattttaataatattttaaagtaaaaaatatttatattaacaaaagttgagaaaaatatgactgaatataaacaaaatatctggaccacatggcgttttaggaatacgcgctatccattcatagccttcgaatgttgacgtagaaagcacctttgtaagcaagtttgttacg

SEQ ID NO: 105512 - DNA, 427 bp, Arabidopsis thaliana columbia
gggagatttctgttcaagaatcagccttgaaggtttcatctaggctatgtagtttacaagaagaggttaagaggataatgggagacgcgggttttatgcccgagctagttaaatttctcgacgccaaatcgatagatgtacgagaaatggcgagcgtggcactgtactgtttgatctcggttccaaggaacaggaagaagtttgcacaagacgactttaacattagctacattctccagttgctagaccatgaagatgggagcaatgtgagcagcgattcaggtaacacaaagtttttgatatcgatattgatgtctttaacgagctgtaatagcgcgagaagaaagattgcgagttcagggtatttgaaaagcatagagaagcttgcagaaactgaaggttcagatgctaagaaacttgtgaagaa

SEQ ID NO: 105513 - DNA, 332 bp, Arabidopsis thaliana columbia
atccgatcaaacgggcgatgagattaagagctgcattgtttttagcacaggcattggaatattgtggttattaagggagagctctggatcatgatctcaatgcttacagggttttgatcgacaaggacggtaatgcgaggttgccttgatatggactcctgaaacctcgcccacactgaaatagttatagcacaaacttgccatgctctcctgcagattgttcgcgaacgggttgagtttacaccagtgagtgctgtattcagattttggcaccgttttgctagatctcatgagtggaaaacagtatgcaccgagtcatgcgcttgacctaa

SEQ ID NO: 105514 - DNA, 293 bp, Arabidopsis thaliana columbia
gctcttagttattatggtaacgctggaattcgaagttagccgttcaacacgtacttttacatttggtctgtattgctgcatctttgtttcgattgttttaaaatagtaataagctcagattggaggttcgtgaaagtacggcccgaggaaatagcgactagtggaagactcatcgctaatcttaccgttcaccgtcaccattgctcgttcacaattgtcggactagtatcatttccatcgatcggggctattttacctagctgctatgtatatcggtctcatgtctgggctgt

SEQ ID NO: 105515 - DNA, 291 bp, Arabidopsis thaliana columbia
cttaattttatagtctcccgtttacgcaaaattaaattaataataatataacaaaatatgggtaaatttctcagataaattcatcaaggagtattttgtaattaatgtgtagttggacaatataatactaaaaaaaaaaaaaaaaaaaaaaaaaaaaaaaaaaaaaaaaaaaaaaaaaaaaaaaaaaaaaaaaaaaaaaaaaaaaaagggggggccggttttaaggaaccaagcttacctacccgggcatgccaaggaataacttttttattggggcacctaaattcaatt

SEQ ID NO: 105516 - DNA, 184 bp, Arabidopsis thaliana columbia
attgcttctaaaaggaagacccctcacttttatttttgacacaaccacttgtgaccgggaagggacaatatcaggacattctagcgcttttcaaataccaaagatgtagacgccattataccccaaaggccctcagcatcacgatatgcctcaaaggagtttaagaatgaacatcatctaatag

SEQ ID NO: 105517 - DNA, 335 bp, Arabidopsis thaliana columbia
caagttcaacacatttaagcctcgacaattttctttctcaactactgaacatcactacctgggctttgttataaacttgtctggaaataaaacgacattctttctctaaatcaaaacttgtcatatcctttataacttacatttactttaaaccaccgaaataattaagagttaaatccaccttatcttatataacaccttcattttataaaaaaaatgtaattttcttgtttactaatataaatataatagtcatcctattctatatgttctaacctaactttcacattcatgctacaacttacttcttcttttatggtacctaaataaatatt

SEQ ID NO: 105518 - DNA, 376 bp, Arabidopsis thaliana columbia
  unsure (1)..(376): unsure at all n locations
aacatgaccaatntataataaacactctcaataacttgttttttaaaaaaagcaaaaaactccggcatcgtttactaacccatcatgacccgtcccaactacctataaacaactaacttaagaaccactacaacatgtccaaataccaaaaccaactcatttcctcactccattacccatcataaccaaaaatatacctttaccaacatctactacgactaacacaactccattaattccttgcaactacatatgccatataaatcacacacccccacaactcaaatatatctttacacctacataacatattcttacactttcatataacaaaaatctcatttcatttaacacctaaaaattatattatttcatt

SEQ ID NO: 105519 - DNA, 278 bp, Arabidopsis thaliana columbia
cggacgcgtgggggccccacgaactacattattattgttgagaccgaacttcttcttcttctggttaggggtctatttcattggctatgagctactctttattgattaggccttactgtgagtagtgtgaatcttctcaaccaaagccaagttcttttctttgttggagcacctgggactatagctacaatggtagctgagcattttaacctggtgaagatcaatacaggtggttttgtgtggccatcggtgatgcacgccgtctaactcacatcagc

SEQ ID NO: 105520 - DNA, 411 bp, Arabidopsis thaliana columbia
gagagatgacaaatagatcaccggctttgaattagtcattctttaaaaaccactaactgttattattctatggcaattgaatttaacaaggctagaagaaactagaagtagtaaactagggtctgttggatgagctatatgtgtatgaaaagctacagctactgactatcgaggttaagcaaatgaaaggcactgagcacgattctgagatttgatggaagtgaagcgtgttcttcgacgaatcataaggaggtttaaggtgcttgacgtacgctctttgtttgacaccttagatctgtcattcgctgctaatggacgaggctatatggatagagagcgcctgatgcgaaagctacgaatcatgattataatgatgaacgaatacccttggaaggtgaaggaagaggacag

SEQ ID NO: 105521 - DNA, 323 bp, Arabidopsis thaliana columbia
attattcattccatatatgaaaatgcatataaatatttataatttgcagcctgataaaccatgtttatatgcaccatgaattgaactaatataatgatgaaactttgcattcattattcgatttatttgctattttaattaatgatttttacctactgggccaattggaagacatatatcgtgtccatttgcacaaaatctcgcgctgttaacaagcgttatccgtgatgtaattacggcgcttttaaggactaaagtaatacttattgcccacacatctcatgcgtaaacacccttaatattacataaagtaaatcaactta

SEQ ID NO: 105522 - DNA, 462 bp, Arabidopsis thaliana columbia
cttgtctctattaacgctcatctttcaccttcaagctctaaatcgaagcaatcttcacactccacaaaccctaatttcaatgcaatcgcaattcaccatctcaatctctcttcatcttcctctatccatggatccataaatctctgtaacctcacaaaaggtgtttccaatgccaagcgttggtgtgaagctctacagtgtcttcttcaagttccttttgaaacaccgtttacaaaaccggattcaatcttccggtgatgaatcttcctcggatccatttggtgtcacgacccgacccgaagaatccgtcgctgctccgaatccgttattcaccgacggtgttgcaaccaaagatattcatatcgatccgttaacttctttatctgtacgaatttttcttccggaatctgctcttacgccgcttgaaccgagtacctccgcctgtgtttattccgaatctag

SEQ ID NO: 105523 - DNA, 394 bp, Arabidopsis thaliana columbia
cactaactaaacaacaaatggaaaagctcaaccatcttcaaattgctacccttgaagccttgctcaatcataacggttgtgtcgcgagatactgactatggggtcttctttaactaccaaacgcgtgctaccatccacccaaccaggttcttcatgccatccctacgtatcatgagtgaagttctgttataccgacgtctagaactctatccaccctcaaaccaggaagaactgtcagatacaagctactggaagaacatatcggactcattttcacgtgtcaactttcggagaatcacatggaggaggagactggctgtctaagagctggtatgactgctacgagtggcacttgcttgagccgagacgtaaatcgacttgcatagaatgcgac

SEQ ID NO: 105524 - DNA, 464 bp, Arabidopsis thaliana columbia
gttgggtacttatgaaactcctgcagaagctgagaaggcttatgttgacaagaaggttgagtatgatgcactggcttcttcaggttctgctgtttcctcatcggttgtaacagtgactagccagtgcttgcgttcccctacttctgcttctgtttcttgtgtaagtgctgatgatttgtctaaagaaaagacgtctctgaacaaagatgttgctgcgtctggtgattcaaccaccaaagaagtgttcactactttcgacttttcggatgtgaaaatacctgatctgagattcttagcagcagaagaggattctatggtttctaatgcaaatggtgcagagctagactttgattgtttccttactgactctaacattctgctggatgattactcattgctcgaaaatgatatcaacttcagcaggtttgaaaacagtcttccaagtgagctacctgactgtgatt

SEQ ID NO: 105525 - DNA, 466 bp, Arabidopsis thaliana columbia
cttctcgtcagtcacgctgaagcagttgacgttttcagattgtgcgagaagtgcaaaggtggtaaaatcgggattgctcatagcccggcttggtttgaaccagaagatgtggagggaggtcaacgtaccgtagaccgtgtgcttgacttcatcatgggctggcatttggatcctacgacgtacggagattatcctcaaagtatgaaagatgcggtcggagctagattgcccaaatttacaaaagcccaaaaggcaaaactgaaagggtcagctgacttcgtgggaataaactattacagttccttctatgcaaaggcaagcgaaaagcctgattatcggcaaccatcttgggctacagattctctagtcgagtttgaacccaagactgttgatggatccgttaagattggtagccagcccagcactgctaagatggctgtatacgcggcgggtttgaggaagcttg

SEQ ID NO: 105526 - DNA, 465 bp, Arabidopsis thaliana columbia
gaaagggcacatacaaacagaagacgatatggtggtggaagaggttaagaatattattgctggtcaaatagaggtggcaggagaggccagcaatatatcttatgccaacaatggtacgttggagaaccagaaagaagtctcaaactatttgttaagtccatcaaacggtaatttctcacccagagacctaggaagcatcttgaaagtggatcctggaattggtcgtgattctaactcaaaatcagacaatgcaaatggtgaagctgcttctgaggaaatgggtttaggaacgattcagatacttgcagatgctttgccgaatattgttccatatgttctgataaaccatcgagaggaactccttcccctgatgatgtgtgcaattgagcggcatccagttagcagtacaagagattccttgactcatacactgttcaacctgatcaaacgttcagatgaacagca

SEQ ID NO: 105527 - DNA, 367 bp, Arabidopsis thaliana columbia
cgacggccggaaccgggtcgacccacctcgtaaacttaaatagaggacggtggtgttgtgagccgcacacgggtgggctcagggccattttgtagcaaactggcgagcggagaacgaagccggttacgggccaactggcctacctagaacccacaaaggggtggcgattaaacagagacgggtatggaagtcgaaatcgtaagagggtacactacctgcgataactagcccgaaaggatggcgctaagcgcgcgacctatacccggcgcgggcagaccaggctgatagtggaggcgcggggcgtgaaaactagcgcgagcccgcggacggcgcgggcaatctggggtgtgcaatttaaatgaacttg

SEQ ID NO: 105528 - DNA, 467 bp, Arabidopsis thaliana columbia
caccgctttgcttctcgcagcattgcatctttgtctactctacccagaagaagaaatatcgtccggatacataacccttcgttttctagccctttcccgccgattctctttagacccatttcctcaggcaaggtcttagccatggcggaagagtcttcttcttcttcgacctcgtcaacatctcagaaacataccaaccgtttagccgctgaacacagtccttatcttcttcaacacgcgcataatccggttgattggtacccatggggagaagaagcttttgaagaagcaaggaagagagacgtgcccatcttcttatcaattggatacagtacctgtcactggtgccatgtcaatgaagttgagtcatttgaagatgaagaagtggcaaaactcttgaacaattcattcgttagtatcaaggttgatcgagaagagcggcctgatgtcgacaaggtttatatgtc

SEQ ID NO: 105529 - DNA, 195 bp, Arabidopsis thaliana columbia
  unsure (1)..(195): unsure at all n locations
cagaaacggaaaaccgggccgacccacacgtacgnaaaaagaaaatggataagctcatcaattttctttttacaaccaaaaaaaaaaaaggggcgcgtaatcatttttcttttgcccccgccacaacanaaaacaccacacctacaaaacaagtgcaaccctcacaccctacaagttcttcaatccacctaaact

SEQ ID NO: 105530 - DNA, 451 bp, Arabidopsis thaliana columbia
cttccaagagtgctttcatatcagaggagctgtgtatcggatgtggtatatgtgttaagaaatgcccgtttgaagctattcagattatcaatcttcctaaggacttagccaaagatacaacccatcgatatggggctaatggttttaagttgcacaggcttccaattccacggccggggcaagtccttgggttggttggaacaaatggtattggaaaatctactgctctcaaaatcttggctggaaaactcaaaccaaatcttggcagatttaatactcctcctgactgggaagaaattttgactcacttccgcgggtcagaacttcaaagctatttcatccgagtagtagaggaaaatctaaagactgctataaagccacaacatgttgactacataaaagaagttgttcgtggtaatcttgggaagatgcttgagaagctggacgagag

SEQ ID NO: 105531 - DNA, 309 bp, Arabidopsis thaliana columbia
agataatagtataatattatgaactgtttttgtgtcactgacaaggccctagacaggctggtgcactgaaatatattggtatactctggcctaaacaacctggaagcaggctttgtcggttcaaagtaacaacaagaacaaaacaacttgtggagcgggatcgactcacaggtcataggtgaagcatcggggtgttcgcctttaagactgtcatcagtttcctttagcaccaacacgacagataggaacatctggggagcagggacaattccagggccggaggttaccaataatacagccgtacaaaag

SEQ ID NO: 105532 - DNA, 409 bp, Arabidopsis thaliana columbia
atcgaactatgcatgcaccccaatatgcgcataaacatttaattgctgagttgagatggtcattctctatcttttttttccaaccatgcaggacagtcattgaaaaaattctaaatattagtttagattcttaatcttgtctgaaatacgattttagtggttcacttcaacatgaaagtacttctttttttattcctattcatacataatttatctcatgtattactactctatatgttattataaaacagaaataatgtttaaagaaatctctatatataaagcaattctttcatttattataatttagaataacatttttttttgtaaatattttggaataacatatagagtgagtttggagaaaaattactctataatagagttttagaagaaaaataaatatatt

SEQ ID NO: 105533 - DNA, 273 bp, Arabidopsis thaliana columbia
gaaaatggtaaagctcagcaaacttctcgctgcattcttctgggctcttctcgagcttaacggctgccttgcgaggcaatcacttggcgttcctcctcaggtacagtacgagtgtaaccttggcagcctaaatgttcttcaagtcaccgtatctattaagagtgacacctgtcttaatgagtgctggtaccacaaccacccttagatcatgtgtggagcaggcaccggtgatcccaatgtaagtgaacaagcgtggtgtacacttgcctacct

SEQ ID NO: 105534 - DNA, 412 bp, Arabidopsis thaliana columbia
ggagaagttgcggataacgttcgatgcagcaatagcacacatttgtttctctgatctcccttcatcgtctagattaaacaaaccatcctcttccatccaccactgagatgactgatgtttaccagtgctcttttttcctaatgcctcagcagctgaagaaccaatcccggatctgctaggccaaatattaacaacacttaggttctaattctaaatataagcaacaatcatttaaaactgtaatcaaagcagtatcgaaattagctcacccagggggttgaatagaggctagagcatcatactcattgccaaatcccgtaactgaagcatttgtacctaaagttctaactctagttcctcttgtcaggtcctttgggagagctatgtcacgccaatcatctatctgccaaag

SEQ ID NO: 105535 - DNA, 406 bp, Arabidopsis thaliana columbia
ctggcaatggttagccaactaaagttatttgtttgatactttttgtgtatggatatagctatatattttaatggtgatcgaatcaatcaaaggttggggacttttagtttctttgggattgtttgtgtactgtttcttgtgattggctttagatgaaagaagtcaaatttgtgattatgttgtgtttttgtatgtaacagaccggtaaaggctaagaaacgtggaggtgggtttaacaaaatatgtcagctttcaccacaactagagaagtttttaggaacttctcaattggctcgaacagaggtagtgtttttcatttctttgtaattttggtttccctttgataattttgtgtggagaaatgcttatgatgacatttgcatatataacaggttgtgaagaaaat

SEQ ID NO: 105536 - DNA, 299 bp, Arabidopsis thaliana columbia
  unsure (1)..(299): unsure at all n locations
caaaagcatttctgtttctcgtcgtcggagcccgttgacagatctctgaatcgctggagaaacaggtatatgctccggctgtatctactttatattctgccaggaagattgtgagcatagaagtgccttgggctctggctgaagatntgagcagattaaatgggtcggctaaagttgcattcttgaatcaagggcattgggggagaacctcgggactttgagtggactgattcaagtgatacaaccactttagcatgcatgattggtaccggaaatggtggtggtttagccggtattag

SEQ ID NO: 105537 - DNA, 407 bp, Arabidopsis thaliana columbia
gaaactctcttagctggtattcaatgtttcagaccccatgtactcactcataggagattgttgaatacacttgctacaaattgtgatttctggcgtcaatcaatttgctctttacagctccatttggtgatcatctgtctcctaaacttaagcttatgtatgttgatttcagatgtttggattgtcaaaggcggtcgcagagaagcaagctgtggaggcaaagggagtcgagagtcaattgcctcttcagacgacagtctcggagtaaagactagcttctttccttctgcgtttgatgtcgtttctcttgtttaacatcacatataagtttctttgtaaatcaacttttccgacctagagaccagatttgaattcaaacatttcaaatgttattggtttgatctttg

SEQ ID NO: 105538 - DNA, 308 bp, Arabidopsis thaliana columbia
tttctggtaatagaagctgtaagaaccgttgtgaccctaatggatatgtttgcgtgtctcttctgttctgtcctaattttttttattctttttttatttcaaacaagaaatgatatttcttcctccacgtaatccacgagagcgtggatgataaatttacactgggtcgacgtgatagtttagtgacagacctctttgagaacgacacgtatccagtgtggtcgacgtttcatcgatggataaggaagtatctgcttcccgcttaataaagtagaatggagagtggggttgaggaccgctacgtgacc

SEQ ID NO: 105539 - DNA, 204 bp, Arabidopsis thaliana columbia
gcccacagaagttgtcaggcagagcacccacagaagaacatgaatggatgcccgggttattgtagctttgaaatgatcttaacagcacacttagaaccaagagcaccggaacattgcggtcagcgcgggtataggcgcttgggggcggacctagggggggaaaaggcaccggcacacggtatggtaagggacattgaggcgggc

SEQ ID NO: 105540 - DNA, 165 bp, Arabidopsis thaliana columbia
actaaaacgaggaatacaaacatttcaaaaatggccagctctgtgcccttgccttgttctctaccaacctctaccgctggcggtcgcaaatacccgccccatgggcccgacagagaagggtagatacagacctaaactgcgatgtcctgcagagaggcggggggg

SEQ ID NO: 105541 - DNA, 407 bp, Arabidopsis thaliana columbia
ctttatacgtaatctcatcaaaaataatttccatacaaagtacttctgaatccatttcctttttattgggtacatcagaaattcatgaaagaacaccaattttatcagagtgaagagctcaaattcaaaacttttgatccgagttcaaaatatgtcaagtttcctaagaagaaaaaaggtctataaagccaaaaaaatagtggatgcagaataatatgtacacaaaagttttggatataatccaaagttataaaaagattcaactgtttcttattggatataaagttcataaagattgaaaaaattacatctcaaatttgtttggaaattaaagaaattaccttataataagtactgtaattatataaactgaatttagttaataagtaaaagtgttaaaacaaaac

SEQ ID NO: 105542 - DNA, 382 bp, Arabidopsis thaliana columbia
ctcattcctttgattcttctcagatgaatatgtcacatgttgttaaccatctatcctttgggcggaggattatgcctcagaaattttcggagtttaagcgcttgtcaccttatgagttatgagttacttgttgcaaaaggagatgtcggtgtactccatggtgctatgagttacttgttgcaagatgatgatggccaaatcattgaaccacactccatcagtgccggattggactaccctggagtcggacctgagcatagttttcttaaagacgtgggaagggctgaatacctttagcgtactgatgaagaagcattagaagctttcaagagagtgtctcggttggagggaataatcccggcattggagacattgcacgcat

SEQ ID NO: 105543 - DNA, 222 bp, Arabidopsis thaliana columbia
ggccgaaaggaaaggttccatgtgaacgctgcacatgttagcatcctgaggggacccgtctgatccttaaccgaacttcgaaaggggatccggtaattccgccgggcggggtgcggacgtggggtcgactggggggctggaggtatttttgtaacagcgcactgaacgtaccgagtgggccggtggaagacgcgcgggggccgggccccgggccttgaaatc

SEQ ID NO: 105544 - DNA, 397 bp, Arabidopsis thaliana columbia
  unsure (1)..(397): unsure at all n locations
cgtncgggnccaacttcccaagtttacgaaacttatcaaaggttcttccacactttgtaggctaagctgccggaagctagtcaacaaaagttgagattgcatatcaacacactgccaaatctgctccgcatcaaacccatcataagagagctgatcaaatggacatttagggttatgcggcttcaacttcatgaatagatactgagatgcagagcgagcatactcagatattgaacttggcgctagaaaaactggtggctctgttgccttaagcttctcaagggcttcaaaccccgaatcctttaccgtagccattgattgagccttctcagtgccctccaaattagggttccttcgatttgacgaaaacagtagagtatatcaatggcggtgccca

SEQ ID NO: 105545 - DNA, 342 bp, Arabidopsis thaliana columbia
gtgcaagccttttccagttttccttttgatgtgtatacttttgcgttgcgtcaagcacttaataatggttgtaagaattactgttgcttccctttgctttttcattatatgctgaatcacgacttgggggactatttctgcagctcattcttgatgaacctggcagcttaccaaacgtgatggttttcactgtataaagttactggttataaagattggacgtgaaacaatggtattatttcttttcttttgccattctgcactaaatagattgggcggtttggtttttttattattttctcttgcttaaatagaaggagaacatatggtcctcagttgttg

SEQ ID NO: 105546 - DNA, 406 bp, Arabidopsis thaliana columbia
ctttctttcttttctcggttgaaataaaaattctttctactgaatctgaaatagagacgaggcctaatcttttgatgccgttgcatgaacatcctttatcatgtacagaagaatttatctattcttgcgatttttgtaatagtcgaaatggcattgcctatcagtgcacggagtgcggctatcggctgcacaaagactgtatccagggctttctcagctatccatctccgtgcggtcactctctcaagatctccatgcccaacaaatcacctcaatatgcaaatgaccgatgccatttttgtctgtgcaagcttaagactccgtttgctcgttgcacggtgtgcaacataaacattagtccactttgtatggtaaagcaaccaccactcactatttgtaaaccaaa

SEQ ID NO: 105547 - DNA, 425 bp, Arabidopsis thaliana columbia
tgagatttttaccgaaaatgagttcagcgaggagtagaagaaaaagggacccagaaatcgtcatcgctagagatacagattccgagttaagttcgtcagaagaagaagaagaagaggaagataattaccctttctcggagtcggaggaggaagatgaagcggttaaaaatggagggaaaattgaattggagaagaataaagccaaagggaaagcacccattaccgttaagcttattaagaaagtttgcaaagtttgtaaacagcctggccatgaagctggatttaaaggagcaacgtatatcgattgtcctatgaagccttgcttcttgtgtaaaatgcctggccacaccacaatgtcctgtcctcatagagtggttactgaccacggaatactcccaacttctcataggaatacaaagaaccct

SEQ ID NO: 105548 - DNA, 234 bp, Arabidopsis thaliana columbia
  unsure (1)..(234): unsure at all n locations
tttgtnntttcttatatcgttcacagagtcattcatcattagcccctcccactgagtccataagcttgcaccttccttgtacctcgtccctcatccctccggtgtccgaaaccctccacaacatcggcggtggtggaggtggtggtagctagccgtctccacatcacggtggaaaaggtggtggtaaaccctcaccccacgtcgggaaaggtgttcgttccttcgctctttgtt

SEQ ID NO: 105549 - DNA, 416 bp, Arabidopsis thaliana columbia
taataatatataattcactttttattgttaatttttactcgataacaaaatgctcatggttaatattttcattaatgatttccacacctattttctgtttaaaactttttttttgttcatccgaaaacgattttctcatgattaaattcattatttttaccattgtttgacccaacaaaccatagttatatttgtaaataaaataccataagatattatgtgtatttcctattaaattagtatgttaaagtgtgtagaaaatggtcttaagcctaataaatagtcaagtcctaatgtctgcagaaattaacctcaagaacccatctcactctctggaactataacataaaaatatttctgcagaaaatataataaaatataaatcaatttgatgtttgtcggtttatgcatgtaat

SEQ ID NO: 105550 - DNA, 391 bp, Arabidopsis thaliana columbia
cttttctaaacccattgactatgtcttgtcagtttaatttttcattagttgcacaactgggtgttttaataccaagttagtagtactcggtttccacttgtgatcttggaattgatcttcattgttttggtttaagcaggaagttgccgcgagctcaatgaacatgaaaatgattgagcatttggagagggaacagtgtgtggagatggagacatcaagatataatctgcagagtgtttggggtaatgatgtatgccaagtggatccgtttgtccgagcttggagcttactccaaggtttgcttaatagctgaacatgttttactcaaaatcatacttgctccacttcgcgattttacatgttcatgcattatgtgagatcgacattttgt

SEQ ID NO: 105551 - DNA, 457 bp, Arabidopsis thaliana columbia
  unsure (1)..(457): unsure at all n locations
cggaanttcccgggntcgatcccacgtcagtccgctaggatgacgaacaaatagaaggggaaattttgcggaagcacaaagcatgaaggggaaaccttccatgaatcttgaacatgtctcagatagaaggcataagccttgaaaaccgatgatcgtgacgttcttgtcaatcggcngccaggatgatagctagcttcatgagtacatatgatagttctgcaatagcaggtttgagagaggatatctagtccattagatcatgattaaaagaatgttctcgaaatcatacgagccaagaattggttctgcttccagatagagatccttgctatgctcatatgtcaatgatttgcttgttctatagggtgcattagctaatatggtcctttattgcggaaggaacctttatattttgcgacaaatgaaatagagattttgtattgtggaaggtgagata

SEQ ID NO: 105552 - DNA, 363 bp, Arabidopsis thaliana columbia
gtcaacatgtgttatgcatgttggatccaagttatgacacatgaacaacattatgacaaaccattgaatgatatatatatatgtatgagttatgaaaaaatatttatttttatacataagttgaatctaatgttcggcatgcaggtactaaactcgaagagtctgatcagaagtggtattccggagagcaaaatctataatatatagccgaactataaatttatatcacaattctctacccatgacctataagtgagcagtgtgtacagtgtataccgaaaaataagcatatttattttgacaacaagaattatagatgaattgtgataggattaaagagcccattcaacaatgccattcttg

SEQ ID NO: 105553 - DNA, 217 bp, Arabidopsis thaliana columbia
caatttgccccaagtaggtgaattttactctttcttctttccacgaccaaacctttggcatggttcggctgctctccaaggccataggggtcagtagctttgaaccaagtgccagctttaccatttcaatgcgctcgagccgtcacacgagctgctgatcgagggagacggtttgaggtgttggaccaccacgctactaatgtccgttgctcacgtg

SEQ ID NO: 105554 - DNA, 291 bp, Arabidopsis thaliana columbia
atgaggtataattatgtgtcgtgacgcatctactttctttggctcttcaacaccacggacgccgtgaattggggaaactgacaaaaagaggaagaacaagagccaaagccttcagagatatggactggtactggccctaaggtgatgaggcacgaggggagacatgagcatctgaggatcacatacggcctactgtcgcaactaaggtagctgcgcaaactagaatgaaaggggagaggatggacaatcttggtctattcaaaggatacactgagatctgaccaagtgaga

SEQ ID NO: 105555 - DNA, 423 bp, Arabidopsis thaliana columbia
cttggtttatttaataatcagggactcccaagcgcacaaattctctaagtagataattgagagcttgttatgaaacagtataacatgacttatatagccatgtcaaccaatgtaaaatggataagatccttttagtttagattcataaaaaattttttgtaatcgatgaaataaattagaagcgaatccacatacatagaaatagaattgctctaggaatattttttccaaatcatatgaatacgatggaatacgatccgtagtgggttgcccgggactcgaacccggaactagtctgttggagtagataatcttcttgttaaaatgaaaaaaaaaaaggtaaaaaacccctccccaaaccgtgcttgcattattcattagacacagctttctctatgtgtacatagtaaactcaatttcttt

SEQ ID NO: 105556 - DNA, 287 bp, Arabidopsis thaliana columbia
atcaaacaaaaagaaaagggttatgctcaccaatttcttttttgcaacctacggggttcgcctagtccttaacggctgccttgcgaggcagctactggggttcctcctaaactacagaacgagtgtaccctcgactacctagatgttttccaagccaccgaaactttcaagagtgaagccgctctgctcgagtactgggaccacatccaccctcagcttcgatgtgtggatgtttccgttgcttccttagtgattgaacaatgctgtcttttcttgccctccttctt

SEQ ID NO: 105557 - DNA, 228 bp, Arabidopsis thaliana columbia
gcggaatcgggacccactcgagaatccgtgcgtttgtgggcattgaaaggactcaagctggaaactgaagttgactctgatatcaccagagcgaatgcttaaaacagagtttctcgaggcgcgaaagctattgagagatgtggctgtgggaagcttttcaggggaggctgagtcagggtaagtctaataaacccttaggttgttagagagtgctactcgggcgtcgca

SEQ ID NO: 105558 - DNA, 294 bp, Arabidopsis thaliana columbia
ggaacccggcgacccactcgtcacattcattctgtttgacaaaattcaccctgttttcttctttgtgttggatgttgcttcacaacatgggagttagaatctcctttcggtcatctctactttttcgctgttcagcggtccgcgggcggacaccatccgcggtcacatgggacctgatcaacgctatgccactttacgcgcggtgcttcggccttgggggcagcgtacgattgatgccaggtatggctgagacgacctacacacgttcaccagctattgggcgctgtttggctg

SEQ ID NO: 105559 - DNA, 203 bp, Arabidopsis thaliana columbia
gcgtctttatgttgctcaggctaattgatgagaggagaggtaaccaaaccctatggtaaccgaccatgttttgtggcatggtgtgtgttccgtgttattgcgtcacagcgccgagaagatttgagcttcgcaagggacaagacaccgacatcggaattggactcgaatgacatctgtcttggcaggatgtagctgggtacttg

SEQ ID NO: 105560 - DNA, 414 bp, Arabidopsis thaliana columbia
atgagctgaggaaaagagccactctttctgatttgattgattcatcattcatcgacaatggcttcttcttcttcttcttcgtcttcgagtacggtgtcgttcgtagtctttgcatttacagtcttcttctgtttggttactccggcgagatctagcgacgtcgaagctttactaagcttgaaatcttcaatcgatccatctaattcgatttcttggagaggaacagatctctgcaactggcaaggtgttagagaatgtatgaatggaagagtctccaagcttgttcttgagtacttgaatctcaccggctcacttaacgagaagagtttgaaccagttggatcaacttagggttcttagtttcaaagctaactctctctccggttcaatccctaacctctccggtttggttaac

SEQ ID NO: 105561 - DNA, 147 bp, Arabidopsis thaliana columbia
gcggcaacagacaacagcacagggacaacggcaatgggaaggacaggcagggcaacaagggttcggcatgcacaagggcatgtaacggacttttgcaatcagttgcatggattcatagaacagcatgatatgttttaatgcatcaaa

SEQ ID NO: 105562 - DNA, 419 bp, Arabidopsis thaliana columbia
aacccggttaacaagaaaattccggttctcatccacaacggtaaaccggtatgcgagtccaatatcatagtcgaatacatcgatgaggtctggaaagacgataagactctccgtctactaccttctgatccttatcagaagtcacagtgtagattttgggctgatttgattgacaaaaaggtactactagactttcttaaaacgttacatttttggacgatacttaagaataacaaatacaatctactaaatacttcataatattaaatgttatggtgtgtatataaaaagttcaacgaaaggagactaaaagttcaatttcattgtgattcatatacaaaaatataaacaggtttttgacgctggaagaagaacgtggacaaagaggggcaaagaacaagaagaagcgaaacaagagt

SEQ ID NO: 105563 - DNA, 254 bp, Arabidopsis thaliana columbia
gcaacttgaggagaatctgtatcaggtcaggatgctcgtcgtgatgatggctcagcctcaagggatatctgggctgttatgggctcacctgtacctggcgataagaactgtcctataagggatctatctgattggtgaaattgcaatcagcttccatactgtaatgggctgtgaagaagcgtgatcactctcatgactgtgcggtacattctgtattgaaagaagtcaaaggtgggcttatctgtaagagggtt

SEQ ID NO: 105564 - DNA, 133 bp, Arabidopsis thaliana columbia
gtgatctacagcaccacaccctaaattgaactccgcgactcgattgcaaggaaagggcgcttgttttcaatctacctcaggggtgcattgaaccactttcgcagctttgtagaagctgtgtaacctttaagga

SEQ ID NO: 105565 - DNA, 293 bp, Arabidopsis thaliana columbia
gaaaccctaaaccttatttaagccaatatttaccaaccctatagaccaaaccatgagctgactgtgacccaccggaatacagatcgaagaatgtgtaagggtagatcataaagactatttgagcaggaaaaccctttctgagaagctcagcagcggagaaagcaaaaaagttagttttctggatagacacttcttgatcagaacctggggagaggtgagaacccttacacgatggaagctggagtctcttagttgaagtacgcagccagcatgtttttgggcttgcatctcta

SEQ ID NO: 105566 - DNA, 447 bp, Arabidopsis thaliana columbia
cggggtgagactagtggatgtgagggatcacacttcctccaataattgttcctttgatgagtgtgtcaagctcttcatctcctctgatcgccaactgcaaatgccttggagttatcctcttcacttttaaatctttgctagtgttttcggccaactgaagaacctctgtagttaggtattcaaggattgaagtcatgtagacaacatcagtcgcaccaacactactatgtgcagaaactctgttcttaagttgcttgtgaatacgagccacttgaaactgaaagaaacaaagaaacaatatcagtataaaattttatcaaattatactacaaaaaatgaaatttctttgtttatttcaatttctagtgggtcgtattcacatgcaactcaagactagagtatctacaacatggccgacttggtgctattgttgttgactacacggct

SEQ ID NO: 105567 - DNA, 426 bp, Arabidopsis thaliana columbia
  unsure (1)..(426): unsure at all n locations
gcgctttagttaaaggcatccgataaatatgaatatttaattaattatatgtgtagtatattttttgggacaactactatataagctgttatttaatattcatatttatcggatgccttgaactaaagtacaagaacatgttgtttaataaaatatatgacatgttatttatcaatctaaccgttcaaaatttatttccaaatattttctgtttttttgcaaatttacaaaacaattgggtttttaatattctttcaccattattatttgattttggtantnaattaaaagattatagttgtcaaaaaaaaaagccatactaacatacatcaatgaaaataaattatttcctgcaaataatttagtttttcaaacccaattgtaaaattgaattggttataagaatttatttatttaaagattttt

SEQ ID NO: 105568 - DNA, 428 bp, Arabidopsis thaliana columbia
acgaacaaacaaaaagtaaaatggttaagctcacgcgtatgtagagagagagacccacagagtcgatccctcctttaactggagtattggagggagcgaattatcggcgctgataaagcttctacccttgtgttagattttcgtcgtgagattcgattcgatcttaaggcggattaaatcgaggtatgcaccaaggggatcaaacggttctgagcttgagacctggtggcggtcgaggaaacagactatttggttcctcttcttcttcttcgtctctctcttttggctctctttcatcttcggatctacctctccttcgtcctcatggtggtgctcctgcttcctcttttcccttcaagggtggagactcgaggttcgatggccgcgaacgtgtgaagtacacccgtgagcagctccttgagcttaaa

SEQ ID NO: 105569 - DNA, 270 bp, Arabidopsis thaliana columbia
gaaaaaaagagagatgagcacaccgaccataaatcaatcggtcttttatataatagtcccccttttatcggaggccgattaaggaaacatggcggtgatgggcctcttctttcttggctggtctgcatgctcaaacccattttcgaccatcaatactatgagcccattggacttgtgcagttacctgcatgtacccagactcacaccgagactctgggccttatatactgttcaatctcttaaaaacggtttaaggagatattccccact

SEQ ID NO: 105570 - DNA, 178 bp, Arabidopsis thaliana columbia
ccggggacccacgcgtcagtcgcatatacaagaggtttttatactattccggctaacacatgggggaagatgatgttccggcccattccacaccagtggaattgatggaatctggcgacccctgtgagtagcgtctgagatgatgacaaaaaccttttatgagcgacgaccgaactga

SEQ ID NO: 105571 - DNA, 397 bp, Arabidopsis thaliana columbia
cgttcggtctacaaagtccatttgcttcttctgatttgcaaaggagcttaaaccttaaggtataatatgagagatagacaaatgtaaagaaaaacacagagagaaaattagtttaattaatctctcaaatatatacaaatattaaaacttcttcttcttcaattacaattctcattctttttttcttgttcttatattgtagttgcaagaaagttaaaagattttgacttttcttgtttcagatttcagcaaatgggatcgattttaagcttcgtctgggttaaaagcttggatcctatctgaagacagaacaaaggttcttgcttttgattcattgcccattttgagaagatgttcgaagggtcgcctcgtgattcttgtctagtttcaacacttt

SEQ ID NO: 105572 - DNA, 410 bp, Arabidopsis thaliana columbia
gagaaaaccgatgctcacagcgtatgtttgtgacgcgcgttctgacgttttcctggttgttaccggccgaacagtgaggcgccgacttcgtgtaaatatttaacgccaatcaccgttttactcttatattctactaaacgaaaccttctccaatcgtctcaatagtgaatctcgtcagagctattgttggagctatgccatcatgggtttttgttgggtgtgtggcgagcaattacagtatgctgcggactaggggtgatgattccggcgcagatgactatcacggcgaaaagatcggtgatccgtaccaggtggctagaggatcctgaagactgacaagtgaatgagtttgtgcatagacaagcgaaaatgacagattttgtccttgaaaagtgtgaaacagaggagga

SEQ ID NO: 105573 - DNA, 405 bp, Arabidopsis thaliana columbia
atggaaagtgaatcacacatgttactatcgcttttgacaagcagatcagccatcgaaccaatggttgtgtacaaagataaataaacctacaacaattatgtaacgtatactcaatattagaatacacattgccaaataaactgcatcaagaattgttccgttaaacattgaatagtagggttaggtggctgtaagtagcaatcacctgcaaaagagctggtctatccttgcttatacagtcaaacaacacttgcagacagaactccttgaattcagaatcagatctggatcaatgaatatgttagaattcgcccttctgagtttgccaagcaaactaccgaactctgttatgacttatggaactaaaagcacaaataaatgtgaatcaaccggataaaacagtac

SEQ ID NO: 105574 - DNA, 411 bp, Arabidopsis thaliana columbia
tggtattatcgtctcctttgattgaaatgcctttaactaagttctctggtctcattgtatgttcgttttggaaacagaagcgcttctgatggacaggaacacttggttgatgatgttggagctggttttatacctggacatggtagtcagcagccatcttcttcagaacataatgtggatcgaacaattgactcgccaggccaggaagaaaccggaatgactggtgtttctaaagtaatcagagctgaccagaaacggttcttctttgatcttgggaacaataacaggggccatttcttaaggatatctgaggtaatcttggaagaacaatcttttgctggcttatctcttgagagcttgtatttaccatggttttaacattaaagcatttctcaatataggtggcaggtt

SEQ ID NO: 105575 - DNA, 409 bp, Arabidopsis thaliana columbia
cggacgcgtgggtggctatatcgctttccaatcgattgcttatgaatgtttcattaggtggctctaaatgataagaaactatttttcgtgcttttgcctctttactccatcgatttagaatgtaggtagatgggattcttctaacattcttcttgtctaacattttcaatgcataaagacataaaatcccggcaaatctaaacttcatgcaactataacatatcgactcgtttacagcatcataattaaccaaatgctcccatgctacaccacagtaagatactttatattcatataccatctcagacttactaaccttgttggcaacataatcaccaataactatgtattgtttctggaacaagttaaattttttgggtgtattcatttcctctgcatgttgcaacat

SEQ ID NO: 105576 - DNA, 415 bp, Arabidopsis thaliana columbia
  unsure (1)..(415): unsure at all n locations
ttccaattttgatttatcaaagaaaactcctttgtgagagattatttatgtactcttggtgcanagaggataatccaatgccgagttttctgagtcgtaatttagagagaatccaattcgatggatttagatatgaacggaggaaacaagagagtctttcaaagactgggcggtggctctaatcggccgacgacggactcaaatcagaaggtttgtttccactggcgagctggccggtgcaatcgttacccatgcccttacctgcatagagaattgccgggtccgggttcgggtccagtagcagcttcttcaaataaaagggtcgctgatgaatctgggtttgcgggtccgagtcaccggagagggcctgggttcagcgggactgctaataactggggaagattttgtgggaaca

SEQ ID NO: 105577 - DNA, 407 bp, Arabidopsis thaliana columbia
cttgaaaacgttaaatgatctttttcttctatcattaatctcttttaatctttctgggtctcttcttgaaaagatggcggccgataacggaaatgctactaacggtgacggaggttttagtttccctaaaggaccggtgatgccgaagataacgacctgagcagcaaagagaggtagcgtagtctgccacgactatagtggtccgactgtgaatgccacaaccatcgatgagcttcattcgttacataagaaacgttctgcttctaccacacctatcaaccaaaacgccgccgctgcttttgccgccgtctccgaggaggagcgtcagaagattcagcttcaatctatcagtgcatcgttagcatcgttaacgagagagtcaggaccaaaggtggtgagaggagatc

SEQ ID NO: 105578 - DNA, 314 bp, Arabidopsis thaliana columbia
gttccttagttagagtataggcgagtaacgggtctgatccaaccacaatacgcctgtaatatcaagcacatggcacagattataaggactgattttggagagcagaaagcaaacttggtcaccaaataacgacagagacggtattttatacaagttgatgagagatcaagacaatctatcgctgaaaaaagccaacttaccagtctccgtctactgcttttagaatccttgtcaaccctttcaattgactgatcatataggcattcactgctccaccaagcacttccttcagtttcaattaatcatacataatg

SEQ ID NO: 105579 - DNA, 298 bp, Arabidopsis thaliana columbia
ggaatatttttaaaatattataaaactaaatttttaaaagaaaagaaaaaaaagtatacacttatacgtataattttaaacaagtagtactactgtacaacttatatacaagtcctaaaacttagtaaattatatttatatcgttaaatttggcttattaatattaaggcatataactgaacatagcacgagtatgactttcttgtatacaataaacagaactatacaatatatatgtcctatgtgactacgtgtgattacaaaatgcagtgatatagcctataggtaatttgccccc

SEQ ID NO: 105580 - DNA, 415 bp, Arabidopsis thaliana columbia
cgcgagaaaaaaacaccagctcaaaattacgcttggctcgagactttgaagatcaggggtttctgtttctgttggggatttcggggaagctttgggaggagaggatctcacgtttttgttcgtttatggcgtctgtgtgagacatagtggtggttctagcttttaggtttttggtgtgtgtgttcgtgttatgttaattgctgtttgtgtcgaagaagaggaagtaataaattagctcaaaatgcatttcactaagcttgatgactctcccatgttccgcaaacagttacaaagcatggaggagagcgcagaaatattgcgggaaagaagtctcaagttttacaaaggatgccggaaatacactgaaggactaggcgaggcatacgatggggacattgctttcgcaagtgcactt

SEQ ID NO: 105581 - DNA, 420 bp, Arabidopsis thaliana columbia
ggtgactacctgtgtgtattataatttcgttacgctgagggtagtacatatatgtgctttattcaaatggaggtgagatctttactttgatttgattctaccaatttagtcttcccaagttaatgatacttcagccagtaaagctgatgagaaggcggaagaagcgagatattcaagtcattctttggaagaaattgctgggatgatacgcaataccatttctgtttatgaagcaaaggtgcaaagcacttttcatgattttgacgaatcatacattctccacccatatatgagtgatacaatcaaagaagtatcaaaagcatgccaagcttttgaggccaaagagtcagctccccatagtgctgtcatggcactaagaaaagttaaggtggaaatcactaaaatatacatccaaaggct

SEQ ID NO: 105582 - DNA, 415 bp, Arabidopsis thaliana columbia
aacaaacttacggaaagttataacggttatgcttgaatatatcaagatttatacattgttagaaaaaaacactgttggtaaatgggttatttacttattcttagatcttgaacagaattttatattaatcttcttgtatctttaaggagttgttaattagttatatttaggggtataaaccggccttaatcaatccaccttgcttgtgatacaagaagattaatctaattttgtttaatatctacattctacaattagatccttatttttaataaacaatgtataaatattgatatccttaccatagtaatgaatattgcgatgttttttttatatatatatacaaacctcacataagacttttcttcttattttgtaacaaaacttttgtacaatcaatacatgacaaatcatt

SEQ ID NO: 105583 - DNA, 338 bp, Arabidopsis thaliana columbia
  unsure (1)..(338): unsure at all n locations
caggnnaccggnnnccggaattccccgggtgcgaccccacgccgnntccgatggatgtcccggtgcatttgagtaagtgatgtgtacgctttcagcacggcgaaangggccatggggaggtatatccgtctgtgatgccagtggatcatccgatctgnnggaaaccgtatctcaagtctctcgtgggcttagatctgcgcctcttctggactnntatgaaaacttatgcgaacctgtaaacccatctaagtatgctaaatggaatgggtaaatcaatccgatgaccctcgttatgtatgcgtgcgagccgagtagccggtatttgggaattttaatga

SEQ ID NO: 105584 - DNA, 411 bp, Arabidopsis thaliana columbia
ctcattggcttggacaggtcatttagtccatgtcgctattcctgcatccaggggggaatatgttcgatggaataatgtcttaaatgtattaccgcatccccaagggttaggcccactttttacgggtcagtggaatctttatgctcaaaaccccgactcgagtagtcatttatttggtacctcccaaggatccggaactgccattctaacccttcttgggggattccatccacaaacgcaaagtttatggctaaccgatatggcacatcatcatttagctatcgcaattcttttcctcattgcgggtcatatgtatagaacgaactttggaatcggacacagtataaaagatcttttagaagcacatattcctccgggaggacgattggggcgtgggcataaaggtcttta

SEQ ID NO: 105585 - DNA, 260 bp, Arabidopsis thaliana columbia
  unsure (1)..(260): unsure at all n locations
cacgccgnntccgggattgtacaccacnngtcaagtcattatacttcanntctaagacannaggaggtgatgtaactaaggatagcacttataactaagtgtgcatgagaggagaccagctatctganntgtctttnncttttcccttttcttttcgtgtttattaattttttcactttcttttggttcacacattgtgatgtttctgatgatgaccttgtggggttagttgttttgagatgaacttgaaggcactaatt

SEQ ID NO: 105586 - DNA, 418 bp, Arabidopsis thaliana columbia
cgtggaaatcatgagtctcttgcaatgaatagaatttatggttttcttacagaatgcgaagaaagaatggtacgtctcttcagagaatatatattctcattgtcattggctaattaatgaagtaacatatataatcttgttctgtacgttaccagggcgagtcctatgggttcgaagcatggttaaagattaatcaagtttttgattatcttccgcttgctgcacttctagaaaagaaagttttgtgtgtccatggcggaattgggagggcagttacgatcgaagaaattgaaaatatcgaaaggccggcattcccggatactggatcaatggtcttgaaagacatcttatggtaacatactctcaactatttctaactttttttctttccaagctgtgtaataacatttttttatgg

SEQ ID NO: 105587 - DNA, 414 bp, Arabidopsis thaliana columbia
cgagaattcatttgaatattggtgcataaaacatttgagatgttgacaaaaaaatggctttttgagatgtattggcgtattgcgtgcgcatattcatatccactatccaaaatcaatattggaccactggaatctcctcgatccacttttttgtccccgtaagttttgtcctcaactctttgaaaataactattctctgcattcttctatagtatataagtatacaaatttcaattttttttgtttttcagaaaatatcagtatttaaactatagatcttgtaaaatactagatacgatatagtaacacgatggttttttagaaaaagcaaaaccactagcttttatgtaacgaggtgatatggttgacgattaatcatatttttttttgagttacgaattagatagtatatat

SEQ ID NO: 105588 - DNA, 415 bp, Arabidopsis thaliana columbia
aacctctctctctcacactctacactctgataacagcgtttatcttgctttctcctgccaaaaagtcccaaaaaacatcaatttctccagagaaacctctcaggttctacatgtgaatgtttggtaaagacagaaagaaagaaaagaggagagacatctgtgacttctttcataaacggtgtcgttctcatttctccttttattcccactagcaatctttgaaacggacccttcagtttttattttttttgcttgctggtctcaatagtaaagtttgaatattttctaaaaagaaagagagctttttttgagattttagcattctgggtttctttcaaatggtttcgtgttctagaagaagtacatagctccaaaagactacatttttgctcaaatgggtccttaaattcgggtt

SEQ ID NO: 105589 - DNA, 409 bp, Arabidopsis thaliana columbia
gtaaacataagaacaccaaacaaaaacgtgatcagcgacggcaacgaagacggcgaagaatacggcggacacgaggattcccaacgatcagattctttgacattccacggcggcttagatatcagcttctccgatccgctctctctgtttgtgtaaatcatggtgatcgcggctgcttcctctttttccctcggtacttcgccattcttcgagatctctcttcattttgtttcatatgtattgttcattgactaatctgaagttagtgcatggctgacagagacgaattaaaattaacttctttttttcattaatggcgaaagcatttgggagattctttttggttgacttgttttgatatttaatcgaattggtttgtttagctcgatcgaaatttgttttttggttc

SEQ ID NO: 105590 - DNA, 422 bp, Arabidopsis thaliana columbia
atgacagcaaaattcttgaatattttgtaggccatggtctttgtaacttgtcaagaacatagatacgtcggataaattcatagatatcaattcaaatgataagctagcttacgaaaagcgtttctcaagaaactatgatttttttctaagaattagttggtcgttacgataaataagaaaccttgaattgatggaaaagaagataaggaattaattaagagattggtaaaatggtagttgagaaagtaaaaaggtcacgtgttagggcaaatcattaatggaagaaggagaaagcaggtagaaatgcactctccattttcattacattacaaactccacgtgaggtttcaccgattgtaggaactcctgattttgggttaattactcacaagtaattatcatatagcgcgttgcttaatatt

SEQ ID NO: 105591 - DNA, 527 bp, Arabidopsis thaliana columbia
  unsure (1)..(527): unsure at all n locations
gtccggtggggatccagcttcataangcacctcgaggctatcaaccttctgggcttctttccagatcgtcgttagaaatgtatggaaccacacatggagaggaannttgataaacattctggaattaccgaaccataannngatgtaacccaatttcncnttcattaaagcngnatcaaaacaagggtcttaagagagcgtcttttngggctttanntgcgaagagaacncacgcnnagatannaagggggtcacttttgatcttncagcatcnnttctgaccactgatttctgacctaaatggcgtacctgagtatttctctagggagaactcgggtatctagcttaacctagttgatgggtcaaagcttcgtcantgaggaggatttgtatgcgactccttgaaagatagggcccatgtctcttcctatttcttgggtattataccagaatttactccgcgcttacttcctttattgcaatgaaccaagtgagaaaaccttgtgtgatctttaatagtctcatct

SEQ ID NO: 105592 - DNA, 101 bp, Arabidopsis thaliana columbia
gaacagaataaaatcgttgaccacgactattacactgaccgcatcgtgcgaggttttgcttgtgaaaagatcgctgacaagctggtctaaaacttgcggtg

SEQ ID NO: 105593 - DNA, 424 bp, Arabidopsis thaliana columbia
aatcggcaaagcaggaatcgagaaaagattcggcatgttcgccttcacgctcacttttctcctctcttcaacagccgaaaccctcccgatcttcatcaacgagcgtccaattcttctcagggagacttcgagtggtgtttacagactctcctctcacattctcgcaaatacactcgtattcttgccgtacttgttcgttatctcaatcatttactctgtttcggtctatttcctcattggtctctgccccacatggcaagcttttgggtacttcgttctcgtgatatggatcattctcctaatggcgaactcttttgttctcttcttgagctctcttgccccaaattacattacgggaacctctcttgtgacaattcttctagcggctttcttcttgttttccggttacttcatttccaaggaa

SEQ ID NO: 105594 - DNA, 430 bp, Arabidopsis thaliana columbia
ctgaaatctccttacccaacacaccctttctcacatacattgacatttgacacattctttgttatttctcaattagtattgtcctttaagtacataaaatgattgtttttgtaacaatgatgggtaatttatagtttacactaatgttgttagtttgttgccatctagggttcatctaaaataataataataaaaaaaaaaaatctagggttcatctttaggaaaaaagcatgtcgacaaaagagaatctaaatggtcgatgtgttcaatgtttagtgcctcatgggatttttcaaacgtagcactatatcaaagattcaaagtgtaacgtttaagacaaggaaaacaattgttagcataagaataactaagtttgtaataaactatatttaaatgcaaatatgcaatatagtccgatacgtcaatcgtt

SEQ ID NO: 105595 - DNA, 394 bp, Arabidopsis thaliana columbia
ctttcgaatttttcgatcagatcattgtcgttaagcaaatataaaacaaatcaggagcaaaccttattgttcttccttaggtatgcatgtgcacctcttctgttcttctgttaactcctatatgatccacaccaaaataaaccaactcaaaaatgcatacttaaatagtaattaagaactctttttactatatactttgttgactaatcatttttcattcatctattgggttcctctaaaaggttttgtgtatatatattaacttagataatttacctggatctgcctttgaagaactttcacgtattctactgcttcttctaacatgtcttgccgtgtggtttgctgcaacaaagacaaaaaaggaaacctagattcaagatctttatatatt

SEQ ID NO: 105596 - DNA, 224 bp, Arabidopsis thaliana columbia
  unsure (1)..(224): unsure at all n locations
agaggaagaaaaacgggncgagttttttctattatctctttctctctgacactgttgatcctctttaatggttgggctgcccaacatttgtccaacttgtgccagctcgatcaacttaatgcgctcgtaccattctaaatcatcatgagcgagggtggtcgcatcgaggtctgtgactctccttgcactctagtttcgttgtttctgttttgctcttgagcgtt

SEQ ID NO: 105597 - DNA, 129 bp, Arabidopsis thaliana columbia
aatggaaatagaccaaaatgacacgcgaatactcttgtgctatatgggaatctttagcatctatagcctaagaatttccctctatttcatgaactatttcaacctttcatctttgtgtcccttgcctag

SEQ ID NO: 105598 - DNA, 277 bp, Arabidopsis thaliana columbia
cgcgattttcgtgcttattagtatggtttcttcaggtacttctttggctcaagagaatgctgttggttgtttggctagtgtaacgagtggggatgaggatttgatgatatctgttgttagagaaggagggattcagtgtttgaagagtttttgggattctgtttctagtgttaagagtcttgaggttggagttgttcttctgaagaacttatcgttgtgtcctattgtgagagaagttgctatatccaatgggtttattcatttcttgttactggtt

SEQ ID NO: 105599 - DNA, 340 bp, Arabidopsis thaliana columbia
gaaaatttcaagaaccctagttaataactataatgggttcgagagttttggcttccttctttgttttcttaatcttgacggtcatcacattgcctcccacgatccaagcttgcactccttgtactcgtcctcatcctccggttccgaaacctccacaacacggcggtggtggaggtggtggtagcaagccgcctccacatcacggtggaaaaggtggtggtttacccccaccccacggtggtatatgtgttggtttcgttttttttgttttttgtggactaattctcactctctcatcctctttattatctatctttattttattatttttttttttttt

SEQ ID NO: 105600 - DNA, 404 bp, Arabidopsis thaliana columbia
tacatatatatagatacctacatatatatatctctatgtctttgttcatcatcagttatataggtgatgtagatagatggacaaaaaaacagcgtaagacctagtttctgacttacatatgttttaaattctttgtctgaatcattacaggatccgagagagagagctctggaacgatattaacatatatcatgaagaaaaagattgaagtattgatatgggaataactaaaacttctcctaatactacaattctcttgaagacttttcacaataattctatgtcccaagattatcatcatcatcatcatcataatcaacaccaaggaggtatcttcaacttctctaatggattcgaccgatcagattcttccaatttaacaactcagcagaagcaagagcatt

SEQ ID NO: 105601 - DNA, 399 bp, Arabidopsis thaliana columbia
tccgaattcgggacgaccccgcgtccggtcgttcgaagagactaaaggcgacggagagaatcggagaagaagattttaacggcggtgggacagtggctagaggaagcgcttgttgacctctgccgcaaaccaaaaaccggtttgaatttcgatcgtgatgtcatctccggtttagtctcctattgcgatcttgctcagcctgtcgatgccaaagaatatctcgacaatattattggaaaagaaggcaaaagcatcattgcagaatatctacagcgaagaggatacaaagatccatctagccatgtagcagccagttcaagtccagaactgcaaatgtatgttaagccaaaagtggataatgttgcttctagtggaaccaaaaaaccggttaaaacacca

SEQ ID NO: 105602 - DNA, 597 bp, Arabidopsis thaliana columbia
  unsure (1)..(597): unsure at all n locations
cggaatttgccggganncgaccccacgcgnntccgcttccttaatcctcaagtacttcnntccgccttaaagcgctcntttcgtggctttccatctctgtaaanannacgctatgnnngtgctacnncgcaagtgggagacccgtataacgcnnaaagcgcggcagcgtctttacgtgaccaananncggaaaggggctcaatnnatacaananntggtganacngnnacaacgnnngagaaaggagtnnngttcgacncannagagaaaatctccaagnncggacanngttacctagnnntcgtgcncacaaagggnnnttttcggtcaatgtaaacaaatgccanntaggcgaacccagttcgagggtggatcgannattcaagacnnaaacgaaaacccgcacaggtcaacaacaactcnngcgggccgtaccctcaagtcaatgaagaaggtttgcnncgcttgaagggttataacnncaatgggtaccccaganntctctctccgaaaggaaagctaaacgaagtaaaggtttaagcnaacgattgaagacncaacacnttgacccaatagcaagtcccaatggaggctacg

SEQ ID NO: 105603 - DNA, 382 bp, Arabidopsis thaliana columbia
cgacatggatgcatgggctcgtagatgatctaaaaaactggtttcgattttaaccacatctaactaagtggcgcgcttcactaaggattggagcctaccaacatcctcactaactaagctggtagtagggcagaacaatataagccgactccgctcgcacgttctcacttacctagaggcatccacagggtaagccggacaccagcgccgcacctacaaagtacgacgagtcagtctcgcatacttcatacgtaagccttgtgattcgagttcaacgtatacaggataagtcaagggacgccttgccccataatacgtttcgaaaccaagcttaaacgccaaggaaaacctcgcagaatataagcttaggataaccttgcac

SEQ ID NO: 105604 - DNA, 492 bp, Arabidopsis thaliana columbia
  unsure (1)..(492): unsure at all n locations
aaattggtcaaataaaaattgatcaagttcatgtcgaaaaagatgtaaaaggattttgcatgttacattaacctaaaaccatagtaaattataatttctaactactgagagcaaatcctctaccaaaaaatatcctaaaaacctaagaaaccccacaaatagtacaactgttacattacataggagcagtgcaagttgttctgaaatggcctgtctgattacaccgaccacaatgaaccacacgcctcacacggtcacgatcctctgcccttactctcctcttcctcggagcacctttcatagcctttggtgtttttattacattttcactgtctctctctgaatcattntctttccactgaactttgtctgatattggctctagagtttctgcataagctcttctgtaattcttcactgtgaaacaactctctgtgtatctataaacgtcctcttcgcaagacaaagagagctcaatggcgtggctacagg

SEQ ID NO: 105605 - DNA, 198 bp, Arabidopsis thaliana columbia
gcgtcggtctcgcatcatgggggcccacggagatagaagtcaaagaatcctcttcagacgaaaaccctgtcattgaagctgtctctacacgaggtgataagcggtttactgacaacccaaatcctccagatgatcgctctgaacctgtgcggacacaaaaggctccaggaaaagtgcaggttgcttctgaatggatga

SEQ ID NO: 105606 - DNA, 280 bp, Arabidopsis thaliana columbia
gcgatgattaccattaagatccttgaaggaggaggagaggttggttgtatgacatagccaagagttggccccgaggatgggtgagatggcctggtctgagacgttgggtttgaaatgtcgggttttgatgatattcctattgtgagtggattctttaactgatgttttctcttctcggttgacgaaggctttgatctggatatctacaaacgaggccatgtcgggggggagaccagaggtgggtagaataaggtcgagcatgaataggtcggagagtttt

SEQ ID NO: 105607 - DNA, 456 bp, Arabidopsis thaliana columbia
caaataccttaagatcacatcatcatatagcttttgtatcattaaaatggcagttcaagctcaacaccattcctccaatctcatcttcctcaatacaagaaacgggaaagagaaagaacatagtaattttacattacaatcacaagcagctggagattttaatcttgatcaaaccaacatgttattcaacaatggaagttctaatcagagaaaaagaagaagagaaacgaacaatcatcaattgttacctatgcagtctcatcagtttcctcaagttatagacttatctctattacacaactacaatcatccaccgtcgaatatggttcatacaggactccgattattttccggcgaagatcaggcacaaaagattagtcacctgtctgaagatgtttttgctgcacatatcaataggcaaagcgaagaacttgatgagtttcttcatgcccaggc

SEQ ID NO: 105608 - DNA, 494 bp, Arabidopsis thaliana columbia
atctctttcaagaattttggtatatatatattagacatactctaaactaaaataaaacttataacatatgtattgtgaaaggacagatacagaggaatgggagttatcaatgtgtgacaagtgagagcagaaaagcatgaccaaactattcaacaggtacattaaagtgttctcaggaagggaaatctaatcttttcttctgacataattttgtagccaactaaattgacaggaaacgaatcatttagatttatatacatgcataagtagttatccctcgaacatttttatatatataggaaatataacatgagtgtgtggataacagtttacatttaaaaagattggaggaaaaaggaaactttggtgcaagaaatcagaaagacagaagtggtgaaaatacaagaacttattaaattaatgagtggatacattaaaattcaattattataaaagaaacaatgattaagctgatgggtcctcttaatttatat

SEQ ID NO: 105609 - DNA, 491 bp, Arabidopsis thaliana columbia
cactgataagggcaactctagggttcatcatgtggctaacaggtgaaaggtagataccctagacgatagattcaaaaaccgggtcaatccactctcgtgaaagagacccccataactctaccacttcctaatctcaattctcgttgatgaaacatagtagatcagagtttaagcaacaatctaccaaattcaataagcggtctagccaatctctttgtctagagtctataaatctctgaaattcgtaaatcaggcatccatttgaacttcttttggacgtgggatacctatggtcgaatacccacattagccagcaaaaaccgcataggggccaacgaatccaggagggatctaacctaatcttaaccacctgactaacctagagattacgctaatctaatccatcctcaagaaccctaatcactactcaagcaacataactaagaacacaaacccataaattacttgaatcataccaaaatgtagatcta

SEQ ID NO: 105610 - DNA, 359 bp, Arabidopsis thaliana columbia
caaactttcaaatttaaaagtttgtatacgagttaattcagtttttttgaattgttttatttttatcaaaaatagtaaatttaaaacttttaaatattataattcatagatttaaaatcaaaaaaaatttataatattatgaaaatttggacatattaaaagaataatacatgatatattatattgtaggatagagttatatggaaggatgagtttgaatcaacattaataaaatttaaaatatcaagatatgttaaattctcatattattattttttaaagccatcaatattagacatttcgactctgaaatgaattttttaagccattttgaaaatatcgtttcatttaaatgacta

SEQ ID NO: 105611 - DNA, 383 bp, Arabidopsis thaliana columbia
ggtcgtactttgtatctttggcaaaacacaaaaaacaaaaacaaaaaaactccttatatttttgtatttgatgctaattgtcgtatagatgcccaaactcaattcaacccaagctcccaatttatttcttctccttctcgttatccttctttgttcaacgcaaacacaatgccacaccaaaggtctccgattacgaccaagaaaccagaagaatatgaacacgacgagtgatcggacacaaaacccggaagatgagttcatgaaatgggtgagattcgttggaagccttaaacactcagtgttcaaggcagccaagaacaaactcttcccttcttatacattaactgtccacaagaaatccaataaaggtgacttcactaaaa

SEQ ID NO: 105612 - DNA, 422 bp, Arabidopsis thaliana columbia
ttcttcctaggcatattgataaacacttcacacgccattgatatgattcagcgacaataactcctgctttaattgacacgtgtattgcacgtgacctcgattcttccggacatgctatgtttgggctttcctcgttttactattccggacaggatctatttgggctttcttttgctcattttatagaaaggcccccgttgcttttttttttctggaaaaatattggggagatgaatgaatagaatattttaatcaaaatccaattaaaggatgtgtgtgtcatgatgagaggtccactatatttgcgtcttatcttccttggtcgattgagattcatttagatattagaaggaatcatccaaacttgtcttattcacgacaccaagatttggtttctaggtagaaacccaattcagcccata

SEQ ID NO: 105613 - DNA, 537 bp, Arabidopsis thaliana columbia
  unsure (1)..(537): unsure at all n locations
agactctataattttaaaggtcttcctaataaatgccacattcatgcaaaataaaaaagtaacaataaaaaaatgaaggtaggtgactcttgtatctaccaaaagggtccaaaaagaatctaaagggacccaatcacacatgccagcctgaccagccccaatagtcttcacgtgagatctaacccaccggtgacgctaaacctccggccaactcaatcttgtctgcttgccggtcctgcctctgtctgccacgtggcatcttccttcctcacaagtcaccacctatgctccttcctctctcgntattcgccacgttctctctccttatttcccgaattacccttcacgtaagggtccgtttcggcaaaaactataacccaccatgcgctgtcatgtttacttgttatcactacacgacactttctacgtggacttagnatcttggtgctgncttcttcttctttccttagtatatataaactcgtcacaagggtcgctctttcattcacaatcacaactcttaagaataaattaaaa

SEQ ID NO: 105614 - DNA, 497 bp, Arabidopsis thaliana columbia
gcgcagggtttaaagttgctcgctgatgcaacttcaactcctcaagatcctggtattagttggagtaaaagagcagaatgcggtcctaacgacgacactggttgtgtgcttacaattaatgatatctacttgtggcttcttgggactttctttttgtggtttgttttggctctttactttgacaatataactccaaatgcttctggagtaagaaaatctatcttctactttctaaaacctgggtactggaccggcaaaggtggcaaccgagtagaagaaggtggaatttgtagttgtattggttcagttccacctgtggatcacattaccccagatgacgaagatgtccttgaagaggaaactttagttaaacaacattcaatggagggtttagttgatcccaacgttgcagttcaaatacgtggtcttgcaaagacttattctgggacgaccaagtttggatgcttgaaatgcaaaaaaactttcccttttcatgc

SEQ ID NO: 105615 - DNA, 459 bp, Arabidopsis thaliana columbia
caaatattcaaatttccttcaattacaattttgaaaaatgtctggtttatcatcagtttaccattttcgttgcttgaaatgatgaactctagacatagtgatttaaattcctaattttatgtcgactttcattttaatcacgaattctcgttaactaagtcaattaaggcacatctctagaaatttcttaattaaaaaccctaaatcaccataatcagttgtcaattttttctctctatttttcctatggattctctcatccttattctttgaattcaaattaattatctgcctctagatctacttatggtgaaaaaactagattattcctgccttaattttcttctgttacaagaattcatgacttaattcaatttattcttataattaaattaatttactttgctctgtgttattctctaattattctatatgtttatctattattattttcatttt

SEQ ID NO: 105616 - DNA, 499 bp, Arabidopsis thaliana columbia
  unsure (1)..(499): unsure at all n locations
aaaaaaccggacgcggggaaaaaaaaagaaaggggcccactaaaattgctaatttcctctttttatttttcaaatacaacattgacattttgctttgttttcaagttaaatttgtctcattccatcaanaataattcgactaaataacaaaatgaaaaatattcaagtaacaacactaaataactaaaatcagttgtaaattgttattggctttgtggcatttacaacttcatgaacacttctgattctgacaatctcatgttataacaagtaacaaaatcatgttataaaattgacgacattttgatgatattttcttcaatctattatgacgaattcgttccattatctcccctattcattctaaggtaattgaatctctttttgaatttgtgatttacttttgtcctttcaaataattaacttatttttctaaatatatatatatcttctactcttataaacaattatagcgtttcaaatactaattatcattatc

SEQ ID NO: 105617 - DNA, 510 bp, Arabidopsis thaliana columbia
aaaaaggctgaaggaaatagaaacagctaggacttccacttgttcatttcaaatggaattgttgtctggggggatgatgtcttatataagtcattacgtgacaaaatccctttttgtaatacaatactactaatttttttttttttttccaactaccttaagaaattaaatatatggattattaattaattacaattttgcgcactcaattcgtcgatttcttcattattaatttcgttttgttttgactttctttcaatcatatccccgccgaacttgcttattttagtagcacatcttcccccacacaaacgttttaattaattgattattatgtacataaatatacattatcatatatatatcttacttgcaagtactaatatgtaaaagttatatttaggtcagctagtggtagaattcatatctagattgatgacttctacatttggataacttaatcgtagctttgatttgttgtataaacgtgtttctcttgaaaaacatgat

SEQ ID NO: 105618 - DNA, 391 bp, Arabidopsis thaliana columbia
caaaagaaaatggttaagctcagcaatctcctcgttgcaaccttctttgttctcctcgtccttaacggctgcctggcgaggcagtcacttggggttcctcctcagctacagaacgagtgtaacctcgacaacctagatgttctccaagccaccgaaactatcaagagtgaagccggtcagatcgagtactgggaccacaaccaccctcagctccgatgtgttggtgtttccgttgctcgttatgtaattgaacaaggcggtctatacttgcccaccttcttcacttccccaaaaatttcctacgtcgttcatggaacgtttattagcggaagagtggtgggtggttgtgccgagaccctcatggactcttattctattcatggacaacttc

SEQ ID NO: 105619 - DNA, 310 bp, Arabidopsis thaliana columbia
  unsure (1)..(310): unsure at all n locations
ataacataacaccacgcgtccggttaaactagcaatctcctcttgcaaccttcttgattctcctctttctttacgactcccttacaagacactcgcttgttgttctttctcagctacagaacgagnnnaacctnnacaacctaaatgttctccaaaccacctaaactatcaagattgaaacctgtcatatcgagtactgggaccacaaccaccctcaactccgatgtgttggtgtttccattgctcgttatgtaatttaacaaggcgttctttacttgcccaccttcttcacttccccaaaaatttccta

SEQ ID NO: 105620 - DNA, 470 bp, Arabidopsis thaliana columbia
caggaattttttttcttaatcttaatcctgaagatggatccgaatttgaaatttaaaaattaataaattggaaatggagacgcctaatctaaatttttagatattattagagaataaatgatcaactggaaaaggtgctgataaagtttaagatattaccgaaacaaaaaatatttgtaaggagggaaatgacaaaaaaggaaccaaatatatgtctaacgataattaatgacgtaaggaaatatcttacctacatacaaataaaagcagtgcgcaagggggtgacgttgttttgcggctgaaccttgaatgttaggtgtatgattactttttttttttttttcactaagtgttgtctttcttgtattaagaacatcaaaaaggacactagtggaccttccacttacaggatgaagacaaacactataacaaggaaaaacatgatctaacaaaacacaatgttgatcatg

SEQ ID NO: 105621 - DNA, 183 bp, Arabidopsis thaliana columbia
gttgggcaagaataaatacacgggaaaaatcttttttacgttggggaaaatccgcgcgcgttcgtggttagatatgtcaggcaacgctctcacaggaaccattccgttacagctcgtttggtgcaagaaactgacacacatcgatctcaataacaattttctataaggtcctatacctccatg

SEQ ID NO: 105622 - DNA, 211 bp, Arabidopsis thaliana columbia
agttttacgttttcgagcgagtaggtcatggacgttgccttttctttgtctggcaaacacacttaccagggctcgttgccttttttgagatcataggcgcccaaatagtatgagacaaccgtaccgatgaaggctactcctcccttgttgatctattattcgtcaatgctcgttacccataccttatattgtatctttatcttatcatttt

SEQ ID NO: 105623 - DNA, 257 bp, Arabidopsis thaliana columbia
  unsure (1)..(257): unsure at all n locations
gtctcacnggttgtaagtctcttcatactccatcgcttgagaatgttttacaaaaaacgacattgttttcgccaataggccagagttaattctcgggaaacatattgagtacaactccaccactatgactagtgcgccttatggtgaccactggcgaaacttgcgccgcattgctaccctggagatcttcgcatcacataagctcaacggcttcttatctgtccgtaaggatgagatcccgcagttgttactacgtc

SEQ ID NO: 105624 - DNA, 389 bp, Arabidopsis thaliana columbia
  unsure (1)..(389): unsure at all n locations
cgatataatttcacagcggagactttgggaaagggatggctctcatcgcgatcatagtcaggcttttcttccttaaagaatttccaggtcagaaccagcagttttcatgactaaccattagttggaaacttggatctggaaaatcttttttcttttttgcatataaatgtagagtggctagagattccggtagcattgattcttattgtggtggtgtcgccgagccttatagcttggacactaaagaagctgggttggggcagtcatatgtctagtaatagcatggtaccttttccatgaacacataaaagcttctggtggattcaaaaactcttttactcaaaagaatggaatctncaataccaattgggatcgttgcccttcctcgt

SEQ ID NO: 105625 - DNA, 545 bp, Arabidopsis thaliana columbia
  unsure (1)..(545): unsure at all n locations
gcggtggcgttgaatctgcgatggcgggaatcaaattgctaccggaagatcttgttacgactcctaaacaacaagcctgtgccgtctccgcggtgacaacgacaacaacnaatagtttggcttccgatgacgatcgatctatcgcggcggattcgtggtcgatcaaaagtgagtatggaagcactctcgatgacgatcaacgtcacgccgatgccgtcgaggctctctcgaccgctaaacttcgtgtctcttccgatacagttctgataaggaagagccagatgctgatggaggaggtcaatcaatgcttggtcttcaaagctattgtgatgcaacgtattccgatgtgctgactaatttcagagagcattggtcatgcttatgaagtttgttttgtataatattaactggagattttaacttatttgtctaattgcttaattcttctactatttttttattatacttctttcttttctatctctactttcattttttctttttatattattttttttatattattttattttcttctttatttt

SEQ ID NO: 105626 - DNA, 438 bp, Arabidopsis thaliana columbia
gcatacattgataccatgaacaaggtgttaagtgcacattttcgtgcttatattcaagcacttgagaaactacagttagatatagccacagcatatgacttaattggggtagagaccagaaccaccggcctcttctcaagagctagggagccactaaagaaccgctctgccgtttttgctttgggtgacaggataaaaattataaaggatattgatcaacctgctttgatcccacacatagccgaagctagctctctcaaatatccttatgaagtgctcttcaggagcctgcacaagctacttatggatacagctacttctgagttctgttgatttttccccttttatatttgtgttattgtcgctcatcgctcaacccccaggttaacgtcatttgttttcattttaacaggtatatgttttgtgatgatttctttg

SEQ ID NO: 105627 - DNA, 367 bp, Arabidopsis thaliana columbia
gcggtaattaactaacaacaaatggcgaacaagctcttcctcgtctgcgcagctctcgccctgtgtttcatcctcaccggcgcgtccgtctatcgcacggttgtcgagttcgacgaagatgacgccagtaaccccataggcccaatacagaaatgtcagaaggagtttcagcaagaacagcacctaagagcttgccagagatggatgcgcaagcaaatgtggcaaggacgtggtgtgaggccttccctagacgaagagtaacctatggaacacgacatagggaacccgcactgacgacagcatttggacaccctctggaccgagctttgccaagaagagccagtttgcgtttgccccaccttgagac

SEQ ID NO: 105628 - DNA, 520 bp, Arabidopsis thaliana columbia
cttaccacccactccttccgatcagcatcatacatttctcctgttgtttgggtacactagtatggacttgggttgggcctacaagttattcatataccttttaaggtgtctacaaatacaaatacctaatgagtgtggatccaagccgcaccttttgtatctccaaaactagcccctctatgaatcttggaggggtacagttgattccaaccgtcactactttctcacaattttcagctatggagatacactccttgatggaatccccgctaaccacgtttacgccattctttgagttgaatgaaaaccacccaggaatcttcacatctccctcttctaatagatcagcaaatgccttgcatatcacagaaagaaacacccacaggaagctaacaacatcaaaattgggacgctcgatatgaaaggataaatctactacaatatgtcaaatatcatcatcagtacctgagcctctatcttgtttggaatggtctcaaatgctattaaatcagcaccagat

SEQ ID NO: 105629 - DNA, 148 bp, Arabidopsis thaliana columbia
aagaaaaatgggtcgggtctaattaataatctcttccttttggacactttggatccttttaaatggttacactgcccaacagtggcccaacgggtgccagttcgatcaactaattgcgctcgacccatcccaattaatcaagagcgag

SEQ ID NO: 105630 - DNA, 502 bp, Arabidopsis thaliana columbia
cggacgcgtgggcggacgcgtgggcggacgcgtgggagtggatggatttgagttattctagatatctgaaagagcttcccaatctttcaactgcaactaatctcgaagaattaaagcttttaaattgctcaagtttagtggagctcccctcctctattgaaacactcaccagtctccagatattagatctccgagattgctcaagtcttgtggagcttccctcttttgggaatgcaacaaaacttgagaaattgttgctttcaaattgttggatcttacaaattcccgctatcgagaatgcgactaatctccgggaattgaatctccaaaattgctcaagtctaatagagctccctctttctattggaactgccacaaatctgaagaaattggatattagcggatgctcaagtctcgtgaaactcccatcctctattggagatatgactaatctccgggaattgaatctccaaaattgctcaagtctaatagagctcccttt

SEQ ID NO: 105631 - DNA, 332 bp, Arabidopsis thaliana columbia
aagaaaacatacacaaatagcaaaacatggctaacaagctctttctcgtctgcgcaactatcgccctctgggggctgctcaccaacgctggcatctaccgcaccgttagtcgaattcgaagaagatgacgccagcaaccccgtatgtccaagacagagatgccagaaggagtgtcagcaatcacaacacctaagagcttgccagagatggatgagcaagcaaatgaggcaaggacgtggcggtgggccttccctagacgatgagtccgattcagagggccgccagcatggataccagcatctgcagtagtgcatgaacgagctttaccagga

SEQ ID NO: 105632 - DNA, 177 bp, Arabidopsis thaliana columbia
agagagcaaaaatggctatggcgattgcctttttacccccgctcttatcttatccttagggtttatccagcacaatcagatgcgtagccaccttacacagctgttgcacaatctaatatactctttctaattccgatcctaggagaggcgcttccttgtctatgcccaattcatact

SEQ ID NO: 105633 - DNA, 201 bp, Arabidopsis thaliana columbia
ctttgaaggaagaaaacagtttttgttacattttatagttaaagcctcaacaacagaagagaagattgtaaaaagtacttaaaagaaaagagtctctactgttgttgaggctttaactttgaaggaagaaaacagtttttgttacattttatagttttccataatgtactgcttgagatttgatatttcttttcgtctcaa

SEQ ID NO: 105634 - DNA, 438 bp, Arabidopsis thaliana columbia
  unsure (1)..(438): unsure at all n locations
gttcgctgttgctttttcatcttcttcttctccttctctgtttctctgctttcgtcacgaaagggcgatatgtattgtttctcagtaggaagctcgttactctgattcgattcgattctcaatcctttcatcaaaccgttttgggacttcggattttcatattaaggtagcgtatccgcttagggatccaattttctccgagaattgtctccttctacaatctgattctcctcgatttttccagttttcaaagcagtcaattagggtttgtagactaattcggatttggagacggtagcggttatggacgcttttggaatcgggagtagtttaaatcaagctcccgtaactcaggatcttaagaanatttggagataattctacaggtaacacaatgtttgatgcatctcaatatngcctttttgggaacgatgttgt

SEQ ID NO: 105635 - DNA, 457 bp, Arabidopsis thaliana columbia
ttttgccgtccgttcaagatatgcttccaacacgactccgtttaagctaaaacccaaatcagaagaggttttagaattaactaaacaccaatacgtttagttaattctaaaaacccaaagcccaacacttttagttcattctgaacaatatatgagacttattgtactccaatatttttttccgagagaactccacttagagaatggtgtccacgagcaagatcaaatccgttgatttctataggaaaatcccgagggatttgacagaggcgtctctgtctggtgctggattgtccattatagcagccctctctatgatatttctatttggaatggagttgaataattatttggctgtcagcacttccacatcggtcattgttgacaggagcgctgacggagacttcttgcgcttagattttaacataagcttcccgtcactttcatgtgaattcgc

SEQ ID NO: 105636 - DNA, 438 bp, Arabidopsis thaliana columbia
gatgctttaggtggaaatcctcatttagtgaaactaattccagcggttgggattcttgcatttgctacatggggtcttacaccccttctgcgccttgccagaactaccctgtttgagaaggggaatgatgcaaattcacagaagagtagcacgcagtacattgttgtgtcatatcttcaacctttgctgctttggagcggagcaatccttttatgcagaacattggacccaatagtattgccttcaagtgccggccaggctattaaacagcgtcttctgatctttgctcggtccatatcaacggtgttggcattttcctgctgtttatcaagcctacttcagcaggtgcagaaattttttatggagacaaataatcctgctgataccagaaatatgggtttcagttttgctggaaaagctgtttacactgctgcgtgg

SEQ ID NO: 105637 - DNA, 289 bp, Arabidopsis thaliana columbia
tctcttcttcttcttctacttctctctattcttttctttaaactacattcaccaaatcaggtggtgttcattacaacgcttatttccctactagaactaatgtcaccaatctcttactctattactactatgcaccaatcaccatatcccactctaaaaagattccctttttattttccaccacataattcccattaaacctctcattttcttcattaagatctaaactattaaacaacccttcacacttttcttcaccttcttctatacccacttcttatttctccta

SEQ ID NO: 105638 - DNA, 451 bp, Arabidopsis thaliana columbia
aatttatgtatttattgagcaaaaaaacagtgacatctataactaaaaagttcattttagatttaggtagtaaaatgtttctctactcattattttcatcaatgaagatgaaaataaaggaagcttatttccactttaatcaattgtaaaaagaaaagtacaagatcggaattaaaaagtaaaaatattagacctatttttacgtatgtggaaaaatattccctgtaacaatcactttctacttttttcactaattaatttctctatattctgtttgttacagattgctttatatatatacactactttactatcatttccatatctttatctttttctgatcaccaatttacttccttatctaatcataattgattcaataataatgacatagcaaaatccgtgaaggcatatacttacattgtacatgtgtacgtatacgattcttctc

SEQ ID NO: 105639 - DNA, 240 bp, Arabidopsis thaliana columbia
caaaaagaaaaggttaagctcagcaatctcctgttgcaaccttcggggttctcctgtcctacggggtgctggggcgggcactgggcctcctactccgacggggacctgcacctatgctcagcccacttaagggcgcgcggcggcccacccagtctggggtcggtgtgagcaggcctgcctctcatctcgagcgtggggcggccgctgcgctcgcccgccggccgccgcccggcgccgccg

SEQ ID NO: 105640 - DNA, 456 bp, Arabidopsis thaliana columbia
gtaattgtccggggaatttactgaatccaccatactggacacaaaaatgcacaaacaatggcggggttaagcagattgttatcatcagtaaccgatcatgaatcgtagatgtaaacacatgaatgaagacaatgtaccaaactatcctaatggctctataggctgctactagtaatattgctaaataaatattagcttagttgcaggtttgcctatctactcagttactttacaaatttagaaattaatatcagctgagatatgagatgtagagaatagttaccttggactgacaactcattaaaaatttgcgcagagccattttgtcgatcaatgtatcgcctcctataagtttaaggacagctccaatcctacaaatatgcaaggcccatcataagcagatgagaacaattagggtcggtgacagcaaaagttgaggtgactaaccaaaatgca

SEQ ID NO: 105641 - DNA, 371 bp, Arabidopsis thaliana columbia
  unsure (1)..(371): unsure at all n locations
gtcgatgaagagacaatgaggcggttcattgaggctcagagagaggctgttattctccctacagcggcggcagctcccccgcatgttggtgaaatggttagcgaccgctttgtttgaggaatgtgtgaaagggtttctttttgtatgttatgtatgtagttaaacatgagtatgtatggatgtatgtttttgtttctttgaaataacattaataaaggtgatcactaaagcataaaaaaaaaaaaaaaaaatataaaaaaaaaaaaaaatattaatataaaatatgggnggacgttttatggtttccaggcttgcggacccattcttcctacgtcttacttcttctatagtggcacctaatttgaattcat

SEQ ID NO: 105642 - DNA, 393 bp, Arabidopsis thaliana columbia
gataaatctctataagccagagcattatccgaagcacaccgatatcactgaagaagactgggagtagacgatgagggctgtatttttaaggaagttgtaggacgctatagagacccacatgaaaatgctccatagaataaggggcatacacaatgatgtcacaggtccaatagctggaaatgaaactgataatgatgattctgtaagtggaaagcataatgaatatgatggtgatgattatggctagtggtcagtagttttatttttttatatttttcctatttcatattttctttttatataagggggggggggggggttctctttttttatttttatattatttttattttaatttgttcttttacttatttatttttattttttatttta

SEQ ID NO: 105643 - DNA, 273 bp, Arabidopsis thaliana columbia
gcgcatcgagcgaaacaggagctgaaatgggggatctattaacacagttggagtctaagaaccgtactggagttccgacggaggcttttttccttttcaacggcaaatggatcctcgcctacaaatggtggtgaattgtcccgtgcttcaacaggatgacgtataaaggaggacttaacatgtaatactacgcaacttgtgtgtgctagcaatgtgacacgtatgaacagcaactcgtagtggagtatggccatcgtttggtcgatgagttga

SEQ ID NO: 105644 - DNA, 454 bp, Arabidopsis thaliana columbia
ataaaataagaaaaataaacctctttcaaataggaataagaaaaaaattaggaattaatgattgggatttttagtggaggtgtggaccatttagttgagtttctaatatggtaattagcccatcaagattttaatatattttttaaaccgttctttttaagccgattagggtttagaaattctaagggaattaggttcttgagtttttataattttgttttgcaaatattgtccaaaaatcattaaaaatctgaaaacatatttatggcctaaaggctaaaagttggatataatttatttattttcagttggatatattttgcttagttttatcccgtatgtattttttccttatttatatacagtaaacgaaaacgttgacagaacatagttgggatggagacagagaagaagaagaagaagaagaagaagaagaagaggatgagaagaggag

SEQ ID NO: 105645 - DNA, 411 bp, Arabidopsis thaliana columbia
gatataacaaccatgatctctacctgaaaaacttttaatgctcgtttagccgtggttttggagaagtcgaagaacctaccacgtcacaagaaatgacacaaaaacgagttgaacacaaacttttcttgtaatcaccaagagaattcattttaggtagggaaaacgtaaatatatactttatacagttgtctttggcactagatattaggattgtgctccgagggtggaaatcaagatcgtttatcggctgcaaatgattatcactaatttaagagcctgtttaagagatacacaaaatcagaacggcaaaaattttgaagaaagaaacgcttacttcagcatgatcataaaaagtccgtattaatggtcgagcttgagtatctcctgaaatcatctgtttaacttttggca

SEQ ID NO: 105646 - DNA, 431 bp, Arabidopsis thaliana columbia
agtcaatcaatttagatggatccgaaatatgattcaaatccaattccaatatagtccctatgggtccataagaaatgtatggaatcgattctttttaatgaagagacctgatcgcaacttcgaatatggaattcaaagggatctaataggaaatgatactctgaatcatagaactataatgaaagatacgatcaaccaacatttatcgaaattgaaaaagagtcagaagaaaatggttcgatcctctttatttttctttctcaaaccgagagatccataaatcgggaatcctaatgcatatagatacaaatggtccaatggggagcaaagaatttccaaggagcattttgaaacattttcgttttctgagcggaaggagccgtttttcaagtagtggttcgatccaattatgtattaaaatcaatattcga

SEQ ID NO: 105647 - DNA, 355 bp, Arabidopsis thaliana columbia
aacacacacaaatctctgaagtaaaatgacgttcccttctctttctgtctcatttctctggtgtgccttcatattcgtgacgcatgcattcgacctcagcatcatccagatgcaacagggaacatgtccgtacacggtggttgtcatgacaagctgtctttctccggagtcgacaagagatcagatcagcattgtttttggcgatgccgacggtaacaaggtgtatgcaccgaaactagggggtttggttagaggaccagctggtttagtcaaagttgtattttggatactggctcccaccacttacggggtgggatgggggtgtgattcctgtcatttcatttggtgaatcaac

SEQ ID NO: 105648 - DNA, 456 bp, Arabidopsis thaliana columbia
ctccggtcctccctctcgctttacctctggagaacttgacggcgactgcgtcttcctccgccgtcgaaacacaaaaacccgtcaggtgactttatctacttcgctactctccgattttagaagccttaacactggaatgtgatgatttgtgtctgaattcgtgcgaattgcgtccttgttgtatacttagtattcgaggttgtctctgtggaatcttcggttcaattttgtgagcaaatatgctttacgaaggctatttaaaatatatgaaagcgaaatacggcgaacggtcgcagggaacgtacttcatggctggagaggatctgataagcaaattacctgattctctgataactcagatactcttgtatctcccaataaaggatattgttaggactagttctttgtccagtaggtgggaaagtctctggcttttgattcctcggttggatttgg

SEQ ID NO: 105649 - DNA, 411 bp, Arabidopsis thaliana columbia
acagtgagctctgtgcttgaaagtgccaaacaagctttaaaggaagctgtgattttgcctgtgaaggttccacagttcttcaccggtaaatatttgagagcttgaaaaaggttgtaaacctatgcacaaatcaattaacttataaacgatgtctttctctattgttttgttaatagctagggccatatatgatccaagagatgtattcttctaacagtctaaacttctggcgctttgctatatccatgaatatctccatcctcttgctgaactctgacccactctccttgcatctaaaggaaccagaacactcacactgctctgtcaaatgagccgctttcacctgattgcacctaatgcacactacatcctgcatatggtacattctttctctctgtctcaccatctcta

SEQ ID NO: 105650 - DNA, 214 bp, Arabidopsis thaliana columbia
ctttatgttgtagtcacttagacgaagttaagaacgagattgactctatttcgacatgtgggcgtatctcatatgcagatatcattcaattagcaggtaatgttatagtatataccaaaacttgttcatgaagagtagcattactgtatttgtggataactgaaatctatcttgggttggcatctgtaagacaatcaacggtcaattttacata

SEQ ID NO: 105651 - DNA, 456 bp, Arabidopsis thaliana columbia
atttcaatgatttcccaagctttgtgaaccttgagagcgatcttcatctttaaagcccatattgtatagtttgttgtattaagcatagggaattgaatcgatgtagatgctctagattcttttgttcttcccgttgaaacagcgagttttgacatcgttgcaaggctctgataccaaatctagtattcaagaaatattaagaacacaagtataaacaaatatctctctttttagtatctttaggaaactctctcaaaacctaaagtctcgatctctctcaaatctcataagttctatcacaccttgatgtatcctaagatttgtaattagatatttccaaatacattattctagataattcctagaacaactaaagctaatttccttttctcttctttaataacttactcctcaagttactcttttcaagcttatccaacacaggtatccataacc

SEQ ID NO: 105652 - DNA, 289 bp, Arabidopsis thaliana columbia
aaaaagaacaatggtgtaagctcaccaatctatatgttgcaaccttcgggggtgtactcgggggtgacggctgtcttgcgaggcaggcacttgtggttcctcctgagctacagaaccagtgtaacgctggacaacctagatgctctacaagccaccgagactatcaagagtgaagccggacacgatcgatgtcgtgggaccacaaccaccctgagctacgatgtgtgggtgatatcgctgctcgggaagctatggatcatcagtgttcaactacactggacaccacttt

SEQ ID NO: 105653 - DNA, 357 bp, Arabidopsis thaliana columbia
caaaaagaagtggttaagctagcaatctcctctttgcatttcttcggggttctcctcgcctgaacggctgggttgaccagcagtcacttagggttactacttacatacagaacgagtgtaacctccacaacctagatgtatgtgaagccaccgaaactatcaagagtgaagccggtcagatcgagttctgggaccacaaccaccctcaggtcagttgtgatgatggttctctctgacattgtgaactaccaaaaccaactcgatcgtatccctagagtgtttcatttggccggaaactaccatttcgtagaggaacgggtatcactcgaagagaggtccttggatgtgccgagacct

SEQ ID NO: 105654 - DNA, 168 bp, Arabidopsis thaliana columbia
ttgcgactactaacgagactattaaacggggaattggttgcagccaggcctagctatcaattagaaggacgtttctttgagaaacttaccaactaccttccaattaaccaattaaacagggcgtctagctatgcgcattcagtacacacgaacatagaccacgtatta

SEQ ID NO: 105655 - DNA, 216 bp, Arabidopsis thaliana columbia
aaaaaagctatgtctacctttactgaaggatcattatcatgtgacactgggatttttaatagagagtagtttttctgaacctactcaagtttcaagttcaacattcgttttcatgatctcacaaatcagataacagaattaaatgaaatatacgaatatgtcttaaattaaacccaagaaaagaagaagtaaaattccctaaagtatctggctatc

SEQ ID NO: 105656 - DNA, 204 bp, Arabidopsis thaliana columbia
caagaaaacatacacaaatagcataacatggctaataagctcttcctcgtctgcgcaagtcgtggccctctgcttcctcctcaccaacgcttccatctaccgcaccgttgtcgaattcgaagaagatgacgccagcaaccccgtaggtccaagacaggagatgccagaaggggtttaagcattaacacaactaaaagcttggca

SEQ ID NO: 105657 - DNA, 412 bp, Arabidopsis thaliana columbia
agaagacatacacttatagcaaatcatggatatcatgccattcatcgtctgtgcagctatggggctctgcttgctactcaccaactctttcatttaccgaaccgccgtttgactggcagaagatgacggcagcgacctatgaggtacaagacagagacgccagaaggagttacagcattcacaacacctaatagcttggccgatatggaagagcacgcaaatgaggcaaggacgtgcgggcgagcacttatatacgcgatgagggcgacttggagggcccgacactaggatcccacctactgcatcagtgctgaaccgagctatgacaggtggagcccggttgatgatgcatcatcttgaacccagctggccgggcaggtagcgatccatggacagcacggaccattcccat

SEQ ID NO: 105658 - DNA, 304 bp, Arabidopsis thaliana columbia
gaacagcaatacagcataatattatagtagtaaaatacttttaaatccttttttttcgtgtgggcaaagcgctatactaaaaaatatagcaaactcaagtatacactaaaataaaattagtacatttgctagtcttcacctctagaagacaagagtatgtcgttttcttgacaaagacgatttggttttggtgagttattatagtaagataatataatactaataaaaatgtatttattataatctatagattagagagacagcttaacgctaatgtgtagtttatgcgcctacgacgcggtta

SEQ ID NO: 105659 - DNA, 272 bp, Arabidopsis thaliana columbia
cagtctatgcggcattctataatgacaattgcaatgagtttagacgtcgatgaaacatacacgtcgataaattaaaaataacattcataagatacacatttttgtttgtcctataaaagaatatgtcaatagatcaaatcaaacgataaaatgttatgctaaacaaaattaccagaacgaaaaagaagcaaatgaagctttcatagaaagaccacaagaaccgggagagagtgatcaagctgatgaatttattcacacagttggtcagagag

SEQ ID NO: 105660 - DNA, 473 bp, Arabidopsis thaliana columbia
  unsure (1)..(473): unsure at all n locations
ctctctcaatctcgagatccgttctctttaaatttgtctttttctcttcaatctcattgtctggcgggctcttttgttgagatcaatctcacattgaaatcaatcatcatagacaattaagttttgattttcgtttttttttttaaatttcttcatcagatctagtttttaccaataacggataaattcaggtcttagccaatcaccaacatggcgactggggcagcaactgagaaccagtggctcaaagggagagtgaaggctgttacctncggagactgcttggtgatcacggctttgacccacaacagagctggcccaccttcggaaaagaccatcactctttcttctcttatggctcctaagatggctcgcagaggaggtatagatgagccttttgcatgggaaagcacggagtttctaaggaagctttgcattggaaaggaggttgctttcaaagtggattacaaagt

SEQ ID NO: 105661 - DNA, 401 bp, Arabidopsis thaliana columbia
ttcaacttcaacagcttttgttcaattctaaatcgcttcaatgttttccagggagtgccagtaattgcagcagtgggagaatctgttaagaatttggaagttgggactccagctgctgttatgacgtttggagcatattctgaatacatgatagtatgagaactactaaaccatatgagcaacaagttgacatttttcaaggcttcagtgatcatgtgaacctgtctgttttggatttaggtatcttctaagcatgttcttcctgttccaagaccagatccagaagttgttgccatgcttacctcgggagtaactgcattaattgcccttgaaaaggtcgtgctaacgagtgtcattaactgtcttgtttcatcgttttttttttcatactctcaaattcc

SEQ ID NO: 105662 - DNA, 355 bp, Arabidopsis thaliana columbia
aaagtaaacatcttttgcctactttcttctttttttctcacttagtcacttgcatggggcggcagtcagcatcttctctctttttctcccccaattctctcaagagaatctctaagcttttgttcttcttacaaatcatgtacttataataaacccaagaaagaagaagaagaaaaacaaaaccaatcccaagctgtgatggcgaaacagagttacttcttcgtcttcaccttcttgtttctttctcttctctcatactgttcttcaacaactacacatcatgatgtgttaaacccaccaacggtctttcctacaaaccccacaactacacccgacggctaccatttcctccggt

SEQ ID NO: 105663 - DNA, 449 bp, Arabidopsis thaliana columbia
gaaagaaggaaataggacaccttacttttgacaaagatgatcagttagctgtagaatggggtgctgctgctgcaaatatccgcgctgagtctttcagaattcctttgcacagcctttttgaagcgaaaggtattgctggaaacattgttcatgctgttgctacgaccaacgccattattgctggtttaattgtcattgaagcaatcaaagtgctgaaaaaggatgtggacaagttcagaatgacatattgcttagaacacccaagcaaaaagctgctgcttatgccaatcgagccatatgaacctaatcctgcttgctatgtctggtccgagaccacattaggactcgagatcaatactcggaaatcaacactacgggatctaggtgagaaagatgcgaaaaccaaacttggaatgaacctaccgcagattatgcacgggaattcgctt

SEQ ID NO: 105664 - DNA, 475 bp, Arabidopsis thaliana columbia
agcattttaattttaaaatcccccttaactagattctaagaaaagttcttaaaacactgacgagggtatgtaggagtaaaaccatctattaagcttatttgataaattaggtatctacgtgtgacaaagaacattcacatgtctataacaattaaatttgaaaagtacaaaacaatcgttcaaaagggtcatagagcacaaatactgcagattaaatttgtcagaacaattgatcaagttaattataattatatatttgtgatatcatactaaccggtaagtgaaagttgttcatgatgagaagacatagctgattcggtacgataaatgaagatgcagagaagaaccacaatgaacacttgagtcaattttgaaacaaaaatcttttccatttctctctccctctttgtttactactagttttgctttctctaatctcatattgactcgagcctttgtagtttataggctcaaa

SEQ ID NO: 105665 - DNA, 466 bp, Arabidopsis thaliana columbia
  unsure (1)..(466): unsure at all n locations
atttccttagaatcgaatgaacatattgggaattgatttgcagaaaatgatacatgatgggggtaggtgttacacatcttaagagttaataactttaaaaccaaatttcacatcatcaagttactagtgcttttttttttttttttttttaagtttccaatgacagtggcagtacctctatttttttctttaattcatttattttacaaatattgccggtttgatacatttcataaatattaaataaattgttaaaacatttatctttaaaagtgagaatggaagttatgtttttttgtcaagaggttgtagaaacaagggagcatctatctttctctcgtncctactccactcaagtatggtcagctctaacccaggatatgcttggtttatggtttactacacgctgggagtctctaatcccttaatcatggcctcgactactccacaagttgtatgatcattt

SEQ ID NO: 105666 - DNA, 406 bp, Arabidopsis thaliana columbia
cgggtcggaccaacccgtccggtgagaaccttcttccaattaggtcttgcaaagtgtgttctgacctgaaaaatgaagattttggtgacgaatcatatctttatgtgtgggttcatttttccacaatttataatttggggaccgcgttaggaaatcaaaagaatcacgacttacgaagaaagtaacgtaccctagtgccagagacaatgtcgacaccatttttggcatgattaagagcttgaaccattgtaatgagagcagaacgagcatcaccttcttcatacacagcttgtaaatagttatgcatctctatcacaccctgttccacacaattgtttttttgattgtctcacattgaatcttctcgggaaaatttcgatggtgtctgtcacgaaatgttttgagt

SEQ ID NO: 105667 - DNA, 178 bp, Arabidopsis thaliana columbia
ggtcggtgtggtaaaactgggatagcaacgacgtttatattcaagaatcaaagcgaaaccacgctggtggatttgaaacacttgttgcaaggagctaaacagaggattccacctgtccttgctgagctgaatgatccaatggaagaagcagagaccattgctaatgcaagtggtgtca

SEQ ID NO: 105668 - DNA, 398 bp, Arabidopsis thaliana columbia
gatagatcgtttgacaaaaaaaaaaaaagagtttatggatagagaatcaacgcatgggataatgttaatctcataattatttatttgaactttgaattcactttttaaagtataaaaaatggatagaaaaccatgggataacgttcataattatttgtatctatgtattacacatgaccacatggaaatataataattatttctatgaattaagttaattgctattatttttaacatgttgagaaggtgcatatagaaatcaatgtagtcaatcttacatttttcaacattcattcactttcctttatttttatttctgtttagatgtttttatcatgtgaataataaagaaaagatcaatatatatatatatatatataccagcctttccggaccaa

SEQ ID NO: 105669 - DNA, 351 bp, Arabidopsis thaliana columbia
gaccacgcgtccggttgccaagttggaaaagaggaaacatatatgattaagcaaagtattatatgcctttgtgaatggttgtgatcaatagagaaaagattcatttcaaatttaattgctaccaataataggttgcgtttataaatctaaatactaatcatgtgaacatgcagaagaagaaaagaagtccattaaatccttcacatctttagcaatgttgaaatttgaagtttatttaaatttatcatatgaccgaataatacaaattttgaaaactgtaaaatattaacacaagtaagaggacccacgtgaagacccatacccagttgcacagagacagacacacagatg

SEQ ID NO: 105670 - DNA, 415 bp, Arabidopsis thaliana columbia
ctgagctctgtggtttcccattacagaagctgtgtaaagatgaaggtacgaaccctaagctcgtcgctccagaaccagaaggctcgcaaatcctcccgaagaaaccaaaccctagcttcatcgacaaggacggaagaaagaataaaccgatcaccggatccgtaacggtttctctcatctccggagtctcaatcgtaatcggagcagtttctatctccgtatggctgattcgaagaaaattaagctccactgtgagtacaccggaaaaaaacaacacggcggcgccattggatgatgcggcggatgaggaggagaaggaaggtaaattcgtggtgatggacgaaggattcgagctcgagctcgaggatttgctgagagcatcggcttacgtcgtcggaaagagcagaagtgggat

SEQ ID NO: 105671 - DNA, 305 bp, Arabidopsis thaliana columbia
acataactcaccaaccaatcaactaaccatggattctgagatcgtcgcggactgcgctccattgctcaaaatctacacgagtggccgaatcgagcgactcatgggtgaagccaccgtactaacttcatacgaaccacaaagcggagacgcttccagggacgttgtttattacgccgactacaacctagccagccgtatatacctcccggagaaagccggcgccgagaccgactcgaaactccctatactagatgacttacacggcggaggatccatcattgcgacagctatctctgcaacttacc

SEQ ID NO: 105672 - DNA, 233 bp, Arabidopsis thaliana columbia
ggatctgttttttttcggaccgccaaaaaattcttgtcaacgcgattgtcgggataaggtaagaaaaaagccacaatcgtgtctacagttgtgctcggccgggatctgtggttcatgttaaaggtatttactaatcgtgtatgctcgacttcgcttcaacacagtacctcaactgcagtatactaattacctgcaagatggttactatggtgtgcgtgattgtggggcaattc

SEQ ID NO: 105673 - DNA, 259 bp, Arabidopsis thaliana columbia
cggaacccgtgacccacgcgtcgaacacaacgaattttattttaccgaaaaagagaaagcgatcggagacccgcttttggcattcaccttttttttttgacatacaggtcttttgtttgtgtggtggacgctgatataagaccttttatggagagtgcatgcgggacatggactccttcagtcacgggaattcaggtcttccgagatgctgacctgttggggctgtggaagacaattacccaggagtgggcattgtggg

SEQ ID NO: 105674 - DNA, 414 bp, Arabidopsis thaliana columbia
ggagattttagttctgccttttgttgtttaatcttatgattacgcgtgattcctgtttattggttaccttttatgtttaagttgcttcttctataaatattacttgctttctgttgttttaaataacctcatgataacacatgagttcagtttggcctattttgagctgttaagaatcttgttatacacaaaagtttgttttattgttaaattttagatgcttcaagccaagaggcagacagtgtcagctctgcaaactctattaacatttagtttgccaaatttatcaaaattggcattattttagccatttaagaaatacaccaagttgcttcttctataaatagtgctgagaacaaaatttgtttaaatcaattgtgatgttgtatatctttatgagttatcatttttggc

SEQ ID NO: 105675 - DNA, 290 bp, Arabidopsis thaliana columbia
ggatcagccaacctgaaaccagaacatcaagttttaaactgaaaggaaaaaaagactaatgcatggtatataaactaaccatagacagaggtaagacgtgcttaagcttaactaagaggtgcaaccgttttttataacagaccaatttggggcacggggaaaaggattaggccagggtgacgagtacaggctagaacaaacagaatagaggaagctaggtgtgataaaacctgcgtgggctacaattctcagtaacacagatttggtgaccaatgcaggaataaaatgta

SEQ ID NO: 105676 - DNA, 334 bp, Arabidopsis thaliana columbia
caaacgagtaagaatactaatacaaatagcagagttatggcaaacatgctattcctgcggtgggcaactatcgccctctgcttcctccttaccaacgcttacatctaccgaactggtgacgagttcgacgaagatgacgccagcaacctcatgggcccaagacagaaatgtcagaaggagtttcagcaatcacagcacctaagagctcgccagacattgatgcgcatgcaaatgaggcaaggccgtggaggtggttcctccctcgacgataagttcaatatggaagacgacatcgagaacccacaacgcccgcagcagggacaccagatccttc

SEQ ID NO: 105677 - DNA, 292 bp, Arabidopsis thaliana columbia
ggcaatattattattttaataatgtgattttatagtgctgttgcgtttgtgaaattagctttttcgttggcattttcttttgtttttttttatgattggcacatttcaatttcataggtataattttatgttttttttgtttcttttgcgtttgttttttttgtttttcgttctcttgtttactctacgaaaatggtctaaataggtataattgtcaaaaaaattgttccaaaaggttaaaaaaagggtaattaaagctttaaaacattctcaaatatataaatcagtgaaa

SEQ ID NO: 105678 - DNA, 239 bp, Arabidopsis thaliana columbia
ggcggctagcagccgcgggaaataagtcttggattagaggagactttgtgcaccatgcgacgcactgaaatggtcgaagacacgtcagatgctgacgtgtacaagccaggactgggatacatgagcacacttaacagctacaagctacctatcctcagactggtccgccttagcgctctacgaggctgcatacgagaaaacgctatggtgctaccgaagtggaacgtaaacgcaaacgc

SEQ ID NO: 105679 - DNA, 179 bp, Arabidopsis thaliana columbia
gtcaaacgacaattggatgaacctatggataatgagataacttcatacgtggtttttttttggagcttcggttgtatatacttcggtttgatggtatctaaccagttaaaagtatgacgatttgtgttgaaattgtggaaatagttgcttctttttaaaaatattaaatttcaataaat

SEQ ID NO: 105680 - DNA, 226 bp, Arabidopsis thaliana columbia
cggaatcgggacccacgcgtcgcgtcgaccagcagatccggacatcgaggacgcctcggtatggcactggacgcgaagcgccacacaaaactaggtaagggacttggccatgcgatcactaactaaccccgagctctgtcagcatatcatcaaccataacagtcattttatctagatttcgctacctttgggtcatcgaaaccttggtccgatgacgaaccaaacc

SEQ ID NO: 105681 - DNA, 177 bp, Arabidopsis thaliana columbia
aggctctctattttgggggcgtatatgatacctgtgctccggtatttggggatgtaagaaaaattacaaacgtgactcttagcccaagtgttatatttgattatttactaaaatctcccttaattgtaaaaggatagattgttcctttttgccccaatcctatgcaactgaaaacct

SEQ ID NO: 105682 - DNA, 403 bp, Arabidopsis thaliana columbia
  unsure (1)..(403): unsure at all n locations
cctgtggagaacattaaaaacgaaatctagtgtttatttatctatcgcccttgggtcttttcgtattacgagattcccattacttctaaattccattcattctttttttctttcttccacacagattcgtaacgagttcttcattttcatatatctccgnttctggtttttttttttccctttcaagtttcaattttttcttctgggtttttcatttggtgattaaacgtttgcattagacgaatcctgtattgttccaagagtcaaaaccatgtccgatggatacatcaattcgaagaagactgatgatatttgcgaagatgtctgtggacagggatcaaaagcagcaaaaacaatctcaaggctaaaatgtgtacttaaaggttttgatttaagaacatac

SEQ ID NO: 105683 - DNA, 257 bp, Arabidopsis thaliana columbia
cggccgaaccccgtcgcccacgcgtcggaaactcacaatgcaaacaggtcagtttctgtgcccttggcttgttctctccaaccttcataccgacggcaatcaagaaaacccgacccgagtcgacagagcgagggttagaatacaacactaactgcgagaggaacagcaaggcggcgggggggcctcctgacaagcgttcaggccccacagaaccactctcacaggtgacagtcgcgaagagcgttgcgttgccactg

SEQ ID NO: 105684 - DNA, 413 bp, Arabidopsis thaliana columbia
gttgcagtttttttcatgcaaaccaaaatatacattcctctcctctcttcttctacttttgcttcggtcttcttcagtagctgagctctctttcaacttctacgccggttcttgtcctggagctgagttaatcgtcagaaacaccgttagatctgcttcttcctctgatccatcagtccttgggaagctcctacgtctcatcttccatgactgcttcgtccagggttgtgatggctcagtgttgattcgaggaaacggtacagagcgaagcgaccctgggaatgcgtctctaggaggattcgctgttatagaaagcgtcaaaaatatcctcgaaatcttttgtcccggcacagtctcttgtgctgatatacttgttcttgccgcaagagatgcagtagaagctctcggaggac

SEQ ID NO: 105685 - DNA, 420 bp, Arabidopsis thaliana columbia
caagaattctacatggaaaaacaatcctaatctaagtatctaccattgcctacagtattttcccaggttcctacatgaaaagactcgttacaaattcgttttcctacatctattaacgctattagccatacatcactagggaacaagccattagtgctaaaactccaacagacgcttgaaaggctccaaatgtcagaccctccaaacaaatatctagaaccatgcagcccttcacagttagactaaataccatgtcaaaaatttaatacaactgtcacctagggatgcttcttccatcgagggcaagttttgcagcggttgcagtttctgcatcagtaaattgaaccagtgcctacgagcaagtcagacagtaaacattttaagtataatagatattaacaataaaatacaaagcaaaat

SEQ ID NO: 105686 - DNA, 403 bp, Arabidopsis thaliana columbia
atagatatcttagtggcgagagagggagatagcggaattgataacaataagcatgagtaagagcactgcgcagaaagaaccgatgagagatcccgagatgcgttcacagaatccgtcaaattgctggcagatcggtggccaattagcagttgtgttcccctcgtgagctaaatacacggtggctgttgctgcagatgctccagagctaaccaaagccagcatcacctgattatatatagaaaccataaatcccaacacttttgagtggtcaaatttaaaattatatatgggttttcattaaaatgttatctttcttgggtcacaagttagttggatatttggtgccctgttttgttctcttaaagagggagatatttaccgtgtcgacaacgagcaagatgat

SEQ ID NO: 105687 - DNA, 349 bp, Arabidopsis thaliana columbia
cacatagtataaaatggcaaacaagttgatccttgtatgttcaactctcgctctctgcttgctgcgggcaacgcttacatctaccagacctccgatgagctcgaacaaaatgacgccactaaccccatagtcccaaacatgatgtaatgccccaaggagcactatagcgaaccacacctaagatcttgccggctatccactctacatcatgaacagcagggtccaaatcttatccttagaatccaggacggccaagattaacacgcttgacaccactttgacccacatctattccaataatgctgcaacgagctttgccaggaaaagccatattgtgttttccccacct

SEQ ID NO: 105688 - DNA, 376 bp, Arabidopsis thaliana columbia
aaaacatacacacatagcaaatatatggcaaacatgttgttcctcgtctgcgcagctctggctgggttctttctcctcaccaacccttccatctaccgcaccgtcgttgagttcgaagatccttcaagccctacttctataccaatcataatccatatataccttatgctgtttagtattaccacactttttacaataaatctttttcttcttctgtccttttttctatgttctaatttttaatatgttcatagtccttcgtctcctttgcgtcagtggcctactatatcttcaaggttcacgatgtaaactttttttctttcggtcccccttcattctaggagtcacttcttgttcggatctttccagctttatc

SEQ ID NO: 105689 - DNA, 227 bp, Arabidopsis thaliana columbia
  unsure (1)..(227): unsure at all n locations
aatatttttattttttaacttaaaaaggggggcacccactaatgaggttgttcatggaacctnttgccggatggctttatgcataccaccatttgatgatattatttattaggtaacaaacaagcaagactacgaacacaactaaattaaatgtcgtttgaaatcattaatctaaagtaattgaatgagagtacaatctggggaaaaaatttatttcctgatagtaa

SEQ ID NO: 105690 - DNA, 415 bp, Arabidopsis thaliana columbia
cgaaagctctcttcctttccctttttggcgctcaatacaatcatgacgttagagagttacgcgggcgatgttcacacggtaccacaatcggagaactcgatggaggagagaggcggcggtgagcttttcgtgccacctcttaacttcgctatggtcgataatggaattttccgttctggttttcctgaacccgtcagtttcagctttctccagtctttgcgtctcaaatccatcatatatttgtgtcctgaggcatatccagaggtgaatagagagtttgcaaaatcaaatgggatccaagtttttcaatttggaattgaaagatgcaaggaaccatttgttaatatccctgacgaggtaatccgagaagccttacaagtacttctagatacagagaatcatcctgtcttgattc

SEQ ID NO: 105691 - DNA, 188 bp, Arabidopsis thaliana columbia
ataaggtgtaacatgtgagactcgtatacatttttgccaacactacatgctctgcccaggggggctactattaacgataacagccacttgtcatcatcgttcttcttaacaacaccaactaccaaatctaactctaccgcaaccctatagtgttccattttttctaaatcaaccatttttgtgacatt

SEQ ID NO: 105692 - DNA, 301 bp, Arabidopsis thaliana columbia
acggccaacccgtccccacgcgtcaaaaaaagaattcccaataaaatgtgtccagtagaatattgtcgcttctggggctgtaataatcggggtgactccttctactattcgagggtgaaatcattttggacagaaatttctatgacacattacgattcaaaacactgcataaaatgcgatcctatcattcgggcgccaaagatatctatactccgccatcattattgctaatagttgatggaaaacgtgatattatggctgtgaggacctgcaagacacatcatccatcaccttgactttg

SEQ ID NO: 105693 - DNA, 415 bp, Arabidopsis thaliana columbia
cgacgacggcaatggcgtcagcttccaagaacattcagtaaaaccctttctcctcgaaaccaccagggactccgtattcctccggcgctgcatcaacaaccgccgtggcttccacctcagccgagcccctaattcgaaactctaccttaaatcctaaccctagcaccagcggcttaccgtcgacatcgaattcaccgattacgatgtcacaagaagatgaaatcctcgcacgctccagtcacataacccggtcggagcttctcaaacgccgatcacacaacctgaagcagctggccaagtgttatagagacaattattgtgctttaatggaggatgtcaaggcacaacacagggattattggtggaagtatgggattagtcagtttaaagacgaaaataatcaatcgaattagag

SEQ ID NO: 105694 - DNA, 411 bp, Arabidopsis thaliana columbia
agcagaggtcatgttgaggaaaagaaataaaagaaagaagtaagagagatgtgcatttacattggtgacgaagaagagtcaatcatcaaaaggagaaatcttgacgaaaacattgacattaagatcacaatatgaagatgtcaattagcaaggtcaagagcatgttctgcacaaccttaacaaagtcaatgccagccattgccttctttgggagaatggcattttcctttgtctttttcattactgcaatccaagattatgctgatcattatggcggtggagctggcgggccactcgagaagacgatgggaccagccgtgaacatgttgagcaaatatggttctaaggctctcacattttactttggaatgcaagtggtcgcattcgatgttagacttattgagttcgcac

SEQ ID NO: 105695 - DNA, 411 bp, Arabidopsis thaliana columbia
ataaactcccttgactgaattattatgagagacacacatatatagagatatatagagatacaaagagttctagaaagttatatctaagggtatgtcatggcgttattccaatgactattcttggccgcttgaatatgcgatattagagcgggagaaatagtgatatcagtgtgaagacaaaaatgttttttttatttgaagatacattactacgattttgtatagtattagtggaagtagaattagaagtagaagtatgagaaggaggtaccatagggcttctttgttatcacgaaacagatttttgattgcagaccaaaggtcatgaatggagcacttcggtttgaggacgatctcaagtatggactcggtaattgtcccatagatccacatttttacaagatcattgtg

SEQ ID NO: 105696 - DNA, 414 bp, Arabidopsis thaliana columbia
agaaatttgtatgcaattttaaaaacgttttttcgaataaattttacatgtattcaaaagaagaaatatgttggcttgtgaattttaatgatttgaaacaatgtctaatagtgaaattctttagccaaatgcactttaactatatgtctatatatgaaaccaaatcaatttcgtttacattttttgtgaaccggtattttatattacaactctactcgtttcaaaaaaagcttccaagtcattgagtacttttctttatcatgatccttcaaactaaattggtgatatcactctccatcgaatatttcacgatgatgtcacttcagattatgatatttaacaattaagcaattaacccctaatcaccatgaagcttattcattttagacatcatcataatattagattttttgt

SEQ ID NO: 105697 - DNA, 415 bp, Arabidopsis thaliana columbia
gggaaatattgaatgaattgattgtaaattataagatttttttaattgttttccttgaaaagaggatcctaatcttagggaaaatggaatttcgacaatcactgcaaataaaacagatatcatttgataatagaaaagactggtatgccccaaaaaggaattttggttcacatccttagtgggaataatcaaacgattctgttcatacattcgcaaaattaagcgtttcgtaattagtgaactatattttttgtcataatccgcattttccaagaaaatatagcgatttctatttaatctatttaaaccatgatcataagcaagtacataaatatactcccgaaaaaaaagtggatatagaaaactctgttgccgagccccatcgaactctaaatatccttgaaatttatccatt

SEQ ID NO: 105698 - DNA, 407 bp, Arabidopsis thaliana columbia
ctgtctcaaaggactttgttatgagtttttttcttgttttgtagaattgttctagtttgtaggacaaaacttaatcagtatatactatttatatatggatatagagaaattttaattaggaaagacctcactcgagagaatatacagctagaaatttcggttgatttccaaatatcttattttcgattcatttcggatatatctagtttataaccatattctctaaattcgaaactggaagttctcgaatttcactgtttgcaaattattaaacatattccctaaaatcaaaacaggaagttcttgaatttagtttccaaaaccattgtgacttcaaaaattatggtctcattcctacctcccctgtttacagatcattgcaggcagtcgaaattttcatatcattt

SEQ ID NO: 105699 - DNA, 348 bp, Arabidopsis thaliana columbia
ctgacgcgtgggcagaaagacactttcacatttttcacttacagagagagagagaagagggagggagagagcatttagatatcttgaggaagactaagaagaagtagaggagagatatggttccgagcaacaatagatgcaaatggagttccattttcttgtttctgctcagagtctccgttgccgtcttagtcgccgtcgctgacgacaagtcttcggcggttgaggatggtttagtgatcaacggcgacttttaaacatcaccgtcaagtggcttttctgactactgagtaactgacggaccattcgatatcccaagatggaaatccaacggtacggtggagctaa

SEQ ID NO: 105700 - DNA, 242 bp, Arabidopsis thaliana columbia
  unsure (1)..(242): unsure at all n locations
attgcatttattttattttaaaaaagccattacatgagaaagagtagcatttcataataataattagaggtgacaatctctggttttatttatgaacaagaaagagattgttgtgttgtagttnttaggttataattaatatatattgttgagttatattctttctttattattttattttttttatttttttatcttttcttctttatttttattattttaattttttatatttattttat

SEQ ID NO: 105701 - DNA, 244 bp, Arabidopsis thaliana columbia
gcggccggaattccggcgacccacgcgtcgagacttgaagttgggataatttggcaaacacgaaataggggcatgaaggccggaccacagcgatgtcactgttgattttctcaagggagacatgacgtgatgagtgtggaacatgaaacctgacagaagcttcttattgtttgacaatcagctaaatgcaccttctgaagagctgaaggactgagactatttgggagctattgagaagtgcgac

SEQ ID NO: 105702 - DNA, 442 bp, Arabidopsis thaliana columbia
  unsure (1)..(442): unsure at all n locations
gaatnaccgggtctactttcacacttataataataaaagtgatcatacataatgtttatatagagcttgagactgctacatctagctagtggggtaatacactttttcaataataaaaagagaagagattaatttgttttttttttaaaaaaggtcaagataatagtcaatctcatcctttgctccaaaattttagtgttaatcaaatgtgggattatataacagactacaatgtaaatagtaggattctacaaactcaaaaatatttgtaacagttttttcttttaaaatggctttcaaattttgaggccgaatcgatggcttatgtatcttgttttctggagtctggctagatcatctgttagcacactaaattttgtaatttcctacaaaatgcatgaagaatattcccaaaatatcttattaggatcttcagtatctt

SEQ ID NO: 105703 - DNA, 222 bp, Arabidopsis thaliana columbia
gaaagaaaatggttaagctcacaattctgttgcaaccttggttctgccgtaacggtgcttgaggagcactggggtctctactacagaacgaggtcctgcacctaagctcagccacaactatagaggaccgtcagatcggtactgaccacaccctagtcgatggtgggttcgtgtgttgaatgacaggcgttactgcaccttttattccaaattctactgtca

SEQ ID NO: 105704 - DNA, 376 bp, Arabidopsis thaliana columbia
atgaatcaaaggacttcagcatgagtctctttgttgccttggggaatcgccttagtctgaacggcagaattgaaagggaatatactatggatatatcgaaattgcaaaacgagtgttacgaaagaccttaatcgagagaaaatacacctagacaattaagagggaagccaaatatatcatgtactagtaccacagccactatcaagttcataaccatattgtctaaattggtaactgtgagatctaacatggcactgtttgctaatcaacaaacataactcctaaaataaaaacatgcagtgctcgaagataggttctcaaaaccatgaggacttcaaaaatgatgggagaacttctacctctcgtggttacagat

SEQ ID NO: 105705 - DNA, 331 bp, Arabidopsis thaliana columbia
gcgacggccggaacccggcgacccacgcgtcggaagaattttcagaccaaaaggaacttgctggcacgctacattctaaacaaacgcaagcaaaaaagaaaggggaagacaaacctaaaacgtgggctctttcaatctttgcatagaccaatctactcaacgcttggcatttcacgggcatctagaatatataatgagacttaatgcgcgtggctacatgacacagatctgtcttctattaacttagacaatgacgttggggaaggtggccgttgagaggtctctataatcaggggacactggcggacaggcagagaggagattgggaaac

SEQ ID NO: 105706 - DNA, 414 bp, Arabidopsis thaliana columbia
gaattaaagccagcttcagagtattttagttctgatgaggctgaatcagtatccgctgcttgtgatgattggcgcgactcagatttaactactgatgttccattctttttggtttcggtttcttctgattcaaaagctagtatcagacatcttaaagacttggaagcgtgccaaggtgatcatcaaaagttgcttttcggtttctatgacccgtgtcaccttcctagtaatcctggctggccacttcgaaactacttggcactgattcgctcaagatggaacctcgagacagtttggttcttctgctacagagagagtcgtggtttcgctgactagaacctttctcttgttgttcaagcctcaattacacttttatcaagtgaatcagtttagactgttccttactcagtggga

SEQ ID NO: 105707 - DNA, 134 bp, Arabidopsis thaliana columbia
cacatcacaacagtaacaatgggtacgtaccacaagtgcttgcgataagctgctaatacttgtggtcagacaccgcattaacatcagaactaagatgacttccgagaacacaatgaacgggtcccatacccgag

SEQ ID NO: 105708 - DNA, 427 bp, Arabidopsis thaliana columbia
cgacccacgcgttcgggtaaagccaagctcttcaaaaaggttaacgagcttttcttgttggcgaaaagacacggaggggtggatgttatatcctacaacaccattatagctgcctatggaaagaacaaggactatacaaacatgtcatcagcgattaagaatatgcaatttgacgggttttctgtgtcacttgaagcttataatactttgttggatgcatatgggaaagataaacagatggagaaattcagaagcatcttgaaaagaatgaagaagtcgactagtggaccggatcattatacatacaacatcatgatcaatatatatggagagcaaggatggatcgatgaagtcgctgatgttctgaaagaattgaaagaatcgggacttggtcctgacttgtgtagctataacacgctgataaagg

SEQ ID NO: 105709 - DNA, 192 bp, Arabidopsis thaliana columbia
atcatatcaatcgacatggcgaatgtggaccgtgttcggcgtgtgcatgtagaccgtacttgctgacgtgttcatcagccaaactacgaagatgatgtcggttttggtggctatggcggatttactgctgcttcccattatgttcaagacagagatgtcagtaggcgtatctgcaatctcaacacctaagag

SEQ ID NO: 105710 - DNA, 204 bp, Arabidopsis thaliana columbia
  unsure (1)..(204): unsure at all n locations
accgggccgaccccgcgnncgaatcaggtcgagtaaattttcacgactgcatatgtgtaaatgcacaatctcggggaagaatgcttatttaagtgactgncgcaaaactgatgaacctctgcagattaaaaattgctattaacagaatcaaacccattgacaacatcttaccgatgatttccctgacatggatgtgattggaat

SEQ ID NO: 105711 - DNA, 173 bp, Arabidopsis thaliana columbia
attcaatgctattactctttcacaacaactttttcttttaaaacatacctgaactgacgttggattactaattcaaaatccccatacctcatccactactccatcttccacattactattcccaaaatcatccccattgacaactacaactgcccacaccttagccacatatt

SEQ ID NO: 105712 - DNA, 294 bp, Arabidopsis thaliana columbia
aaataaaagagaaagagaaaagtgaaataggtgctgatatatagtgatatgtggatagaggtaaagcaacaagaacacaatcttttcgatggtagtttaactagactacctatagctattctttcgtttttttctgatttatataggaaacaacaagaccacaatcttttcaatgataagaggtcccaattaaaacaacaatggaaatactagaataattaagttgtgacaattcgatttggatttagattaaaaattgtaatgttttgtatttgactttttccagtaattcct

SEQ ID NO: 105713 - DNA, 294 bp, Arabidopsis thaliana columbia
caacaaacaaaaagaaaatggtttagctcagcatttttctctttgcaaccttcgggggtctgctcgtacttaacggatgccttgcgaggcagtcacttgactggactacttatctacataacgagggtaacctctgcaacatagatgaaacaacagcaccacaaactattaagagataagacggccaaatcgagtcctcagtccacatactcgaataattaagatgtgacaatgcgatcgggatttagattaaaaattgtaatgttttgtatttgactttttccagtaattcct

SEQ ID NO: 105714 - DNA, 390 bp, Arabidopsis thaliana columbia
  unsure (1)..(390): unsure at all n locations
ccgtccggggtacactaagggttcgtgagttaaccccataccnctgnggtgtgtgcgccatacgtagtggaaacgggaatctactgatgttagaggctgcagcacannccgacgacccacaaaactggacgaactaagcccaaatataacctgaccccaccatttgcgcagactttacattccggtcccataagaacacataccgctggtctaacccatcattcatcgatccctaaccttttcgccaagacactacttaaccttatcgctctttaaggatggatgatgataacttactctcaccataaaattcatcgttggtctagccaacaccctctatattctcattaaaccctcttaccaacgctaattcaaaccaacatcacatat

SEQ ID NO: 105715 - DNA, 458 bp, Arabidopsis thaliana columbia
tcctctttaaaatcgcgagttacgatcaagatgcagattttcgtaaagactctcacgggaaggacgatcaccctcgaggtggaaagctcaaacaccattgacaacgtcaaggccaagatccaggacaaggaggggatccctccggaccagcagaggctcatcttcgcgggcaagcagctcgaggatggcaggactctagctgactacaacatccaaaaggagtcgactttgcatctcgtcctcaggctccgtggtggtatgcagattttcgttaagactttgacgggaaagaccattactttggaggtggagagttcagacactattgacaatgtcaagaccaagattcaggacaaggagggtattccccccgaccagcagaagctgatctttgctggaaagcagcttgaagacggcaggacattggctgattacaacattcaggacgagtctacgct

SEQ ID NO: 105716 - DNA, 401 bp, Arabidopsis thaliana columbia
cttctctctctctctagattcgaaaaaatggctatactggtgatgttgctgaatctctgcggcttaccggagatagccatggcggcaaggacagggaaatatcggaaatgaatacaatggccgatcaaggaagcacctactgagacattctcaaaatatccttcctgactcaagaattctactacttcatcctcggggcaacggtgaaactatcatgcacagacaggaagacaatgcccgagagtgacacactcttaactatctcaaacatgatcggatcgcatagaatcattcgcctacactagcacttgctcgagaccatcgacgcatgaaccgatctatggagggtcttaaaacaaattttcataggctgaaaacctacaaaaccaagttagtcattt

SEQ ID NO: 105717 - DNA, 213 bp, Arabidopsis thaliana columbia
gtagctttttccgaaatacagtatacgtatgatgtcgagcgggggagcactaatgggctagggcccatcccttaccaaccaggaaactcaatacaggccgtctgttgacagacagacttggggctaaccaacaaggaaacccaacgacctagtctacaatataggaaaagaggacagcgagaaccagagggctgcagcagcatcttgaaagct

SEQ ID NO: 105718 - DNA, 446 bp, Arabidopsis thaliana columbia
cggcattggtctctccccattccaattatgccgtttaccaccggcgacgacaaaactccgacggaggcacaacacctctacaactatctgatccggcagcaaatgggccgaccgacttctctccgacttcaatttcacctccgattcctactcctgctccttcgacaccggcaccaccaccgcacactctcgtctgtccgtcaccatctattgatcgtcccgaacgccacgtccccatccccattgatttctaccatgtattaagagctcaaacacatttcttaaccgatggaatcagaagagcattcggagctagggtttcgaaacccccgcaattcggtttcagcgacgacgctttaatcagccggagacagattcttcaagctgattgcgaaactctcgctaatcctcggtctaaaacagagtacaatgaaagtcttcttgat

SEQ ID NO: 105719 - DNA, 302 bp, Arabidopsis thaliana columbia
cggaacccggggacccacgcgtcggccaccttagacagctcagagcgaggagtgggacacccactaccaagggggcggcttgagagactattgacatgaggtccaagaacatgcacctgctggcactgtcagccagctagtcgggccggtaacagcttacctgcattgatatgtagtatgcatggcgttcaggaagcatgtcttctaacaacagactacagactgactgactgagaaggagatcagggcaaacacgcaaacggtggacacaggcaaagacagtgggcatccacagggtgata

SEQ ID NO: 105720 - DNA, 375 bp, Arabidopsis thaliana columbia
gagcgatatgtgtcttatccgcaagtggtgctgtctctactgcaactcttcttcagccagcgaccttctcatggaactattatatacgagggtctattcgagctcatatctctctcaacttcttatctgaacacaactgacaatgactacccaaaccgcactggaagtctagcggtctcacttgctagccctgatggtcgtgtcattggtggtggaattggaggtcctctaatagcagcaagccaagtccaggtcattgttggcagcttcatttgggcaattccgaaagggaagattaaaaaacgtgaagaaacttctgaagatgtccaagatactgatgctttggaaaacaacaacgataacacagcagcaacg

SEQ ID NO: 105721 - DNA, 471 bp, Arabidopsis thaliana columbia
tttcgattcacccctaggatttcttttaatttaattcaatcagaatctgccatataattaaggggtgaaactcatttaaatattaaatttaatctctaaccagtattttataaatccaaactgatatctaatctcctttaattataatatctaatccctaattatcttttgtaaacccaaactggtattttacctcttttaatcgtaaaatttaaatatttttataaacccaaactggtatttaaatataaatagctatatctatcatctatggctttcatgcaaatatcaaaaatattaaatttcttcttaatctcacttaaaaaatatcaaatttattttgaataaatcaaaattcaggtttatatagattgattgttttggacaaagaaaatcaaccttagtatatcttctcttgttgcattataaatctcgggtttctctacgtttgattgtgagtaaggtttcttg

SEQ ID NO: 105722 - DNA, 314 bp, Arabidopsis thaliana columbia
gttatgctgaggaccgaagcaaacttaacaggggatgagtctgacacggggtgcctagaactgtgaagaaggaaatagaggtttttctaataacagcacaaacttcagaccacacagtacacgagcaatagctacagtcaaccaccaagcgtaaaccagtcctggccaagcgtgcagtcacaccatgaataaccaaccgaccagaccggccaaccggccaggccacatgactcatcctgacagtatacaaccacgacaagccaaccaaactattagacttttcattcatgaccctgctgacctcattttcatcc

SEQ ID NO: 105723 - DNA, 360 bp, Arabidopsis thaliana columbia
aacaagttccttatcaaatcacaacaacaaatctttatttgagaagcataccactaaatctgaggggtccagacataattcgaagaagatttgaagaagaaagacgaagatttgaagagatcgaagactaagattcatgaaaagaagaagaaccctagaagattagggcaaaaagagaagatttttacagaagaaatgtttgtgatattgagaagaacaaggaagaaaatgagaaacgtctttaatggtgagagaggtgtacggtcgaagttgatgtaaaggataaaaactctgaatcctaatgaatacacgcggaaggagcgaatcatatgatgacgatcattttgccgataccgaatc

SEQ ID NO: 105724 - DNA, 112 bp, Arabidopsis thaliana columbia
cccaaatatcacataagcaggtgttgcctattgtatctataacttaactgaaattcctcttgtggtgacatgtctcctaggcacgccaacctgagaaacccaattccaaacg

SEQ ID NO: 105725 - DNA, 192 bp, Arabidopsis thaliana columbia
tcgacaacaaagcaacagttgcctgttgccttcgctcttgctgtggtaaacctattaccgaccgcgtggcgaaaaagcccctacccatagcccaaaatgggaatgccgagggttagaagacacctagactgcgcatgtctcacaagcaggaggcgacgaggttgattcgagcacagaaacccacaggacaca

SEQ ID NO: 105726 - DNA, 401 bp, Arabidopsis thaliana columbia
  unsure (1)..(401): unsure at all n locations
catctacggaggatgtagcaacggggaggtattttattactcatatgacagaaaagatgggggggattgatgccgctagtattgaacctgaagtagacgagaannctggtcagacaggttctaacaatatagaggctactggtaagaatgcagaagggttgaatggtgtacaagaagcatcaaacagtctaacgagctgcttgttagaaatggttattaggaagagtgcctacattggtaggtgggccttctttcaatataagaaaatatgcagcctgtcatccttcgtggatatatccagtgctgttacttctctagagggaatctttggatttgttggaaaaaatatcaagttagaagatttgtattattgacagtgaccaggatgattattgaaaatt

SEQ ID NO: 105727 - DNA, 464 bp, Arabidopsis thaliana columbia
gacgcgtgcgaaaagttttatgaatggaattgtagctctggttttaatttttgaattgtttgattattaagggtgggtaaacaaagaaatatagaaaagtttacgcaactagtatagtatgatggaatttttgatcaagccaagtaacatttgttatcaaaagtagattgtacaatcttttttttctttttctttttaagttagaatttaataaaaatggatcaatgcatatgaaagtgatgtatgaacgtatgctttttttttttgaataacttagaggttctggatccaaacttgtacatcatgtcaaacaaaagaccggagtattttatatgctttttttgtctaaggcaacaaaacaaattgtcatttttatattacttccaattccaagaaacatattttcaaggttgcttttgcagttatatccatattatctccttggctactggatcaacgacgag

SEQ ID NO: 105728 - DNA, 382 bp, Arabidopsis thaliana columbia
aaatgtgaaacatcttcaccaggtgctcccatcattcgttggcttcatgatttaagggtaacgattgacttgataaaatgtgagaacctagcgaaaagactactttcgttaatgctgaaactagctgcagtttttcgttatactccgcttgagcttctgagaagccagactacagtcagcccttcaagtccaacagaagatgacagtcggtgcagcctcatctcaccacctcctagagagcccacaatgaaagaccggattcttccatgtttggaacgtattcagaaactggagaaaagttatgaggatattcggaacaaacccggtgcaatacctgtagagaaagagagaatgttggtggattctttagacagaatcaagt

SEQ ID NO: 105729 - DNA, 278 bp, Arabidopsis thaliana columbia
attagcctttactctatagatttatatcatatctatcgacatggcgaatgtggaccgtgatgggtttttgcatgttgaccgcactgacaaacttgttcatcaggcaaacatactaacataatgtcggttttggagactatgacgattaaggtgctcggcatgtgattatagacagaaatgtcagatggagttacaaaattttagagctcttagcagcgagttacaatttgatgcacactgataacacgtaatggactcactgtagtccgttcgttgat

SEQ ID NO: 105730 - DNA, 439 bp, Arabidopsis thaliana columbia
tgtcagtcttgctggtgcacagaaagcgtctctctatcccgatgacttgcttctactctcaaattttgtcatgtcatcagaatcattcaggcaagtgctaaatattttgtccatttacccaccgggaaccatacatctgtttgtgtaacttgttctcactgctaacaggacatcagaatctttctcaccaatctgcctaccaagatacaacgctcaagcctttttgcatgcctatgtccacttctttgatgtgagtcaaatacttgtaaagagcttcttaaattcatccagtgcacaatgtgaaatattaacttactcgatggtgtaggatgatacatatgtaatattgcttaccacacgttcagatgcgttccatcatctcaaagattgcaggtaataaaagctatatcatacttgaaggtactcgtgttttttacat

SEQ ID NO: 105731 - DNA, 209 bp, Arabidopsis thaliana columbia
aagaaaaatgggtcgagtctcatctattatctctttctctttgacactctagatcctcttcaaaggcgactcttcccaacattatcccaaccagttccatcttgatcatctcaattctctcgtaccacctccttatcatcttgatcattcttcatttctaaacctttacaacatcattattgtgtatttttaatctttcttttttttta

SEQ ID NO: 105732 - DNA, 314 bp, Arabidopsis thaliana columbia
atctcaatcaaagtcaaaatatatttgcttgtttggtaattcttagatgtgcttgagtttttatttgtgtgaagagattaatatattcgaaacacttggcgtgaatgcaaatcctaacgagataagcaatcctcttaatgtaaagaacaacaaataacatggtccatgcccatatttaacagcgtgttatcaacacttgagaccactttgacccgctctgccggtttgcaacaacaggccggccgtcctagagattccaagctttcatacgcaagcatgcgacctcttagttaattctatagtggcacctaaat

SEQ ID NO: 105733 - DNA, 439 bp, Arabidopsis thaliana columbia
attactttcataatctgtaaaacattgtaaccaattgtgagtgcagagtaaagcttgtgcattctttggaagtcaacagtttaaatatggagaactaatctaatttactataatcgtttgattaaattctcacctacattcgtttatcttggttcattatttttggtcatttttattaaaggttagtgaaacatagcccctgcaaagaaattaaatcaaataatctttctatttttttcttaggatttgattactctttaagctataaaatatgaattgtttgccaagaagaagaacatgacgatttttctatgagatgttaaaaatggggcaacatcaatggaaggaggttgattatggtggggtatccataagtcagttagtgtttgtgtcaataacaatctttactttggaagttacacagttaatggatcgagct

SEQ ID NO: 105734 - DNA, 434 bp, Arabidopsis thaliana columbia
gactaaaacggtccctacatcacaaccaacatgttatgcatcagaagctgcaacataagctaggcggaatcatcttcctaataaccatcactgactacgaatctaaagccgaacatggcttgcaatcatgatactactctcggccaatatttcaatgctcttcccaaaatcgcatataacaaacacctggcaggcattatatctccgatctcagccgataaatggaactgctcaattatctctacacacgccaaccaatgatcgtgtgtgagagttctaaagcactacacgtgaagcaagtcaatggcatagtgaaaagtccaagtacacctctttactccgtatcgatcatcacaacgcacttagggaaacgcattatcaatacgcagaatgtgaaacctcgagaatcacactcatgaaaaaagaatctttct

SEQ ID NO: 105735 - DNA, 441 bp, Arabidopsis thaliana columbia
gttccatgtaataaataatctgcctttatagatcttgggatgactcaactatcacatatattagaaggcgatgaacacgacacgatattgtataattttacagtcacctagtacaataaagcagataagtcgcactgtaaacaaaaaaaaaaagagtacattcatggcatatcttattgcatcatcacggcaggaatcggaacacctggtctagcggtccatcccttgcgtgatctgtaagcatcgatggcttgtaatcgcagcctctcctgggaagcacttagagtagactttcttgcctgccaaattaacatacatataatcatttgaaccaatagcacaatctctttcctgagttttcctaacaaacaatagcaagactatataccttcggaacaacagccaacttaagtggagctggcacaacatcaccaaatctta

SEQ ID NO: 105736 - DNA, 193 bp, Arabidopsis thaliana columbia
gtccaagatcaaatcaagaaacccattaaaaaaattaatcatgtttaggcttcagatttaagggtggagggtttcttggcgaagaaacgacccacactctctgtggatctcaacaggaggaagagcttatcgatttacctcctggtttcaagttttatccatcagacaattaacgcttatcatactatattca

SEQ ID NO: 105737 - DNA, 370 bp, Arabidopsis thaliana columbia
gggtgattctcagattcacaagcttttagagctcgaatttgattggcgagctagaaatgtcgaggttttgaggaagaagcaaccacaaaagaggattgattttaagggcttttttgtttctttccgatcttgcggcagagatggcgtcaaggtttataaagtgtgtgaccgtcggagatggtgccttctgaaaaacttgcatgctcatttcttacactagcaatactttccctactgattatgtgccaactgttttcgacaacttcagagctaatgtggtttgttgattcatcattgtctatttttgactgtggatacttttgttttattgtcttcatcttgtttcttccttttttttcattagttctgt

SEQ ID NO: 105738 - DNA, 439 bp, Arabidopsis thaliana columbia
tcgagatctttttcctcatcatgtcagcaaatcccacgactgtggtatcaggatcaatttcaaagagcttctctacaatcttggtgtaggcgtgttcatgacgcctctcatcagcagcaatggtgccacaaatcttcccaagtgtcaagtctccaagatcctttgccagtctagcagtgtttccatgggagatgaatgtagctctttcttgaaaagaagtatatatgaatcccaagtaagggttgttttcagtttttggatcctacaaaacaaaacacaatcaatacgaccaaaaaaagagacttgtaggtttagcctttataagaaaagctagccatcttattatactataagagcttaccattccagaaccaatgaggtattgaatagttttttcaatctgtctcatgtctactcgtccagacagataaaggtactt

SEQ ID NO: 105739 - DNA, 433 bp, Arabidopsis thaliana columbia
cggacgcgtgggcaagagtttccagatgtgaagagttgccgtagagcactgagagatatggcgattgctcttcatttcgaaatgcagactataaaatctgacaaaactcgtttcacagctaagtgttcgagtgacggatgtccatggagagttcacgctgcaaagctccccggggttccaactttcacaatcagaacgatccatgaaagccatagctgtggaggaataaatcacttgggtcatcaacaagcttcagttcaatgggttgctagctcggttgagcagcggcttcgcgagaatccgaactgtaaacctaaagagattcttgaagagatacaccgggttcacggaatcaccttatcgtacaaacaagcttggcgtggtaaagaaagaatcatggcgactatgcgcggatcttttgaagaaaggtatc

SEQ ID NO: 105740 - DNA, 428 bp, Arabidopsis thaliana columbia
agactttcttacctgtggcaagcactgggtcgaccaaaaatactcttgaattcttgggaaattcatcatgcaacctaaagaagatgtatcaaaggtgttattataaacacttcagtcactacaaacacaatgctgcagagaagttcttacttgttaagatacaccgatggttaaagtgttttctcatctctacttactcctgtaaaagaaaagaagcacggggacatcaataagctatttgataaaaggtctcatttctgacatccgaagttcaagcaagagatgatatatagctagattactaacctaaatgataaattttattagcaggtaaaactgaggatgcgcgttccgcaagagcaagaccagctcttaatatcgggacaacctacacagagacaaaaccaagaattagaaacgcttacatg

SEQ ID NO: 105741 - DNA, 305 bp, Arabidopsis thaliana columbia
gacaactttacgaaagctttaaaacttattgttgtgaacacattgagagaaggctcaccaacaactcaaagctgtgagaccagagcggccagaagactggcagcttggacatggggcaggtggaggcggcagatttaaacgccaacgcacaaagcatgagacagcatcagtaagatgacattaactgcaagcggtacagaagcatgaacggccatagaaagaagacattaactgccaacgacacaaggcatggacgaccagcgaaagaaagacattagcgcacaactcggagcagacaagcggag

SEQ ID NO: 105742 - DNA, 150 bp, Arabidopsis thaliana columbia
ataagaaataacaaaatggctcgagtctcttctcttctttctttcctcttaacacttttgatgctttgtcatggctacgcggctcaacagggtcagcagggtcagcagtttccgaacgagtgccagcttgaccagcttaatgcgctcgag

SEQ ID NO: 105743 - DNA, 441 bp, Arabidopsis thaliana columbia
gtccgcagaaaaactcttttgactccacgagcgttttaagatgtaccttctagcttccgatttgcggggatgaccaagaagccacaatggtggtggagaactttggcttgcctgccttacctaatgccactgcatgaaacttggatgtatgcagaaaccgcttaccatctccacccattcctagaagattttgaattcttaacctacccatttctaggcgccataggaagattaccaagctggttcctcatggcttacttttttgtagcttatctagggatagtgcgaagaaaagaatggcctcacttcttcaggttccatgtagtgatgggtatgctgcttgaaatcgcactccaggttatagggaccgttagcaagtggatgcctcttggagtctattggggtaagtttgggatgcatttttggactgctgttgcgttt

SEQ ID NO: 105744 - DNA, 442 bp, Arabidopsis thaliana columbia
ctctctcagacttctccgcctctccatcaatttcctcaagcaagaaaaagctcctccgaaaccctaatttcagcttcctcaaacctcagaaccggcctagcttgagagcaaaccttaaatcatggttgtgaacgcgaaagactcgacggttccaacgatggaagacttcaaggagcttcacaatctcgttactcatcatatagagtctttcgattacatgacactgaaaggactcgatgttatgttcaatcgaatcaaacccgtttctgtttacgatccaaacaccgagaatgaattgagcatttggttagaaaatcctctagtatttgctccacagaaagagagttttaaatcaacatcaaggaaagagcctttgcttccctttgagtgtaggcaagcgaaagattcgtacacaggaacgtttatggctgatgtttgcttt

SEQ ID NO: 105745 - DNA, 172 bp, Arabidopsis thaliana columbia
  unsure (1)..(172): unsure at all n locations
cactcacaaattaaaaagagagagagagagtgagtctgagagagagagagattctgcggaggaagcttctttcttcgnaagggtgttcatagattattaacgttatggtccctacgttagctccatttccagaaacatgggtgcaggggagaatgctgtttacaatcaagaa

SEQ ID NO: 105746 - DNA, 441 bp, Arabidopsis thaliana columbia
ataatctttgcatgttgtttcttcaaagttcattttttttttaatatttacattttaataaggatgaaaaattaacattttcttttgtctgttacaaatatttctccgctgatttgaagctgaggaatttaattaaggaatattttggcatattctttgaaaatctctcattctttggttctttctaagataatttgcttttgttgtataaaaaaagagtaactagaataccaaaatgtacggtacttatgatttaaaaacttatctgatgctaattagtcggcttaatctatatttatgaatctctctgatgtttgttttttgatatcatgaaacagattgaagaagaagaaacatcataaccgtaaaatgctgtagacaagagcaatgtttcctcacaaagatcaaacaatgtcgctgtctttggatccacaatctgat

SEQ ID NO: 105747 - DNA, 404 bp, Arabidopsis thaliana columbia
aatcctctcttccctcatccactgcttctttttttaataacccatttcatctctttcccctggtacgctcttttctttcttcattttctgtggaaattttcagagcttttctgtgtaaattaaagagttcttttttgaaggaaataggcaatctcatcctgagaatcaaacaaccggaaaattcaataaatgaaacgcctttaattgttttttcttacaaaacttctaagcagattactttggcggagacccatctgattggtatttttgcagatattccgttcttggagtaccaactggcctggagctacattccttagcctggagtaaataataggctgaccctttgaaatcaacatggtttcctcaagaacttaataacttttcgctggtttctgtcctgg

SEQ ID NO: 105748 - DNA, 279 bp, Arabidopsis thaliana columbia
gataagatgagtaatctcatcaatgtaactcttgttgctcttccggttcttaacggctttacatgcgtggctttcaactcggttactttctgatctacctaacgtacagaacctgtgtaacctagacagcctacatgttatccaagctatcaaaactatcaacagtgagatcgagtacagcgaccactgccaccataacctcccatatgttcgaggtgtcggtgcttccgatgctattgaacaaagcgaacattgcttgcttaacttgctcactttctt

SEQ ID NO: 105749 - DNA, 410 bp, Arabidopsis thaliana columbia
attgtatcagtgagagaacccaacaacctccaaattcttcctcagatctccaaaggaatgcagggaaaaacttaaactaatgttgaaacttcctccgagattcttctctgtttactcaactctcatccacattcttgcctccttcctctgctcctccgacgtcagaggcgatttcccggcgacgagattcgatctcggaacgttgactctctcaagcctcaaacttctcggcgatgctcatctcaacaacggaactattaagctcactcgtgaactctctgttcccacttccaccgccggaaaagctctttatgggaaaccggttaaattccggcacccggaaactaaatctccggcgagtttcactacttacttctccttctcggtaacgaatctcaatccttcctcaa

SEQ ID NO: 105750 - DNA, 414 bp, Arabidopsis thaliana columbia
cggacgcgtggggtttgatatttgggtttgttcgattatattttttttgtcgaatctcttatctgggataacaatatctagggttttcggttcgcaagtttcttgcaactacttcgcaattttgcgagggatatatttgcaggttgaagtgaaaccaatagttggtgttaatcctcatgaatgtgaccactttgtttcaaaaaagaatcctaaagacagggatcttttacatattttttatcttgtgaacaaagggtataaaatgagcaagaaggtttggagttaaggatggattaaagtggaacaagtacatgaaggtagaattaatcatgtaatgaaacctgctatcgaaagagtttctactaggtcttctagggaaaaataaaaataagaggaaagaagaaaattttagga

SEQ ID NO: 105751 - DNA, 203 bp, Arabidopsis thaliana columbia
aaaaaatcaacgaacacaaaactcattaaagctccttaattccctaaacacaatctcttcatggtgtgtgaatctctctctcgttcggattctcatctcttcttctggtttcagatttgagtctttgtacagtattttttttaagatttttgttgtgttttctattatttttttcttatataatctttaactttctcttattt

SEQ ID NO: 105752 - DNA, 432 bp, Arabidopsis thaliana columbia
gtcgccccgacttcaaccggtggtggcggagtctgctggccagacgcttcctgggaattttggacgctcggactgacggtgccctggaagttgagtcgcgttcgagctccagtaatccgcgcagttcctgcagaaagtgaatcgactcgttctgcgtatgcgttgtgagccgatctgattttggaatgattagccgctagtgctgcgagttggccgttgcattgctcttggaaggtcacgaacttgtcggagagagacgtcacggcaagctgctgtcggtcagtcttctcggatagctgctgaagcagctgcttaatgtcgtcgagggtgggggctcggtcgccggagctctgatcgtcgttgctactcatggtgactttgatcgttgttctgaagtaaaagactttatttcccctccttctagcgccaaat

SEQ ID NO: 105753 - DNA, 157 bp, Arabidopsis thaliana columbia
caatttttgactacggatcttatgttcgattctgctaaacttcattagatatacacagactccaacctcttgacatcttaagaactaaatcggtaaccgcagatgtttagccaactttatcgcgtcttcgaaatcgtaacgacttcaaccctctgac

SEQ ID NO: 105754 - DNA, 416 bp, Arabidopsis thaliana columbia
atcacgattctccaaaatcgcttcaaaaaatcactctaaatcccatcttctctaccaccggagatacaccgccgttacatggccgcgacatcaaactcaggcgaagatccgactctctcttaccatcaccgatctccttttcgcttcgaattacttcaatctatctcttcctctgatcctcgttactcttctctaactccttcttcaacgaatcgacctttctcagtctctcaatcgcttccgaattcacaactgtctcctctaatttcacctcactgggacgattcttactctcaaatcactcagaaagttcagaagagtagaaagaatcatcgaattcagcttggatctattgccaacatgtctggaggagaaagcatagatatagctaaagtaatagtgaaacaagagtcgtc

SEQ ID NO: 105755 - DNA, 416 bp, Arabidopsis thaliana columbia
ttagaatatagactttagattattacatcttgatgaaaatattaatgtcttcactagatatcgcaactcaattaacaaagaggtctcttgattcattattttgaagcttttagaaatatgagaagaaaaatgcttgaatattacttctgaaactctaagatggtgtagaagtaatcaatgtagaaaggtcgaaaagtagggaatcccgcggagagaccaagctctataaactcttcttcggttctatgcttacctttggttctatagatggtcatgacaaagatgtcaccttctaacaaggcacgagtccggtgactttcatcggtttccttaggcaagaccggctcacacgcaatcagctttcctccaactggtaacgcgttgtagcaattcttcattatctgcttgcattcttc

SEQ ID NO: 105756 - DNA, 415 bp, Arabidopsis thaliana columbia
caagaatgataaatatatcaatatattaatgtttttatagatgttggccgatatattgtttgagaccaaaagagttgaattttaagattaaaaaggagtttatataatactgtataacaaagattcctccatcgtgatggtgataaacacatgaaccattgatcgattcatctcggtgatgattttttcaccagaatcgacgctcaaacagttattgacatgtggctaggatggagtgagtccaacgaaaatttcttcaacaacaagcaagttatctattgggctctttttgagcctttaatgtttctggggctttatgtatagcccatgtaagatttggttatagttaataacttaataatatctactcttgtgacaaaccctaaatccaatctacagtcttttttttgttttt

SEQ ID NO: 105757 - DNA, 422 bp, Arabidopsis thaliana columbia
gtgaagaggagtgacttgagaatggcctctccttcttgctaaggttagagattgcttcaaagcggaagcagcctctggtgttagtgtctggtgcacggtataagcccctgtacgcatcacaaaaccacccaccttaaatccctaaacccctcgcaagaatctatcgatctctttttgctatttcctctctacccacaaacaaaaggtttaagtaagactttgaagttcttgaagcttaaaggaagaaaaagtaatggtggaagtaaacttagtgtttataaagatatgtttagtctgagagaagtatcgaagagatgaggacagagcaagttatgaatttatattgttgggttggtttcatactttcgatgttgttttttcttttattaattaaacatcaatttctttattggttttgtttt

SEQ ID NO: 105758 - DNA, 417 bp, Arabidopsis thaliana columbia
atcttcgacacctgtttctgaaatcttcttcttgtcttctccttggaattctatctgtgagcgggagtttcagatccaccaggtcatgtggacagttctcaacagtagcatacttcaacaaagatcattgcttttcagcggaacctgataatctccaacaaacattcttcggtttacagtattaacaccagcaggatagtgctgttttcccattcttgaagatggacagggcagatacgtcgggctttgtaagtggcggaagttgttcatctctcaacttgctccaatatatgcttatagctacaagtatgatgtgctaagtggtactatttcggagctctctttcatctatatccttttcatcttcatgtgaatttggacaaaggtgtagttccattctctagtgccattaatatg

SEQ ID NO: 105759 - DNA, 419 bp, Arabidopsis thaliana columbia
ctttggtattacccatctcgaagacagcagaactgtgaaacaaagttggaatttttgttcatataaaagtgccgaatatagaactgagatacggaaaaagataagagacagattttgagttttacccgtcagccttagaaacaactccaacttcagctacgatttgcctcatctgagattcattacaagcaatcacgaatagaccgattaacttgtgaaggcagtggcttacaaagacagtgaatagagatgcaaacatacctcgttgaatcggcgaccatctaatcgaagaccttcagggtttacgtactccattgttgtgaactctaggtagagataatcaaggatgagagcaatgaaagacagaaacagaacaagtttaatactttctgatcccacagaacagggaacaagagacg

SEQ ID NO: 105760 - DNA, 206 bp, Arabidopsis thaliana columbia
gacaaccggaacagcgtcaagcgttcggattaggcctgaggggccagaacctaggagggaagaaagcacacgcacacgatggtaaggagaattgacgcggcaccatcctatatccgctggctcgcagcaactggactaccttaaagacactccatttgttatcgttagctcgggactatcgaaaccatgggttaaggaacaaccaa

SEQ ID NO: 105761 - DNA, 314 bp, Arabidopsis thaliana columbia
  unsure (1)..(314): unsure at all n locations
gaaaaatcttccttcaacggcgggatcaggatcgagcaagtcaacaggagctgcatcaggttgggcagctttctgatgaatggagtgtaaaatttaagttattggacaagtccggcttcatcttcttgtgacttgagagcacgagacaatagacaacaatggtggtcagccaacagtctttttgatgtatgttaatggtaagttgatgtgtgtttctttgtaatcctcccacactccctgttttaattanttttctttcttataatcatcgntgttacattatcgattatcatttgtatcactgagatattaat

SEQ ID NO: 105762 - DNA, 200 bp, Arabidopsis thaliana columbia
cggaatccgggtcgaccactcggaccgtgcggacctgccaacgacagaacgtgttgccaacggcagaagggacagtggtatcaaggttgatactgtcatcacgaacagtggggttttaaactagaaacctgtcgacttggcgtgactctttggcatgcatgggattaaaggttaatttccggagtggagacagtaaacac

SEQ ID NO: 105763 - DNA, 250 bp, Arabidopsis thaliana columbia
cgccggcgttcccgtgacccacgcgtcgaaataacaaaatggtcgagtttttttttttttttaacacttgccttttatggctaccgtaacagggtagaggagagttcgaacgagtgccagctgaccagtaatgctggccgacacgtctgagaggaggtgcgatggggggccaccacgctctagtcgtgctcaggttcttgacgtcaatggttaggcttcttgccttttttacacggagcttttgggtagg

SEQ ID NO: 105764 - DNA, 196 bp, Arabidopsis thaliana columbia
ggagagtattgggcctatgtgcgatggcgagacccgagaatcggaatgagaccggaagaataaccggcatgtgtgagagtggctcttatcaaagcttacagggtgccttcctagccgtacgcgagtgcctgatctcttcttgatcgggctagacttctaaacttcactgcgtgataatcatattatttttttatac

SEQ ID NO: 105765 - DNA, 163 bp, Arabidopsis thaliana columbia
ggtgtccgcaacctaagttcagccaccaactatagggaagcggagatcgagtactggccacccactagtcagtgtggtttcgtgtgttgtatgaacagggttctgcacttttattccaattctcgtcgtaggacggttacgagagggctgtggcagccttatg

SEQ ID NO: 105766 - DNA, 233 bp, Arabidopsis thaliana columbia
gtttttgataaggcacttccttgacgctgaacttgccgcggtacttcccatgttcttctttcgattcaaagactatttatttcggcgtgggacattctaaaaatttgtttatcttgatggctgattgggaggagaagaagatgatgtggatcggtgattctgaaaaggtaatcagcatagggcaaagccagggggtgtgtccgggctgtgggtgagctgggcgtgcgtgggct

SEQ ID NO: 105767 - DNA, 200 bp, Arabidopsis thaliana columbia
ggaacagcactgtatatcgtctttctgagtgaatcgggcagagccggagtgtgcaaaacttcggttaatgttcactttggatctacaactagaaacagcctgtatatgttttgcatgcactccaaaaccaactgccgaccctaaggtcattggcggaacaaccacggggttggggtacagacaacagacgaaactggggg

SEQ ID NO: 105768 - DNA, 225 bp, Arabidopsis thaliana columbia
attccggcgacccacgcgtcgcgtccattcgagacccaaattttcttttttgaaaatgtatggagctcaaagtgaagccgacggaagcacaaaatgagatattggtcatcagacacgagtgtatgaagaccgaatggcttaccaagatggaagcagactgaatcataaaaccgtttcggtccaaatagggtatctgggttggggaacagataacttacgtgcgtg

SEQ ID NO: 105769 - DNA, 100 bp, Arabidopsis thaliana columbia
ggttaagctcacaattctggaaccttggttctgcttaacggtgcttgaggcagactggtctctatcacaggtcctcacactagttagcacactataagag

SEQ ID NO: 105770 - DNA, 213 bp, Arabidopsis thaliana columbia
gttttctgatttttagctttatgaactgtctcgcgggataggcgcttgattaagtatattgaactcgaccgcacggagtgttgaaaaaccagcctggaagtcatgcgtaagacatggctgggttttgggagcccctatacgacgggttgcacatcagacacagatgaagcttgtgagattcagggaatcaagctgtatgacggttggactaag

SEQ ID NO: 105771 - DNA, 333 bp, Arabidopsis thaliana columbia
caaagccaccggtttttagacacacagatttcattttcagttgttaaatggtaactagagaggcgaagttgacgccagagcgagaagtagagtcgcccatggcgcaagcgagacataatggaggaggtggggttgaaaaactggcaaagaagctcaaaaggcatcaccaatgcctttacttacggctaatgggaatagcagcttggtagctagtggttataatcctcttttaggaacatttcaagctcttgattcattgtcgatagcttttatctcaccattacagtttattccttttccggagtattgatgaggcacatttaaatgggattg

SEQ ID NO: 105772 - DNA, 399 bp, Arabidopsis thaliana columbia
ctttgggaacgaccatttcactgtagcatctttttttctgcaaattattctctctataaatggatttgatcttcagaccaatctctccctcaacatttcctcatctcatctctctgatttcttgcttcgaattttgatttatctctctctgtctctctctcggtctcgtgctctatctcgtttgtaggcagtgccaatttcaccacttgtgttgtgtgtcagcggatatagaatctgagaggaatatttaaagattctccctttgcttcttcttttttataccgtttctattaatgtttgggactcttgcttccggcgaaatcgaaactgccagactgaaccgtaatttggggattacgtccaatttagggggtttctgcggtggatttgaagactttg

SEQ ID NO: 105773 - DNA, 412 bp, Arabidopsis thaliana columbia
gcaaaagagggaaagatgtaaggcattgagacatgcatttgagtgtagagtagtccttatccattaaggaaaggaaatggtaaaggctaagctcagtccctgattacaaaactgaatcaacaaatctgtggattagcaagaattcgaaagaacagttaacgttataggattattacttgacacttgatacattaggcgtgagatctcaaagcataaacaatgaaatgctttagattgtataatctatatggacctcatgaagtgaaacatactaagatcatattaagaaaaaagtaatctaaaagatttaaagggaagttgaaaaattccatgaatgttcataaccatactattgaaatctaaaatcgtaaggcactgcgaaactggatccacatttgcataggatttttga

SEQ ID NO: 105774 - DNA, 404 bp, Arabidopsis thaliana columbia
atcacgaacaagtaagagtacaactacaaacagcataataaatggcgcacaagctcttgcttgcttgcgcaactactgccctctgctacctcctcaccaacacttgcatataccgcactgatgccgagactcgacgagatgacaccagccacgcgatgggcccaagacagaaatgtcagaaggagtttcagcaatcacagcacctaacagcttgccagaaattgatgcgcatgcaaatgaggcaaggccgcggtggaggtccctccctcgacgatgagttcgatgtggaagacgacatcgtgaacccacacagcccccagcatggacaccagatcctccagcagtgctgcagcgagcttctgcaggaagagccagtgtgtgtttgacccaccttgagacaagct

SEQ ID NO: 105775 - DNA, 310 bp, Arabidopsis thaliana columbia
ggaaaaaataacaatggttattaaaagtttcccgttaagattgaacctatttgggaggggagagaatttttaagagttgagagtatcttatgtcatttgcttatgtactcttttatacaaaattcgcacttgaaaagtgaagatataaacctctaaaacgggaatgtgttttcaaatacacaaagggagagatcgacattatgttaactattattatattatatttaatatttataagaaaaaacttgaatcatttattatttttcccaaaactcctctttttatatggtgatatatggatggaacaaaa

SEQ ID NO: 105776 - DNA, 404 bp, Arabidopsis thaliana columbia
caaaaaccacgcagtcgtgttctgttgaattggtatatttggaaataagaattatcctgctgagagatattgagatgtgaaggagtccatgccatattgagatggaagaagattatagtagagataaaaaagttccaagacacaaaccaccattagctaaattgactttgaaccatcatccatacataaaccgtctaagacagatgggaactggctggtagtctatatataaccaataaagatcacccataaaaagatacaaaaaaagaagaaccgtttcttgaatgatatagtaatagaagctaaggaaaatgcaatgtgggaatcaagcagacttaggaaaatgttgagacagaagttttgaaatcttgaggaacccgacagtgtctttcccactgaagatc

SEQ ID NO: 105777 - DNA, 226 bp, Arabidopsis thaliana columbia
gaaatggtagctacattctgtgcccttggttctgctaacgggcttgaggcagcactggtctctatcaacgaggaacctaccctaagttcagccaccactatcaagaggaccgcgacggtctgaccacccaccctagtcatgggggttcgtgtgttgtatgacggcgttctgcactttattccaaattcactgtaagacgttacgagagggctgaggcaacctatgc

SEQ ID NO: 105778 - DNA, 186 bp, Arabidopsis thaliana columbia
gttctacatttttgtcgttaacagaagttaaaactaataaatatctgccaagaaaaaatcagaacttgagtgaatattatgcttatattgcgcgaaaaaaaatctaattagatatatttttattatacaccaccctatattaacccacccataagagcctacggaaacctatttgtaatttaaaaa

SEQ ID NO: 105779 - DNA, 337 bp, Arabidopsis thaliana columbia
gtttggttaagttttggacaattttttattaaatatttatttttcttaaaaattagacgatgcaaggtacctcaaagattaaaagtaacttaagtttagaagtaatttttttatagataagaacgacttaaaagtactcaaagtttgtatcatttgatttaatgcggagatgtcaaaacaaaattttgtaggtgcgttataatatcttgaattgaaaataatgttatataaataccatgaaataacacaacattttacataaggaggtaacttaatttacttcaacaaattaaatagaaatcctataagataacaacgtaaaaatgtaataaaacat

SEQ ID NO: 105780 - DNA, 412 bp, Arabidopsis thaliana columbia
ggttctccgaagcctttcaattacccattcaaatcacattctcctcctgtagagttcatcaagagaagtgtaactaatttaacggctcctatgccaatagctagtgctactggcaacaaccttagtcgatttggaagcttggagagtcagaattgtatcccgggtacttcccatgggtctctggatcttgtagatgcttttgaacagccatcaactaacagcttgacaagaatccggtctttgcaaaagtgtgcagctgcaatagcagaattggttcatgaaaggggtgaaaatggtaagcatttagaagctttctcgatccaacttgtgattcttgcaatttggaatcaagcactacacatctgtcatactcaagcagtctcgggtatagaaggaagcctgctccaagaca

SEQ ID NO: 105781 - DNA, 256 bp, Arabidopsis thaliana columbia
gcttatttgaatggacagttagttgcttgaacagaaacaggagatacttatagaagaaatgtttgaactaacaatggtgtgggttgttggataccaaagggtggcacttggtatggaactgaattggtcggggatgatggtggtaaggaaaggttgcagggaaggctccgggggctgagggagttaattgattcaacaatccttttgaggtggagcgtctactgcaagctagctttgcaggcagatatttgtgccc

SEQ ID NO: 105782 - DNA, 387 bp, Arabidopsis thaliana columbia
ggaaaaatgcttggcattcaattgaattgaatgccgccataaatgtggtaatgtcccaaccgtatttttggatccaagtttttgtgtttgttcagttttatctttatttatggttttgatcatagagtacgaaaaattagaaaaaaaagataaattttggaatgacaagaaggaattcacaaacttttctttatttttaattttttgtagtgtaaatgtaaaaacggataatttggtatgaaagaattataccgaattgcatcataccatatatataaacaatatctctcggattgactctttgagttctaattaatatcggttgccaaaaaaaatttgtagaataaaatgacataatcatcaagcgggacagaaattatttttaac

SEQ ID NO: 105783 - DNA, 359 bp, Arabidopsis thaliana columbia
atgcgctaataccccatggcagaggcgtaagcttgtgaaaatcttaaatgactggagcgtattccatgtgcagatggggattgctgttggtcaaatgatgcagcaagatacatcacgcagttcgaaaaatggggataagtctctactcattttaaaccatatatatggtggattagaagagcaaattaattgggtggcaattcgctttctcatgctgggatttgacctagacctctactcgccaagtgaatattgcatggtatactggtacatgtatattatactcttgaagcttgccgaaagagcacgtttcaggggcttaatcgttgtcaacactgtggaaagaaaagcaaaaagga

SEQ ID NO: 105784 - DNA, 294 bp, Arabidopsis thaliana columbia
tgctgtgtagttgaacatatctgtgaaattgaatggtattaatagtatagtgtgaggactctactgatccgagaatttagagctatcgtgcacaaaccgcttatggaagggcgcatattataaagcacgcggcttgccgtgttgagattatgataactgacgtcgatggcttggtgcaccatattaaatttgcctataacttgaggtggatgggctccatggggtacggggacggaattgggtcgattcggaggggcggaacgtccaatcaagaggagagcgccaattaccatc

SEQ ID NO: 105785 - DNA, 516 bp, Arabidopsis thaliana columbia
  unsure (1)..(516): unsure at all n locations
acgccacgcgtcgcgggcttcctccnnttcttctttccttcggatcccacccgttctcctctctccttttcgcagacctcaatcactgccaaccgcgcgaccgcgtcgatcctcnnccgtcgtcttcttgtcccaaaggaagtnntgtcaaggggacgaagcaannntccatccaatatataccccagcctcgtttgattaacctcaaagctagtgaagggattggggaagttgtatgggaagaatatgatacctnnaggtagaaatctttcgaagaaccatgtgttgctcagaatgggtattatccgaggcaagggatgtttgtgttttgttcaccttgtacacatggcccaagaggcatgtgttctacctggcttttatcatagactccttacccaagtctgacttcttgtcgttagtaccctaaccgagaccattgtccatgnccctcagcaaaaggtgtcttctgctcgtgctgttatgagcgagctcttcggcaaggatactggatgctgc

SEQ ID NO: 105786 - DNA, 304 bp, Arabidopsis thaliana columbia
ctatgatggatagagtctgttccgtattttatctctaatcaacactttagatccttgtacgcggctgcgcgacatcaacagggtcatgcgagggtcagcagcctccgaacgagtgccagctcaaccagctgaatgcgctagagccttcacgacggactgaagagcgagggtggtcgcatatgaggtgaggcaccacctagcgtgttaacgccgtcactgaagcgtctcatatgcacgctacatgaaagagcatacggggctatactagggctacatattcaacaccatgaagctctccttggtg

SEQ ID NO: 105787 - DNA, 423 bp, Arabidopsis thaliana columbia
ctaaactgagaaaaaacagcaaagaaaatcagagagatcaaaaaaaagaagaaaaaaaagaacagagattcttttgaactaacgaagacatatagatactgtaggaagcttttcgagacgtagtttcgacgtgagagtatctaatgggacgactcatcagaggagtaaatctcacggtgttgaggcacatattgaagatcttattgtaatcaagaacactcgttgggctaatttaccggctgcgctattacgagatgtgatgaaaaagttggatgaaagcgagagtacttggcctgcacgtaaacaagtcgttgcttgtgctggtgtctgcaagacatggagactaatgtgcaaagatattgtgaaaagtcctgagttctcaggcaaactcacatttccagtttcgttgaaacagcccgggcc

SEQ ID NO: 105788 - DNA, 339 bp, Arabidopsis thaliana columbia
gcacatgtaaggcacggacctttcgcgtattaggcacctgaaccgggaagcggcacaccacatgaaatagctaaggttagaggagacttggcaccatgcgatgcactgaaacctcgatgacccgtcgatgctgacgtgtcaagccatactcgatcatagcacacttaacagtcaatcttctatctagactttcgcttagcgctttgtggctcatcgaaaaacgcttggtgctaccgatggacgtaacgcaaacgcggactctacgtgcaaacggaaggctatatacaaatgggaacgacacgaaaagaggtcgacaagagactcagcggcagtactagt

SEQ ID NO: 105789 - DNA, 430 bp, Arabidopsis thaliana columbia
tggactccatctgtatgacggcttgttcaaggttattccatttgatagtaagggacagctcaaggaagcttttaatatcaggcttgaggaattgcaggttctggatatcaagtttctgtttggatgtgcaaagcccactattgcagtactatatcaggacaacaaagatgctcgtcatgtcaaaacatatgaagtctcgcttaaagataaggattttgtcgagggtccatggtctcagaacagtctcgacaatggtgctgacttgctgattcctgtaccaccaccgctctgtggtgtccttattattggtgaagaaacaattgtctattgcagtgctagtgcattcaaagcaataccaataagaccttccatcactaaagcatatggaagagttgatgttgatggctctagatatcttcttggtgaccat

SEQ ID NO: 105790 - DNA, 213 bp, Arabidopsis thaliana columbia
atcttacatatagaaaacggtttttatttgctctagccaaggattaatgcatgggggggttacaatgtagcggcatgcgacactcttctttgtctggatcttcttccgacaaagacttctcctcgttctcatttacttccacaacccaaaaatgcaaatatttctcgacgaattctcattaaccctttcaagataccgacacttcctgatctc

SEQ ID NO: 105791 - DNA, 425 bp, Arabidopsis thaliana columbia
caaaaacgtttttacttataaaacgttagaaaacttctctagtcatgttttatgcataggtcgctcacaagtcaccaccatgcaacactctcttcgttctgatcttcttccgacgaagacttctcctcgttctcatttacttccacaacccaaaaatgcaaatatttctcgacgaattctcattaaccctttcaagataccgacacttcctgatctcacttctccggttccgtcaccggttaagctcaaaccaacgtatccaaacttaaaccttcttcagaagctagcggctacgatgctcgacaagattgagtcctctatcgttattcctatggagcagaatcgcccgcttcctaaaccgaccgacccggcggttcaattatcaggtaacttcgctccggttaatgaatgtccggttcagaacg

SEQ ID NO: 105792 - DNA, 410 bp, Arabidopsis thaliana columbia
cgcaaacgagttctcttctaatacctgctgcaggattagccaacacaggttttgatgcttcagaagttagacaagccgagacagggcttggtgctacagaagttggatgaaccgagacagggcttggtgctacagaagttggatgagccgagacagggctggatgctgtagaagtaggacgagtcgggacaagtgtttgtacttcagaaattggacgagctgggacaggtcttggtatttcaggggttggacgagctgtgacaggtcttggtgtttcaggggttggacgagctgggacaggtcttggtatttcaggaattggacaagccgggacaggtcttggtgcttcaggagttcgactcggcgggacacgttttggtacttgagaagttgcacgagcaggcttaact

SEQ ID NO: 105793 - DNA, 118 bp, Arabidopsis thaliana columbia
cctaaatctgtgctacaaaatttgttgatggcagagaacctttgagactagaacttgaacccattgttcagatctcttttcgtgctaatctcctagtttattgaagataaattgattc

SEQ ID NO: 105794 - DNA, 229 bp, Arabidopsis thaliana columbia
tcctcttcaatggctacactgacgaacagtatgccaacgaggagccaggtagctcaactcaacgcgctcgatccatgcccaaccatgacgagcgagggtgcgcagacctaggtctatgaccagcatgcacacgagctacaatgatcacagggtgaccttgagcatcgattcaatggtcctgacgcgctcttgctacccactttcttgaacatcggcaaactgacgttca

SEQ ID NO: 105795 - DNA, 366 bp, Arabidopsis thaliana columbia
gttgcatcttatgatcatggtttatgtgtacggttaaattttacattgtggatgtggttcaagtggagctgtcttgtagatcaatggactaccaacttggagagttgttttaaatgagattttaatactttttaaagtgtttctataaaataattagtgcttgctttttattattattatatatattactattagtatcagaaaatattatatttatattctgttacaagcgaaccatagttaacaattttcaacatactgatccacaattgacagttttacctgaactatatctacaatggctgagttttagtcattgggtcttaattcatattacggagatacattgatatgtgatttattcat

SEQ ID NO: 105796 - DNA, 416 bp, Arabidopsis thaliana columbia
gaaaaatttgtccacatcctgttgttattttcgattcactttcggaatttcatagctaatttattctcatttaatacaaaatccttaaattaaatttgtacagtacctttgttttgggtatagacaattacatttttgatctgtatcaaatactacacttacaaaatcacaaagtaaaggcagcaattaattttgctttgaattgaaaagctttgagagagtaatcaaatgcttaaatcacgaaaacttacaaatttcaaaattttgtctctccataaattctcttaataaaggctgttgtttttccaatttgaaaattctatttttcaaaatcaagaacaggctatggaatttcaagaagctggttcatcatcaagtagaatcatcttcctttgtttcctctcctatctaaaatc

SEQ ID NO: 105797 - DNA, 395 bp, Arabidopsis thaliana columbia
cgaccccttggccaatgaagttgaaatcgttgttcgttgcttcggaaatcaaatgggaagtggattcaccgggattaaaccctaaattcgcgattcaaatctggaagtatgtaattcaaaatcctgattgcgtttgggacgagattccttcattgccttccgctgcatactctcttctccattccaagttcaagactcttacttcgtcttttcactcgctatttcattcctccgatggccccacctcaaagcttctcatcaagctccagaatggagcttttgtggaagctgtggtaatgagatacgatacctcgtttggggatgttaggagggaaaccacgtcctggaggtataagatctacgttatgtatttatctcaggttggttgtaagatg

SEQ ID NO: 105798 - DNA, 180 bp, Arabidopsis thaliana columbia
ccggcgccacgcgtcggctctgtccataaagtatggggagatcttggatagcaaccaatactagggcagaagctcttcttgttcctatttaaaggaacaagggatgctgtccaagtgttccaaagcccatcaaagtacttttaagcgcttgcagttcataaaattttacaaaagatccag

SEQ ID NO: 105799 - DNA, 376 bp, Arabidopsis thaliana columbia
ctcgccaaaaaccttgaaacctttaaaaaatctaaaactatggctaagctcattctcggttgggcaactcttgccctcgggatgctcctaaccaacgcatccatctaccgcacagtggtggagttcgaggaagatgatgacgtgagcaacccacaacaaggtaagtgccagatggagtttatgtagcatcaacaactaataggttgcaagcaattgatccccatgaaagcttatcaaggaaaaatcgtttcctatacttatgcttttttgctcactctttaattatatctttaagtccggtgtttacttaatttctttctttatcttcattatatttctttaataaaattattttaatttaattcaattgtaaatt

SEQ ID NO: 105800 - DNA, 369 bp, Arabidopsis thaliana columbia
cgccgaccggcgaccgacgctcccaaaaaccttgaacctttaaaaattcaactatggctaactcattctcgtttcggagcttgcccttggatcctaccaccatcatttaccgacaggtggagtcgggagatatactagcaccacacaggaggccgagggagttatgacatacacttaagtcttgcatgattgttgattctattgtaagtatttatcttgtttttacttgttctttttttattattttttgatgttgttggtttcttttaattttttatttatcttttcttattttttcttatttttttttcttttttatttttgatttttttttttgtttttttttattttattttttttattatattt

SEQ ID NO: 105801 - DNA, 421 bp, Arabidopsis thaliana columbia
caagatcaagtgctctctttgattcaaaacattatctttctgaaattcaaaggttgaataacattcagtacagacaaaaactctttaagtcaaataatcaaaacaggatatttgctacatcacctgaaaaccaaacatagactgaagccagtctagaatgtcttcatcgagtttcttcttgtgacctgctgtccatggtaatccccttgtatttctaagagcggctacagcagcttgtatctacagaacagtattcaaacatattatgtggactgaaagacaataaaacagaaaaatagaagacaagctgagaatctggataacctcaggcaatctcattattgcctgattctgactatcagggtcaaggggaagtatattgtaaggcacgtaaatctgggtcttctcttccaccttattg

SEQ ID NO: 105802 - DNA, 323 bp, Arabidopsis thaliana columbia
  unsure (1)..(323): unsure at all n locations
caccaacataatctctttaccattcaaaacataatttttccttctctcccacgtcggttgacaatcaaaagcagcaatttcccactaaatcaaaccgtcaaaaaaccttatacgttactttacctgatatctattcataaacgcgctgccacgctataatgtcttcatttactaactaacagtaacctgctctccattgttatccactcgggtttgtaacatcttatacgatggcgtgagaagatccaaaactcgacacctcttcacgtngttgacttatctgagatctctgctctaatcggacaagctcttctctatctacc

SEQ ID NO: 105803 - DNA, 400 bp, Arabidopsis thaliana columbia
gttactttcattagtgacttctatttaccgaatgattaaattgcatatacgggtaacttgcaggtatcaaggagtctgatactggtttagctcctctcagtaagcaaatgatgcaagaggggcaacctctccaggtgggttatgtttcctgttttagatatatcccgatcgatctcctcatggatatcttttcgagagttcctgcaaagtctatagctaggtttcgttgcgtatccaaactctgggaatccatactttgtcgtcctgatttcaaggagttgttcatgactatgtcttcgattcgtccaccgttgcttcttttcaccttccaagatgatgatggcaaattggtcttcttctcttcacctcaccctcagattccatgttacgagaatacgtt

SEQ ID NO: 105804 - DNA, 383 bp, Arabidopsis thaliana columbia
ctctttacgatcgatggaactataaatatataaagagaacgaagaacactggtaagaacttaaaaccaatgattcgccatatgttctcctctctgactcacagattcgcatggcggattccacacttcgtctacggcgcaacgtggacgttgtttctgacgttaacggtggctatcatctcgcttgcaccggaattcgctttcgtgtcggcgattttcccgtcttcttctgaggtgttctcgcggcggtgcggttcttatgcagccatattggttccgctggatctttcctcggaggtcttgtgtttaccggcgaatcttttccggaggtcgaagatggtcctcgttgtgccttcggtttttgtaactttgttgtttcttttt

SEQ ID NO: 105805 - DNA, 420 bp, Arabidopsis thaliana columbia
  unsure (1)..(420): unsure at all n locations
ntcggccaaaataaccaggaaaaccccgttattaaattttaaagctgacctgttttgactggcactatgctttactcatagcaggcagctcatctttgctctttccaatagtatgggacaagtcctacagagcggggagctagagtaaataaacaagctaggttcaactatctgacgatcatgtgttttcatcagtccttaccggaagtggaaagcatggtgactgcatgtaagcagaattgaagtgtttaatacattctgtcgttgtcttactaccaacatggtctgcaacttctttccaattgccaaacccgtatgtcgcaatggcctaacacagtcaatttacttcccaatagtcagatggaatctctatatagacatgggagtgtacaatcagaaacgattaatgattacctcaag

SEQ ID NO: 105806 - DNA, 419 bp, Arabidopsis thaliana columbia
gacctgatgttaccggtgctgtgactactgtcacaactatgcaagtgagattatcattaagtctattactttaacaagattgctatgatgttctcttttgatttatattaacttggtttcgctatggatttcaggcgatcaacgacaagattctgtcgttgaaatatgaagactacacggctgagatagaaactgctgatgctcaggagtctcatgagagaggtgttattgtgctggttacaggacgcttaaccgggaacgataatgttaggaagaagtttagtcaatcttttttcttggctccacaagacaaaggatactttgtcttaaacgacgtgtttcgattccttgaggagaaagaggtgactgcacaagcccgctctgttcccatcaatggaaccactagggatgttcaggct

SEQ ID NO: 105807 - DNA, 409 bp, Arabidopsis thaliana columbia
aaggaattttccttaaaatttctaaaagaaccagctcaaagagattctacaatgacaatctgggtggctctgttggtctagggattgtagccgcgctcgagaactcaaacactcgtcgaatcacgagcgtttgtagatcggaaccgaaccaacccggccggtctgatccggttcagtttatgagccatggaggaagcactgacggagaagacgaggagatgttcataatggacgaggaggattacacgttggtgacatgccaccatggaccaagtggatcttgtagtacaagggtttatgacaaagatgggtttgagtgtttctcaagtaagatcaacgatgatcatcgtgaaagacttttcgtggtcgatgtcgttacggaatcttcagtgaattcgccagagtttca

SEQ ID NO: 105808 - DNA, 401 bp, Arabidopsis thaliana columbia
  unsure (1)..(401): unsure at all n locations
accaaccttttcttttttttttttcctttctttttaactcctcctccccggagccggggtttttcctggccgttttccacgaccactttttttgttgggacacatgcccaccatcgtacaccctggctggttcgtaactacgtcccataacccgtccgtcgctaggatcagaaactcatctttctcagtccgatccgtaacccgcacttccggctccgaaatgacgtacggtttaaaataattgtctcctatgggctcgggcatggctaaaacgctaaaactctgcaccgcccagtatatcactcgtcctctgctcttggattcgaccagctcancggacgataggctgtcattttcaacgtaacagagtaaaatcactaatcaacaatcagaagagtaga

SEQ ID NO: 105809 - DNA, 413 bp, Arabidopsis thaliana columbia
atggattcagactttgttcctccttctgtttcttttcagctcccggttatcgattgctctgaccaaaacctaaaaccaggaagctcaaagtgggatgaagtgaaggctgatgtccttaaagctctagaagactacggttgtttcgaagctttctttgacaaattgtcagtggagcttaatagatctgtttttgaagctatggaagaccttttcgagttgcctattccgaccaaacagagaaacgtgtcttcaaaacccttccatggatatctttgtcataatctttacgagagtttggggatcgatgatgctaatgttttggagaaagtcaacgactttactcaacaattatggcctgatcatgggaacaagagtattagtgagacgatacacctgttttcggagcaattagt

SEQ ID NO: 105810 - DNA, 345 bp, Arabidopsis thaliana columbia
aaaacatacacaaatagcaaaacatggctaacaagctcttcctcgtctgcgcaactgtcgccctctgcttcctcctcaccaacgcttccatctaccgcaccgttgtcgaattcgaagaagatgacgccagcaaccccgtaggtccaagacagagatgccagaaggagtttcagcaatcacaacacctaagagcttgccagagatggatgagcaagcaaatgaggcaaggacgtggtggtggtccttccctcgacgatgagttcgatttcgagggcccccagcagggataccagctactccagcagtgctgcaacgagcttcgccaggaagagccagtttgcgttt

SEQ ID NO: 105811 - DNA, 374 bp, Arabidopsis thaliana columbia
ttcaaagcctcgacgagaatttctatggaaatcgggcatggacaaatcgggggcagatctcggcctgccatcatcatgagattgggtgaagaaatgacggagaaatcacgagattgaacaacaactgagcttcttctaagaaacccaatcgcgttacgacttgatagagctcgtctcacgaacatagccatcatccctaaagacttcaactttcttcttcttcttcttcttcttcttcttttctgaggtttaaggaggtagacacaagaaaaacaagtaccttttgattgattccgtgtatagagctaaaaccctcgacctcgtattgacgactgaaatgtaataaataaaatttagtttccttcatatataaa

SEQ ID NO: 105812 - DNA, 394 bp, Arabidopsis thaliana columbia
  unsure (1)..(394): unsure at all n locations
taattttaatatttaaggaattttgctgaaacaaaaaaaaaaactaaaacactgatatatgtgacttgtaacctatatgcaggttttgtgaatactcgcctgaaaacaccagtaactggtgcaagtcaccgattgtaatggtgttcagagaggaagagacgaaagatggaaggaaaaacatgcgttacacagatgacattggagatctatgcattttcatttcgaagggagaggatttctgcgtcaaggctagctcttgccctggactccaacctaactccatctctttacatggccgtttgtttgcgattcttaatctcacgaaaagaaccatgggttgctacgaatatccccaaggcataccaaaaaggattccctatntaccctactggct

SEQ ID NO: 105813 - DNA, 399 bp, Arabidopsis thaliana columbia
gcgtaaccagatagcttgtgcaccttacacattataggaacctttccctctaaatgtttacctctgatgtggtatacattactattttggttgtagatgaattgtgcgcatttggagaactgcttacatgaagcaagagaagaagcccagacccatctttgtgctgctgatcgtagagcttctcagtatactgcacttcgtgcatcagctgtgaagatgcgaggtctctttgaaagattccggagctctgtctgtgctggtagtgggattgctgattttgctgactccttgcgaactttggctcaagctttagccaagtaagttcccatctgtacgcttcccaaaaagataaccttagttctttttctcttgtgtatatggcagtacttattcactttc

SEQ ID NO: 105814 - DNA, 341 bp, Arabidopsis thaliana columbia
aaacttttcagagagaaagaaactttcttctccgatcaaagttcaaatcgccgtccggttacttttccagcatcaatcggctttcatagcggtggtggctggctcagagcggtgttcctttaccgcattttactttttgtttttaggaataatcccctccactttctttgaattcaaatccaaatcaaattttcttagccatgagtgttgtcttcataaggttttgcctctagtttcatcatttgtggttcagatctaagatgggggagatatagtttctcttttattttggtttggtaaatcagtggtttacatatttttcctcttttatagttgtgaca

SEQ ID NO: 105815 - DNA, 394 bp, Arabidopsis thaliana columbia
ggaaattggagtttaaccaattaatggaaactacggccatcccaaattaccaaccgttttgtggagccacattgaagagagagtcgttctcttagtagttttgacatccacatctactgtatacatgcatatttgtcaacgcattcctcactaggttcagcatggttccttttttggattatttcatcaattgattcgacatatattaataaagggagatacatattttgtatcattttgcgtgtcggtggtaatatttgatttggtgattaggagtagaaaactgttttggatgatattaaaaccaaagaatgtgttatggttactatgaacaaacgttctctgctgtattgtacaagaacacattctttaaatttggttgatgagacacata

SEQ ID NO: 105816 - DNA, 355 bp, Arabidopsis thaliana columbia
caaacttgtctgagattgttactatcatacttgaagattatgtcaaatctcaaatgggattgactaatgtattcaatgcatctggattgagtaagttcttgttaccaatctcgagaatgccgaaagacggtccaaactggccaacggttgatgatatggtgaagcagaaccaaggctctggggttttacactccaagaaggaaagaagcttctgaaggtgttgcttaccagtggaattacatggttgaaaatcaatatggtaatgatggaatgaaggatggatcatgctcgagtcgatctgaatcttcttcactagataccatgtctcggtctttggtgtttcagaactactttg

SEQ ID NO: 105817 - DNA, 402 bp, Arabidopsis thaliana columbia
cgcacaggaagtcctttcaacaatggcccgaaacatactgagacggagctatacgggcaaaaatcggctggcaatgctttctcactctaccaagctcctgatgaagccatgtaatattaagtaaagtatcagtctaaaacacagcagtaataaatcgaagtacgagccaagaaacataaatcttactggtgatgacattcaagtgacatacctaatgtgcagaacctttgtgttaaaagcgcgcgaagttccaatatgtttcgaacatattgacgcttttctaacttgctttgctgtttcctttggaatcctgcaggtttcttgatttgcactaaactcggaacataagagcacacaagtgggcaacgtcttttattaaccggttctccgagatcaacttgt

SEQ ID NO: 105818 - DNA, 392 bp, Arabidopsis thaliana columbia
tgacagttcacgtgacgagatctcatctgtttcttcctatcccaacaaaagcaatttaaacagaacatttggcagttcattgtccttgaattctggaccgcgattgtcaatgaaagacacgtcatatgttgaagaacgtgtgggatcatctccaaagatgatgctttctcagttatcagctgccgtggtgtcttatgattccggaactggttagtgatttatgtgcgagtacatacctaaaacagtattttaatggggtcactgagaatagcaccagctcatgtagcctctctgttttttggtgaaggctggtttcgaactaatgctaaacacagtactgttctcaaataccaataaataattgatggaaagatgctaaataaaaaaagacc

SEQ ID NO: 105819 - DNA, 404 bp, Arabidopsis thaliana columbia
cggacgcgtgggacctgataaggcatcaccttccttcagcattccaccattggcctagtaaacaaaacaaaacataaatacataaaaggttcaacatctaaaacaggaaaaagaagaagataacccatattctatgttaaacatgcatatacccttggttgtgcatccgacgaatcctgacccgcccctttgagaggaaggcctggaggtgcctctcccttcgctgcagcagcctgcacaggtgatttaattaaggattaatgacgggtcacaacgccaaacagaacacatacaatttcaatatcttgactttttgaacataaacgccttaataagaaaatgaagtgtatagcatgtcggaaggacaatagcaagcacaggcactaaaaacatcgactagttga

SEQ ID NO: 105820 - DNA, 380 bp, Arabidopsis thaliana columbia
atgaactggccaagcaagcattgatattggagcatacatcttaggcctggaacctgagcaaaccaaggaaaagatcttcactcctaactgactcagatctaatggacagacatcagaatcgctctttctctctaaagacttaaacaccataatgccctcttcttgccgacaaagttagcctgaaaaaatcatgtttttatgctaactttgaccaacaaactctactctataacccacattgaccaaatgcgtgagatgtatgagacactaaactgattgcatggctcaatacgactcaagctttttcataccccatcccgataatctctggacagacagcagagactgcactcagcatgagcaatcattatcacgctcat

SEQ ID NO: 105821 - DNA, 398 bp, Arabidopsis thaliana columbia
gccaaatactcctgagggtgtgtgcacaactacaacactatctggatctggctttctacatagtaatgatacaggcgatcagttggtcccagtatcacataacaggtcagttaaagaatatgtcggagaaacaaacctgtgaaatgaacagtaaactgacttcctggttctctgcacaccatttttttccaggcagtgcaactaaattccatagacaaaaacatcacttacacatccctaagatgattaactaacaggacagaacacctttgcaaggggtttaacgtgaaaaatgaagattatcataagcacagaggctaagcagtttaaggacttgactaacctccatgttgtaacctgcccgtgatgcacacattgcgtggaagtgagttgcacac

SEQ ID NO: 105822 - DNA, 397 bp, Arabidopsis thaliana columbia
atggcttcataaaatactcaacctctccggtcattcagtaacagttttgatgttcatacctgaacatgccaagcctcaggatcgttctcactaacagtaggagtatcagaaactcctaatatatctggaatcctatcaatccttaacaacgcatcgtcataggaagtcttaaacttcttgatcccgctaggctttgcagccttcaaccatctctcttcgaagttggtcagaacatcatatgcagccgggccatcaatcttactgtgtaagtcatgccacggttctcttggacattctgaaagattttcctgttgaaataataacatttgtttcagtacacaatcctattcagaataaaaagattgggtaccagatcattatttaagtaagagctcaa

SEQ ID NO: 105823 - DNA, 403 bp, Arabidopsis thaliana columbia
gtcaaaactcatagacaaatcgtgtattgagtgcaaacgaaaaattcatacacacaaaaaaacgactattttcatcttagattttggacccccaaatcaacatgctcttatatggaccaagttggaagagaagcaggagatgcagcttgagattgtgcttatgcgcaggactctctcaaacttttgtctttcgcttatctgagttagttttgtggtttgatagttaatatcaactctagtttctttcttctccatctttggagtttgccaatttgccttttttgccattttcatccttgtgatttgatatgaataaaggttacaatgctaaggatgatgtcattccacaactacttacctttttgcgaacaataaatatcacaaatctcatgagaccccaaac

SEQ ID NO: 105824 - DNA, 402 bp, Arabidopsis thaliana columbia
atgcgactcagccagatcttggtcttaccatccttccaaggaaaaggactcggaagctatcttatggaggtagtaaacaacgtggccataacagaaaacgtttacgatttgacagttgaggagccatctgaaaagttccaacacatccgcacttgcatagacataaaccgcttgcgcagtttcgatccaatcaaaccagacattgattcagctgttcagactctcacaaaaggaaagctatcaaagaaagctcagatacctcgattcaccccgcctctgaacgccattgagaaagtccgcgaatctctgaagatcaacaagaaacagttcctcaaatgctgggagattttgatataccttgctcttgatcctattgacaagtacatggaagattacacatca

SEQ ID NO: 105825 - DNA, 115 bp, Arabidopsis thaliana columbia
acccacacgtacgagtccctgcagagccaccgaatctatttttagtgcacccgatcaaatcgcgggctgggaccacaaccacgctgagctccgatgtgtagatgtttcccctgct

SEQ ID NO: 105826 - DNA, 395 bp, Arabidopsis thaliana columbia
caatcatctgtccttggggatccgacattaatcctctcatacctactaattgatgtacttgagatgcatttcccctagctcccgaaaaagacatcatatggactggattgaaggggtccgtcatcctaaaattaggattcatttcttgtcgcaaatattcacttgtagcataccatatctcaatagattggcgtaatttttctaccgcatgtacattcccataatgatggtgtttttccaaaatccaactttgttgttcagcatcttggacaagccagcccttaaaaggtatcgttaaaagatcatcaattcctaatgaaatggatgtagcagtggcttgctggaaacccagagtctttacttgatctaggatgtgtgatgtatatgccatcccc

SEQ ID NO: 105827 - DNA, 237 bp, Arabidopsis thaliana columbia
tccatcactgggacagaaaccaccacttttacagatagcgggaagagactagctgcagtcaccaatgacaaatttagcaagggtacgagcatcagacgtattgctttcatactggatggggcaacaaagatcgacaaaagagatcttaactacccatctgccaacaaatacaggggaacgtacggtaagactcctgagacagctctacacagtggaaacagcggcaaacaagagaac

SEQ ID NO: 105828 - DNA, 429 bp, Arabidopsis thaliana columbia
aaatcctcggatacaatggagaacacttcaacaagagtcttgtaagggaaattacaatggacaataaaaacgtatatcaaaacatatatagagaaccagccaaggaagaagaagagattaggaattagacaaattaatcccattactatccctaagccaacaatgaaccaaaaatgtttcatcaccatttcaaatttatggtcaggcgttggataaaaaagatgggaaattgcaatgaggccaatgatggacgacatggtaaagaagaaaacctccacaacttttcccaacccgagtgtcataacacagataaacaccacaaatgccagttccgaccacgctctttcagcaggactacactcttctggaggaggactagaggaggatggcatccaaccccacatctcctctactttgatcgatgcaccg

SEQ ID NO: 105829 - DNA, 427 bp, Arabidopsis thaliana columbia
cactaatctccaagagttgaatcttcgtcgttgtacaagtctggtgagaatccattcttctattgagaatgcgaccaatctccggagcttcactctctgtgattgctcaaatcttgtggagcttccctcttttgggaatgcaacgaaacttgagatactagatcttgaaaattgttcgagtcttgtgaagctcccaccatctatcaatgccaataatctccaggtattgtctctaagaaattgttcacgtgttgtggagctccccgctatcgagaatgcgactaatctccgtgaattgaagctccaaaattgctcaagtctaatagagctccctttttctattggaactgccacaaatctgaagcaattgaaaattagcggatgctcaagtcttgtgaaactcccatcctctattgaaaaactcacc

SEQ ID NO: 105830 - DNA, 311 bp, Arabidopsis thaliana columbia
aaactaataaaacggccaggatccgaaactatctaagaatacactaggaaataagttataatctgagggacttcgcctacattcacttatacattccttgaaatataccaagtacaaacgccaaaatatatagtaccgataagtttcttctacgcgatgcgagatgataccaaagcttacccattctggagtccatgcaggtaaagcaaaaggttcaggtttgaacaatggatcagcgtcacactgtagccagccagtggacaaatcctgcatcatgattcaaagatttactaataactccctaaaagatc

SEQ ID NO: 105831 - DNA, 349 bp, Arabidopsis thaliana columbia
gaaagctagagaagtgcttgagagaacgcctttcgaggtaaagacagactaggatcggtctgagatgctcggagaacaccagcataatcgaagcatgaaagatgcatagactcagagtggaggatatacccactcaagaactagcctgggttggtcaggtgaacacgataggaggaacgcatgctgactataggccggtttgacattaaccggttcggatataggactaaggctagcattcgccgatgtgctcatctttagtccgggtattgtaccagcagcctttttcatcggactagctatgactgtatttcctggcttcatggtccataggcttaaccggactatc

SEQ ID NO: 105832 - DNA, 359 bp, Arabidopsis thaliana columbia
cggacgcgtgggcggacgcgtgggcggacgcgtgggcggacgcgtgggtccaggtgtacacacacacgctaaaaaaaaccaaggaagaagaagaacttctgccatgtagtatcatacgaaatcttaaatgctatatatatattttcaactttcatttttaaattactatacaacttggtgtcaattaattcaaaaactacacttcattgttcgtttttaagatcttaattactactctctaactttttttaatctattttctagaaaatacattttgttacaatagattaaaatatgttttatatgaataatttattaatgtatattattaatgtattggaaaattcaaaatacaaaca

SEQ ID NO: 105833 - DNA, 404 bp, Arabidopsis thaliana columbia
cggacgcgtgggaaaatacatcatcgttttcttcttaattaatagaatggtcaaataaaaaatcgtctccaatctttttctctctctggatttgccaataaattggggataaccagctaccaaactcattctcacaaagtcataacagtcgtttaaagtctgatccttttttatctttctttagtgtgtgaaaagagaaatacagttatggcggagatctcgggaaacggtggtgatgctagagactgtgctgaggtggtttttcttatggaagaatgacgtactacatcttcatcatgttatttatatacccttgttgttacatgatcttcttctttctaacgtccgacccattttttactaaagcttgatttttgtttgtttagaaaacatttttttttttt

SEQ ID NO: 105834 - DNA, 427 bp, Arabidopsis thaliana columbia
  unsure (1)..(427): unsure at all n locations
attcttctttgtctacatgaacgtcgagtgatgccaatcagaatacaaaaccagaattagtctgcagtttatttaaattaatatatacatttttgacttaaatgagacgagaaaaatatttacatcatttaaataaacatcatcttgttttactatactaaatacaagactatagtcgatatttagtcaaatggattatgaggattccttttcctttgtaacaaactcaagctgaagaaataagagttaagaaagaaaagagaaagtaaaaataacagaatcgtattattcctcattaagtgtttaatgtgtacattgtaaagtatttatacttgtctataaacattacaaagcttatttattctactttctgatttcaatctattttatataaatnatacgttgcacttgttgtaaaaacgctatt

SEQ ID NO: 105835 - DNA, 396 bp, Arabidopsis thaliana columbia
cggacgcgtgggttcacgagctgtttttttattcctctcttatttttcaaggagtaacattatatatttacgtttttattaattcccctatcccaaaccattaggtatttaaggtttattgtagtctcactctcaggccgatcaaatgggacttattcaattatgattccactttaactaaaaaaaaaatcgcgtaacaaaacattattctaacgttccaccgatttttagttttgcctttcagctgtcaacttttattttatttttgtctttatcctgctttaattgaattcgtctctacaactacaacgttcaatttctgtagtaataatatgcttaaaaaggcattggacatttctttgaaaaatatacttttttttaaccatttttttcttt

SEQ ID NO: 105836 - DNA, 336 bp, Arabidopsis thaliana columbia
gaagaaggaagcttggcctttgaggagattcaaaggatcgtgtggcttactgtatttaaaaaccctagagttcatcatcatcttcctctcattattgattgctctaatcaggttccgacgagactaataatcctttctcatatcgataacattgtcttactctgctgtttttttatctggtgcttgttttttttcaatctgtattctttctttctctccatatgttttttttttcatttatttttatttcttaccctttatattattttttctattattcctttctttttttttctctcgtggtattattttatttttttcaaacaattttttttt

SEQ ID NO: 105837 - DNA, 255 bp, Arabidopsis thaliana columbia
tcggtttcaacaaggccattcaaatctattcacagatcttgcgatcattcagtgagtccactgaaaagatgggcgacttgaatctcgatttagcagaagcgattcatagcttgggtgcacgcattaaacaattacattagttgtggtaccgttctgttacattgcggcactatattttactctagtatcatatcgagggcattgccatgggttcatcttgtattgtgaagctcattgctgtgtttgcagtttaac

SEQ ID NO: 105838 - DNA, 463 bp, Arabidopsis thaliana columbia
caagtttaactaagtgaaaagtctatggcggagacaacgagttggatcccagtatggtttcctctgatggtgttgggatgttttggtctgaattggtttatcagtattgtaattgctttgtttttcattataccttttcttttttctctatcatgtcttttatctttccaccaattctttttttttttctcccccctttttttttctctctcctataattttttttttttttactcttcatttttttttttttccttccctattttttttttctttttttctacttttttttttttttcttttctatttttttttctttttaaatattatttttttttcttttacaatttttttttttcttctttcattcttttttttttcttataaattttttttttttttctcctcataatattctttttttcaacttcttttcttatttttctataatattttttttttt

SEQ ID NO: 105839 - DNA, 421 bp, Arabidopsis thaliana columbia
  unsure (1)..(421): unsure at all n locations
ataaaaaaggcatgagggtcagatactatcacttaaattatgacactatatggcctcatcaagggcaacagcgtatagctgcggccgagctagcgcgacgtctaacaactcactgatcagagaccattcgacatgatcaagtagcgagggtggtcgcatcgtgggctggaaacagcatacaccctcagctctagacaatgcgcantggcacacagcggctcacactgggacaatacacgcctggaggggcagacttggttgaacgcgctcatgcataggtctggtgcgcacgtgaggctgctaacatcaatggctatggcggccagcgcaacgacgctgacagtgttgctggtctaatcagaaggtggaggtcaggcatacaagctatgtactattgacatgcacaagttagaagagcaat

SEQ ID NO: 105840 - DNA, 312 bp, Arabidopsis thaliana columbia
cacaaacacacacatatttgtgtcgtactaatgactttccctctcagtgacattatgggtttttttaaacaccttcatattcaatacacatatatcctaccttagcatctttatataatacaatatatattttttctcttcactttatttgtcataacaagctttttttttccaaaaataacaatttttcagatcatttttttttttgttgatacttatttttacatatagtattcattaaaactaattttatttgttatgttagacattttttttttttcaaattatttttactactaaacattatattta

SEQ ID NO: 105841 - DNA, 406 bp, Arabidopsis thaliana columbia
gttttgaagaacgaccttgatgccgatgctcaatttaagaccccgatttcctttcgaagaaaacggaagttgtctgagcttagagactcgtcagttccgggtaaaagaatcgatttgggtgagcgaaggaattcaacctttgcggatggctcaggtttgcaaacaccagcttcagctttagatgccaaccaatctgggagttccagactgggccaaatgacacctgcttctcagctacggcttccaagtgatccccagccttcaaatccagaacggttatcactagactcccttgtggttcagtatctaaagcaccaacacaggcagtgtctggctccaatcacaactctttcccctgtgtctctcctacatccacatgtctggcctgaacctaaacggttacttg

SEQ ID NO: 105842 - DNA, 408 bp, Arabidopsis thaliana columbia
cggacgcgtgggcgacattcaatgattcgactttaaatacatacacatgcttagtttaggtcttgcatgccttacgaaaaatatgaagaaacttgtactaagatgtttagttacacttcttttgatcagtgttacaataacagatgcaattgagtatccacacatcagtcacagacactgagactaattcaagaaaggtttagattgaaggaatagaagagtcattagcagaagaagaagccgaatataaaacggttaagctttctcaacaaggtgtgacgtatttttgcggtgcatttttgggatctttggtgtcttttggaaattatttgttttgccctttgtccttcaaatactcttttcttgccttcttcggtctactctttatcttcgacttttttcattttt

SEQ ID NO: 105843 - DNA, 307 bp, Arabidopsis thaliana columbia
ggtccggatatctcccgggttcgacgccatcgcagtccagttttcagtcatccctatgccagctttacttctcttagcgattatctctagagatttagtttagacaagtcgtctataccatagggtaatagaagatagtttcacaatcaaccattgtaggtcatttggccatcgtcgatttctgtgaaaagtcgacccaccactaggacacttagatctacaaagttgggtaggtatttgacaaagcgttgtcatttgagtaggttctgagaagagaggctgtctgagtatgaacaagaaggtcctt

SEQ ID NO: 105844 - DNA, 399 bp, Arabidopsis thaliana columbia
cacatacagacattctaatttctaattataaaacacaatatcaaaagatatgaatgcacacagagtctgctgtgcttctcgtgactagcgttctgtgtgccattgtcaccgcctggcatgtcgatgaagtgtctattgagaccaacctatgcacctctttctctaaaactactaccaagggcattggagctcatctctctgctgctgagtttacttccagcggtcacgatgtctattgctctgctactggtatcaacattgccaacagtccatacactcttgaatccgatatgtgctgcacaagcaccattgaacacatcattgcaatgggccgcaaggctagagtctcttctgcaagtgcttctaccgccaaaggtgacgcttcatctgcagagactc

SEQ ID NO: 105845 - DNA, 261 bp, Arabidopsis thaliana columbia
gtccttgtagaggaaaagtaattaaatggctgcttcaacttcctctttcactctcgggtatttcaccacactgggtactctccctttgtagttagtcccttttaatctaatacctaatttttaattttcttctaatttcattatattatttatttttaatttgagttatctcatttttcttccattcatcttttattattacatatattatactttcaaattatattttattttttatatacatgtgctcttttattttat

SEQ ID NO: 105846 - DNA, 408 bp, Arabidopsis thaliana columbia
aagttagcggatgcataccagaacgcaaggccgagatatccgatcgattggttcacgaaacttgctgctcgaaccggtcagcacaaatcagcttgggatgttggtactggcaacggtcaagcagctattggtgtaagcttcttccatcttgttccaaaagtttccactttcttatgtactctgcttcacttagatctctcaaacgatgttgttttaatccctctagaagaacacaattatggatttattagctttagttgagaggagagaagaagatgaatggcttctttctaatgaatttatgatttaattagagcatatatttattttcaatctgtactattaacgtcttatgttagtgatgattttgaatgtagtcctattataatcttttcacattttgtgatt

SEQ ID NO: 105847 - DNA, 512 bp, Arabidopsis thaliana columbia
  unsure (1)..(512): unsure at all n locations
gtccggtatattcccgtggtcagatcccatcgcgtccgatgagagaagatataaatagggtcagaggtctcattctatttatctnnnctttctctttagacatctcttaganntcctcttcaataggctatcatctagcccaacatgtgagcccaacagagtagccatgctcagatcatactcaatagcagctcgaacccatcccaaatcatcaaagagcgagggtaggtcgcatcagaggtctagggaccatccatgcatccccagcttccgttagctccggctttagcctttgagcagtttcagtcattagatgcctcatagagtcttttcttagcccatctttcttagaacagccggcaatactcacagtttagttagttcacaggaagagggtctatatgggaaagagtttattccgggatagcgccagagacagttcatggaagtcaccaggtatttaggagaagagtcaaaggtcaagggtcaagagtcaaagggttcccgtgaca

SEQ ID NO: 105848 - DNA, 258 bp, Arabidopsis thaliana columbia
tctcaacaaactcgagtaatacctcttcgcctgaaaaaaaaatacagagaccaccactcacaggtcataatcgtaatagcaaagtgataaccaaatagtttgctccaccaagccttacatcgtttcaagtggatatctgttagcattcccataggtagatcgggcggatccaatccaagctccatcaacgcgttactgcatagaaacgcccaatatcatatcaccctcacatagagaaggtttcttgttagaatttga

SEQ ID NO: 105849 - DNA, 389 bp, Arabidopsis thaliana columbia
agaagaagagccacacactcacaaattaaaatgagagagagagagagagacagagagagagagagattctgcggaggagcttcttcttcgttgggtgttcatcgctattaacgttatcgcccctacgtgagctccatctccagatacatgcctgcatgtcgaagacttccacctaaggctttggagctcaaatcggtaaccgacaccacaaagcgagtgccgtgcgagaaaccggctttcttagtgggagatccgattccagcagtccagacgcatttggtcacacacgtgatttctcgattacccatcctaccttttcatttgtcatcttttatattccttatgccttttactaccgtcgtcaccaatttacttcttatttttttcct

SEQ ID NO: 105850 - DNA, 246 bp, Arabidopsis thaliana columbia
caacaatggaaaagagcctctcatacttgtttctgccgcttcagaaccaactagagagcagaggtatcatcgttcgtgtataggttccttactagttcttgatgccacttataattcagccttacaagatcgtatcttgcatcctctcatttattcctcatactcacactattcattaaactatcccgactctgtcgttactcaccatcatcaaaccccattctctatctgacccgtttatttcca

SEQ ID NO: 105851 - DNA, 254 bp, Arabidopsis thaliana columbia
ctcacaacaaggaatacatggttatccaatttcagatccattcaaccatctacaacgaggacggaaccagcatcttggtgggccaacacaaggtctggtacacgtagatccacagagccacgacctaattcacaaggaggaacgtcatctgtgtcgcggaatcgaacttatcgattccgagaattttacttacttcgtcgacatcgaagctcatcgaagtgccgtaaccaacaaatactctcgaaggtattcct

SEQ ID NO: 105852 - DNA, 395 bp, Arabidopsis thaliana columbia
aacagtatgaaccggatttgtaacaggagtagatcaaacaaacttaagtttcagagatttcaaagtcaaacaaaactttaacttctataaacctctaatctctctatagaggtttcgatgcaaattttagagatgaacacaaagaaaaataagcaaggcattgatgataatagcaggccttcctaacacaggagttccctccaaaacattgtaaatacatgagcactaattcataattctatggatacgccaattacattcacccagatccagaagacagggaatatcatcggccttacctgaacagcatcctttgagtaataacgaccatcaccagagaccacaagtgtggcaacctgcacatatgaacaataaacactcatgaatttttcgaa

SEQ ID NO: 105853 - DNA, 395 bp, Arabidopsis thaliana columbia
ctgaattaagcaaaagagaacaggaaggaaacataagctttcaatacagaagagacatgaatagctagataatggtaaacaggcactttaccctccacgtccttcagtgccgaaatcctcagaaaatataaattgcacgttccttatgtactgccttgaccatagcggctcaaatataaggtttgagaatcgaagaacagataagttctcgactagctcctttcctaggtaatggtctatcctgtaagaacacattttcattatcatatcagccaagcaaccaatagtatcatcattgcaacaaaatatcatatcagccaagcatccaatagtattatcattgcaacaaaacaaagctataagtgcatttatttgtcacctaaaaattggatctt

SEQ ID NO: 105854 - DNA, 244 bp, Arabidopsis thaliana columbia
cgtatataaaattgatgcttgggcatcattatttacaaaaccatcctcataggaacgaatttagaaagaaaaacaaaatacaagttcatggagaccaactatgaaatataatggacatatcttagaaatatcttcttaatggaatgtctatttgcttttgcactgtccatggtgatttcaggaccaactatgatctcacaatctaatcttaaaatagaagccaaataaaaaaagaggacgagac

SEQ ID NO: 105855 - DNA, 314 bp, Arabidopsis thaliana columbia
gtttaaataaattaaatataagttgcaatgtaattaacataccgattcttctcaaatcgggccaaccgatgagtggatgtgaagacatagaaaaaataatgagattggtttgtaaccaatttcagaaactagccgaaaagaaagtctctcatattaagggaggaccaaggagctgagatgatcgtaggtgcaggagacaacaattatcaaccatagttatcctaaccagaattgtatacgtctatggttgaaatggttatactacttcatagttgaatctcaagaattttatgtatttcgatatattttatttt

SEQ ID NO: 105856 - DNA, 336 bp, Arabidopsis thaliana columbia
gcaaagaggcagagaagatctccagtttattatacctttgcataaagctcaacaggacgacggaactccgggtcttccaataaggtcttgtcagttggaagtttcaacaagccctctgattctcctttcagcagttccctggtaccaaaacagtaaataatcatggataaccgatcatgtaaaaaagtatctgtttgctgcttttatttcttggagacacaaacagaaaagattaaaaaaatgcacaaagaaaatctctgaggataaagaaatgaaaattacacgaagtaggagttgtcaaacttcagcggctcttgggtccatggtccatcaaag

SEQ ID NO: 105857 - DNA, 394 bp, Arabidopsis thaliana columbia
tctagtaatcaattggaaggatgataaagaaatagtttgagtataaggaagatgtttaagtgaatttaagtttggtttggaataagagcttcggagaaatgtacataagttttctcaaagaagtaaagatcttacataacgatgacatgtaaacatttgagcttcaaatacaatgatcattatattgttttgcagattggcgattgcattgaattagaaaccaaaaaaaaaataaaaaaaaaattatatgttctttacttcatttgtatggtccacttttagatcctttacttcgtcgtgctctctacttttggaatttcctttgcttttctcctcttcatctactacataaaatcaaaaatgaaaacatcttttttttactcaatatttactc

SEQ ID NO: 105858 - DNA, 370 bp, Arabidopsis thaliana columbia
tttgtttagaaaataacttaattaggtaaatggtcttggcagtttgtatctaaatgcaaacgcaattaattagatatgacggcgggaaacgtgtagagaattttctagcagtagcaccttactaggatctgtaaatttacttgatagttgatcagtgatcacaaagctggaagtgcaatatcttaagacaagttaaatagagttttaggtaaagaagcacatagtgtgttgacaaaagagtcaactatttatatgtttatagataatattatgtttttggtcttcatcattcactatcttctcatgtaaataatattaattaaattatttatgacaaaaaagtattaattaaattattctttgatatatt

SEQ ID NO: 105859 - DNA, 345 bp, Arabidopsis thaliana columbia
ggaaaaaaaatgtacgaaaataatctcttaacgctctcttcatgcaccatgaatggcaatttcgctttctgcccattccttgtctctcagagacaaccattctcttcccacaagcgtaatcttcacactctcgctgctgattctgctaattccgacaacctcgccggtgaagataacggcggaatttcggcggcaaataaaggttctgggactacagcgagaggaaggagattactcaaggttagagaagagaagcgaaaacgcgactacgatcgtcttcacgattacccatcttgggccaaggtactggaaagtgcgtgtaaagatgatgaagagcttcgagct

SEQ ID NO: 105860 - DNA, 380 bp, Arabidopsis thaliana columbia
gtcgaatctgaaatctgttttcaagcaagacttaccccctcaagtgggttccgttgttcaggttcttttcaacaccaccaagcatcagtaaaactactgctttctttatccaagcgtgcccataaatagaaggtgctaaggaacgagcaaggagatcaaatgcatcatctcttcgtgcaatatttttaatgttatctaggtcttgcttagtgtatataggtgcatttgcttctttattgagcagagcgatattattggctatgaggatagtcctacacagaaagaactcggtcaagactatcagagtgaaaacatcttgaactaacagatgtgtaagaaaaacgcacctaaagactccatttacactacctttgtttttt

SEQ ID NO: 105861 - DNA, 307 bp, Arabidopsis thaliana columbia
aaaaaacaccaaggtcaaccagggtactgcttaggtacatcagaacacatcaatgaaagacggggacaacatatgggtaggacacggtacaacaaaaaacaacaagcgactaacagggtacaccaagactcaaccatacacatcgacaagcaacagctagtgacaacaatgggatgccgccacatgcactataaggcataacatgtgaaactccgagacgtctttatcaacacttcaggctctgtccactggatctacaacttatgaaaacagccacttgtaatcatcgctcttctacatattcaca

SEQ ID NO: 105862 - DNA, 405 bp, Arabidopsis thaliana columbia
gttgaaacctttaagagaagatctaattaataagaaagaggaggaaaaaaaaggatggggggctcagtttccatgggggcgtctctcgctccgtacttagtctctgcgatactactcttctttctcatcgagcagctctggtacctcgtcaagaaacgtaacctacctggtcctctctttgtccctccgatcatcggaaacgccatttcactcgtccgtgatcctacttgcttctggttcacgcaatccgacacggcaggcactttccctggccttggtgttaactacctcatcggcagattcatcatctacattagagacacagagcttcctcatcaaatattcttcaaccgttcgtttgcaagctttcaaccctttaggacatccttttggcaaacaactatt

SEQ ID NO: 105863 - DNA, 361 bp, Arabidopsis thaliana columbia
cgttagataatcagttaacgattgttaacaattagtttttttggcctggtcaacgaatgtttatagtttaaacggttggtcaacgatatcttcatgtttaaaatggccgcatgtaaagttgaggtataaaatggccacaatttgaaagttggggtattaaacgacatttttcccaaacttacaactaaaatagtaagatagaaggaaaacgatttaaaccaaaattaaccgaatacaaacagatttctttatttttgaatatcttttgatagagaactatcgaagatgtccgcgacaaactaaagaaaatgattcctcttataaagatgagtaactgtcatacaatttcaaattctaacct

SEQ ID NO: 105864 - DNA, 284 bp, Arabidopsis thaliana columbia
gttttggcgggattttgcggttttggcgggaaacatgattttacggttttgcggggaaatatgattttatgagtttggcgggaaaacatgattttgctgttttggcgtaaaaataagatttttgcggttttgacgaaaaatagattttgcggttccggcgggaaaatataatttttgcggttttggcaaaaaaacatgattttgcggttttggcgaaaaatataattttatgattttgacgggaaaacatgatttttacggtatggtgcgaaaaaatgattttg

SEQ ID NO: 105865 - DNA, 372 bp, Arabidopsis thaliana columbia
atcccggaataactcttcccattagaccccttccgtgaacaacagaagcaaaacagcatcttcaatggcttcgcacctgagatcttggctcaagccttcaagatcaatgtcgagacggctcagcagctccagaaccagcaagataaccgtggcaacatcgtcaaggtcaacggacctttcggcgtcattaggccacccttgagacgcggcgaaggcggccaacaaccacatgaaatagctaatggtttagaggagactttgtgcaccatgcgatgcactgaaaacctcgatgacccgtcggatgctgacgtgtacaagccatcactcggatacattagcacacttaacagctacaatcttctatcctcagac

SEQ ID NO: 105866 - DNA, 280 bp, Arabidopsis thaliana columbia
agcagagcctgatcatactcaagcttatttatttatttagaaacaacaaaatatagagcgcgcacaagttccattggcaggccgtttctactgcaatgcattcggtccttgtaaagtcggaatcctcataagcgttaaataagctgcaatgcaaccagaagaatcattgtgagcagttacaccatagagacttgtatacaattcaaaccacttactgttgtttttaccactatacaaagagggatttttagagaatgattgaatcctttcaaccttcttt

SEQ ID NO: 105867 - DNA, 172 bp, Arabidopsis thaliana columbia
cggacgcgtgggcgggcgcgtgggtacaaaagtcgaatgaacctctgttaattcagcttcatgtgaactgctcaatatcgcacttttgtctttccgagggcttaacagaagccctatcattggcgagccttctgacaggatagttaaagcgtgcagatgcttgaagttcgat

SEQ ID NO: 105868 - DNA, 382 bp, Arabidopsis thaliana columbia
gggagattgcagcgccagaaagtccgtgtatcccgaaataggatattagattctgctgcaaaagttatggagatgtattctagccagaaagctgtgcttgaagtagaatattttggtgaagttggtactggtctaggccctacccttgagttttacacacttctaagccatgatctgcaaaaggcttccctagggatgtggagatcaagttctggtgacaaggtatctatgcaaattgatagagatgagattgaagacggaaaaccatctgcagctaacagagatatagttctggcaccacttgggttggtttctcgaccttggccctcaacagctgacatatgtgaaggtgtcagttcataacgtcatgatattccgcttt

SEQ ID NO: 105869 - DNA, 180 bp, Arabidopsis thaliana columbia
cttacataacaacactttacacacgtcttacttcggttattagtatcaaacatggggtgcggatgatgcgaggcggcgcacgatcaacaaattcatttagcccactaggaaagctaaccgtccaaggttgccatgcactagcctgtgcaaccgtgacaatgtcatatgcaacagctgcaa

SEQ ID NO: 105870 - DNA, 251 bp, Arabidopsis thaliana columbia
aggaagacaaggccaaccatgggaaggacagggacaacagggacaacaaggacgacagggacaacaaggccaaccatgggaaggacagggacagcagggacaacaagggttccgtgacatgcaccagaaggtggaacatgtgagacgcggagacgtctttgccaacactccaggctctgcccactggatctacaactcaagagaacagccacttgtcatcatcgctcttctcgacatcgccaactaccaaa

SEQ ID NO: 105871 - DNA, 264 bp, Arabidopsis thaliana columbia
tcggttgataagaacatttgaaatcacttgagcactttaagaaaaggagaagtgaagagatatgcggatgagatccaaacgtggtttgcatcgagcaacattaaggatagaaaatctttgtaatttgttttttaaaaagtttgcattttgcattcacatgtataaatgtttcttttttctttgaatataatctagattcaaaaaaggtataatatatatatatatatatatatatatatatatatatatatatatattgtgtct

SEQ ID NO: 105872 - DNA, 422 bp, Arabidopsis thaliana columbia
gaaagctagtaagcagccctttaccaatataacatctacaacttgtctctgtgtattttatataaattttctgcgtgaaacaaaagactccagagcaaatacatataccatgcaaatacattcccatcaaatttcaagcgactctactaaatgttactggatatatctatctttttaacaaagaataaaaaatagaaactgtagatggcgatgacataaacttattcttagacaaaattgggtcagagactcagaggacttagacatatgcagcagttgcagatacggacacaatagaaacccataggtactgtatgtaatatttatctctatcacaaaattttgaaaccaaaaaagattggcgacaatgtctaaccttaataccagacaaatattgctccaacaaattcttactaatcttt

SEQ ID NO: 105873 - DNA, 225 bp, Arabidopsis thaliana columbia
gttggggggtaggggaaaaaaaaaaaggggaattccaaagggggattcctttggtccttccttaattggattaaaaaccttccttaatcaactggccaaaatcacggcctctttcactttaccaaatcccaaatcttcaagggggggaaaaaaaggaaaatcggatttcagtttttttttttcatttctaacataaccattcctgggcccgatttattctttttt

SEQ ID NO: 105874 - DNA, 411 bp, Arabidopsis thaliana columbia
aaaccactcattttcaatgaccttagcaaatgtaatcctctgcccaatataagaaatcagtgtaagccttcagatctactcaatcctatagaagcttttgcctcttcaaaggagagatcctctaatataaattatataatagggtaagaaaaatataccgttgctggattgggatccagaattcttttgattaacttcttagcacttgcagagaaccagggagggcaagtaaattctgctttgaatatctgtaattatgaagaaagaaaatcaggtggcttttatgctatatacgtctcatacaaaaatgacagaggcttttatacagccacccaaatgcacctagagcttgaagcctttttgatagcatgctaaaagaatatgtatcaaatgaaaagcaaaagaagaaga

SEQ ID NO: 105875 - DNA, 266 bp, Arabidopsis thaliana columbia
gggagagggacttataaaagagaggttctaactaaactctgtgcttcctgcacgctgacagatggagccctattatggcattcactactggatgtcgacacgtgtttatctctttacttattgtggcgcacgatgaatgtatcatattctttacggcctcttcatttttttgagatgaatcaaaaattgaacatagcatcttgaagtgaaattctttactattgctttgatcaaccaccttactcgatttgatcgttttcatataa

SEQ ID NO: 105876 - DNA, 191 bp, Arabidopsis thaliana columbia
ctcctcgatgcaaccttcggggtttttctttttcttaacggctgccttgctaggcagtcggtaggtgttcctcctcagctacaaaactagtgtaacctcaacaacctagatgttctccaagccaccgaatctatcaagagtgtagccggtcatattcagttctgttgaccacaaccaccctcagcttcgat

SEQ ID NO: 105877 - DNA, 411 bp, Arabidopsis thaliana columbia
gttcctacattcgttttctgagggatcatcagatcttgtttggagaaccagaagataaactgaaagaacctgctgcttgaacaaatcagtacacataaatggaagaataaaacaactttgctaatccacgataatattaccttgcaggcaaactttatttgctgattatcctcgtttcctgagaacgaattacaaccaggaccagcaagaatgcaaggttcgtattcctgaggtgtaattttgggcagacacaaagcacctcggtgagtcggtttctctaactgcggactatccaatgcctttcgagagtttattttgataaacgatgctgatgtcaacacaaagctattttgctttctaagaaacaataaagcaagggactgaagatgagtttgtcacttaatgacaagc

SEQ ID NO: 105878 - DNA, 418 bp, Arabidopsis thaliana columbia
caaaaatgttaacataacaagtatgttactgggaaaaaatcacgtttctcgactaaattgaatggtaaaaataaaatcattcaaaataataaaatttactatcattcattgggatcataaatagctttgctgttttcataaataccatttcattgctatgaaatacaatgttttccactttataaacttgttgcgatgcctattctagtgattttctgattttttttctcatttgcaatgttgtgagcaaaaaagcgaacaaggctaaaccgaaaagaaaacaaggaaagattaaagatggatttgtaaaacttaagggaaacttcctctagtgcacattctcttgtttaagacatcactcaggtttacatcattttcaaggtttccttaaacaatttggcgacgagtttaaatatat

SEQ ID NO: 105879 - DNA, 338 bp, Arabidopsis thaliana columbia
cggacgcgtgggtcacaaacgagtaagaattctaatactaatagcaaaaaaaatggcaaacaagctcttcctcgtctgcgcaactttctaccgcaccgtccttgtgaccaacgattacgactaccctaccgccatagagccaaaaaagagggaatgccgcaaggagattgaccaaggacaacaactaagagcttggcagcaattgatgcttcagctagcaaggcagggccgtatcgatgagtttgatttcgaagacgacatggagaacccacagggtcaacagcagtgacaacaggtatttcaagcagtgctgaacgagctttgccaggaagagccag

SEQ ID NO: 105880 - DNA, 404 bp, Arabidopsis thaliana columbia
ctcaattgtcccacatcgagtaaattagtataaaggaagctaaacttttgcctctataaataaagatacttcatttcccaccgacttttacatttgggcttcttaaaaaataggcttgacaataaatggcctttaacgcaaggtcttgttgttttgctagtagcaacgagcgggttacttgtaactgcaattgtctgaaagatcagccagtgccaaggtacttgtaattacaagtacaaaaaattgatttctttgagttcatgttcatgtcggattttttctagtgtggtcggatgtgcaacaaaaaaattggctgaattttggagttttaagatccaaagatatgtgattttctgtaaggttttattaagaatgaagccatcgaaggatccgtttgaagcagc

SEQ ID NO: 105881 - DNA, 206 bp, Arabidopsis thaliana columbia
  unsure (1)..(206): unsure at all n locations
acaaaacaaaacacacccaanaangcaaaagccacggggagcaacgcaaaccgacggggggggacncaanacaccggggggggcaagacgacgacgcacgccagcgagaggcgccgnaaccaaacgccagccaaaacagacaaaacaacagccacgcgcccgcacaggcgacgaaggaagaagccggncagaaggaaagaagggac

SEQ ID NO: 105882 - DNA, 378 bp, Arabidopsis thaliana columbia
ggtaaaaacaatttctcattagcttacaatggcggatacacaccgtgtcgaccgtactgggagacactttcaatgggaggcgccctatgaaggcggccgtggtcaaggtcagtatgaaggagaccgtggatacggtggtggtggttacatgagcatgatgtctgaaagtggcccatctagtacccatgttttgttcctgttgaatggagtccctgtcgttggttcttttcttgccttggctggattacttttagtttgtgcggtgatcggtttaatggtagtttttccactattttgttttgtttaaaaccggttatagtttaaatttggagttttaagatccaaagatatgtgattttcgttaaggttttattaaga

SEQ ID NO: 105883 - DNA, 282 bp, Arabidopsis thaliana columbia
cttcagacttctacgtcttagcgctcttctttgctccatccgtaataacacattggtgggggggtaatggaacggaggcgccaactcctaactcctcgtatcaaacggaaaggctcatattacatatggtgaacgacaacggataaagagtgtttgaccaagatatctccagcggacagctactagtcgtgccacaaggctcttttgtcatgaaacatgccttatgcgaacatgtcgagtggattgaatttcaagacaaacgaatacgcacaggtcaacaca

SEQ ID NO: 105884 - DNA, 424 bp, Arabidopsis thaliana columbia
agtgaaggatcaatctcatatctagccatattggatactgcccttgagcaagcctgctgaacacgtaaagaccctggactggagctcaatgttcttataatcgacggcatgagagtgtctatatgaggagcaatgttgtctacatgagcacgagcatggtgtgcaaagagagatacagtgtgaccaccagactccaacccaatctctttgacatcagaaagttgtgcaacaaaaacatgaaccacctttgcatccaaatcttttacaatcgatctcaaattgctcattgcagtcttgtgggaatctggatctttgtcaagattagccaactcttgtctaaatgccgaaccaagatttattcccattctccccctcctggttcctctgaaaagcataaaaagccacaatgatgaattcagtaagc

SEQ ID NO: 105885 - DNA, 336 bp, Arabidopsis thaliana columbia
cgtcgctagaagaatatagtaattatatttttgcaggatttgttgaataacataagggaacactgcatttgcaaatattattgtgacatctttcatctaattacaatcaaattatttttttatgaaagcgactgaaagttacatgaacgtagcaaaaataaatttggcttagatattttggaatacatattgtgtcatcatccgaatcattttgacaaaaaataactcttctatatgctttatctatttatgatattttggtaatttccaggcaaaagataatctaaaatcacgagttagttctggaccattttcttgaatattttctgtaacttc

SEQ ID NO: 105886 - DNA, 273 bp, Arabidopsis thaliana columbia
acgcgtccgctcttattaaatacacaaatagcctatcttttttaacaagctctttctcttctgcgcagctgttgtcctctgctggctcctcaccaacgcttccatctaccgcaccgttgtcgaattcgaagaagatgactccagctaccccgtatgttcaagacagagatgccagaaggagtttcagcaatcacaacacctaatagcttgccagagatggatgagctagcaaatgatgcaaggacgtggcggtggtcctttcctcgacgatga

SEQ ID NO: 105887 - DNA, 326 bp, Arabidopsis thaliana columbia
gtttgttttgtgtagctctgatgaattgttatgagtctttattccagctgccattgctggagctaccgctgctgttttgtttgttccggcaacagttgtgtttgtcttttcgatatcataacctgcgttaagagatattcacagatcataagttaggaaacagagggttttagtgatatataacacacgtaagaggaaacttacagtcaaactttttccaagctaagacgagtttctttctgtcgaatactacacgatacccggtcatgtagttttctgtttcattaagagtaaacaatgtcattatttaattggatgttccatga

SEQ ID NO: 105888 - DNA, 419 bp, Arabidopsis thaliana columbia
ctaaaaccaaaaacaaatactatgatagtaggaaatgatcaataagacgagactcaaagagtaataatctcactcttaaaactcgtctttgcagatgcaagataagtaagaaaacaattaggttcaaatatttgagtactaaattatttgagaaagagcaatgaaattattgaaaataagttacggtacaataactatgtctatgaattcttcattatgcccagaaccataatcatatagcttagctttgttcctttagtttaaagtgatctgttgagaaacataaggaatgcatattttgttgagttaggatataacttcattgtttaactttttctaatatatgcctttcttggtaaggagaacctttaacaatgtttttgatttctctgtaagtttatgactttactgatcatttt

SEQ ID NO: 105889 - DNA, 309 bp, Arabidopsis thaliana columbia
gttttctaatcactttttcattattatttttttaaatttgatttaattttttaaaaaaatcgataaggggtcagctttttcaaaacaattaattcgtcattattgttaaacaccagcttagagttatctttttttgacgcgtaatcacgtattaataagcctcagttgtcacgcgtcttaatttaaagccaaaattaactgttgaaaattttgattttctattgaccttcgttttttaaattaaagatggagaaacgttaatcatatatctttgaaaaatagaaaaatagtatatgagttagactttaa

SEQ ID NO: 105890 - DNA, 413 bp, Arabidopsis thaliana columbia
caagcaattaccagtcaaaagaaggtagaatacccttcaataaaggaaatcaaaccttggcagtgttgaaagccacaatgtctacagtctggcaatatactcactgaccaaggtggtaaagtatatgactggccattaaatttcacatgtgcagatttatgctcatcaatgtttgcgaaaaatgcatcgcacacctttcctccagtctcaccatctccatgataaatgtgtgcctgaaatttgcgttatttacaaataagaaatctggaatcttaagcatgtttaatataaaaccttattttcattcttgaaagggaatcaattaacaggccccgtatttttgttcagtaagataaaatcacattttatacggtacattttaaaagaagccacccctatatatgggcatttga

SEQ ID NO: 105891 - DNA, 241 bp, Arabidopsis thaliana columbia
ctcccatctaaaaataacccgacccatttacgcgacccaaaccggatcaacccgcagtggatgagccaagcttcgtaatccaatccaaagaagcagaatccggcgtcgtacaacctcggcgtacgggcatataagttgttgcgccggtagcggaaccatggcagggcgccgcgcctacttggtccgaggtgctccacgtacccatgggtggtgttacgtgcatcaggtcggatcttcttag

SEQ ID NO: 105892 - DNA, 194 bp, Arabidopsis thaliana columbia
aagaaaatggttaagctcagcaatctcctcgttgcaaccttcggagttctcctagagcttaacggctgcctggcgaggcagtcactcagtgttccttcttatttacataacgaatgtaacctcgacatcctatatagatttcaagccaccctaactatcaatcatgaatccatttcatatttaactacttaatt

SEQ ID NO: 105893 - DNA, 326 bp, Arabidopsis thaliana columbia
tcgattttcatttaaatagaggccagaagctctatggaaaaatcgtgggtcaattttatgttttagtaagggagaaatggaattcagatttaagctattttttgcactggataggtttgctctggtgcaagactactattaggaggaccagtattatggagggaatttcttatgtcagtgtggtttagtttcttagttttcttgtgcgttttagttgtttgattttttttttttttgtctttttttttttgtttttttttttgtttttttttttttttttatttttttttttactagttgttttattttttttttttttttttttt

SEQ ID NO: 105894 - DNA, 361 bp, Arabidopsis thaliana columbia
atcataatccagatgaaagctcataaaccctaattaaaccctgaaaaaagaaagaactcatctttctttttgttgttttacaaatcgaaaatccaaagaaaaagtgaacaagatgatgaatgagacattcgaaatcggcacaagggacactcatgttttataggtttgagtttcaatttggatggcattttagtaattttgtataattttcgttatcaaattaacagaatgtttaactgtatattcacaaggcattttagccactattgatcctttgtgtgaaccatccatgcaaattacacattcattctttctcttcttcaatcgtcattctttcgaattatatcgtatcaaccttata

SEQ ID NO: 105895 - DNA, 238 bp, Arabidopsis thaliana columbia
  unsure (1)..(238): unsure at all n locations
ccacgcgacgcaancaacagagccaaaaacaaagaaaaagagagcaaaccccacgcaaaagagagagcgccaaaaggaagcaggacgccaggccacacgaaaaagaagccgcaaccaacaacacaagccgccagcaacaacccaaaaggaggaaggcccaaggccgaagaacagaagcaaacaacaacgcaaggcgcacacccgagactcggctaagccacaagacaaatgcgagacg

SEQ ID NO: 105896 - DNA, 431 bp, Arabidopsis thaliana columbia
cggacgcgtgggccggtgggtagtccatggacttgtcctggagatgaagagttctacaatgcatcaatcatatggggagtgattggtccagggagaatgtttaccaaagaaggtatctatcccgggttgaactggctctttcttatcgggctacttgttccaggtcctttctgagtcctatcgtagatgttcccatagttgaattggctttaatacatttccattgtgcttttatcttttttgtttttgtttcatgcctcatgctttgtgtattctatttctgttcttgattcattgggtgatgtttgattctttaatttcctcatttttttgtttgttctttttcgtattttctctatttccttatttcattcctcctatttcttttgttattttattgattctatttatttttcatattcatattcttt

SEQ ID NO: 105897 - DNA, 329 bp, Arabidopsis thaliana columbia
ctaaaacgttaacgcagtctgacgctaataacggcggaggtttctccgttccacgttattgcgccgagacgattttcccgcggcttgattactcggcggagccaccggttcaaaccgtgattgctaaagacatccacggcgagacttggaaattccggcatatttacagaggaacaccttgccgtcatcttctaaccaccggttggagcactttcgttaaccagaagaaactaatcgccggagactcaatcgtcttcctccgttctgaatccggtgacctctgtgttggaatccggcgcgcttaacacggcggtctcggatttaacgta

SEQ ID NO: 105898 - DNA, 116 bp, Arabidopsis thaliana columbia
atggacgttatgtgagtctttaagttccctgttctcatttacaggaagcttgtcgggattacttgatagaaagcggattaccacttattgtggcatttcttataaatgtctctgtg

SEQ ID NO: 105899 - DNA, 368 bp, Arabidopsis thaliana columbia
attacttggaaacaaaacatctgacgatctccagactcagctgaagtttcgagctgaatctgttcttctctacacgcgatttctctgctcgtagatgtaaaacaataacgcgaggcggtgatgaacaacaaattgagtgattttgagaaaagtctgtacaaaaaactcaagagtggaaagctcgaggtgaaagtctcataccggactttcctgtgtccttattgtcccgataataagaagaacgtgggataccctggcgacactcttcataatgcttctggagttggtaatagctcaatccaagtaaagatgttagactgagaaggctagtcaccgtgctcttgccaaataccttattaaagatcttg

SEQ ID NO: 105900 - DNA, 367 bp, Arabidopsis thaliana columbia
acggcaaacatggcacgtaggattgaagaatcatctaaagaggctcaatgctcctaagcattggatgcttgacaaacttggtggcgccttggattctaaaacattttgtgcacactcacaagcgtagggcagtgtaatgctgatggtgctgatcttaatgcaacagggtgaactatgctttgacttaccgtgaagttatttctatcttgatgcaaaggcatatccaaggtgatggcaaagtcaggactgacaagacttaccctgctggctttatggatgttgtatccatccccaagaccaatgagaactttcgtcttctttaccatacctagggatggtttctgtttttattcatctaggtttgtgg

SEQ ID NO: 105901 - DNA, 169 bp, Arabidopsis thaliana columbia
tcggaagaaatgattaagctcgaagatcataaacataccgagaacattctgagtacgtggagctctgatgataatgtcagtcctcataggagtaaccctaacctgatcaccagagtaaccattcttcgttagactttttgtaagaaccttatatcaactcagtgttatt

SEQ ID NO: 105902 - DNA, 322 bp, Arabidopsis thaliana columbia
aagaaaacatacacaaatagcaaaacatggctaacaagctcttcctcgtctgcgcaactctcgccctctgcttcctcctcaccaacgcttccatctaccgcaccgttgtcgaattcgaagaagatgacgccagcaaccccgtaggtccaagacagagatgccagaaggagtttcagcaatcacaacacctaagagcttgccagagatggatgagcaagcaaatgaggcaaggacgtggtggtggtccttccctcgacgatgagttcgatttcgagggcccccagcagggataccagctactccagcagtgctgcaacgagct

SEQ ID NO: 105903 - DNA, 415 bp, Arabidopsis thaliana columbia
atgaagagaaatcctccaagctctccctcagttgtccattcccattcatgtcctgaagttgtgttgcttcctttgtagttgattttatgaagtggtgaatattggaaacagctgcttccaaatcttgttgattggtgttcttctgctccttttcgctgttttggatatccacatgtttctctagagtttcatcagtaacttcaaaaagacgacttgacattcgtttggttgatgatccttgcatctcttggatcgaaaatcttgcggcttcaacgattttctcaatgctaatgccctcttgagattcaaatatcctgttgatttttgagcggagaaccactaacagctgatcaagtgttgttgcatcctcctctggctcactggacttactagaggactggttttccacaaattt

SEQ ID NO: 105904 - DNA, 304 bp, Arabidopsis thaliana columbia
cgcgtgcgaaacaaccaataaggtcatgattggttcttttcccaaatgctacttccgccgccgccgggggttaatggatttggacccgaggttattgttcaagctttgaagatcgatcttcacacagcagcagcaccattcagaaccaatatgacaaccgtggaaccatcgtccgagtgctaaggacacttggtcaaatgaggcccgaaacatgggttcttactaatcactaaccatggggtggatgagagcctctacgttcgcgcctatctgcatatggactctttatttaaggccccggctt

SEQ ID NO: 105905 - DNA, 411 bp, Arabidopsis thaliana columbia
gccataatcaagtgtcagggtctgcttacaacttctggaagcatggtggtaaatatggagtggggaaatttttggtcctctcatttgcctagaacttcgtatgacattgacttggatgcagagagttcaaatgcaaatgatatgggatttgagaagatgatatcaggaatgtatctgggtgacattgttcgtagagtaattctccgcatgtcagaagattctgatatctttggacccatctcgcccgtgttatctgagccttacgttctaagaacaaattcagtctcagccatacatgaagatgacacacctgagttacaagaagtagcaagaatcttgaaagacataggggtattagatgtaccactgaaggtgagaaaactagtggtgaaaatatgcgatgtggttaca

SEQ ID NO: 105906 - DNA, 410 bp, Arabidopsis thaliana columbia
gctcgattaatcaactactccaatagtccaactcccacatcacatgctttgtaatcatctatatatagaagaaacaggttaatttgtatgtgtatcttataatattttcactaacgaacaaattgagcaatcatcatcatcattaattcttcatacgtaagaagaagatagaaggagagaaaacaacaagaaatatagctggaagattcgtcacatgcagtttagttggtagaataaaacactttatatttgggagttttacaaaagccaatagaaatcttttttttttttttatgaatattggtatatgagttttaatagatgggtcatgaaacctaatgggtatttcgaagtacaaaaacataattcttaatggacttcattctttagatcagaatctccaatcctac

SEQ ID NO: 105907 - DNA, 386 bp, Arabidopsis thaliana columbia
aacgattgttattattctctttcgcaagttcagtatgaggatatgttcgactttgtgttttctttctgtttatgattcctctactatttttttgccagccaatcctcttctttaatcatctgtgttctgtgctgttataataggtattaaatatgctttgctgttgggtagaagacccaaactcagaggctttcaagttgcacctaccaagaatccatgactttctctggttagctgaagatggaatgaagatgcagctattgacagggttataacggaagccagctatgggatacaggttttgctattcaagcgattttggcaactaacctcgtcgaagaatatgggcccgttttggaaaaagcacattcatttgtcaagaattt

SEQ ID NO: 105908 - DNA, 340 bp, Arabidopsis thaliana columbia
ggcgaccacgcttccggtaacggctatcagcggatgagtggttttttttagtgccgagacctttatggactcgggggacgattcaaggacaacaacaaggccaatcatggtaaggacgacaggtacaacaaggccaaccatgggaaggacagggacaacagggacaacatggatgacaaggtcaaccatgtgaaggacaggtacaacagggacaacaaggacgacagggacaacaaggccaaccattgtaaggacaggtacagcatggacaacaagggtttcgtgacatgcaccataaagtgttacatgtgagacgcgtagaccttctttgccaacactt

SEQ ID NO: 105909 - DNA, 390 bp, Arabidopsis thaliana columbia
cttgtatacttcatggtgccattcactcatggcaattataagcctctgcttattagctcaggcttaccagcatgcgagtgtcgtgattcaatcattggtagaagaagacattaacgtcaaatttctagtacagcttgataaattgatccggcttctggaaactccaatctttacttaccttagattgcagcttctggaaccaggaaggtacacatggttgctgaaaacactttatggtcttcttatgttacttcctcagcaaagtgcggcgttcaagatacttaggacaagactcaaaactgtgccaacgtactcattcagtactggaaaccaaataggcagagcaacttcaggagttcctttctctcagtataagcatcaaaacgagga

SEQ ID NO: 105910 - DNA, 280 bp, Arabidopsis thaliana columbia
caaaatgttattttgggggcaaaaagtttgccagccagtactcttagcaaccatttagaacagcggttgttcaagaaactgaagcaggaaagacaagagagggctagacttcaaggaaaaagctatgaggaggtcccgggagccgactcgcttgtaatcagagttgtagcatctgtcgacaaaatattagaagtaaagccacgtttccttgacattttccgtgaagataattatttcatcagaattcccttataagtctaaggccattctgttgtttcag

SEQ ID NO: 105911 - DNA, 361 bp, Arabidopsis thaliana columbia
tccggaaaagcacatagcaaaaaacacaactaatttgaagcatcgtatgggcaggacacagccgattatgaacagtgagagccgttttggtagagctagagacgctaatattaaacccatttgggccaaacagctcattagcagccaaaggtggaagtggacagaatatttgcacactctatgactcaggcccagctagttcaagctgacaactcacaccatgctgaccaagcacagccgttagatggtcacacgttttggtttgtctctgtttcgtgtgcaatagatccctgtgacacaaaccacaacgttaatgttgcgtcttctgtcaaatgaaacatcacaattagaaggaaagagg

SEQ ID NO: 105912 - DNA, 379 bp, Arabidopsis thaliana columbia
agaaactgatccatccaaaatactatcttgtcttcactcttcaaaattcctgtcattaccctctcgaaccctttctcttttcgaatctccacttttttttctatcttctgcttcttcttcttctctcttcaatgattccactctcacaaaatctccatgactacaaaacgcatagacagagatttcccatcttccgacgatccttcctccgctaaacgccgtatcgaattccccgaagaaacactcgaaaacgacggtgctgccgcaatcaaactccttagcttactcctccaatgcgccgaatacgtagctactgatcatctccgtgaagcttcaacacttttattcgaaatctccgagatatgttcttcgttcgggt

SEQ ID NO: 105913 - DNA, 266 bp, Arabidopsis thaliana columbia
cacacatagcaaaaaatggcaaacaagttgttttttgtttgggcggttttggttttggggttttttaccaacgcttgcatctaccgcaccgacgttgagttcgaagaagatgacgccactaaccccataggcccaaaaatgaggaaatgccgcaaggagtttcagaaagaacaacacctaagagcttgccagcaattgatgctccagcaagcaaggcaaggcccgagcgatgagtttgatttcgaagaccgcatggagaacccaca

SEQ ID NO: 105914 - DNA, 229 bp, Arabidopsis thaliana columbia
gcgtccgaaagaaaatggttaatctcatcaatcttttttttacaaccttctcttttacactcgtgcgtctcttctatctcgcgagggactaacattgggctaacgcgtacctactcaatcaatgtaacgctctcaacctatacgtatttcaaaaccaccgaaactatcaagagtgaagccggttagatctatgcaccccaacttcgttgctccggctttgcctttgagc

SEQ ID NO: 105915 - DNA, 412 bp, Arabidopsis thaliana columbia
ctcattaaagggagaccgggacatcctatacgggttatgaagaacttgagaacctgtgatgattgccacgctttctccaagtttgtttccagtcttacttcgacagaaatcatcatgcgagacaagaacaggtttcaccacttcaggaatggtgtctgctcttgcaaagagttctggtgacttcacttactggtgctcttattattaaaagaggtctgatgagaaatgcatccacagattttaaatgtatctgaagctttgaatagtatcaaaagaccagttgatccaaaaccaagttcctgatccactaaacttgcatatggcaacaaatcgtgaagcttttgtttaatcttctgcacaagtcagaagcctgaataaggagctaagtcaatcacactatactcattaatgc

SEQ ID NO: 105916 - DNA, 344 bp, Arabidopsis thaliana columbia
gttgctcgttatgtaattgaacaaggcggtctttacttgcccaccttcttcactggcccaaaaatttcctacgtcgttcaaggaacgggtatcagcggaagagtggtccctggatgtgccgagaccttcatggactcgcagccgatgcaaggacaacaacaaggccaaccatggcaaggacgacagggacaacaaggccaaccatgggaaggacagggacaacagggacaacaaggaagacaaggccaaccatgggaaggacagggacaacagggacaacaaggacgacagggacaacaaggccaaccatgggaaggacagggacagcagggacaacaagggtt

SEQ ID NO: 105917 - DNA, 314 bp, Arabidopsis thaliana columbia
accggaacggaagtcccgacccgagcgacgcgaggatcagatgctagctaaattgagcacatgttcagaaatgagtaagcttcagagtgagggcgatcgtgaagccatcactactatcacagggaaatccgaggcaaagaaacgtaactttgtcgagactattgagctccagatcggtctgaagaactacgactgttatatggacaagcatttgattggatagctttagtttctaagtgtcagcgtcggtccagcagagtgctttctgcgttggtgtttctaacgatttctacgcattttaccgtttcaccgga

SEQ ID NO: 105918 - DNA, 392 bp, Arabidopsis thaliana columbia
agggacctggaagaaaagttggaaaagttggaagcagagaaagaggagctcaaaagtgaagttaaatgtaacagagaaaaggctgttgttcacgtagagaactcattggctgctgaaatagaagtactgacttctcgaactaaggaacttgaagaacagttggagaagttagaagcggagaaagttgaactcgaaagtgaagtaaaatgtaacagagaagaggctgttgctcaagtagagaactcgttggctactgaaatagaagtattgacttgccgaatcaagcaacttgaggagaagttagagaagttggaagtagagaaagatgagctcaaaagtgaagttaaatgtaacaggggaagtggagagcacattgagatttgagctcgaag

SEQ ID NO: 105919 - DNA, 422 bp, Arabidopsis thaliana columbia
gtaaaataaaaaagcaaaagagagaaattgaaaaaaaaaagaaagaaaaataatcctctcttgtttcgggtagggtttcgtttttgtttcatcgataaactcaaaggagatggattcaacaaatggtaacggagctgatcttgaatcagcaaatggggcaaacgggagtggggttactgaggcattaccacctcctccaccagttatacctccaaatgtggaaccagttcgtgttaaaactgaacttgctgagaagaaggggccagttcgagttcctatggctcgaaaaggatttggaacaaggggccaaaagatccccttgttaacaaatcatttcaaagtcgatgtggctaatcttcagggtcatttcttccactacagtgtggctctattctatgatgatggtcgtcctgttgaacaaa

SEQ ID NO: 105920 - DNA, 272 bp, Arabidopsis thaliana columbia
ggtgcttccacagtggaacgctaactttcacaccacgtcgttctttacggttggagggagcccaaatccagatcgtaaacgacaatggtaacagagtgtttgacggacaagtctttcggggacacattgaaagttctaccacacggtatctcggtggtgaaaccggcgattagaatttcaggaatctgtgttgggtcataacatacgccaacgcgcaaattaacactcttgcgggacgaacctcagtcttgagaggtttaccacttgaagta

SEQ ID NO: 105921 - DNA, 410 bp, Arabidopsis thaliana columbia
agtacatcaagatttggtacaaaccaaaccaaatgcgtggttatgtctggttagagaaaccagttactgaagaagacgaagaagacgaaattagcctcccgccggtgaaaatctccggcgacacatcgaagtttccgtataaaaacaaacaaggacacagatcggcgattagaatttcaagaatcgttacggagacacttaaattaggactcaaagatgtgagatggttcgttatgggagacgatgatacagtctttgtcgccgagaatctaatcagagttttgagaaaatacgatcataatcaaatgtattacatcggcagtttatcggagagtcatcttcagaacatttatttctcttatggaatggcttatggcggtggagggattgctataagttatccattagcg

SEQ ID NO: 105922 - DNA, 419 bp, Arabidopsis thaliana columbia
cgtttttcccctgtaaaacaaagtcttttgcttagtgtccatatcaaacacatggagtatagaccaaaacagctttagatctttaagaactttttagtcactgtgagagacaaagagctgaatatgaggttaccttatactgattatcatcttcaatactttcttcaagcccagcaagtccaccaaatgcaatcaataggtgcctatgatttcaagccataaccattggagtcagtcccccaaatttaaacggctaataatgtgtttagacacaaacttataccatgttaaggggaaatgagaatcacctaaatgttggtattttcagctcagatgaactaattaccaggccgtgctccgaggtaccaatcaaataatcgtaaccaccctgcttttggtattaggaaataaggttatgc

SEQ ID NO: 105923 - DNA, 384 bp, Arabidopsis thaliana columbia
gaaacatactgaaagggatcttgcattgggaatcggtattgcatcactgatatgctgcatttggtatatgcggctatcaggcgagatagtaggatgggtcccatactattcacagaatgctggtactcctatctactttgcatttggagacagcgggatgcatagggcaagggacatcttaaccactggggcaataactgctctatgtgcgagtttgttggggtcccttctggctcagccacgaatattcatggccatggctagggatggattgccgccagttttattttcagaaattagcccaccaactcaagtaccactgaaaagcacaatagctattggcgttcttgcccctgcactcgcattgtttatggatgttgcaca

SEQ ID NO: 105924 - DNA, 365 bp, Arabidopsis thaliana columbia
gtctcgttcaggtgctcgcaacgcacttaatcagcctcagaagaagattggtagtcgtatgacggcatgccaattggcttctaaaggacctgtctttggtggagctcctatcgctgctgcagctgtttcagcgcctgctcagcattcgaactcggagcatactcagaaaaagatttatgttagtaatgtcggagcagagcttgatccacagaagttgctgatgtttttctcaaagtttggagaaattgaagaaggtcctttgggtcttgataagtatactgggagacctaaaggtttctgtctctttgtttataagtcgcctgaaagcgccaagagggctttggaggagccacacaagacttttg

SEQ ID NO: 105925 - DNA, 427 bp, Arabidopsis thaliana columbia
caagaatggtaacgcctttgacgatgacattgttgcaatatacaggatgaatattccatgcaggcgaatcgatgattgtgatgttcgagatctgaacgttttgagagaagatgatctcgattgtgtaaggtcttgtgatccccttaaatccaccactgcgatacttcacccaccagtactttccttgcccgttgatcgttccgttgttacctaaccaaataaattccatcaattctagtctttatacgtaaaatacattcttaagatcttatatcattgattcttggtcgttaaagcaccaaactgttgctactaattcattaaattgttgtattattaatttggttaaccttaccggtgataacaacatcagttaggtttgtgccagagattagactagcaaatgttggtcctgctgcatctcttc

SEQ ID NO: 105926 - DNA, 365 bp, Arabidopsis thaliana columbia
ggactatcacacaaaatacttcaatattttatgaaatttgacataaaatctcactaaatgaccatttttttttttaatggccacttaaaatttgttttgattcttctaaaaatccaccaaatgaccagacgtcttttaaaatctctcgaaatctaaaatccacaaaatcttacctaagttcaatacacccctttttttttgtgataagtgtaaacacacaaaaaataacatatataaatggatatggatgctaacataaaagttcacattatatttatatattaatttattaactcatctcaaaataaagtacataatatattattcaatctatgaatttaatttgattatcatgtaatttgggg

SEQ ID NO: 105927 - DNA, 301 bp, Arabidopsis thaliana columbia
gttgcaacctttgaaaaatggaacctatggctaagctgaggctcgctttcggaactcttgccctgtgcatgctgctagcccacgcatgcatctaccggacagtggtggtgttcgaggctgatgatgacgtgagcaacccacagcacggtgagtgccatagggagtctatcaagcacaagcccctaataggttgcgtgccctggatccgcaggagtgctcagcacggaagaatcggttacaaagctgatgactctgagctcactcttgatgtcgatcttgaggaccatgcgaaccccatggg

SEQ ID NO: 105928 - DNA, 294 bp, Arabidopsis thaliana columbia
gcgggttcgatggcaaacaagctctttctcgtatgcgcaactggggccctttggttactcctcaccaacgctagcatataccgaactgctgtcgtgatcgacgacgatgacgccagaaaccccatgtgcccaagacagaaatgtgagaaggagtttcagctaccacagcacctaagagcttccctttcattgtggtaatggatacgtggccccgataccttggcggacagagttttgaatagttcatgcggagacacatcggcacccacaaggcccccagaggccaccatatct

SEQ ID NO: 105929 - DNA, 347 bp, Arabidopsis thaliana columbia
gaaacagacggtgtaccttgtgtgttgaaaggtccgccgtcgcataggtttaccggttgcgatgggtttttaagcttcacgggcgcctagggttgccagtatcgatggctttgtcagcaccggaaccggaatccaattggtgcggtctctatagtgtcgcattctggcgggttcaacgagatctgaagcctattttgtttaaacggtctacgtgctcagttctcagatctgggagggtgaagtctacaagtcatagctctagcagtgatgatggccgttcggctggctcagctgcagctgaacgaactggacagtccaaccatcatagaggcaagttcaggaccatc

SEQ ID NO: 105930 - DNA, 345 bp, Arabidopsis thaliana columbia
gaatacatggagaatcacagctgccttcagaaagatacgacgtcggcagccaaattagacgtcgaaactggaaacctccggcagagagatgaaacgaagccgttttatgcaaactcactgacgccacgtgagatggaatctcttgttgcgatctgcgataccttcatatcctccatcgacgactctggagtaggacacgtggatgattgcgtcgctggatatttctccgcctccgcttctcagaccggaactcccgaccgcgtggcgaggttgatgagtgagaggcttcaccacccaaagaagtggatactaagagctggattgggttactctctacttggatcg

SEQ ID NO: 105931 - DNA, 404 bp, Arabidopsis thaliana columbia
tgaacacactcgatgtgcaaaacatatcgatagtaaaatcggtaaaaatgagcatattcaggttaagaaaacatatagagataagtgtacctgatgtttctgcagttgggacagtagacacttggacagctttcacagatccaaatgttgtcttcagactcaagtacttcactggcctttgtccaagcaatgatctttgattgtatggtatcagtaagcttccagatcttactctactaaggtctactgccgagattttaattgtaggtacttctaggctacctgtaacatacgtcatacgccaaggtcttataatgggaaatcagcctaatctagacagtgtttaatagaatgactaaataagcacttatctttaatttgatcccttactttttaaaattgag

SEQ ID NO: 105932 - DNA, 281 bp, Arabidopsis thaliana columbia
ggcaaaagcaataagaaatccaatatataattgtatttcaagtgtaacaggataggatttattagctaagagttctaaatttaatgttggttcgttcgaaccatataaacttatacctaaaactcctattaataaaaaaatagaacttcctgccgtgtacaaaataaatattgtagcctaatacaaacgtttcttttcacctcacatggctataagtccattgacgtgatgtattcgtaactcgcactgtaatttaacaagtcggactttacttgcccacc

SEQ ID NO: 105933 - DNA, 384 bp, Arabidopsis thaliana columbia
  unsure (1)..(384): unsure at all n locations
ggtccgacccacagcgtacccgtatacattccacaagtatctcttggttttttaatcgcgcaacaagcaaccgataccaggggggttagttcaaaacaaactcactccctcatatcaacactattccttttctaacaactaactttcgccattttagatttgaagttataacctaattgttccaaatttcaccttatgaatctaggacgttcaaagtaagcacgcttgattacacttngactcacatcattttcctagctatcttcttatgtccaatttttttcatcatcttatgtgcttataacctcttatcatcaatcacccaagaattctgttactaagagcttgattgttgttaacttttttttttaatgtacctacatt

SEQ ID NO: 105934 - DNA, 342 bp, Arabidopsis thaliana columbia
ggaggaatagcggctgatttaccttatggttggatagataaatgcttggatgtgtttgtgattattttttaacagaggttgttgaatatcaaaaactcattacacgaaatactatttttttagaacgggttgaaggagtagggattattgttggggaagaaggaattaattgctctttatgcggtataattatttatgctttttgagatcttatattttctatgttctactgatttggtattacattgatgttttattgtgtcgatatttgtatttttctttttgaatttgggtacataatttttatttttatacttttatcttttttagtttattttattt

SEQ ID NO: 105935 - DNA, 412 bp, Arabidopsis thaliana columbia
cttttgttcagtaaatactaaaatcgttacatgaattttcatatacatatactccctggattataaaaaagaaagtaaacaaattcgcattacaaaagaagatacatcatggccctcaaagcaactatggtcaccaaatccatgtttgcagccttattcacaattatcgcgatggctacattggcatctgcagcctccggtttggctcagtctccagaatcagaccacttggttaacaaatgtatggctaagttatcttcaaggtgtgcgatgtatgtcacggatgcaatctgtactattcatggtccgatgagactaaaaccatcatggatgttgtctagaagttattcacatgggacgtgcttgtcttaaaatctgtacgaattatgtatttcaaatgtttttgcccaag

SEQ ID NO: 105936 - DNA, 426 bp, Arabidopsis thaliana columbia
gaaaaaaataagaaccaaagaaaacgaaataatgaaagaacacgtgggtttagggatctaataagaatctctttcttaaaatcaatagaaagagagaagaaaaagggtttgggctctattgagtatgacacttttatatcaatgaaaagcgacgatgtgttgtatatgagatatggaatgatcttctcatctcaaatccctattcgttttttaacatcatcattctcttttccaccattctttctactttcaaacaatgtatcctaccttttttcttcttcttggtacatactctattacttttactttctttttttttgtatttcaaaaaccatgcatcttctaaacaatgttatcggttgagttaagtttccgaaattacattaccgccactattatatttttctaactttggtatacaatata

SEQ ID NO: 105937 - DNA, 418 bp, Arabidopsis thaliana columbia
aaaagattcaatagaaaaaacgaaatttcattttctttcaattgggctttaattatgaaaccaaagttatactagttgcttcttcttctactttaaagtgtgtgattcttcttctatctttttaatcaaaagtatttctttttctatcgtccaccacattattctatggcatcttctaggcatgaatatttattttcacttattcgaaatccagattaattatgttcgcttcagatcggtttatctgaattgaacactagtttgtgagattttgctgaacaaaaattatattctgaagtgcaaaatgatggtggaaacgaaattgaaccttcaagcacctttgtgatgatgaggtcttagtcttcggagaaacagaacagaatatcgtgaatgtcagacagagttatgaaacacaaaa

SEQ ID NO: 105938 - DNA, 345 bp, Arabidopsis thaliana columbia
gacaaagaggcagtcgggcatcgacgtgagctttgacgacaccctatctcctgcgtttactctctatgtttctccgaacttcggctttagcaggagacaagattgaagaagtctgggatatttctaacgcttgagcatcaaagaagaggctctacgagccaaagatttggcatgggatcggctgagcaagtcagatttcacaactgctcgtagcatgagcgattcaggctcacaaaatggatgcaactcttgagagtgttgtcgctcgcatgattatggtgtgtgatgagccttgagcagcattggacaaatttggtgatgagactgaaaggtacacgattcttc

SEQ ID NO: 105939 - DNA, 422 bp, Arabidopsis thaliana columbia
gaaggcaatgctcgaagatcgtttgttgaagaaaaccaaacgaagcagagtaacaatggcttcgacggtgggattagcaccgggactctcccggaaattgaagaaggtattggactgtcgtacagatagtccggatctggtggcgtcgcttaacgctttatcctcattctacgacgagaacagtgctcacgcacggcgaaatctcagatcgacgatcgagaaacgagcgcttcagatcaacagtgagttccttaacgcggctgattcgactcagatcgcattggatcgcgtggaggaggaagtgaatgctttagctgattgttgcgataagattgcggcggcgctaagtagtttcgcggctaccactagcgatattattagtactactgagaggctaaagcaagagcttgaggttactactc

SEQ ID NO: 105940 - DNA, 429 bp, Arabidopsis thaliana columbia
caaacttgccaaggttaaggctcatgtgaccgaagtgaaataatggagaggtcagaatcatatatccatgtcaatctcacaattttaaatatcattaacttgagaatatatgtcatgtatgccttgaattttcaatgctccttgcgcacttctgccaaactgattgagctttatgtaattcattaacttgcaggctcttgatcgcagtgaaaaaattgagcttctagtggacaaaatccgagaacctttgttcacaggttagtaacttacctttcactcatatgtgagctttttgatacaagcatatcttctttctaattgtcatgctcttttatctcgaattctgatatctataggcacaagattccagagcgccaggaacgaaaatgacaagatgtggtttcagaacatgaagattaagctcatagt

SEQ ID NO: 105941 - DNA, 175 bp, Arabidopsis thaliana columbia
gccggattcccggtcgaccacgcgtccggacaacgttgatatttaccgcatcgttgtcttattcgaagaatatgactccagctacctcgtaggttcaagaaagggaagatagaatgcgtctgatctatgacagcacataggagcgtgccagagatggttgagctagcaaatgagg

SEQ ID NO: 105942 - DNA, 308 bp, Arabidopsis thaliana columbia
gtactctaagcaatcggagctattatgagttagtccggtcatagcgagcgctgcgacctctacgaccttgagtttcccagtgttgactaactcggagatcgttcggtagaggaacagggtggtccttactttgctaccgttcttcactgacgccgaacgatacgaccttgaaagatgaacctagttaagagaaagagggacccgcgagggtgccatgacctgttggggctctggctactagcgaggtcgacaacaatgccaaccgtgccaagggcgtcggtgacatcatggactatcctgggaggggc

SEQ ID NO: 105943 - DNA, 206 bp, Arabidopsis thaliana columbia
  unsure (1)..(206): unsure at all n locations
gaagggnnggacccacgcgtcccggttctttcaagccaccccaaactatcaatgagtgtatgttcggtcagtaagccgttctggtgccacatcgcaccctaaagcttcgatagtgattggtgtttccagttgcttggtatggaagtggaacaagagcggtctttactttgcccacacttctttcacttccccaaaaaattttctta

SEQ ID NO: 105944 - DNA, 244 bp, Arabidopsis thaliana columbia
caaaaagaaattggtcgacctgactaatctacttgttgcaaccttcgaggttatcttcgggcttaacgggtgacttgctaggcagcaacttgaagtgcctccttacgtgcctaacgtgtggagcttggacaacctagacgtattgcaagcgatcgaagctgtcaagagtgcatacgcgcagatcgagttctgtgaccacaaccacagtcagttccgatgggaaccaaatctcgctgctcgttgt

SEQ ID NO: 105945 - DNA, 433 bp, Arabidopsis thaliana columbia
aaatgacatcatacattgattgataaaacaagatacataaatattcaaactttgataaatttgaagtatccagagatcacaaaaacctaaaatccaaaaattctgctgcattgattatatgtatttaagctcaaaatacaaatcaataacagtaagagatctagatcgaaacataacaagtacagaaaatcaaatcgtgatagattcagataaatatccaatttcacgaaaccctagatatcaaaaagaacctataaagcttctcaattcccagattagatctagcacgaagcaattcacaattaagcatcggaaaacaatccgaaatctcaatcaaggaacacgaagagacgcgagaacagatcgagaatggagaaaaaagaaaaaggcctcacatttgccaagcggagaggataaagagagaagcgaagag

SEQ ID NO: 105946 - DNA, 394 bp, Arabidopsis thaliana columbia
cttaccatggttcatgcaattaagtgcactccgattcctcgaacactgacttttgtaactgttaatctacagagtcctagctcttgacacctaactcatgaacctgtaagaagtttgctttcttcatgtatgctgtattgaaagtctaacattcagatcaaagaaactttatatttcaccactaatatacaaagcctgctatgtaataataccttcggtttgtcatgcgagagaacctggtcgaataattgcgaacctatataacaaagatctgctgccaaaataaccacaggctggacatttatctatcggggcatctaccaaaatgatcagaattggcattatttgagctatgtatgagaatacacaaaaatctgcttctagatttattcgc

SEQ ID NO: 105947 - DNA, 177 bp, Arabidopsis thaliana columbia
cggacgcgtgggcggacgcgtgggacaaaaagaaaatggttaagctcagcaatctcctcgctgcaaccttaggcgttctcctcacccttaacggatgtctcgcgaggaaggcacttgtagctctctcctcaggtacagaacgagtgtcacctcaccaacctacatgttctccaagct

SEQ ID NO: 105948 - DNA, 422 bp, Arabidopsis thaliana columbia
caaacacaagattacacctacaattagcagatgaatgccccaacaagcgttgtgcttcttgtgattggcgttttgtgtgccattgtcaccgcaaggcaggtcaaagatttgtccacggagaccaaattaggggcctctcttccaaaaactactaccaaaggcattggagctcagctttctgcaactggcacaacttacagcaccagcagccggagatggtatcctaagcggattaacaatgccaaaggtgcaggggccaatgcatacgaaagtgccaacacatttaccagcggacaagtcactgccaagggtcgcaaggcaagagtttcttctacaagtgcttctgccgctgaaggcgatgctgcagctgcagtgactcgcaaagctgctgctgcacgtgcaaagggtaaggtagctttcgc

SEQ ID NO: 105949 - DNA, 422 bp, Arabidopsis thaliana columbia
gtgaagccaggagttggttctgatcttaacaaggagatcttctatgtgccgcaacggccttatatggcagtaggaacacttcgtgaccagttaatatatcctcttacttctggccaagagagtgaactgctcactgagattggaatggtggagctattgaaaaatgttgatctagaatatttattggatcgctaccaacctgaaaaagaggttaattggggtgatgaattatctcttggagagcaacagagattgggtatggccagactattctaccacaaacccaaatttgcaattctagatgaatgcacaagtgctgtcacaactgatatggaagaacgctttgccgctaaggttcgagctatgggaacttcttgcataacaatctcccatcgtccagcgcttggtgcattccatgatgt

SEQ ID NO: 105950 - DNA, 386 bp, Arabidopsis thaliana columbia
aactcacaactctgctttttctgaacctaccaattccgtcgaatctcaagaagacgagggtacttctcatgaagaagttccagcagaaggagaagatacagaaggtcttaacatagatgattgcatgcgagaagaagcttcagttgaaacgaatcttgatgattccgttgcttcaccgtgtggtggagatactactgatctctcgcttgtaccttacgctcctactcgaggagaggatggttcttgttgaggataatggaatggagctgctgaagatgcatgataatgttcaggggaaaactgaaactccggattgggaaagtttgattgcagatgcttcatgagctgttaatctttgactcaccttgggcttttggggcttttag

SEQ ID NO: 105951 - DNA, 234 bp, Arabidopsis thaliana columbia
cggacgcgtgggagcgaacagagaatgtcgtctgtcttgcggttgttggggcggagaatctgtaatccagcggcggagaaagtgcgtttgagcagtaacctaagcggtggtggagatttaacaatcttaaatggacataaagcgggtcaagacttattcaaagatactctaaaatgctaagacataacgcaagagaaagaaggcctacacaaataagttaacaaggagttcaag

SEQ ID NO: 105952 - DNA, 368 bp, Arabidopsis thaliana columbia
  unsure (1)..(368): unsure at all n locations
gcggatcagcatgaaagaatccaacctcaagaagctgctttaatgaacaggataagccctgcgaaccagaccaatacaaggttcttaacaaaacatctacacctatctctcagaataacaaagttcaatccacagattcatttgccactttgtgaggaatggacgataatttataattaggtaacagttattttgttacctgatcgatcaagtcccttctatcaagggaagcccttttcagcttaatttcatctgttaattttatgccatcgatccattccattgtgagcactgctgtgcgtgtaaaattccagtaaattttagggactntgatgttctctgctctgtgattcctggacatattccta

SEQ ID NO: 105953 - DNA, 419 bp, Arabidopsis thaliana columbia
  unsure (1)..(419): unsure at all n locations
ctctcctcttcaggttttcaagaagcttactacgtttttgaagtctctgggagttaaagctgtgtttgatactagctgcagtagagatttggtacttattgaatcttgtaatgagtttgtgagccgttataagcaagctaattctgatgatggtgaaaattctcaatcccctctccctgtgctttcctctgcctgtcctggttggatttgttatgctgaaaagcagcttggctcatatgttctgccgtatgtgtcttctgttaagagtcctcagcaagctattggagctgcgatcaaacaccatctgtgtcaagcattaggactcaggctgcatgaggtgtaccatgtgactgtgatgccctgttatgataagaaactcgaggcagcaagagatgattttgtctntgatgatggaacac

SEQ ID NO: 105954 - DNA, 148 bp, Arabidopsis thaliana columbia
ctaaaatatccaccgttgacaagaaaacgtagtctaataatatccaccggcgatatttggccaactcattttttttttttttttatgttgttagctagtttttcatgcgatcaccttctaagctaagagttcgtggcttacttccttt

SEQ ID NO: 105955 - DNA, 419 bp, Arabidopsis thaliana columbia
ttcaggtgcgattctatgtcaaatctctattttcaaggacatgcttgatcaggttctactcttctccttcttcttcttcactggtatggtttctaggacatgcttgatcaggttctactcttctccttcttcttcttcactggtatggtttctcgtctttagcttaatttgagctgtgatcgaatgacactgatcaatcgggaaatcgaagtaaaacacaagagatgcttacgaaacaggaactggataatctttggttaaccaaattggaagtttaggaaatgaccaactcttctctcttctctttgaacaagcctttttgcataattttggatgtgatcttctcttttaagttttaacataatgaaataatctacgttgaagttagcaacattagaaaatttgatcctttggagaat

SEQ ID NO: 105956 - DNA, 425 bp, Arabidopsis thaliana columbia
cagagttcaaaattctcgaggggcttcggtttttcctgccacgatgaacttacagtcgaaggaaactcatccgaaacaaagcaataatccctttgaattcggactcatctcttcggattcgttacttaatccgtcgcataaacaagcctcgtatgcaacctcttccaaaggctttggatcgtatcttgacttcggcaaccaagccaagcacgcggggaatcacaacaatgtcgattcttggcccgaagagctgaaatcggattggactcagctctcaatgtcaatccctatggctccatcttcccctgttcaagataaacttgcactctcacctttaaggttatcgcgtgagtttgaccccgcgatccacatgggattaggcgtcaacaccgagtttcttgaccccggaaaaagacgaataactg

SEQ ID NO: 105957 - DNA, 429 bp, Arabidopsis thaliana columbia
cttcatcaagtttctcgaggagagtgaagaatttggttttaattattctttgattaccctttttgtggtgtggttttcgttatttcgaggagtgataataataccgttatgagtcatcactttacatgtgtttgatcaattactcttaattcactttctgggtttcttcctttgaatctctcctcgaagaaaagaaaagaaaaatgaaggaggaacaaacaagatctctgtttggaatctctttgtctgataaaccaacttggcaacagtttctcatttgcacttctggtttcttttttggttatctcgttaacggtgtttgcgaggttcgtttctctcttttttgcaatttgattcgagaattttgatacataatcaatcaacgttaatgtttttggttgttctttgtcataattccacatacccagc

SEQ ID NO: 105958 - DNA, 143 bp, Arabidopsis thaliana columbia
ggcgcagacgtccgctaaaaaaaaatctcgcaaagacaaagtttttattggctacctaaaccatgatatgggtcctgctctctcgtagcgggaaagtttgagaaactctcgctattaaatttaaattgaaggcttttttttcc

SEQ ID NO: 105959 - DNA, 153 bp, Arabidopsis thaliana columbia
  unsure (1)..(153): unsure at all n locations
agagtaatnnagaaaancaaaacgtggcttttcgtcaaaaccaangcnnanagagagagcgtgaagaaagcanaggcgcccccctccgaganaccancganaccaactagggttaggcaaccaggtgttgataccctcgaagaaggagaagaa

SEQ ID NO: 105960 - DNA, 337 bp, Arabidopsis thaliana columbia
  unsure (1)..(337): unsure at all n locations
agaaaacatacacaaanagcaaaacattgcgtgcaagctcnnccnagncagcccaacgcaaggcctcagcgaaagnctgaccaacgcccccacctaccgcaccgnngtcgaattcgaagaagaagacgccagcaaccccgtaggtccaagacagagaagccagaaggagtttcagcaatcacaacacctaagagcttgccagagatggatgagcaagcaaatgaggcaaggacgtggaggtnggccttccctcgacgaagagttcgatttcgagggcccccagcagggataccagctactccagcagagctgcaacgagcttcgccaggaagagcca

SEQ ID NO: 105961 - DNA, 384 bp, Arabidopsis thaliana columbia
  unsure (1)..(384): unsure at all n locations
aaaccggcgaccacgcgtcgacatgactatatcgagaaaaaggttcctggttttggnaaagnggngagagggcaggagccttcggatacatcgcctcaccgctcgccaagggcctacttagccgtggctacactgttaaggccttcgtccgtgatcccagtgatccgaaaaagacacaacacttagtttcactagaaggtgcaaaggaaagacttcacttgttcaaagcagaccttttggaacaaggttctttcgactctgctattgatggttgccatggagttttccacactgcttctccattttntaatgatgccaaagacccacaggctgaacttattgatcctgcggtcaaggagacgcttaacgttttgaattcgtgcg

SEQ ID NO: 105962 - DNA, 357 bp, Arabidopsis thaliana columbia
  unsure (1)..(357): unsure at all n locations
tgacttatcgcttcncnngctgactgggaatctggttgagttgaagcttctcctccattagagttttctatggaagagacaatctctgtgctttgatgggacaggtctagggacggtttggggataagagagagacgacaaagagggcatgttgtgtgtgatgtgagccatagatcaatacattccatgtgaaaagtgtgcccacatgatggcatttgttggagtttctcttctgcttagtagtccccaagacacactgaacatctgtttttaagtactcatagtcaaaatcaggtgattcataatcatactttcttatgttttagctattcaaacaagaaaataacccaaaagcag

SEQ ID NO: 105963 - DNA, 143 bp, Arabidopsis thaliana columbia
  unsure (1)..(143): unsure at all n locations
aagacgcgncagaacnnccnccaactctcccctgataagcaacaangggnnaaaggnccgcggggtctacaccgaaancggcacagacgccacagancnncngnacaaagaccacaacagngaccagaaattcagnatcacca

SEQ ID NO: 105964 - DNA, 317 bp, Arabidopsis thaliana columbia
  unsure (1)..(317): unsure at all n locations
cgggccgacccacgcgnccgcacaaacacaancnaancccaaaaactcnttccgaaagccacaaagnnagnagaggggcggggganaggcgaanaggcgccaccctcaccgcaaggcaggncaaagatttgtccacggagaccaaattaggggcctctcttccaaaaactactaccaaaggcataggagctcagctttctgcaacaggcacaacttacagcaccagcagagtcgttagctaagctaaaggttttaacaatcccaaaggtccaggggccaaagcattcgaaagagccaacacatttaccagcggacaa

SEQ ID NO: 105965 - DNA, 182 bp, Arabidopsis thaliana columbia
  unsure (1)..(182): unsure at all n locations
gcgtccgctctgcgaggctccatccgnaaaaacgctccggtgccactcgcaaaggaacgnaaacgcaagcgcggcgctctacgagacaaacggaaaggctcacacacaaanggtgaacgacaacggagaaagagagttcgaccaagagatctccagcggacagttactagtcgagccacaag

SEQ ID NO: 105966 - DNA, 231 bp, Arabidopsis thaliana columbia
  unsure (1)..(231): unsure at all n locations
acaccatangatgcgtatactgcttctaccattacatccattatccaagaccaatatgcactagcatgtgctatcacaggaagctgaaactatgtaaatacaactctatcaggaaaactatgaaccaagaaatactctttatccgactctacattctctaggatcattaaggggccgcgcagaacatgcatacacactagatcaaagcaacccataccgtggaaaactata

SEQ ID NO: 105967 - DNA, 150 bp, Arabidopsis thaliana columbia
gcgacgcgaccgcgcgcgaacacgggctcgggaagaaaagcggcccaagcaggccccccggagaagaggaagaagggccggcagcacaaagaagaccacggcgggcacatgcacaccacggggagccaaggtctacaacaaggaaaagag

SEQ ID NO: 105968 - DNA, 269 bp, Arabidopsis thaliana columbia
  unsure (1)..(269): unsure at all n locations
gccaagaggagaccancngcagcgcctggcgtcccgataaccgcgacganccgncaggagcggacgagaacaagccacagcccccccacaccagcacgcgcaacagnnacaancnccccacccgncgcaccaaccgacccncagcccnccgcggaacaacccgncaaaacacaaagaagccgccacagaggaacgcaaacgcgaacgccacncnnnacgngacagacggggaagcccaaanccagaacgnaaacgacaacaggaacaga

SEQ ID NO: 105969 - DNA, 193 bp, Arabidopsis thaliana columbia
  unsure (1)..(193): unsure at all n locations
cacgcgnccgggcggcgggggaacccaggcacccagagccgtccccgggcgtagnaagcgacgaaacgcgaaagggagnagaaaagaagcgcacacccccccacccccgaagaggnnnaacccnngaacagcagcngaanccaagggcaggcaagagacaaccnggcgaacagaaacancnnagcagccagag

SEQ ID NO: 105970 - DNA, 317 bp, Arabidopsis thaliana columbia
  unsure (1)..(317): unsure at all n locations
ggcatgcgtccaaacccccaacgaatacagncgcacgctaatacaatcgaggattatgcaaggtaggtgatttcttgttttcatatatccataatgcatacataggagcaagaggttcttagggtagcttaatcttaagtgtgtatgatatgttatgtaggcaaagttcttgtggatgggagaagagttattaaagctggaatgcctgtatctactactgcagctataaagatcacagctgaagttccaaaatttgtatgtaggtgattattcctcgagttgccctatctttctacagtttctttatggtttaagac

SEQ ID NO: 105971 - DNA, 149 bp, Arabidopsis thaliana columbia
  unsure (1)..(149): unsure at all n locations
gcacagagcaaaaaaaggcaaacaagnagncctccgtctgcgcagcncncgcncncggcnnaggccggaccaacgcnngcaacgaccgcacccgcccagagnncgaagaagaagacgccacnaaccccanaggcccaaaaaggaggaaa

SEQ ID NO: 105972 - DNA, 286 bp, Arabidopsis thaliana columbia
  unsure (1)..(286): unsure at all n locations
ggagaacaaaaaaaacnaaacccatccctctttcncncnaggcnncnncgaggaagagtgctcggcagaaaaagccggccccccccgccccgcgggnnnagctaanaaaaaacnnncaatcttcctgaaatctttcaaaaccccgaaaagggacctcgtagctctaagctctctctctgtaggaggccgacccatctcaaatcaactcacaacgaagcttctgatctagataacggaacggacgatttgccgtcgtttacggaggttagttncgaccaactacgag

SEQ ID NO: 105973 - DNA, 183 bp, Arabidopsis thaliana columbia
  unsure (1)..(183): unsure at all n locations
cacaaacatacaatttaattccaaaagattgttgcattttaaagangaacgccacaaagaggggggggcttcacgngannagcgcccccgccgccancgncaccgcaaggcangncgaagaagcgncnaaagagaccaaannaggcaccncncnnccaaaaaggaccaccaaaggcannggag

SEQ ID NO: 105974 - DNA, 397 bp, Arabidopsis thaliana columbia
  unsure (1)..(397): unsure at all n locations
accaaagaacnggagcggggagatgtatangngtttcccacccgttcgatacattttcatgcgaatattggggagacaaatgccgttgtgatttctgcgggtgggagccaagaccccggtaggatcataataggtgatgcggttttcggatcaaaacctttgattgatcccaaggttttggctaaagcttttgcgttggactacaacaaagtgaaatatcttcaggcagtgttttcttgatgacatactagcttaagagaataatgataaaatatagttatgcgaaataatccaatgattatatagatatatatgtatgaagtaggacgtaaataacaaaaaatgtgtggaaaaatatatgtaagatgtcatgtgcttattaattaaaacaatttgt

SEQ ID NO: 105975 - DNA, 261 bp, Arabidopsis thaliana columbia
  unsure (1)..(261): unsure at all n locations
gacccgcgcttccggtaggcaacaacttggctgattgttgagancgncgaggcnnaaggcgggacgtttggcaannncnnaacaaccccacgccagnncgnaancacgncccnnnaccnnnaacgnacgnggaaaanangngncngcggcaccncacnngnaanaacacnnncnncncannaaaaaaagggaagnnncgaggcaaaaaaaaaaaaaaaaaaaacaaaacaaaaagaaagaaaaaaaaaaaaaaaggggcgg

SEQ ID NO: 105976 - DNA, 324 bp, Arabidopsis thaliana columbia
  unsure (1)..(324): unsure at all n locations
agaagccctagatnnngncaaaaggcgtggtcngatttttaaaccanggccggaangggacggagaactcaggaangggagccggcgccgacccgnaagaaacccgcnaacgccgcngccaagcgcgacgagaaaacngncaacgccgcncgncganccggcgccganancgagaccgncagaaaanncaaggcnggaaccaacaaggcggcancaagcggcacaacncngaacacaaaaangcnngangangacacngagaaccnnacncangaacgngngccnacngagcnaaagaaagccannangcaagccaggacagac

SEQ ID NO: 105977 - DNA, 307 bp, Arabidopsis thaliana columbia
  unsure (1)..(307): unsure at all n locations
ggaaaaaccgggccgacccacgcgnccgagaagagcgggancgacgnncaacgcctgggttgtttgtatgnngcaacaaanangacgaaggcgagaagagcaggcttctgacgcccaccaccagagggttacgcaaaggcagcactgcgttttggaggctatgaagcgcaatgcacaccgtactggcctcacgctctcatgggtgcagttgtctctgcatcgcccgaaagcgtttttgaatcatttaacatcaagagatgcctccagatccggaagaagggtctccaaaaagactccatgaagaaag

SEQ ID NO: 105978 - DNA, 367 bp, Arabidopsis thaliana columbia
  unsure (1)..(367): unsure at all n locations
agggaccacatccaccaacagcacccaagngngtgnggtttttaggcaagggaagacaangagcggggacgtaatccacangaaaaccacccccacaaacgcaaaaaaaccanacgnaccacaaggcacggggaacagcgaaagaangangcanacananaccaagaccnggaccaacccgcaggcaaagcaaggacaacaacaaggccgaccaaggcggggacgacagggacaacaaggccaaccaagggaaggccagcgacaacagggacgacaaggaagacaaggccaaccaagggaaggacaggcacaacagggacaacaaggacgacagggacaacanggccaaccacgggaaggacaggga

SEQ ID NO: 105979 - DNA, 254 bp, Arabidopsis thaliana columbia
  unsure (1)..(254): unsure at all n locations
cgaaaaaccctagcacagctccgagatgggtgggtttttatgggagacnccggcgaagccggcgggcgtaaaccaaacgccgcgcgcccaagcacgcgcnaaagnncagaacagagccaangnncnncagcnnaagcngangggncagagccacccnaccggcnnaacaaacaancncnngaagcnnnnngagccacgnccgccannggagnacaaaccaccaccagagaagagaaagggcccgccnnanacag

SEQ ID NO: 105980 - DNA, 272 bp, Arabidopsis thaliana columbia
  unsure (1)..(272): unsure at all n locations
cagncnccaaggagcccacannnacgagnnannngcaaaangagnnncncnccaacccaacagggaagaaagagcnacaggacanngngcnacaaaggaacangcgngganacaanggncnggangancnngcagnagcnngcaaggccanggaaggggnacaagnaannaanggccnngaaggcaagangncnngcncnnccaacaagannncgnangnnnnggacacagaggannncnnccacaggaagaagaaacagaagaagagcaac

SEQ ID NO: 105981 - DNA, 257 bp, Arabidopsis thaliana columbia
  unsure (1)..(257): unsure at all n locations
ccgaaacagagaggaggacagggaagagaagggggtagggagaaagggnnnaaagagaggnaagagggaggagggtaggatggagtcacgaacaccacaaggaaaagtggggtcagaagagttaataacgggagatgatgaagagaggaagaagacgaaggagaagaagagaagagagagcacgtggtctctgcctccgccacactccacaccttctccattggtntttttcgatcccttntggtaggaggcgccga

SEQ ID NO: 105982 - DNA, 272 bp, Arabidopsis thaliana columbia
  unsure (1)..(272): unsure at all n locations
gcagcaaacgccagagtgggattgtggcnnagcncnncacaagcaggcgcccagccaangcaggggcccccnacaacanccnccagccagcnannaaccaggncaacaagangcgngagagnaaaggnancgnngncggncnaggnancggcggcggncncgcagcgncagggcnnnggacnccaccnccggaggcnnangcngcggcagaagcggcggcggcnagnncagacagcagaggacagnngngggggangggggngacaccggca

SEQ ID NO: 105983 - DNA, 364 bp, Arabidopsis thaliana columbia
  unsure (1)..(364): unsure at all n locations
gccagactgcattccgacacnagagatttgttatttttgaaannaananaanagacggaaggaaggaagcataaacgaagaaatactgaaacgncaaacgannagaacataancnncagaanaaaggggacaanacagagagcaaaaagncnaaannnccaacaananatatggtatgtaaagagcggtgaaattctgacctgaggataattcatgcacccaaccatgaaattgccatcctgcaaagaaagggaatagaacgtttaacctgtggttcccattaacaatagggagaacagagaaaatatttgtcagacagaatatatgatacccggttctttctgagtgccatatctgattcatt

SEQ ID NO: 105984 - DNA, 363 bp, Arabidopsis thaliana columbia
aacccgaagcttccaacaaaccagctaacatttgcattatcaagaaatagtaaaagctatgaatgttaccccaataaccaactccaaacagagaagtaaacaatccagttcctatcattccaacagtcaagaagatcctaagattcatcctatcccccaaatgtccagcgaaatacattccgaaagcgtaaaccgcaagaaacgcaacatcgatctcaccgagcaaaaccgtaccatcaggaccattgaaaggagcccaaccaccttcttcttttacagaggaaccaaacgaagtaaatctcaaaagaagtgagtttagtcctgtatctggagattgaggatcaagagcacttttgacaatac

SEQ ID NO: 105985 - DNA, 429 bp, Arabidopsis thaliana columbia
  unsure (1)..(429): unsure at all n locations
ggaaaaaccgggccgacccacgcgncacgccgggggaaggctagacagancnngtttcttgtttttatcccaccgnnnaggnngagacgcacactttaaatggtattaaggtcacaccacctgnnccaagtggagcttccactggtatctatgaggctcttgagctgagggatggaggatctgactaccttggaaagggtgtatctaaggctgttggcaatgtgaacaacatcatcgggccagcacttattggaaaggacccaactcagcagactgctattgacaacttcatggtccatgaacttgacggaacccaaaacgagtgggggtggtgcaagcaaaagcttggagccaatgcgattcttgctgtgtctcttgctgtctgcaaagctggggctgttgtcagcggcatttctctatacaagcaca

SEQ ID NO: 105986 - DNA, 393 bp, Arabidopsis thaliana columbia
  unsure (1)..(393): unsure at all n locations
aaaaccgggccgacccacgcgnccgcgcgaggaagttngaacccggaggatttttctttttttttcgcacacacncgcaccagctgggggtgctccctcaacgccagcatgaacgaggcatcaaagtcctttatcctcagagtggcccttcttccactcaggtgctagccgtgtttgtcggtgtaccgataggaggaacgctgctgactatagccggtttgacattagccggttcggttataggactaatgctagcattcccgttgtttctcatctttagtccggttattgtaccagcagcctttgtcatcggtctagctatgactggattcctggcttcaggggccataggtctcaccggactatcatncatgtcgtgggtactcaactaca

SEQ ID NO: 105987 - DNA, 326 bp, Arabidopsis thaliana columbia
  unsure (1)..(326): unsure at all n locations
ggaaaagcgagccctggangcgccgaaacagggtagatttattagagnnccaaccacgcggcgaggggcaagggcaaagccagagggccccgcacacgcaccagaaagnggagcacaaaaggagcggnganaccanngccacaacacccggngnagcacagnggnncnacaacgacggacaggaaccacnngncancgncagcgncnncgancaagccagncaccagaaccagcnngaccgcaacccaaggccannnaacnnagccggaaacaacccacaaggncaagnanggcnacaaggccgagagcaacagccacagaagaac

SEQ ID NO: 105988 - DNA, 357 bp, Arabidopsis thaliana columbia
  unsure (1)..(357): unsure at all n locations
cgggccgacccacgcgnccgnggncaacgacaacggacagaacgngnngggggtggngtttttgaagggacagcncgaggggaggcgacaaggggncgcanaccgcgcccacccccacggaaacaagnncgagnggancncnnncaaaacnaangaaaacgcaangancagcacnnnnggcgggagaaccncgcncnngagggcanngccannggaggncanancaaanggnnnccagaacncncccgaggaagcnaggaagaacaagnncaacacacnngagaccacnnngacccgcgcccgccggaggcaacaacaacagnngancgaggagaaagncgaggcnnaaancaaaac

SEQ ID NO: 105989 - DNA, 244 bp, Arabidopsis thaliana columbia
  unsure (1)..(244): unsure at all n locations
aaaggcaancaaaganacaagaaanaaaagncgcaggngggggncncagncncagncncaacgngncgnaaaccccnnnncaannnnngncaaacancnnnacncnnnagngacnaaaacagacaaaaagnngacaccnnnanancnannnccgnngacccnccacncnaacgcccnccnncaancnnggccgnncacacaccgcacnacncagannagacngaannacancancacaacgcca

SEQ ID NO: 105990 - DNA, 275 bp, Arabidopsis thaliana columbia
  unsure (1)..(275): unsure at all n locations
gcccganngnacacggggacggaagggccacaaccacaaccacaccccaccgnanggacccaannnngggggnngagaggggaagagaaacanaagcaacncaagaaacncnnggagacnaaacaaggagccccncaagaacaacaanacagnncagggnggncnnggaggaanancgnaagaacgannnnggancnaacagaagaaaagaanaaagggncaggaacnncngaaggggaggacncgnacaacannnanganaagaaagaaaaacc

SEQ ID NO: 105991 - DNA, 219 bp, Arabidopsis thaliana columbia
  unsure (1)..(219): unsure at all n locations
ggnncattcattgaanggagaacanagataattgaatttgagnagngaangannnngcgcggggacttattggagaagaagcgcggcacccagggcaccgaaagcncggcagaggccgaccaaccaacncangcacgcagccaggccaacagaaangagaaaagnaaangagnangaaacngaanngncaccgccgaaaaaganngnagcgcacaaaca

SEQ ID NO: 105992 - DNA, 171 bp, Arabidopsis thaliana columbia
  unsure (1)..(171): unsure at all n locations
gcannnaaccagccaggcaaccanangcngcgacccgcannaaangcngggccacnngncgaagnaaaaagnacancaaanccanangaagnnnncccaagagcaganngnanccanngggcaaananaggnncgancaagannngnnnnncgggagnaccaaaagcaagc

SEQ ID NO: 105993 - DNA, 260 bp, Arabidopsis thaliana columbia
  unsure (1)..(260): unsure at all n locations
cggaaacaacccaaaataaaagtttttctacaaggccnanagcagcaggacagaagaacannngcaacggcccccgacccgagggganggcncaagcnnngaagaacgancnncagacagcgcagcaaccccagaaccaagaggacaaccgnggaaacannngccgagnccaaggcccgnncgggggcannaggccgccnnngaggggccagagaccncangaggaggaagaagaagaagaaggacgacanggacgacac

SEQ ID NO: 105994 - DNA, 161 bp, Arabidopsis thaliana columbia
  unsure (1)..(161): unsure at all n locations
gggagagcggcccacccaacncacccggaccccannagagccacnnnggcggagnnncnnnccacgnncgncnncgncnnngcgggagaaggcncaanccncgcncnagacaagnngnanggggacacggcggcncacacggggacaaacacgccnggagg

SEQ ID NO: 105995 - DNA, 247 bp, Arabidopsis thaliana columbia
  unsure (1)..(247): unsure at all n locations
cgcaagggngcttccacagaggaacgcaaataanaacttttagncnnnacgngacagacgggggggcccaaagggagancgggagacccaacggnaacagagngnnngacggacaagacncncaaggacagcgcanagccgnaccacaaggnnncnncggggngaaacgcgcaacaagcaaccgannccagagggnggagggcaaaacaaacgcnaacgcgcaaancaacacncnggcgggacgaac

SEQ ID NO: 105996 - DNA, 370 bp, Arabidopsis thaliana columbia
  unsure (1)..(370): unsure at all n locations
caactgaccataaacacaancnaancannttcnaaattttttaangccacaanaanagggcggctttttttgaggggngttttgtcttccatagacaccgcaaggcangtcaaagatttgtccacggagaccaaattaggggcctctcttccaaaaactactaccaaaggcattggagctcagctttctgcaactggcacaacttacagcaccagcagtgtcgttagctatgctaatggttttaacaatcccaaaggtccaggggccaattcattctaaagtgccaacacatttaccagcggacaagtcactgccaagggtcgcaaggcaagagtttcttctgaagtgcttttgccgctgaaggcgattc

SEQ ID NO: 105997 - DNA, 276 bp, Arabidopsis thaliana columbia
  unsure (1)..(276): unsure at all n locations
cacgcgnccggacagaaggggcagagaaaagagaannaaangaagaagtaanggagaaggcagnncaaaaagggccaaaaagggacccaaggcgccacgacagccaacgaagaccggaaccnncaaggnngacacggcagcnncagccgnacaaagcnncgcnccgannaaccaaanccaccaacancncngcgcgnnncaaaacaaagcanangacangacccgacaagnggaggcacaccaaaacngnggncacaacaacgaagacangcgcca

SEQ ID NO: 105998 - DNA, 409 bp, Arabidopsis thaliana columbia
  unsure (1)..(409): unsure at all n locations
ctgaacttgcaaaancaagagntttaataaatttcntacctaaacnaaaccatacgcaagagactatattaacatgcatttatcacaattcaataacatataacattcaatgatgtaatgctattacaattcatcttaccaaatcagagaaacaaatcatatatatgaaagttggtcaacgctctccatatgattgccacatcatcacacaagaaaatgacatatgtcattctacattatttaacaaaaagtttagcataactaattgagggaaaatgaaaagtcttctattgtgttaaattttccattaatatcacttttaactaccttttaaaactttaaaaatacaaatcatgctagtataaacctatttacaacttatcatatgcattttattttattttggcta

SEQ ID NO: 105999 - DNA, 331 bp, Arabidopsis thaliana columbia
  unsure (1)..(331): unsure at all n locations
cacatagcaataaanggcaaacacggagaattaatttttgcagcncccgcncncngcggcggcctcaccaacgcanccatctaccgcaccgccgnngagnncgaagaagaagacgccacnaaccccacaggcccaaaaacgaggaaaggccgcaaggaganacagaaagaacaacaccaaagagcnggccagcaanggaagcnccagcaagcaaggcaaggaccgagcgangagacagaanncgaagacgacanggagaacccacagggacaacagcaggaacaacagcnanngcagcagggcngcaacgagcancgccaggaagagccag

SEQ ID NO: 106000 - DNA, 317 bp, Arabidopsis thaliana columbia
  unsure (1)..(317): unsure at all n locations
ccgggcggaccaacgcgnccgggaagaaaaaggggccgagncacaaaaaataattctttcccnnggacacncnaaagcggcgggaatggcaacacngccgaacagccgcccaacgagngccagcncgancaacacaaggcgcacgaaccancccaaaacaacaagagcgagggnggacgcaccgagggcngggaccaccangcaccccagcnccgaagcaacggcnnagcccaggagcgnnncgacanagagccacagggncanaaccggcccacanncnagaacgccggcaaacacacgnngggggcacacggaag

SEQ ID NO: 106001 - DNA, 300 bp, Arabidopsis thaliana columbia
  unsure (1)..(300): unsure at all n locations
ccccgcacaaaaagaggcnacggangngaggaaagcnaaagcaacagaaacggcgangggaagaacagcncnganncacnggcnncgcncccaancccgacgncncncnnccnccaccnncacnncagganancancaccggncaanagcaggancanggncancancagngaacccgaagggcagaaaccaggnnccancccnaagccagagaagcngggcancaaaaggagcaaagacnagagaggacgangangagcacaagancagcancggaccccaagagaagaaagaagaaga

SEQ ID NO: 106002 - DNA, 419 bp, Arabidopsis thaliana columbia
  unsure (1)..(419): unsure at all n locations
cagnagaaaagaagnagccnnatttttggacacgcaggagaccacccaaaaagttggnctaatttctctatacctgtgtcctcagctaccaactcaatctgatttcttaaacatgtcaaccgatcgatggttgtcttgggagaaacacctttgagttggcgctgaagatcagactgaacaggaacacggaactgtagaacaaacactacagattcttgaatgatcctcttcttgttcttccttcccacaacagcaatagtagattgagcacaccccatgctctctatctctctctctctctctctgctatgatcttatgctcacaaaatcatcctacacaacattgacatatatatatgtcaaaataaggatgttatggaacaacctgaagcagatagatccggataattctgaagctc

SEQ ID NO: 106003 - DNA, 357 bp, Arabidopsis thaliana columbia
gctttgagcatcatccaactgactgagagatgcttgaagactcacatatagtcatagtcttggaagtgctttcagcgacattctgttgtgcaaaacctgctcgcgcatcgataggcagtacatccaagcaaaggatgatggttattaatacatccgaatgttattttatgatgtcctcttttatattagaaatttagaatcattaacgctaatatgaacgtgatctttattattttattagacataacttacatataaacataaaatattcttacatacttgactttgaaatacaacaagcacaactaacatagtaaaacgtctttgatcttaacaagtcaccgaacttggatatgt

SEQ ID NO: 106004 - DNA, 367 bp, Arabidopsis thaliana columbia
  unsure (1)..(367): unsure at all n locations
acagaacgagngnaaccncgacaaccaagangnacnccaagccaccgaaacaaacaagagggaagccggncagaacgagnacggggaccacaaccacccncagcnccgangngnnnggagancacgagcacgacacgaaacagaacaaggcggacanaacnggcccaccaacaacacnnccccaaaaaannccaacgacgaacaaggaacgggnaacagcggaagagaggaccccggaagggccgagaccancaaggacacgcagccgaggcaaggacaacaacaaggccaaccanggcaaggacgacagggacaacaaggccaaccaagggaaggacagggacaacagggacaacaaggaagacaa

SEQ ID NO: 106005 - DNA, 246 bp, Arabidopsis thaliana columbia
  unsure (1)..(246): unsure at all n locations
agaaccaagangacaaccgnggaaacaaagnccgagnccaaggcccgnncggngncannaggccgccnnngaggggccagagaccncaggaggaggaagaagaagaagaaggacgacanggacgacacgngaanggcnnagaggagaccancngcagcgccaggnngcaccgaaaccncgangacccgncncgngccgacgngnacaagccacagcncggnnacancagcacncncaacagnnacg

SEQ ID NO: 106006 - DNA, 400 bp, Arabidopsis thaliana columbia
  unsure (1)..(400): unsure at all n locations
ctcttcgagtcgctgncgcnggngctgaagtaatatttcgtgccnccnncnncgnnnncttgcgcaagtcgccgagatttccctgacggatcaacgacggcgtctcctggacgccattccaggggtagtttcgtaaaatcatctgttcctgttgcttcttcgctgcctggtattgggatggattctatggctgctgctaaatctagtagtgttcctgctagtggtttaaccactgtctccgtcgttaccatgcctcctggactttctgagaaggctagtggaatggaggtgcagagtgaccagaagaagccattgaaagagaaaaccactaaagctgagagacgagctattcaagaagctcaaagagctgctaaagctgctgcaaaagctgatggtggga

SEQ ID NO: 106007 - DNA, 475 bp, Arabidopsis thaliana columbia
  unsure (1)..(475): unsure at all n locations
cgggccgacccacgcgnccgnnacaaagatngcaanngatgagnnggttttttaatttttatcaacaangaganngagagggggagaatatggggcngggcttcctcaaaatttataggaagtctaagattcaactttggggggttgaatattctttagttaagagtttctaatctattcttgcacacatgtcattggaagatattaatttacctttcaatcttttttttatcttgttcatctttttctaatatgtacacgtatatttttggtttttaattactagtatcttagacatactgttgggataaaatttccaactgtgcaaaaggataatgtcatctataattttctaataacaaaattttacatattcgaaaaacttatttgaatttctattgattgttcattctgaatcacatnatattatttggtatattaatagagaaatctgaagtttattcaaacaaccact

SEQ ID NO: 106008 - DNA, 265 bp, Arabidopsis thaliana columbia
  unsure (1)..(265): unsure at all n locations
agcanntaccgaacgagtgccagcgcgaccagctcaatgcgctcgagccagcacacgaactgaagagcgaggcaggacgcaacgaggagagggaccaccacgcccctcagcaccgtggcccaggcgaaacccaagcacgagacatcagcgagtacaaggggcgccacgagcccgcggacgaaaacaccgcaaaacacaccatcagggcaaaaggacgaggtccacaaagaaaaagagaaccctggaggcgccgaaacataccaag

SEQ ID NO: 106009 - DNA, 269 bp, Arabidopsis thaliana columbia
  unsure (1)..(269): unsure at all n locations
gcaaaaggcagcccgaccggncaannngaagaangncgcaancaaccgnagangngccgccaaagggngggnnnagcnncgancngngnaagagaaanganangcnnacacaaaagggncnnaaagcnccgncannnnggaagaccggaaccaccanngnnggnnngannnncaagganggngnganacnaggggcgganacccgagcaacngaggggccaanngnngcnganaagaaccgngagaaganncacnananggcaccaaac

SEQ ID NO: 106010 - DNA, 149 bp, Arabidopsis thaliana columbia
  unsure (1)..(149): unsure at all n locations
aggcannggggcgcggagngcacgaggacggaggcggccccagcacangngaganngcnaagggacaangaggcngaagnngcgaaagcagcagcgggaaaagggaccaagnncngncggcnnnggaanccagagcnngcganncagca

SEQ ID NO: 106011 - DNA, 139 bp, Arabidopsis thaliana columbia
  unsure (1)..(139): unsure at all n locations
aaacaaaccgaggaggggttctgcaggagcnagaagccccccggagaaaacccnncagaannnggangaaacaagnagcncacaagcgagagaggacgcanngagagcncncnacaaccncncaancaaacaaccaaac

SEQ ID NO: 106012 - DNA, 201 bp, Arabidopsis thaliana columbia
  unsure (1)..(201): unsure at all n locations
caccanggaagcncncnncacnncaacacacacacccaannnacagacnaagccncnccncaaancnccgcngcccacnncnncccagncnncgngnnggnnnnngaanncgcnacccaaaacgcaanncccgaagcngagacccagnaanggancaagncacgggcnncgnanacaagcncncnnacgnaacgagacgcc

SEQ ID NO: 106013 - DNA, 265 bp, Arabidopsis thaliana columbia
cccaacaaaccacagaccggacaaccgaatgagacctgacggtggcaaacacacaaaggaaccacagctccaattcagggcagcgaccaccacgcaccacagatccgatccgccggaacaacgtatgcacactccggcgccggaacacacgctaaattcggggacaccgaagcgcacagacacagaatgagagaaaccacacaccgaacaggtatcgagggaggaagaaatggcacatacaacgagcccaccaacgggggaccag

SEQ ID NO: 106014 - DNA, 281 bp, Arabidopsis thaliana columbia
  unsure (1)..(281): unsure at all n locations
cggaanaaccgggccgaccgacgcgnccggnnggctcagcagcttcagaaccaacaagacaataaagttttacancgnnncgngnnaagggacgcgggccaggtcgagaggccacctctaacacagcccnacgagagcgaggagnggagacacccacgnagcccacagggcaacggccnngaggagactancngcagcangaggncccacgagaacanngacgacccngcncgngccgacgngnacaagcccagccnaggncgcgngaccagcgncaacag

SEQ ID NO: 106015 - DNA, 486 bp, Arabidopsis thaliana columbia
  unsure (1)..(486): unsure at all n locations
gaaanaccgggccgagccacgcgtacgnggaaacctgttaaggcgganaaancaagntannctttttaggcanaancaacccaaaggtggacatttttgagacatatgggcgtccttttaacccnggagaaatcggaactttggagcagtgaataacagaaacggtagtatgcaaaataccaaaaccaaactcttgggaaactggtagacataagagatctaaggtcaccggattcatgatttcaaccttatcatgataaattcgtatggatcgtttctataagagatccaagtgattgtcgatgaatctcttgtcgttgaagagagcgtaccattgtatgcatgtcgctttgaatcgtatcaaagagtcgatcggngtccttgtaagaatgtcttctactatacatcaaacttattcaaaaggcagcgactatttggttcattaaggatttaatgtaatcggctattacataagtcggttctata

SEQ ID NO: 106016 - DNA, 407 bp, Arabidopsis thaliana columbia
ctagattttttcttgctgacaagagaactcaaccatacaacattttcagtggatcccatttatctcaaagaaaaaatgatgaactaaggtctttgttttttgtggtcactaaagtgtagtgtggggttagccaaagggcaagtaaaatacagtccaaatacacaaacaccactcaccactgaatttacacattatttttcctttcttgttccgtacaggttttcgtatcaacaaaaaatataaattatcctaaaataattaatcgtagaacaacaaaggattgcaaacgattaccacataaatagtactgcgccgaacactttgtgttcatagatcaatactatgtatcttttgttttctattttttaaataatttttttttttatttttaattattttttatattt

SEQ ID NO: 106017 - DNA, 431 bp, Arabidopsis thaliana columbia
gaatcacactgagaaaaaatctatttcctttgactgtgaacagtttctttttaagtttgtcttgttgccttggtttggtggtagtggtagtggtttcaaatggagtctctttgaagccaatgtctctgtatagtttagtttgttagggttttgtttttgtacacttgcttaagctttgtacttctagtgagtttgttgtatatgcttgcttatgttaatcttataacaccgatttgtgtttcttgcttctttctcacacacagagtttatcttcaaaggacccaaaagagagtgttttagaactctaatctcaagcaatgcatactccaaaacctatgcctggatcgttggaagtgcctcagaagaaatctcctgcatcaacttctaaaactgcctggtagctcaagactttaaattcccaccctgtttcg

SEQ ID NO: 106018 - DNA, 407 bp, Arabidopsis thaliana columbia
cttctcttacatctctatcttcttaagttctttcctttgttcttcgatttgatcaccaactctcacatatttcgaaatcgtcacactttgttgcgtgtcgtcttctctctctcataattcttgagtttcacgtctcaagatttgatcacttctgccaattttccagattgatctctctaattatggcttccatgagtttcgccttgaatcgcttctctggactctcctctaaaaccaccttatcagctgacttcaatccatcctctcgccggagttttctaccgccgactagagttggacttaagatctcttccgccgccgaatcggagcctgatctcagtgtcactgtaaatggcctgaaaatgcccatacctttcgtgatcgggtcgggtccaccgggtaccaac

SEQ ID NO: 106019 - DNA, 377 bp, Arabidopsis thaliana columbia
ctattatccatagaacaatatatattttttactatcaaaacaaccacccacagacatgacattcaaaatgtataatttcctttttatatagaagcaaaatattattttttttgtcaaacagaagcataatattctttaaatgtattttcaactctacaaaaatatttttacaaaaatatcaccggaatagaaattaaaaacaaagattctttaatcaatatcgggctatattaatcatttttataattggattaatattttcttaattgttagcactatcagatgagttctaactgttttttgcatgaaagactcggttcatgtgcagatcacgctttgcttattttgtaattcacttcactgattttgtgaaaaat

SEQ ID NO: 106020 - DNA, 394 bp, Arabidopsis thaliana columbia
gttgtttttggcaatcaccgaggttataacttattacttggctatttttttatgtgtcttgaaatgggaaaaactatagttacattgttacagaggcaacctcaattacataaagtaggtgagaggtagatcaaaggctacaaagaagagcattaatattgagtcattgggtagttgtggagtgttgagtagtaaatgtaacaaatattgtaaaatatctccttggaatgaggatcggagaatggttggtcatttggtctaagtaagaaattctgatcgcgtgataaagtaataagaatcgttgttagttttttttacaaggacacattaaactttagttaagcatttttgtataaccactacatttctttactaaagatatttacattcttat

SEQ ID NO: 106021 - DNA, 415 bp, Arabidopsis thaliana columbia
gacgtcggagcgtgaagggcactctcatgaaaagcgcgttagagaagaattaacgtcaagacccgagacgcaacttcactcggtcgtggctaattctccgattaggttttcgattctcttcgtcttcgtctctgaagcgaccaaaaaccctaattctatcaattcgaaatcttcaatttcacatgggtgaacattcaccttctcaaccatcatctcatactcttcctccaaaccaaccggaatcacccaatcacgaaacccctaatccaattccaccggaaaccaacgatgacgactccgcctcatccgcctcatccgccggagtttctggctcaatcgtctcatcaaccaccattgaagcaccacaagtcactgaattaggcaatgtatcgtctccacctttcaagatccctct

SEQ ID NO: 106022 - DNA, 373 bp, Arabidopsis thaliana columbia
gttgaacatactcccttggaaggtgttgttgttgataagaaagaagagaaacccccaacggcgttgagttctgagctagttaaaaaagtggaagaagatgtacccgtttcttctgggatttcaaggggtatggatgctgtaagcattgatagacctataactgaaatggtcaataatattgcgtttaatcatatggaccaaaaagatataaagaagattaagcaggattttgatacttctgtgggagctgttaaggatgcctcatccggtttggactcatctgtaacttaaggtaaagatgaacctggggaggggaattctgaaaatattgtaatcatggtacggttctcatgattaagagcttcttcaggat

SEQ ID NO: 106023 - DNA, 437 bp, Arabidopsis thaliana columbia
taaatattctcaccaatctttacttcaataaaaatatatttatttaataacactaggaagaaactcgactgttacatcaaggtgaaaaagaagaacaatggaaaccaaacaagagtaaatcaaatcttaattaaccaaccaaaaacggaagtagcatatgcttgactagttgatacagacgtttagtgatgatggtgtctgaaagagtctaaccaccttgtgagacattctaaaggtgacaactttagaacattgagtattggtccgaccacgacttggagcttaatcccacctggctttgagctaatgaataatggattcatggtttggtgagcttgatgagatcgtggcgtgtcttgtgcacggctattggagaattcgggtcacagtattagaattcaaggtcaccgctgatctagtagacataattgaattca

SEQ ID NO: 106024 - DNA, 432 bp, Arabidopsis thaliana columbia
tctcatcttgttctgcacagaaacatgttctgatcatcagaattataacatgagcttacgctgtccaagtccgcgtaagaagtcaacaagaccagctctgcctgcatatttaccaaacgccaataatcgtttgccatgatccccaacaatgagctcataatcacacaaagtcactctctcagaaagaatctgcgattggataccccttttggcaacattcctcaggatcttagataggacaaaaaggataaatgaaaagtgtaatactttatccaacaaaggcatgtactctttctgtgccttatgagtttgcgaaatgaaagcgtatgctctttctggaagaatcatttttagctggaaacagaatcaaatctcataaactggtatttatatagtaataaaaaaggaactcttttaatgcaaattcccaca

SEQ ID NO: 106025 - DNA, 433 bp, Arabidopsis thaliana columbia
gttaattagcggcatattctctttattactcatggtttcaaaaataagattccttaataaatatgctgctatatcattacatcgaaaattcctagctctcaccatctttaacttattatatattttttttttgttgggatcgatctaccctaacgttaaaacatctattccaacaaaactgcgtgcagtttttattcatgggatggcaaaatttgatattaacggacacaaatgctcaaggagcaatgaaaagactaattggtaattaaaaataaaataaaaactaataagtaaattagagtgatacaaaacagcaaaaatgagagaaaagagttaaacaatatgcgtagaattgagcgtcggttcatggtgccaagtggcatgggaacatacgggacaacacattcggtctgcgtcgatatgagttgataga

SEQ ID NO: 106026 - DNA, 439 bp, Arabidopsis thaliana columbia
cagaaaccaaagaaatagccaacttttcactttcgatcatttccaaaactatcatcggattttatagtttcaagcaaaacaaacaaccctcctacgctttgcttttaattattttcttctttgcttccatcatattcatgctctctctcacagaccacaaataattttacacgtttatcgattaactaattatataagggtcttttatataaactcctaaattatgatctaagatattgtgattgattggttctgttttttttgtaagacctcatccaaaatagctcatgttcggctggtcgaagatagatatgcaggtcgccaaaaacaaaacaaaaataataagttttgatcctatcggtttggtccaaaatgatcatttcggctcatcaatatcctataatatcatcaaatgtccattcgtattaagcctgaatta

SEQ ID NO: 106027 - DNA, 424 bp, Arabidopsis thaliana columbia
aatggatccaagattcatcaacaccattccttccttgaggttcttatctccaattcatgtatcattaatgcaacacattcacacacacacacacataaatattctgtatatagagttaatgcttcttaatttgatttagttatttaaatatagatcgatatatatccatgcagctgtttatgtaacaatatatgcatgtatgtcgcgatgcaggtatgatgatgataagtgtgatgatgaatatgcgtttgtgaaagctctatgtatgagtggtggagatggagccaacagtttctccgccaattctcgccttcaggttcttcaatatcttcgcttacttttagggtttaagcagaaacaaattattaatgttcaaatttttctctggtgatacaaacatttttacaatcatttaattatgata

SEQ ID NO: 106028 - DNA, 222 bp, Arabidopsis thaliana columbia
cggacgcgtgggtggcgatgctgtatttaccggaagccggtttacggagcccaactgcgcgctaacctagaacccacatagggtgttggtcgattaatactgctagtcggtggtcatggaatgttttatcctttatagtgtttgtaatatcttagtatccttatttatctttttcttgttaattgtttggtcttttatctcatagtttatttttatatttct

SEQ ID NO: 106029 - DNA, 438 bp, Arabidopsis thaliana columbia
gtaaccaacaagcccaagattcttgatatcgatgagtctgataaggataaccatttggctgcggtggagtacgttgaggatatgtactctttctacaaagaggttgagaaggagagccagccgaagatgtatatgcacattcagacggagatgaacgagaagatgagagccatcttggtggattggttgttggaagttcacgtcaagtttgagcttaacttggagacgctttacctcactgtcaacatcattgatcggttcctttcggtgaaagctgttcctaaacgtgagttgcagcttgtgggaatcagagctttgcttattgcttccaagtacgaagagatctggccgcctcaagtgaatgatttggtgtatgtgacggataacgcttacaacagcaagcagattctggtgatggagaagactatccttgggaac

SEQ ID NO: 106030 - DNA, 202 bp, Arabidopsis thaliana columbia
ccgtcgattccgtcgccacgcgtcggaccgcacgatccattccacttgtttttagcttcttcttaatccgctctgtcctctcattagattctgttcctcttcaatttttctgcatgctctcgattcttctgacgcctcttttttcccgacgctgtttcgtcaaacgcttttcgaaatggcgattttggatttctgctgggcg

SEQ ID NO: 106031 - DNA, 330 bp, Arabidopsis thaliana columbia
agaacgcagagccggtattaggattgagttggagaaaattgaaatgcagggagatgacctttatttgccaactgctcctaacaagcttgttaggggtatccgcgtagacagaggaatacccttacaatcagctgccaaagcccctatcatgataacttttaacgttattgatcgcgatggtgaccacagtgatgttaaaccacaggcttgcattttcaaggttggagatgattgccggcaagatgttcttgcccttcaagtgatatcttttcttagagacatatttcaagcagctggtcttaacctttatctttttacatatggagtact

SEQ ID NO: 106032 - DNA, 342 bp, Arabidopsis thaliana columbia
aaaagatccattttttaggcaaaattgttttaattgttacgtcatttaaatcaatagccgcaaaagcccacaatttcaaaaaataataatattaaaatgtaatatagaaagaagggttcgaaaaattattctttccatattatatttcttcctagtagttctaatactcgagcagattgtttagctaaaaaagctcgggttcaaaatagcatttttccatgtaaacatatcggttcttgaatggctttctttagcacaaagtattttcccgataacttaatataaataataattgtggaaaaaaaataataataatattaaaatgtttttttccagcacatc

SEQ ID NO: 106033 - DNA, 399 bp, Arabidopsis thaliana columbia
gcagacagtcccgttgcccaacctgcaagtaataagaagaaataagccagactactaaatgttgtaatcgagcatgtttcatacatgaatgacatcagcaacctgtcccatccaataagtttgtttacatgactagaatggaacctctagaagacaaagacgcccactttctacaatgattctataaaattctcctatcctactctattaaaaattggttagggcaccctaggctatactccatgtcaagataccaaaatattttatctataccaccaacgcctgaaacaaaaaagaggtgtagtttctgaagaatatataaatcattttagggaacctcaaaagagttttgtcagatttcaagagtgtaaagagaaggagactgaaagatcgaacttg

SEQ ID NO: 106034 - DNA, 261 bp, Arabidopsis thaliana columbia
gacaaagatgaaagattcgggaaagcaagaattacatggtatgaactaatatggatcgctgttatctaataagcaatacggatatctacctaactgaaaactacaatcaagagggggtccactgtgacactagatgtggattaatgtgtaagagcgtcaaggtgaatgagagagaacaacagctacaatcttggaaaaagagatgctcaaacaggctcgggctggccattgatccgagtactaggaatactacggcatgag

SEQ ID NO: 106035 - DNA, 432 bp, Arabidopsis thaliana columbia
cgcgaatcatccgtgatgttggtgtctagggttttatcaagagtttctcgcagcgcaggcttacgctcgtctctctcctccgtcgttactccgaagaggaatcagattccgattgttgcaagccgatttcactccctcgttcacggaacccccaacaagcttgttgcagttccagtgtcgctcctaaaccatggaactctagatttgaatgttcttcaaaggttcggctttttttcctcttcctcagctgaaccgaagggaaatgagagtaacaccgaagtaccaaagatcggcgaaacttctgagaatgtggaggtggggaaagctacagatgcagagattgacttcgacgatttgtcaagagacgatttagtgaagcttgtgagtgagaaggaagatcttttgagggtcagcagaaagacataatggaaa

SEQ ID NO: 106036 - DNA, 416 bp, Arabidopsis thaliana columbia
cgactatgatacgactattggacgactattttacgacgactttacgacgacattttgtttccaaataagaatttggtcttatcttgattttttgttggttggtcatcgattatgagaattcggtttgtttgttgtttgaaatgctataaagtataacaaaaagacaattattattgaaaatcctatcaaatacataaaacacaacttacacttatgttcaaagttctaaaacacacacacacatacattattgttcaaagttcaagggaaaagggactgaaatctaaacctattgatcattctgtgaagtagctggtagaggctctgtggttgtcgaagattgagaggccatgaagtcaaggaattgcggatctgtttgtcggagatacttctccactaaggacaagtgttcgagc

SEQ ID NO: 106037 - DNA, 431 bp, Arabidopsis thaliana columbia
gaccattggaaccggagtttggagaatcagtagacattgtggagtgggtgagaaggaagataagagacaacatatcactagaagaagcattagatcctaacgtaggaaactgcagatatgtgcaagaagagatgcttttagttctacagattgctcttctctgcactacaaagctcccgaaagacagaccttcgatgagagatgtgatatcgatgctcggagaggctaaaccgaggaggaaaagtaatagtaatgaagagaacactagtcgtagcttggccgagaaacattcatcggtttttagtacttcacctgtaaatggccttctttagtatgagatttaagaatcaaaagaggccgataaactgattcgttcgattcgtgttctgtatgtagaagaaagagagaaagagagaaagagagagagatat

SEQ ID NO: 106038 - DNA, 403 bp, Arabidopsis thaliana columbia
  unsure (1)..(403): unsure at all n locations
cgtccgattcggtcgcccacgcgtcggcggctttacttgcccaccttttacttcccaaaaatttcctacgtcgtcaggaacggtatcacggaagagggtcctggatgtgccagaccttatggactccagccgatgcaggcaacaacaaggccaaccatggaggacgacgggacaacaggccaaccatgggaaggacgggacaacgggacaacaggagacaggcaaccatggaaggacgggacaacagggcaacaggacgacagggcaacaggccaaccatgggaaggacagggcagcgggcaacagggttcgtgacatgcaccaaaggggaacatgggaccggagacgtctttgcaacctccagctctgccatggactacaactagagacagncattgcatat

SEQ ID NO: 106039 - DNA, 429 bp, Arabidopsis thaliana columbia
cttttgtcaaggaaaacggaagagtaagctgtgttgggagagatagaagaagggttagtgagtaaaccggaaccgtaccggaaacctggttcgttggtcattgagtgatcggactggtaatgagtggagttaaagagaaaagggtaagtgttgttgtggtcgggagagaagaaagaggaattagggttacaaaactcaggaagcttctccatctgatgcatcatcatgttcattatgtcagaatccatagagaaagatatggagaagctgataaaatgggtatggagagaaactggtgaaaagcttacaagtgaaattttagggttttttcttttggatgattgatgattgatgatgagagaaagagacggtatgtgcgagagaaatggcaatggtactactgtgcccaatcagaactcaagcaatagt

SEQ ID NO: 106040 - DNA, 428 bp, Arabidopsis thaliana columbia
ggaacatcaagcatctcctgcaaattttcaagttactaggcattataagtcttaatgtttcagtctgtagaagtgcatatgcctaaaagatcaaagaaaaagacatacctttactacggtccagttcccataagcaccaggagaccaaggatttgggctaaaaagtcgccgaggaattccttttggaacatctcctgctggaatgtaggagacaccggtccacacgagcaccatgagtggtacaccatagtcagctattaagcttctgagccagcctgtgcaatcgaagcaaattgagtcactaggctttttcaagaatccgtgaatgcgtaaatgattggcctgaatccccttgataagaagaatccagctcatgagataaagatgttgtttcacttaccagttccgtaccgccatgatctggcttt

SEQ ID NO: 106041 - DNA, 401 bp, Arabidopsis thaliana columbia
gaaatctaattgttccaattgggttgcgggcaggaatcatagcatcaagctttatactacagtcaggtggattcctcacttacaacccaagttccccggtttggattgcagggagccgcccatcacagccttttagtggagttgttggtcttatggtctctttggcgttggcacttattctttatccgaaacgttctccagaaaccaagatgcagaaatataattaagaagaagaaggcaaacagtaagaaatgacatgttgtgctcatgccctttctatgatttgcagagggaaaactgatttactatgcacagaagaataaaaaaagaataggtgaaagtatagaaaatgaggacagaagaagagcttcggatctgcatgcttgtaagtaggacgcata

SEQ ID NO: 106042 - DNA, 433 bp, Arabidopsis thaliana columbia
ctttttcttgcaactaattgaaagtggtcttacacaatagaaaagtttcccatacatgctctatccaatataaaatgggacctagatctctagtaacctgagaaaacaaatcacaataatatgagaaaacaaataataatcacaatcgctctttactagaggtctgtttacacttacttagacactatttcgatttctcaattagacaaatagctattcagaaaatcgtttttattcatgttcaggttataacagaacactcgatctagtgtaaataactcaactctagattgcataaatgttcatcacatggatgagcactcgatctagttgattttttttcagaatttgcctttcaaaaatcacttgttataacttatgtggtctcctgggatgtttttgtatgcttacgtttgtgaaaattgtcccaagt

SEQ ID NO: 106043 - DNA, 314 bp, Arabidopsis thaliana columbia
gtaccgattcggagttccggcccaggcgtacgcaaccatggaaaggacagggacaacagggacaacaaggacgacagggacaacatggccaaccatgggaaggacagggacagcagggacaacaagggttccgtgacatgcaccagaaggtggaacatgtgagacgcggagacgtcttgccacactcaggcttgccatgatctcactcaggacagcattgatatgttttgaatgcatacaacatacgaactaggtattgcgacacaagagttggtaaacaaacaacttgggtaccagtatagtaatatatgtaa

SEQ ID NO: 106044 - DNA, 214 bp, Arabidopsis thaliana columbia
cttaataaggcaagagaaaacaaacattcagaacagcaaaatcttacttgtttaggatcagaaagactccacaaagaacaaatgtcacagccacaaggatccacccactcacgacgaatctatcattatatacatccccatcagtcagctttcaatttattttaaaccactgtaaattaacgaaaatgaagaagttggggattataaggcttac

SEQ ID NO: 106045 - DNA, 273 bp, Arabidopsis thaliana columbia
  unsure (1)..(273): unsure at all n locations
cggacgcgtgggcaaacggctacgtatagaggacaaaaaaactaaaactaaaaagctttgcaagatctttgaattgtttcatcagccttggttggtgtttttgaaaatcttcatttgtccctttttgtccgaccattgagatacaaaaatgcgtttatattgtagtaatattttcttttcttttttttgttaataggcgtnatattgttaactgcgagagacatcatatagattttcttgttctgaacatttttaagtttgcaactgtattat

SEQ ID NO: 106046 - DNA, 482 bp, Arabidopsis thaliana columbia
cggacgcgtgggcaaaataaagttacgtcaaatcagtgtctatacattaaaaataaaatcaaaataaaactaggattaccaagtttttagtcgcgggtcttctatcatgtaagatattattcacctgacagttgacacgtttattttgtttctaactttttaagttttactgttccatctttcgtttcaataatttttttgcatatttcttttgcgaaaaaacgatagaactcatagagggtggagaataggatgtcgttttgcgctctaatatttaaattttcttgctagcttggttctttccacttaaaagcattatacactttttctaattaggattttacaaaaagaaatgacaacacaatatatcattgtcccatttctcgcaatatacaacatcctattttgtatgtttttgtccttctcattttggtaattactcgtttgttcttttcttttaagatgacgccatcaaattacta

SEQ ID NO: 106047 - DNA, 541 bp, Arabidopsis thaliana columbia
  unsure (1)..(541): unsure at all n locations
aaataacatactctcttttgtttacttataaacgatatgaaagaaataaataaaaagaacatagaatcttattatgatctagaagaattaattaaagaaatatatatatattttttttcatttctactcatgtttcttatacattctttaaatttgttcaccattttgatttacttgttctcatattagtttgttatacaactcacttagaataatgtagattacatttcagccaaattcatgtaaaagatgcttttctttgtgatgtttttaaaatgctttcttttcactttttttctttcttaactataaatcttgatgcaatgcctaccttcttagaacataagatcttctttaaaatccaaaatcgtaggccactatttcattatacttatgtaatatatgtgatacagatacatctatatacaaattaaacacgaaaccatacatgcacggtgtgatcacacacgcacacacatagaaacataaacacgccataatttctatacagtttaatttcatntttaacttacttcttttt

SEQ ID NO: 106048 - DNA, 288 bp, Arabidopsis thaliana columbia
tatacgtcctcaccgtaactgataccgcctgcggccataacatgactgaaatccgtctgtgacacgccggagtattgctcattcaacaactaccttggtcaaacaaaacatggcgacgaaatgaacagccgcactacaacaccgacctgtctaacgtggcgcaagactttctgacggaaaacaccacttccgcgcaaaaagcttagctctgtactctgctctacaccttaaactcatagtttaagacaacctacaccgcttaccaacaccgaaccttggaactagatt

SEQ ID NO: 106049 - DNA, 516 bp, Arabidopsis thaliana columbia
cccttcgctatgtttttctatgaaggcgaccaggacaaggctcttgggaagaggataaagagtgctttgatttgggtggttactacagctgttgtttgtgctctggttcttggaattttatacggagtcattgggaaggtggacttctctgtaaggcacttgtcttctgccacgactactttccctacttcatggcagttttcaaataatcaaccttgcattggtaacactgctcgtcagtgctcagcatatacagctaatgctgcgtctgaaaagacatggtccatgcgtactacgtttccagaatatgttgttgctcttgctacaatcgttgggtcagtgctcttcacgatatttggtggtgttggtattgcttgcctacccttgggccttatcactgcattcatcaggcgaccaaaggctgttatcactcggtcacagtatataaaggaagcaactgaactaggtaaaaaggcaagagatctaaagaaagcagctgatgcacttcaccaggaa

SEQ ID NO: 106050 - DNA, 488 bp, Arabidopsis thaliana columbia
attttattgaataatatcacataccatatgaaaaattagacctctatataacaaaataacatgttacattaagaaatcaagtttctcgtaagttttaatatgataatatatccaatggttgccactttcttgactacaatattccattgtgccattcggtaaattttactctaataacttaattaccttaattttaacaaaaattgatgttagatacacatataatggcaattttttctttttattcttaatatgatgtttaactaaatcctaaatggtattttgattagaatgacggtgatatatcaaacacttacatgtgagttcaattttttatttattttttctagtaggttactttaagaaaagtacgtttattaaaatcaagaaaattcaatgttgtttcgactaatttattaatttatatggattctaattatgtgtagatgcgcttgatgtcatatcccggaggattgccaattaagaga

SEQ ID NO: 106051 - DNA, 278 bp, Arabidopsis thaliana columbia
tccatttaatgttaaaattttacaaacgaattctcgattatttaaagttgatgacatgtataccttgcaaacataaatccctttattattaaaagggaagtacaaattgaaattttttctaatttggcctcaattttgatttcaattttggattttattctttgctattcaaaattattaaggctaatttggtcttaacaatctcctaaactttatatgatccgattcaatctaaaccgtttaataaaattaatttctttcaatctaaaccgttcaac

SEQ ID NO: 106052 - DNA, 183 bp, Arabidopsis thaliana columbia
aaatctcttcggccgaaaccatagagtggtacatatggccgtaaacaaccagcaggaaggctgtggcgggtcacagtgccaccacgaacacatacactatgcgtgcgagatcgacacagaggttatatatcacgcatacaatagtgacgaaggcttgcgttatctgatttacagccgacatga

SEQ ID NO: 106053 - DNA, 510 bp, Arabidopsis thaliana columbia
  unsure (1)..(510): unsure at all n locations
gtatgtctgattattggatcgagtcgtagacctacgaaaatcttggcacgaagtcctaacaattaaaataatattattagtacatagtttaatataattaaaatgcgtaatgtcaaaaaattaatagatatcatagtaaaataaatatcgaagtaaagattattttgaaatgaaaaatctaaaagacacctaaattattaatcaaaaccacttatttagttaaaatccattttatataatatcaattatcataatatacaaaaattaatctattaatttgtttagataattattaaatacctaaaatataaaacctaaatattaaaaattgcagcaaacaagactaacgacttgaggatttagaccaacangactataaagctcagtcaaaaaaatgtacgacacgaaaactgtccacttctaccgaaaatgcatatgatcatttcaggtaaaccaggtctcatagattagacccatggacagcctactaagaccgaactttattatata

SEQ ID NO: 106054 - DNA, 432 bp, Arabidopsis thaliana columbia
tgcaaaaaaaaagaaatagatatatttcattctgatgctgtcaccagctggttataacagagtgaattgttgcttaagaaattcttggcccctgttttaagttataagtcacatgagtaagtacatagagagatggttctgatggcatgtgtttgtgtgacaggcagaagggcttatagaggagaaaaggaggctggcttgttatgagtttttggagcaattctgcaactgtgttgcatccaatgtctctctattacagaaatccatccggtgccctgatgagtgccgcgaggccatctcctcccttgtatatgcagccgctagagtctctgaagtccctgagctacgcgacctcagatctttatttgctgagagatacggaaacacacttgatcagtttgtgaaccctgagtttgtagagagattcaaagc

SEQ ID NO: 106055 - DNA, 338 bp, Arabidopsis thaliana columbia
cttgctcttctaatatacatatatatgcaatataatatgaaaagtaataaaatttgttaccagttatttgtttttaagcaactctaatgatttctttacttttgtttagcatgtaaaaactctaattatacatcaacactcaagcatcttctttgttttgaaggaaaaatattacatatatccttagatgtcttcaataagttgaagaatgctgtcgagatctagagcgttagctagtattaataaactgtatttccaatgttctgaaagatcagatttgctaggttctaacctgtttgagcagaatgctcttgttctgattttgatagattttagtt

SEQ ID NO: 106056 - DNA, 416 bp, Arabidopsis thaliana columbia
cggtctttcccaatgctgaacagataatgggtattccgaacaaattttacacccatgacactgtaaaacaaagtcgcgtgtcagttaagctccacaatcttttaatgattccaaggagtctttaacacaaaatataatatttgcggtaataatcaacattttactagccaagtaaatctgttgggaagatactggaaaaggaaaggggttttctgcttatatatcatgtcatgcaattagtcatactgttttcttacacaaaattataatattcaaggaaaaactgggtccacattattgagtacgttatgccattttcagaaatatggtacgaattatggaagtacctgtcaccatgagcaaagatagacttatgacaatcaccaaaatccaaaccccaaattttcaaatttttg

SEQ ID NO: 106057 - DNA, 505 bp, Arabidopsis thaliana columbia
gcattgcaaatactgcgagaataagttcacgagcgaaattgctggagagtacaatgtcaattcttctgcagttgggcaactagaaggagttgatcctgttgatcaattagctggacgatgcattcgcgttgtcaagaacatggaagctgaaacaaatgggtgtgtattatgcagtggttctgatttttgtagatcaggatttgggccacggacaatcataatatgtgatcagtgtgaaaaggagtaccacattggatgtttgagtagtcagaatattgtggatttaaaggaattacctaaaggaaactggttttgctccatggactgtacgaggatcaacttcacattacaaaagttacttcttggtggggcggagaagctttcagattcttctttgggataatacagacgaagcaggagagaaatgatgtatatttcatcagtgatcttgacatcagatggagactgatcagcggcaaagtactttctctgaagctcgatgtac

SEQ ID NO: 106058 - DNA, 207 bp, Arabidopsis thaliana columbia
ctactatgttcagctctcttacagtctttacatctagagtactttttttcctatttgagattcgcccgcggtgtggcttatgttcatagatacgggaggggcggcctgaacgacaggtcccaaagtatcttccgctggatccttatgatcgaccgttgatgagagcaaattgaagcctttaaatttacactgtcatataaaaatcat

SEQ ID NO: 106059 - DNA, 399 bp, Arabidopsis thaliana columbia
tgagttttcgaagaaccatttcgtgtggtttttgcgtcgcgtggtcagagaaggttgaatcagcagaatcaagacatcatgaactcacctcctccttcttctaatgatggcttggcgaagcgaaaaagaggtcgaccgcgcaaagatgaaaactcaactccaaaaccggacatgaatttggtaggtaaggtggttactggtgtaatcgaaggatctttcgacgcaggctatctccttaacgttaaggttaaagacagtgacacccaactcagaggtctcgtgttcatacggggcagagtcactccgatcactccagaaaacgacgtggcttcctttgttaaaatgtacggaagagaagatatcaagaacaacccaaaccgatcaattctttccctactg

SEQ ID NO: 106060 - DNA, 465 bp, Arabidopsis thaliana columbia
ctgagacaacctacgacagaaaatcaactaaattcacatccctaaattgaataccagcagaggggtaaactttctatcaagaacaagcaaaaccgttttgtgattcatcaaacacaaagaagattgaagcaaaaggagtaatgttagtgggagagcgacaaaagaaggctttgaaaatatatctcactacatcattacaggtaacgcgatgcattttgtattcttaattcatggcaagagcagaatagacatgcaggcagataattgcatatgatatgctcactataggatgatgattgctactcagaaacaaaaccacatttgcaatgaaaggccaaaaaaaagctttagtaagccaaagacaaagctctatacaatcatcctgtttctgcaaaacgaaagacctctacaaatatttaaactaagtgacataccatgtttactttagcgcaattggtgactttc

SEQ ID NO: 106061 - DNA, 355 bp, Arabidopsis thaliana columbia
cgactatgttcaggtcgcttacagccatcacaacgagagaactctccggcctaggtaagattggtccgcggttcatcttatgttcatatgtatgaaaacttggcctcatacgaaggtcccaaagtttctaccgctggatcgctatgatcggacggagatgagagcatcgcccagcctttaaattgagctgacaaataaaagtcaatggcatatatgcatgtatggaccatatttcatttgatttcgaacgattttcttatctaacttgttttaagaagataggggattagtgtaaatgatctaggtcgatgctaaattgtgtaggtgatttctgtactagattacgcattccatg

SEQ ID NO: 106062 - DNA, 415 bp, Arabidopsis thaliana columbia
ctttggtaagtatgcaaaacaagtgaaatttaaatatgatccattcatatattcaattcttattatttgcttttgtttgttgcttttagaatgctattgaacaagaaataatcactgtctctggaaattcagtggggacttcaatcgggaccacaactcaggttgtaaactcaatttatcactaattcacatccctttactattacttatttttatcttttcttgcaggctgaaattaactttgttgatgtggataacttagacaacaatgaagacaacgcttattacatttccacgccaaagcctataactaaaagatttttggcaacatctaaacatgttcaacaatcatcaacgaagccttaactaatgtccaaggctcagatttagaaggaaaaaaaaagattatacttaa

SEQ ID NO: 106063 - DNA, 144 bp, Arabidopsis thaliana columbia
tctagccgctacactctttcctgctttatttctcagatatgctgacagcctctggccatgtttaaagagaaggggggcatcaacattcctgtcattgtccactactattctgtaatgtccaccaccactgtgcactttatctat

SEQ ID NO: 106064 - DNA, 457 bp, Arabidopsis thaliana columbia
  unsure (1)..(457): unsure at all n locations
ggaaancccggggcggcccacagccttcggtttggaagagacctctttttctctcttcttttaactcgacgcactttagaaagaaacggtagtccgacgacctctccgtgggccgctgaatcctcatcgctgattcttggcggctttctttttgatgaaattggattacgatggctggatattcaaccaaaggagctcctactaatggatcagtctacgtttcaaatctccccttaggaactgacgagaatatnntcgctgactattttgggaccattgggttgcttaaggtatggtattggccagagagacaaacgaactggcactcccaaggtatggctgtaccgggataaagagactgatgagcccaagggagatgctactgttacctatgaggatccgcatgctgctttggctgctgttgaatggatcaatatcaaatgatttcatggaaaca

SEQ ID NO: 106065 - DNA, 429 bp, Arabidopsis thaliana columbia
  unsure (1)..(429): unsure at all n locations
cacatagcaaaaaatggcaaacaagttgttcctcgtctgcgcagctctcgctctctgcttcctcctcaccaacgcttgcatctaccgcaccgtcgttgagttcgaagaagatgacgccactaaccccataggcccaaaatggaggaaaggccgaagggggttcaagaaggaccaccacctaaaagctggccagcaatggatgctccagcaggcagggcaggtcnntgcggaggagttggatttcgaagaccacatggagaacccacaggcacaacagcgggcacaacagctatcccagcagtgctgaaacgagcttcgccaggaagagccagattgtgtgtgccacaccttgaaacaagctgccaaggccgtgagactccaggcacagccccacccagcgcatgtcgggaaaatttaccagacagccaa

SEQ ID NO: 106066 - DNA, 300 bp, Arabidopsis thaliana columbia
ctgaaggtgacgcacctggcttgcccaatggtgtgagccccggagagcgccaccatcacgcgtggggataaaccgggggctcggaaaaggttaataaggttatcaagagtagaggttggaggtggcaggacgccggagttagcagtcgagaagctcgccgtgatagaatcacgtctccctagttttacgctccaaccgcggccacccatctgcttagttcaaaatggggtaggtaagattctttacaaaacaattcttcaaaattttagtcacaaatcgtcgaaaaaaaaaaatttattt

SEQ ID NO: 106067 - DNA, 334 bp, Arabidopsis thaliana columbia
  unsure (1)..(334): unsure at all n locations
aacagcgtttttgttcttcatctgcattgttctccgcctctctctctcaaactcttcagtttgcaaaacccttaagggggtgtgaattagtaagtaatggggaagaagaagtttattgataagaaaaaggcggcgactttcgagttgtgtcctcgtgatacgtcagacccaagatacagtgatgcaccaggtggtgataagatcttnttacgagttgatcaaagncctgntaacatcaatggtttcattgaagaagatgaagaagaagaaggagacagctcacggtttgatgatgctcctgaagagatggattatggttactctaagtttgggg

SEQ ID NO: 106068 - DNA, 433 bp, Arabidopsis thaliana columbia
  unsure (1)..(433): unsure at all n locations
aacaacttactgaatcaaaagtttctagagtgagactctctaaatgacgcctgatcactgcatttccctgcctatgcacaagttttatattcaccaatttggatatatttagtcctgcatctgtcaactttttctctctttcttgatctggaacctcgttaaacatccataactcagatccaggcgcaagcagagcttctagcacctatacggttagaaaagcacnnaactagttaacacagagtttgcatggaacaatgtttacactatagttcttcactctcttttgatacatcatgtaccttgatcatatcatcaatatcacgacgccatccacaaaaaagtattttctctggatattttggaggatcctgcattttgggaaaatgacacatccgtacctacatatatgaatatggttctatctttaatc

SEQ ID NO: 106069 - DNA, 420 bp, Arabidopsis thaliana columbia
  unsure (1)..(420): unsure at all n locations
atttgggtcccatactgtcttcgcaacttggccctctctctcgcgttcagaacgttttgacttttaagcttcttctcgattttggttttatcctttgttatttttagtctgctccgtattccctccgaatctcgtttcaaatacatcctctcgtaaagaaaccgttttttttggtttagtactgaatgataaaagtattgttttcgtacgaaatttatgtnaaccctcctagctctagaggatcacctagaccatatgcatgggacttggtcgagcttcgatgcggattagcccgagttatcaatagaatactgaaaattgacataattaactatgatttaatgcaaatgcgtgtctataatatactgaacatctaacagacatgatgattgatgagcagtaaattccaaacggtctaac

SEQ ID NO: 106070 - DNA, 261 bp, Arabidopsis thaliana columbia
  unsure (1)..(261): unsure at all n locations
agaaaacatacacaaatagcaatttttttctcacaagctctcacttgcatgcgcaactctcgacctgtgccagggtgtcaccaacacttccatctaccggactgttgacaaattcgaaaaagaggactccagcaacccagcatgtcccaggcagatattccanaaggagtgtgagcaatcactacacctaagagcctgccagaaatgnatgagcaagcaaatgttttttttttgttgtggtggttgaagccatgaccatta

SEQ ID NO: 106071 - DNA, 434 bp, Arabidopsis thaliana columbia
  unsure (1)..(434): unsure at all n locations
tttaagttttgttgttactttagaagacctgtggtttatatttgtgagcatttgaactagttattaaagttcatagtcttaaatgtgaacagatatacaagagagcaagtgaggcatatgaagctttgtcgactaggttaggtgagcagaagtttctctttgaagacaggtattgcaatcacattccggaactggattctttctcttaagcctttttgtaaaagatnnacaatgtttatattattctcttcccacaggccatcgagtttggatgctttcttactctcgcacatactttttataatccaagcgttaccagtgagcagctttaaatttcaccaatatatttctcagttatgggtttatcaggttgaatttagccttagaactatttagatgaagtagttttcttaatggtgcatgatcaggttaca

SEQ ID NO: 106072 - DNA, 346 bp, Arabidopsis thaliana columbia
gaaaatgaataagctcagcaatatcctcgttgcaaccttagccgttctcctcgtccttaaccggatgccttgcgagggagacacttgcacgttgctgctcagctacagaaccagagcaaccgtaacaacctaaatgtactccaagccaccgaaactatcacgagtgaaaccgaacacatcgagtactgggaccacaaccacactcagcttcaatgtgttggtgttgccgttgctcgttatgtaaatgaacaagagcagctttacttgtacaccttcatcactttcacaaaaataaactacgtcgaccaaggaacaggtatcagcgtcagagtgagacctggatgtg

SEQ ID NO: 106073 - DNA, 451 bp, Arabidopsis thaliana columbia
ttgaaaatgtttcagctttacaagaatgattgtcttaatataacaacatacaatctgtcatcttgtttgcatgtgggagaatgttgactataagttacaatcaggacgatcttatcagctccaatagttcactcttcctcaactttgagtatcctttgattcctctgttctttgcaacttctttgagctctgcaagtttcatagtttctatcagtgaagctttctcttccttctttgtcaattctcctaaagctttatcgctgtttgatactgggagcttacctcttggacctgaggcagaagaagataaaggagttctcttgacaaaactagacggtggtcgaggaagctctacttgtctctttggtggcttctccttcacactagtatctcctacagttgcagagttgattatattaacaaatggcgagaacatggatttgacatttga

SEQ ID NO: 106074 - DNA, 551 bp, Arabidopsis thaliana columbia
  unsure (1)..(551): unsure at all n locations
ggaattcgacggatcgcgttccgaaaagtaaattaatttactttttaaaaattttaatttcttaatcggcatacctatgttatttactttacaaacgaataacgattatantttagaaatgtactttcccaaataatatagtacggaattttcctaatccttcaatttattaattcttataaattaacgagttttcttataaccaaactacgtgcgataatctaggattcgacaatcaacgggttagtccaaaattgttnngntgtaagatgtatctaacaaaaatttatgtcaacttcgattaccatcatcaccagcatattatcatcatatcaaattatatatgttcggtgtaaaacaaagaaacaaacatgaaaaagaaaaaagaaaagaatggttggtacaaaaaatcaacataatatatcttcaaatatttcagcctaaaccaattattagtttaaatatgtttttaacattcttattaatatttgtattccctcttaattagatggaaaacaaagaaagacagaagcattgtggatttcttcact

SEQ ID NO: 106075 - DNA, 471 bp, Arabidopsis thaliana columbia
  unsure (1)..(471): unsure at all n locations
ctctctttctctcacaatggagacaagaccatcatcatcatcttctctttcattttcgacgaatcttaacctcgacagacggggagttctcaaactcctcggaaaaggcgccaccggaacagtcttcctcgctcaccactctgtttccgactactctggtttcttctccctctgctaaaaaactcgtcgacanatcctccgcattttctctccgccgtgcaaggtggaaaattcagatcctccgacgtctcttcgttgacacaaacccaaacccatttttcccaaaactcttagcttcatcagaatcctctgaattcatcgcatgggctttaccttactgctccggtggagatttaaccgtcctccgacaacgtcaaaacgacagcgttnttagctcctccgtttttaaattctacttacttgaaatcgttgtgcgctggaccactttataccatggggatcgttacagag

SEQ ID NO: 106076 - DNA, 439 bp, Arabidopsis thaliana columbia
cgataatgaacataaagcatgcgctttttggaagagaattggtgcatattttaacaatagcgcttcacttgcaaatctgccaaagcgagagccgagtcactgcaagcaaagatggagtaaacttaacgacaaagtctgcaaatttgttggatgttatgatcaagctttgaatcaaagaagtagtggtcaatctgaagatgatgttttccaagttgcataccaagtctacacgaacaattacaagagtaattttacacttgagcatgcatggagggagctccgacacagtaaaaaatggtgtagtttgtacccctttgaaaattctaagggtggtggaagctcaaagagaacaaagttgaataatggagatcgtgtatattcttcaagctctaatccggagagtgtgcctatagctctagatgaagaggagcaagtcatg

SEQ ID NO: 106077 - DNA, 362 bp, Arabidopsis thaliana columbia
cttgaatatctttgttgacttttgtgcttagtcaacttccggttaaatgaaaatcctctcagactgttaatttgtgtaaattatctacggaattgtcttcatgtaccatttaatattgtctgttctatacttgtttccttttttaatttgatctctgattatacgagtaacccaaagcccaaaagcatttaagcatggggactccttttccctttaattaacataatctgtttcatccgattactattataaatcacaatttacttctttaataactacaacaactcttgtctctccatctgtcagtcttaaattctccttctttctcttaactaattatgtttacgtctttacgattaatt

SEQ ID NO: 106078 - DNA, 425 bp, Arabidopsis thaliana columbia
aaggaatatgtgtggagacttatgtactatagtcaacttctcggacaactgtagatcctctcaaacggctgagactgtcgaacatatgtacagcgagggctacatctaccatctaatagcgcttgaactatactaagttatctagagcgaggggggctgtgttgatgcgtgtgaccaacatgcaaaacacatttaatgatgcggatctgccttcgagtcgaattgacatagagccgcaggatccgattactgtcattaatcagaacgcacttctactatacctacgacgtcacgggaggggtcatatgggaagagtaatttctgcatgcgtcgtgacctcatggagtcaccggtttcggtgaatgcaaggtcaggtcagagtcagggttcggacatgcaccaaaagtagagaccacgggcgggac

SEQ ID NO: 106079 - DNA, 500 bp, Arabidopsis thaliana columbia
atacattatgtggttatacgtcgcaatgtacaatccttgctctgttttcatgatgtaagcactctagagcacgagcaacgcctaacgcgaacccatatagttccatccagaccatagttgatgacttctcgcttgcgatgaacttatcaagagacccgttttccatagatgcgcaaataattgctctcttggaaccttcagagatgaatcctaggacggtaacaatgtcgacatgcgaagctaggctcatgctggcaacttcagtgataaaggctgcaccattattaccttttaagtctttcaaaaccttcactgcaaccatacggtcatcagaaagggttcccctatagacaattccgaatgcgcctcgccccaccacttctgcgaatgagtttggaattctcttcacttgatcgtagctatattgcttcagatgaataagtgctttgattcttggtttggaatatgttccttgaggtcttggtgacccttatcatttg

SEQ ID NO: 106080 - DNA, 388 bp, Arabidopsis thaliana columbia
  unsure (1)..(388): unsure at all n locations
ggaaaaatatgaacatttgatcaggcggatatagataacagtgggacaatagactatggagagtttatagcagcagtggtgcatttgaacaaaatagagaaagaagaccatttgttcaaagcattctcttactttgaccaagatggaagtggttatataaccagagacgagctccaacaagcttgcaagcaatttggcttagcggatgttcatttagacgacattttacgcgaagtcgataaagacaacgtaacaactcattaatatgcaattgatattgctttacctatagttacttgcaagaacattgnntctttataatgatgttattatgattggttttgtcaggatggaagaatagactacaagcgagtttgggatatgatgc

SEQ ID NO: 106081 - DNA, 326 bp, Arabidopsis thaliana columbia
  unsure (1)..(326): unsure at all n locations
ggaatttcagagcgacaaggatgagtttcaaatttctctttaactttaatttctcgatgcacaaatgtaaaagcggataatttggcacgaaaaatacgttccgaaccacatcacatcacctatgtaaacaacattccccaagaatcgctcttttgagctctaattaagagtagacggcaaaaaaataatcaaatttgttcaattaccttttagttaagaaaaataatattttttgagaaattggtaagaatgccctttcaaaaatacccattttctatatatatcttgtttttcaaannanannannnnnnnnnnnnnnnnnnnnn

SEQ ID NO: 106082 - DNA, 228 bp, Arabidopsis thaliana columbia
gaagaaagcaaataaaatctagagaagcttgtttctagggtttcgacttttcgacggccggtccaatttttcaccggtttgtgcttaaggaatcatgaagcttgctttttccgaaacttttaagtttaatcttgggagaaggaatctggaccggttttcaaaaaggtccggcagggttgaaagggtggttttaaaacttggtttggttttggttttatggaaaatgaa

SEQ ID NO: 106083 - DNA, 439 bp, Arabidopsis thaliana columbia
aaaagatatataaattccatcttgggatataaaatggtaacttttatggtgctgagataattctgaaactcactcattcgagagaaacattctttgcaaaaagcaaaggcttccaatgaatagttcacttgggttgtttgtaatactttttttttaatcaatgagaaataaatgctcgtgtcttctcttgtcagccacataactcataatccggttgagtatcatgattaataatatgtcacccttttatgctgctgatcggcttactatttcaaagaatatcataagcagcttgaaacgggacggtctagttttggtcgataccgctttacattaatgatgcgaatttgacaaaaatatatttttttttcgacggtaggcacatttttatggggaaaaaaggtacataatgagctataatttgtctatgatatataac

SEQ ID NO: 106084 - DNA, 361 bp, Arabidopsis thaliana columbia
atcaaagcttacacttgccactgaacatacgaaaaatgtcgtagatctagcgctgctcgacaaagaggagggagggcgacagagtacacgatgactactcatacatttccctattttctcaccgccagcaagatgcgcagactggatatggatttgtcaccctttatgggggaagcagagatatatttaacaatgcatgctacggctctataagaaatgaagcttgcgccgcttggcgatgatagagctattgatctatataggcacttacattataaacacacttctagagagaacacattccccaatcaacactttatttctataacacagaatagctttttgtccgattcttcgattg

SEQ ID NO: 106085 - DNA, 124 bp, Arabidopsis thaliana columbia
gtcagaagcattgaacgtgctgttgagttggttttccgggtcgaagaaaatgctgtttgaagtcaagtccttaaggcacaggtcaggaaaggactagtcagtgatgctattgagtccttaatcc

SEQ ID NO: 106086 - DNA, 218 bp, Arabidopsis thaliana columbia
gaaggactagcgagcgatctatgagacctttaccaagctgagacaccactcacttcttggaggcatccggcctctgaagacactaacgctatgatgacgtgtcagataccttctgacggtagacagaagtgaaggacccaagtgcatagtgagctatctatgctttgcacagatgaaaggtcgggtggattgaagaattattccatgcccaacgtgcc

SEQ ID NO: 106087 - DNA, 298 bp, Arabidopsis thaliana columbia
  unsure (1)..(298): unsure at all n locations
agaaaaatgggtcgagtctcatctattatctctttctctttgacactctcgattctcttcaatggctacactgcccaacaggggccaacgagtgnagctcgacaacttatgcgctcgaccatccaaatataaagcgaggggtcgatgagtctggaccacagccccagctcgtgctcgcttgcttgagcgttcgcatgacctaggtctttctgccacttctgacgcgcaactacgttgtgtcacgaggggttatggagagtattcggatgcccggacgtcatgagcaccgtatttgaga

SEQ ID NO: 106088 - DNA, 426 bp, Arabidopsis thaliana columbia
aagcatatcaataacgaggaaagaacttaacatttatccctataacgcgagcgaaccgcgaaatcccactcgaaaacgacttctccacgttcgaattgtaccatcacaaacatctcacgacggaccgggcctaagttccctggaaaggggcgccagagaggttgagagccccgtcgtgcccggaccctgtcgcaccacgaggcgctgtctacgagtcgggttgtttgggaatgcagccccaatcggccggtaaattccgtccaaggctaaatacgggcgagagaccgatagcgaacaagtaccgggaggtaaagatgaaaaggactttgaaaagagagtcaaagagtgcttgaaattgtcgagagggaagcggatgggggccgtcgatgcgtcctggtcggatgcggaacggaacaatcccgtccg

SEQ ID NO: 106089 - DNA, 433 bp, Arabidopsis thaliana columbia
atttataattgctgtcaaaaaattaaaaaaaaaactataattctttcttgttcgaaaattataaaacagatgtcgggcgctgtaaaaacttgggtgttctctacatgctacatatcacagaggactaacaacatcctatagacggtcctcaccagcatagcacacaagatggagactaagaaaatcggcaacagtcaccacgtgcacaattagctcttacactttgctgtaatccaaactctatatgaaaaagatctatgtatagattactctctcgactaacggattgtcgaaagaatttcaagattcatcattaaacttttgtatgcccaagaatcatacccggatggaccttaaccttctaaaacttacaaacgtttcagagacatcatctaggactttcatgtgtaggaccatagatacaacaatgtcc

SEQ ID NO: 106090 - DNA, 420 bp, Arabidopsis thaliana columbia
  unsure (1)..(420): unsure at all n locations
ccgtccgggnaacctcttcaaacgctttaagcanttaaaaaggcagcnntgtgaccactttctcgtcataggtttcncnttttaaacccanntttcgcgcaatgctgcgaccaagggcttgannaatccaatcagtnngcacatnnccttgtacctcnntcttgagcnnntctcaaatnngagcattnntgcgtggtnnccgaatgccnnnctaaggaacatnnngagaatcannatgactggtnncagaacctgctnngacttcttccccgaaacttatagcgnnttctgcctnncaaaacttnaacaggtcacganntcacgaactggcaggtattctcaagacacgccaattggaacaagcagccccctcaatatcatcaatcctcaagtttcaatcttccaaaggatcaaacgttt

SEQ ID NO: 106091 - DNA, 315 bp, Arabidopsis thaliana columbia
aaacgctaactagcaatctcctcgcagcaactcttcgatgttcttctcgtccttaacggctgcctcgcgacgccgcacttgaggttcctcctcagctacacaacgagtgtaaccatcacaacctagatgttctccaagccaccgaaactatcaagagtgaaaccggtcagattgagtgctgataccacacctaccatcagatcaccaaagcccatgaatcaccccgctcgttatgtaattgaacataggcggtctatacttgcccacctttttcacttccccaaaaatttctacgatcctcaaggaaccgttatc

SEQ ID NO: 106092 - DNA, 367 bp, Arabidopsis thaliana columbia
ctccaggctctgcccactgcatctacagagccctattttcagtttctggctaacaaaaattaccggaaccgcatacttatttgcgtcttaaaatgatcaaaaaatcaagtaaccttttcatccaaactaaattcaattccacttaaactattttggaactaaccttatgtttttagtgcgcatgcctcatttaacaccatataataatattgggtttattcttgaattacggaaaacatgtctaattagtgaggcaaagtccacccgttctaccacttcaaaattttgttacgtctatatacactcgaggtttttattccaaaagctcttacaatttgattgaacccgactatcaaacctatattca

SEQ ID NO: 106093 - DNA, 436 bp, Arabidopsis thaliana columbia
gacgattacactattcgaacaatttgtaattcacctcaaacaaaaaatgggtaaggcgcctttaatttgattaaaaaaagaattcctgttgttgaattatatttatataaagaatttaattaaaaacttgtattgtatttatataataataataatattaagtattaaggcacattcttttaatataatatattcgtaattactttcttgaaattgataggttgaaaatacactttagaaaaaaaaaaagagaaaacagcctaatactaataatttgatctacatcaattcatatgcattagattctaatttcactttattttaaaaaaaaaattttagttttgttacatatttttatttttagggcgtgccgtttttgaggatccaagctttcttttcgcgtgcatgcaaaatgtttaatttttttatagtgtca

SEQ ID NO: 106094 - DNA, 288 bp, Arabidopsis thaliana columbia
ttcctctaactttctttatatttttttcttccccagagaaagagaattactagacgctagagagagatcatgggtgattaatattactatgggatgtgtagtaacatgtctgcatgttccttatcgacgtcttattctactaaactctttctattcatggttcctcttgttgtcatctctggtatcgtctttgtaaacattggtcctaaagacacaacttctttattaacccttcttgctcactctactactcatttttctccatcttcgtttctgttctactgctcc

SEQ ID NO: 106095 - DNA, 213 bp, Arabidopsis thaliana columbia
gggccgcaggcgtccaatcctttttttttcatctttcgggtttttattttcactctacactaactcatttcctttgctacttttcatgaaatagaaaacttctaatctcacacccatgatattaataaatgtattcatactctttcatatcttttccattcattcagagtttctccctctccataaatcaccaattcgaagacccttataaat

SEQ ID NO: 106096 - DNA, 190 bp, Arabidopsis thaliana columbia
  unsure (1)..(190): unsure at all n locations
cggggcgggcacgcgtacagtgtaacctcnacaacctatatgttctccttttcaccgaaactatcaagagtgagcccgttcagatcgagtacagggaccacatccactctcagctccgatgtgttggtgtttccgttgctgttatgtaattgaacatgttcggactctacttgtccaccttcttcacttt

SEQ ID NO: 106097 - DNA, 450 bp, Arabidopsis thaliana columbia
gtcccccacgcgtccgtgagttctcataaaatgagagggattttatttttgccatttggctctttcctgctgtactctacagcagctctgtgcttctccccttccccaaggtttgaggatgccaaaacatactacttatctccttcctctttctcacatggaactcctccatcacacacgcctccttcttctaactgtgtaagtccaccttactacccttcttcttcaactcctttttacccttcactcttttttacatactccaactccttccactccatcacacactccaactccacacactttattacacacaccaactcctcacaccccttcttgttactgttgtagtccacctttccactcctccacgccttttcaccctttcacttcttctcacccaaccccatcacaccctctttctgatgtatattacctcttcttctccac

SEQ ID NO: 106098 - DNA, 447 bp, Arabidopsis thaliana columbia
aaaggttccaagtccaacaatgacaaggaatccaaagactcaactgaaatagcaaggggtccaagtccaaacattgacaaggaaacaaaaactcaaatgaaaggaaaagatagttgttttttccatcttgaatgggtatattccagggctagtcaaatcccgaacctcgtaaaaaaccaatctccttgaggttcgttcttgactcctccccttttgaagctctccaatagattaccgaaatgggggtggttcaagcagtctgacaaggaaacaaatctttgatcctccgcacggttgtacgaatcagattctcagtagttgcaacagagctaacactcagcctagcctcaggacctgactcaaccagcatttggaaggaaatggtcaaaagtgatcctccttctttttctccaggcttacccgtaccatctggaaaaatagcaaaat

SEQ ID NO: 106099 - DNA, 446 bp, Arabidopsis thaliana columbia
cggggggggccaacgcgtccgcctcaatttgccaagattgaaggacctttttgagcagttcggtagctgttaaggcgtgggggaaaattatcctgggcctggttgaaaccacacaagtggaaataaaggagaaaatgagaagatgaatgatgtagaaagagttcctccatttgccaagaatgagaaggctgattgtgtggctgatgagatcgccgacaagctcgaagatcagccatgcacaaaccacaccacagcgagcacggttactcctggctcggtacctccacggctgacgaactaccaggacattctctgtgaatgcaaaatcgacccaaacactacccgtgacggattgatcttacctgtctgtatccctaaccggatcccgactttggctttaactaaatacacccaaactggttatgctcggtatcttaatgattcga

SEQ ID NO: 106100 - DNA, 290 bp, Arabidopsis thaliana columbia
  unsure (1)..(290): unsure at all n locations
tcttacagtaattatgactgattctgatttgcttgcaattcatgtaggatcggggatctggactagatggaaaggatggttggttacgatcttttctttttcctttcgttactatcatgcggctaacaccgtgaaagctacttatcagagagttctttattgttnttccattcagctgaagcagcatcagagaatggtggttctgccaatggtccgaaaaatggaagtgctggtacacctattctaccggtgagccagacctatccaatcatgccaatgacagctgcagg

SEQ ID NO: 106101 - DNA, 444 bp, Arabidopsis thaliana columbia
caaaaaaatatcttttaatagtggaaaaaagatgttttgatattaataagttacagactgataacaatctgcagacaagatcttaacatgttcaaccattctacatagcaaaaagatgggtttgcgctgtaccttcaagcaattaccaatggcagtgagatgatcagcagaaaaaaacttcccggaactgaaaggaactggcagtagcttgctaaatataggatgatcgactgaaaccttttcatggagtttcagcgctaagagcaaagcatctgggtttcccacctcggtggcttgttcaaaccatttataaagttctggagcttccataacatgagtaacaacaggttcagtaggcaactgcacaataaaaaagataggatcacaaaaaaacttcacaatgtgtaataaacccgcactaaactttgcacataaaaatgaatc

SEQ ID NO: 106102 - DNA, 173 bp, Arabidopsis thaliana columbia
tctaatccttataatgatccatttatctctttaacatccaccaccatggctttgcggcgtgacattattcaacatgtacataaaatctttttcagtcaacttcttattacacatttcatatttgaagcattgaaaattaacttctatttttatcatcctgtttataaccaaca

SEQ ID NO: 106103 - DNA, 189 bp, Arabidopsis thaliana columbia
  unsure (1)..(189): unsure at all n locations
aaaacatacacaaatagcaaaacatggctaacaagctcttcctcgnctgcgcaacggtggccctctgcttccggctcaccaacgctctcatctaccgcaccgttgtcgaattcgaagaagatgacgccagcaaccccgtatgtccaagacagagatgccagaaggagtttcagcaattacaacacctaa

SEQ ID NO: 106104 - DNA, 445 bp, Arabidopsis thaliana columbia
caaaactcgtgaatattacaaatctgccactagaggtgaatttttgactaaacggttttttttttttttttcgatctcacggggtctgattctcgttgttgtctcatggagagcacggagcagccgaggaacatctccggatcgatgcagagccctagatctccgtcttcgcatccgtatctgtcagtctccgtcacagatcctgtcaaattaggcaatggcgtacaagcttatatctcttacagagttatcaccaagactaacttgccggagtaccaaggacccgagaagattgttattagacgatacagtgatttcgtctggttacgggatcggctttttgaaaagtacaagggcattttcattcctcctcttccagagaagagtgctgtagaaaaattccgctttagtgccgaatttattgaaatgaggcgagcagcattgg

SEQ ID NO: 106105 - DNA, 355 bp, Arabidopsis thaliana columbia
  unsure (1)..(355): unsure at all n locations
tagactttgttcaccatccgattcacttatttcctacatacaccctnnnnacccggccgttacaacccactactgggatacataatcccacttaccacttacaatcttcctatcctaaacactttccgccttaacgctcttcaggcctccatccctaaaaactctatgttgcttccgaaatggaacttaaacccaaactcttcactctacttgacaaacggaaaggctcatatacaaatggttaactacaccgtgtaaagatatacctccaaaatatctccttcttacagatactatgtcttgccacatggcttttttgtcattaaacatactattacctaacagttcgagtttt

SEQ ID NO: 106106 - DNA, 156 bp, Arabidopsis thaliana columbia
  unsure (1)..(156): unsure at all n locations
aacaggcacattaaaaacatctaagcttttttttcacccaccagcaaccttancattctgtacgcttctacacgggtgccaacacaccaatcacctcctactgcttccacaactaaagaaaatgtgcaacctttacaacctatatgttctacaagc

SEQ ID NO: 106107 - DNA, 388 bp, Arabidopsis thaliana columbia
  unsure (1)..(388): unsure at all n locations
natcacaaaaagacctctcaatagtcaagctttcaagaaccgggcattntgtaataaggcgtttctaaccccatatcgtcagcacacttagttataatcagatccataactttgagtgaaggtaaagaaacaaactcgggactagccaaagtaatccacaaagctttaaagataccaaactctcacaagtgtaaatgcttgaaggtaactgaacctcccaactcccatacgaatcatccaaaacatcgatatgttgaactttacgcgtgacgatagtgttgatccaacgtccgataagaaaaatgtcagggtcatactcgtcatcacaatcatacttcaagataaatttttgtaagaatgattcactgttgaaatcgagaaagctatc

SEQ ID NO: 106108 - DNA, 366 bp, Arabidopsis thaliana columbia
gtctgattatcgacatctctcgaactatgtgatgtgactgagaattgtctaaaagagaggatgccttgatgaaagagtagcttgacatagcatagtggagaatgaagacacctggttatggatagtcggccacaacagaacactggatcgacaaggagaaaggatttgactagcgcatgatcgagtggtttgagacggtggaagcgtgaaacagctatgacaacagaaagaacaccagggacttgtacatacatgaagcagctcgttggctggatcatagcaccgacattgtttttatgaaggacaaaaacacaaatgcctgcgaggcggatcaagacgcttcgggtgattgtgcataaactaaga

SEQ ID NO: 106109 - DNA, 440 bp, Arabidopsis thaliana columbia
ggacacagccggtccatccattcacgtcctcataaaaatgcttgcgactataactctcgtcatggctccggttttcctctgaaagtgcaccgttacttatccatcccggcttatttactctcttgcacatatacaaatagagagggagagagacaattgtctactcggtagtcttatgagacggcggttgttgcgattgctgccatgatggtggtggctgtgtttgcttcctagtcttcttcttctctgctttggtctaatgttatctattcgactgggactgtccgatgaacttgattcatcatcactcggataatcataggtcgtagcttctatatcatcgagacgttttctgcgacggtggacccgatttatgttagtcaaactgtgacacaagcaactaatcatctctccaatggcgaaccagtacgctgcacaag

SEQ ID NO: 106110 - DNA, 243 bp, Arabidopsis thaliana columbia
  unsure (1)..(243): unsure at all n locations
tcatcatcaaaacttgcggtaccacttattttctcctctctatcccaccacttntaatcgtctctgtttagctctgtctgaatatcaagttcctgaagtacactctcggttccttactctatcccggaggccagccttttcctcaccgcagcttctctgaataagtctctgatcttgatggtcactatactaatcttttcttgaacattgtatcctacttcattgtctttgatatattatact

SEQ ID NO: 106111 - DNA, 393 bp, Arabidopsis thaliana columbia
  unsure (1)..(393): unsure at all n locations
aaacgagtaagaatacaaatacaaatttcaaaaaaaatggctaacaagntgtggtggggctgcgcaacatttctccctctgcttcctcctctgccaacgcttccatttaccgcactgttgtcgagttcgacgaagatgacgccagcaaccccatgcgcccaagacagaaatgtcagaaggagtttcagttattacagcacctaagagcttgccagaaattgatgcgcatgcaaatgaggcaaggtcgtggtggtggtcctttttttgacgattagttctatttggaagacgacatcgataacccacaatgcccctatcttggacaccatgatccttcatcagggctgcaatcagctttgccaggaagagcccgtttgttttttgccccacctt

SEQ ID NO: 106112 - DNA, 431 bp, Arabidopsis thaliana columbia
  unsure (1)..(431): unsure at all n locations
ctcctgagtactactggaaacaaaaaagcagagaacaagagaaaaaaaaaagaagacgactttatctttttctgggttttgttgtctttctttgactttatgggttcttttgttttagatttaggctcctacagatctgcttaaatctctgtgatcttgtctcttaattcttctgtttacccgtaatttccggaggattctcttcttgcttttccctgagcttctggatttggtcagagaagccttaagttcaaaaggatttggcttttgaagattggtgttaattaagcttctgggttttcatcagtttgtctaaaagtgagtggagtctctcatcttagtctgaagctctntttttttggatttgagcatttctggtttgagaagaatcttttggaaaccaaagagaaatgtctttcgaggcattgttc

SEQ ID NO: 106113 - DNA, 164 bp, Arabidopsis thaliana columbia
atatttaccatactctaatccctatctttatagacttccttattcacagtagagcaccctttcctaagaaagcttcttaatctcccagaaagctacgactttttcagttctcatttgtaacaacctacttccaacaaactttatcctccttcaaatattttata

SEQ ID NO: 106114 - DNA, 233 bp, Arabidopsis thaliana columbia
actaacctaattaaataacaccttttttctactcctcctcgtctcaaccacgggtgggttctctaacataacgcgcctcctccctagacaccactcaagactcactactaatctacacaacctgcgaaaccttaacatcctaccagatgttccatcccccgcacctatcatgagtgcacaccttcatctcttatactattaccacaaccaccctcatctcccatgtgttctac

SEQ ID NO: 106115 - DNA, 184 bp, Arabidopsis thaliana columbia
gttctgggaccacaaccacccttagctttgatgtgttggtgtttccggtggggggtgtgtaattgaacaaggcggtctttacttgcccacccttttcacttccccaaaaattttctacgttgttctaggaactgggtttcagcttaagagtggttcctggatgtgccgagaccttcatggttct

SEQ ID NO: 106116 - DNA, 426 bp, Arabidopsis thaliana columbia
acagggtttgtaagttgtaaccatatatatgccgtataagaatcagaggtttctagctgtacacgaaagctatgtataaataaaagctatgtatatatgtttttttctaccataacttttcaataatggatctcggctattgattgttctcgaccaaagtgatatgataattataatctttgcgcacacctaaattttatagtgaaaaatacataatttaaaaactttacttttgtagagatgcctatataaaaatggtttaccacatggacattgttatttgttcagatctccaacgtatagcaatatttgtgatttatagatatgtaatttggtgttcaaagaatgtgtagaacaattattcttatgggtatgccaagaaaagttatataactttattctatactgctttcacgttaaataatg

SEQ ID NO: 106117 - DNA, 197 bp, Arabidopsis thaliana columbia
tggacgcgtgggtggtaccaattgttctattgcaagcgattcttaccatgggggcaaggaagatgtgggtttactacatttaatcggatctggtgcctatagattctatatctcgtgagtcgaggagtcttgccatgtgggaatctatacggaggttttaactatgctggtattgactattataacatcttaataaa

SEQ ID NO: 106118 - DNA, 290 bp, Arabidopsis thaliana columbia
cggaaaggcaattttgtatcttaaggtgatatctgtgattttatgattatgaccttgtctccgactctatctccagtaataactctagcttctagtatatgattacccatctgtgttacttgcaatctagtaccattacataggccaccttttggatcaatattccttaataacataaccggtgtaccaatcttaagagtgagattgtgattaggcaaaccagaaagctttatactattgaggaaatcaggtgtgaagacaggattgttcaatgacgcttcatcttgagg

SEQ ID NO: 106119 - DNA, 309 bp, Arabidopsis thaliana columbia
caaaaagaaaatggttaagctttttattttcctcgttgcaaccttcggggggctcctcgtccttaacggctgccttgcgaggcatttacttggtgtttcttcttaactacagaacgagtgtaacctttacatcctatatgttctccaagccaccgaaactatcaatattgtagcctttcataacgtgttctgggaccataaccacccttatctcctatgtgtttgttttttcgttgtctgttatgtatttgtactatgtattctttacttgcctaccttattcaatatttcaaaaattttcttatttct

SEQ ID NO: 106120 - DNA, 383 bp, Arabidopsis thaliana columbia
ctctcatcctctctcttcttttgtgtttactttttctctttattattacgcggcaatgagttttatctgatagaatctgttccacccaaaaacagcataagaagaaattcattgtcagagaaaagttgcaagaaaaaaaaacgatcttcttcatcattctactaaatgggttcttgtttcagatctcgtgtccttaataagagcagtattggactcgatgatctttatctttcgagctgtaaatcttcttcatcatcttctgttcttaagacttattgagtaatacttattgcaacgaccgttaatagcttatgctttaatgatttctaactttcttcttagtactttaaatcggtttcttctttcttagtatgtgctttttt

SEQ ID NO: 106121 - DNA, 424 bp, Arabidopsis thaliana columbia
  unsure (1)..(424): unsure at all n locations
gaattcaaaacccaccttgattgtcctaccagcaatctccagctttccatttaaggcaatttgtgctgcctttgaatgttcaagttgaacaaactatgcaagagaaaataaaactcagtgaggaataactaagaaaaagagtaccaacaaagtaaaaaacacgttccactaacctgaataaatccaaatcctttgcactgcccagtttcaggatcaagtggtagctgaacaagctcaacgggaccaaatgcctcaaaaatctgataaagaaaaggaaacaactgtgagaatatgaaggatactgaaagaaaaaaaaacagttgctggagtgtccatatgtaattaaacaattgacctagaaaactgaatatcacctgtctaagctgcagttccgacatgttgaaatgcangttacccacataga

SEQ ID NO: 106122 - DNA, 412 bp, Arabidopsis thaliana columbia
gtaacatttcttcctttattccaagaaacaaacgaagaagctactttttgtaataacaacagctgagtcttcttctacaggtttgcagagatgtgggaagagttgtcgactaagatggatcaattacttgagacctgatttaaagagaggagctttttctcctgaagaagagaatctcatcgtcgaacttcatgccgtccttggaaacaggtaataattagttatcaacaataatgctgtctaagaaaaaatatcatagaaaacagaggatcatgtttatgttttcagcttcattcctctgttttttgctctgctctgttttaacagaggatcaagtttatgtcttaagcctcctctgtttttggctttggtctgtttatactcagatggtcacagattgcgtcaaggcttt

SEQ ID NO: 106123 - DNA, 193 bp, Arabidopsis thaliana columbia
gaaaatggttaatactcaacaatctcctttttgcaaccttaagtgttcttcgggggggtaacggatgccttgcaaggcatacacttgccaatactgttcaaatacgtatcaagtggaacaatctaaacctatatatccatccaaaatcataaactgttagggtggtagcatttaagtttgtgtccactatcca

SEQ ID NO: 106124 - DNA, 390 bp, Arabidopsis thaliana columbia
gtcggaaattccggggtgagacttttgcagaagttgaaggttcatcaggaagaggaggtggaggtgcacccggttcgacgttttgaggacatgcaccagaagttggagaatttccgccgaggggatgtgtttgcttcgcttgccggagtttcacagtggtggttcaaccttggtgattcctatgtcgtcattgttattgttcttgttgtctcctacagttataacctgttttgccaatttccttatgattgttcaactagcctgtagtttaacgcatgatgaataactaccattttcgtttcctttatgcaacaactcttttattggtttggacctaatcataattttttttagttattttatatttattattcattcattttattcttc

SEQ ID NO: 106125 - DNA, 278 bp, Arabidopsis thaliana columbia
tgctgagaagaaaaaaggattgggtgattggatgaacattataaagcctgttaatgaggagaaagatcattgggtacctgatgaagctgtttctaagtgcacatcatgtggttcagatttcggtgcatttatacgaaggcaccactgcaggaattgtggtgacgtcttctgtgacaagtgtactcaaggcaggattgctctcactgcttaggataatgcttctcaagttcgtgtttgtgaccgcagcatggctgaagtgtcacaaatgttgattaatg

SEQ ID NO: 106126 - DNA, 422 bp, Arabidopsis thaliana columbia
gttatttgggccctgcggtttaactttcgaactgctaattttcggatgggagaggtccatcctagttacgtatgggcgtatttgtcccattgacacgtctgaaggaatcaatgttggacttattggatctttatcaattcatgccaggattggtgattgggggtctcttgaaagtccattttatgaactctttgtgatatcataataagcacggattcggttgctttctttatcaccaagtcatgatgaatattatatgtattgcggcatggaaaattttatggctatgaatggtggcattcattatgaactggctgtttcagcttgattccgttaagattatttgcttcttttatgggaagaggctcattttctaagattttttctttttcaattatttttctatatggagctatttttat

SEQ ID NO: 106127 - DNA, 422 bp, Arabidopsis thaliana columbia
cactggaacgttgaaataacgttagattacaaaaagtacgtactagaaacactctggttccaaaatataaaaagaaactaatctagccacaacaaaatacaaaacttgatactttttaaagcaaccattttgaatgaaaagtgggaaaaaaccaacgagcatccttgaaaagtattttcgaggtcctggaagaagcagtaagaagtttcaaccagttggaccacattagcggatcgaaaatggtagactcaaataccgttcttgatagaagcatttcataaactattttcattgtatttttgtaactgatcataacttaaatttatgcaatttattatcacttttgtctctacctttattccttgatctttttataaatttttttgttttttatatttcttattttttaccttttttaatta

SEQ ID NO: 106128 - DNA, 421 bp, Arabidopsis thaliana columbia
aatgaatgttccacaacttcagcttcctagttccattacgaaaacacgctactcaagaaccccctgcaagtatccctcacatttagctttacacacacacacaaaaatcctcatttaaataactatgtagtgctcattaccagattcctgacgccttcttgctttgatccctgatgtgaaatgacattctcagtttttgttcaaaattatcataagcccaatgtgttaagaaggaccatggaaacaatttaccgcgattttccagagaaggcatcgtcgatttgttcaggggttggtctttcagcgtacgttgctagcaagacatatttctcctttccattttcctcgttcactctcttataaagctcataccggtatggataagacatcctgaccaaattcaggtcaaacattcagaatg

SEQ ID NO: 106129 - DNA, 217 bp, Arabidopsis thaliana columbia
gaggagatagcgaaggccaattattattttattttcctattttagttttcattacggcctgtgaatcttcgggttgggtgttctgtaacttcccagattttttttttctctttgctgggcttcgatgccttttcccctttttttctctttcctctgctcttgattcagtttagggcgagaaaaagtagctgtttttacagggtttatcacaaagatc

SEQ ID NO: 106130 - DNA, 413 bp, Arabidopsis thaliana columbia
gaatttgtttacaaatccggaaaaaaacaaacacgaaaactattttttacgaaaagacatatgttttgttaatttcatatgacatgccactaacggaattgataagtcttacacatttttagagtctcataagtcataaactatatgaaaattttaaaatgacataaactgaccaccgttttctacaaaaaaaaaaaaaaaaatcatttcccaattattaaaggtaaaagaatatttaaaaatcctgatttgacagaaaaaattattgaggatagagtccatggctaattctttttttttgcttacatataattaatactagatttttaatgaggatatataacgaatgttgctcattaacttactcatttggtatatgagattgaaagagaacatacattattgtgttttga

SEQ ID NO: 106131 - DNA, 420 bp, Arabidopsis thaliana columbia
gaatatgatgacaaatccggattaaatcaaactcgaaaactatttcttacgggaaggcatatgttttggtaatttcatatgacatgccactaacggaattgataagttttacacatttttagagtcttcataagtcataaactatatgaaaattttaaaatgacataaactgaccacctgtttctataaattaaaaataaaaaattattttccattattaaaggttaaagaatatttaatatttcctatttgtcagtaattatttttgtggttagagtctatggttaatttttattttattcttacatttaatttatttctagtttcttttatgtttatttatattattatttttactatgttttttttccattgtttatatttatatttttttaattattattttaatattattttgtt

SEQ ID NO: 106132 - DNA, 237 bp, Arabidopsis thaliana columbia
aacaaattgttcaaattaattctttttttcggtgcaaccttatcaggagggcgggtggttaacttatgccttggcagcaacatacttgggagttctgctgagctacagaacgatgtaaacctatacaacctaaacgttatggaatatacatagactatctatagaaaatccggttagatcctgtcctgggactacaaacacgcttagcttccatgcgattataggccctgtgatcgt

SEQ ID NO: 106133 - DNA, 422 bp, Arabidopsis thaliana columbia
ccttagagttgttggcttctagaaccttgggctcatcttcatcagacgaattttcggcaggggcatcatcattggagtggcaggattttaacaccttacgcttcgcctcttcgctagaagtatcaatatcatcaccagcttcttcatcttcatcttggccatcagggggttacctcttggtcaactttgaagacatccttggtgttttcgaggcctctgatgcctcttttcgagccacattccccttgcttcgaaacctttcactcatgcgtgatgccgctgctacaatcttcccaccaatatcacccattttgccatttttttcagtttcgggctttgaggccttcttcttcacctctttggccttgctgtataaacaattgtggtaattagattttcagaatcaaagcatcacaataata

SEQ ID NO: 106134 - DNA, 426 bp, Arabidopsis thaliana columbia
agagatcccaaatccggaagatatcttcttctctcataactcagtttactcagattcactgaaacatacaattaagttaaccgtcagtctctcacctgcagcaaaattcactcttctgctaataatgttctccacagagattcatctattgatcattttgactttttcaggaaccagagatgaaaaattatagttaaggttagtagtagtagataggtttaataaatttgtagttaagtaacccaaaaaaataacattaaactaaaatccaacactagaaaccagagagacccccttaacgacaacaacctctctgtacacaagacaacaaacactctctacaaaaacactactctttccttcttcttctctctactctattctaattctaaagagagagagaaaagctatggatggatatgaagc

SEQ ID NO: 106135 - DNA, 423 bp, Arabidopsis thaliana columbia
cttttgatgatttttccaaatttcaactctctttttattttctttatatagtttctaatatattttttgataaaattcttcgtgtgtatatacagcgaaagaaatatccgcgggaacccttgtatatgtagcctatagatctggggattttacaggccttttaaaaacttacgacctatgtgatgtgagtttggcatgtaacattgattctgagattgaagctggcgacgtgtttgacttcagtcttaaagacgttctttatgttggttttgatgaggtaactatttttaatactctttgtatatgaatttgaagtttccttaagaagtcctaggaccaatgttttttcaagtaatgctcttgggttcatgatgttctttggttctcattaattcttctttttaacttggcagggaatcaagt

SEQ ID NO: 106136 - DNA, 124 bp, Arabidopsis thaliana columbia
aacaaaagggctatgggatatgttaatatcatatttggaggagcgctttggtgatgtgcaactatctatagcagtggtacaactaatgacaaacattatgttgaaagctgattggtactacata

SEQ ID NO: 106137 - DNA, 413 bp, Arabidopsis thaliana columbia
gttgtagaaacctgatcaagcgcctcatccactgactgcatcaaaatattagcagtaacttcagatattctgccctcatcaagcatctcccagtaagttgcttgcacacctgacacaaccaattttcaaagtgtcaataatctagcaggtaaatagtatattggagggtacatgatcataactaccatttaagaaccgcatacgtatgtcctttaaacttttagggtcaagacttccaattttagagccattgtgaggatgatgaactagttccccttctgaaccttttaggcttgaaatataactttcaactgtaggccagtcagcaagtcctagctcctcatcgtctcctagatcttgaaacgctcgtaaggccttattcaacatttcgtacttcgtatattccaatattc

SEQ ID NO: 106138 - DNA, 146 bp, Arabidopsis thaliana columbia
  unsure (1)..(146): unsure at all n locations
acggaaccccccgcggtcgaccccacgcccgtccgaacaagtaacaattagctagaatgttattnttctaaccgcacgtaatgtttggtttcaaggggcagagaacgtctcttcattatatagtctcataccctctggnnttttgt

SEQ ID NO: 106139 - DNA, 354 bp, Arabidopsis thaliana columbia
cagaagagaagtctaagccattatggatctcctgcaaaagacatggacctggttaattcaacctcattgataagatgttaaaacagaaactaaaacatgtgaataaagaaaaaaataccaagctctaataaaaaactctatcttgtttgattaagtcttgtttcagtcttgctttcaaatgtttgttgagtcttatggagtttaagttggttcaagtagtttgcagctttgtagggattccagtttgtaatggcattatataagccatcgctttcattgtaataaagcagagaatttttagagtttatattcacagagcattgtttacttttacactcttactaaacacattat

SEQ ID NO: 106140 - DNA, 248 bp, Arabidopsis thaliana columbia
ggcgcacgcgctcgttgtagaccaaaaagctaattgcgattattgactaaaccacttatattgttacaggatgataaaaatatggcgggctgctcgtgacacgtttgcttaagcgaacaaacaaaaactgtcatgacttaacttacttgatacaaagagtccactgggagaaacggaagtaactaccaaagaggttgtgttactaccaactcttattcaaactgtacatcaagagcataaaaacttta

SEQ ID NO: 106141 - DNA, 195 bp, Arabidopsis thaliana columbia
  unsure (1)..(195): unsure at all n locations
gcttacgctcaccaatctcctcgttgcaaccttcggggttctccttgttcttaacggctgccttgcgaggcagggacttggggttccttctcagctacagaacgagtttaactctcnacaacctgatgttcttcaagccaccgaaactatcaagagtgaagccggtcagatcgagtactgttaccacaaccaccc

SEQ ID NO: 106142 - DNA, 103 bp, Arabidopsis thaliana columbia
gcatatagacagttgttattttagtcttgcctacaagagtcacttctttttactgcactgaagatggtatcttgatataccggcggctgatactagatagcca

SEQ ID NO: 106143 - DNA, 419 bp, Arabidopsis thaliana columbia
cccacgcgctcgctctaattaaaaaagccacaggatattaataactaagcatcaccaaactttaccaaatatcttggaataaggccggatggccatgccacgtctggaataaaatcccaatttgtcttgccaagacaaacctcactcgataatcagagtcacttagcatcaacagaagtcgctcaatcattgtctgtattaaaacacacacttaattcactgtacaacaagagactaaataaaataagaattccacaaggaacccattagaatatttagctgtgaccggctaatgtgaaatttcaaaaagaaaactactagcggttatgtgaaaacaggaaaactgcctgtgtacttgtttattataaacacactggaatttttctccatttcttgaacaatttcgcttcacgtcatga

SEQ ID NO: 106144 - DNA, 506 bp, Arabidopsis thaliana columbia
cagcctccgagatcatttatgcaagttgtgcatgtgctggcgggtacaagggtaatccataccttggagactgccaaggtagagaattgctccttcaagtatcttctttccttgtgtgtctcacatcacccatcatttcagtacaaattcatgacttccttttttatatatgtttcatgcctttttcgtttgcagatgttaatgagtgtgccgcacctaagaatccctgttgggatacaagtattttatatcgcaggaaatgtaagaatacaccgggatttttttattgcgtggactaccacattccagaaacaatgctaggtaagtcattgaatttgttatatatcaaaattcaagcagcaaaacttttagatatatgatgatgaacgtctagtttttcttgtgtggtgtttgcaggattaggtgcaggtttttttgtcttaatagtaggcggcgctatatatgtggtgagaaagcttcttaggaagaaaaggatgacaaagcgc

SEQ ID NO: 106145 - DNA, 517 bp, Arabidopsis thaliana columbia
  unsure (1)..(517): unsure at all n locations
acattttatcagaaagataatatgtttattatttattattaacatgtttattatttattatttttgactgtttagatatttattatttattattaacatgtttattatttattatttttgactctttaaatatttattatttattatttattattaatatgtttattattattttgttcattagttgaactattttacatagataaaagtaataatattttaaagtaaaaattatttattattaatatgtttattagttgaactattttattattaatatgtgtccaaacgtagaaacattagagataaaatgaaatagaaagagtaataaatgaaccaacacgttaacaaactttatataaaaatcaagaaactttttttttttaaatcactgtctttaaaaatcaacagantttatttgaacttatcactgtctttgtcaaaaaaaaatgatgtaaactttattttaaaagtcggaaacttttttaaaaatcaaacaaacttttgtaactttaaa

SEQ ID NO: 106146 - DNA, 438 bp, Arabidopsis thaliana columbia
gaattttcatcatagccaaaatcacactaagacataaccttccataacagtgactgctttgcctctcagtagaacggtctgcttctctttgtccaggtgcaccttcaacgttcctcctctgcttgaagcctaaacacattccaataataaccaaatctttcttcaggtaactttatacgaatcacttcagaatttgtcttttaagtgtctgcgtggagagaaagagagagagaacctggtaggcgaagaaatcacacttgttcatcctgaggctccagtaatgagctaaagcacaatgagcacttccagtaacagggtcctgaagagccacacagtaaaaagaaagcaaaagaggtcacgtttttgctgttttgaccactcgctcttaatcttctaagagcaaaagactaaatgataaccttattgattccgaaatct

SEQ ID NO: 106147 - DNA, 241 bp, Arabidopsis thaliana columbia
catagagaatatgggaacactcagcattctctctctaagaagcctaagtggttttgctactgcttaacggttgtcttgcgaggcagtgacgtgatggtatctcctaagctacagaacgagcgtaagccctgacaacctatatgttctacaggccagcgtaactatcaagagtgaagccgctcacatcgagtactgcgaccacaaccaccctcagctctgatgtggtggtgtctccgtagtt

SEQ ID NO: 106148 - DNA, 349 bp, Arabidopsis thaliana columbia
ctctctcgtcttctttctttcttcttaacactatagatcctttaccatttatccacggctcaacaaggtggggagggtcagtagtttccgaacgagtgccagctttaccagctcaaagcgcctaagccgttacacttactgaagagcgaggctgcccgcattaaggtgtggcaccatcacgcttctaaggtatcaagctcatgtgtttgctttaacgtctcttgatctagtgcaaagttatttacttgccctgtttctttaacaccgtcaagctctgcttctagtccttaaggtctaggttttattggaaaagttatctgtgtatgcgctgtaatattctatgacttat

SEQ ID NO: 106149 - DNA, 119 bp, Arabidopsis thaliana columbia
aacaagtacaaaggtatcgctacctaaaaatctctctgtcggcatgtaggatttccggggtcgtaacagaggcgtggcatggctctgagatgggggctcttcacacatacagaacaggg

SEQ ID NO: 106150 - DNA, 490 bp, Arabidopsis thaliana columbia
  unsure (1)..(490): unsure at all n locations
ctctcggccattggaagtttggatcttaattttaacagattttttagaaaagatagattgagggaatttaaccaaatattggtcttatatatattgaagaagcacgatgaaagatgaatatagattcagtgaatatctatgaaaggtttcttgctatatatacgttcaaatcatttagtcaatctctaattatgtgctaaccgattctgtagccaatcaccatatattaaagtctttttgctaatgattgcatatacagtagaaactctataaattaataatgctgggaccatgaaattttattaatttatactgatattaatttatcgtataaattaataaatattagtttatagaaatatttacgtaaaatataatactaatttctttttaaaatgttttttaaatntagtttttcttaaggttntggtggtggatattcaaatatggtagattcttaattaattttgatttttaattattttcctac

SEQ ID NO: 106151 - DNA, 472 bp, Arabidopsis thaliana columbia
taagcattgggtttggtttggtttggtttggataccgttttgtagaaactacacctagaattttgaatggtttatgaaaaaacaggttttattcgtttttcccccttttcagattagtatggttacacctgcatgtttggatatggaataaaccatcagttcggttaaactgttggacatcccttttatatccaacagttatgaatcaatgttctttacaatgtgtgcaggattaagaacaaagatggtgcgagcagtccaaagacagtgaactgccgctcaagctgtctaagaatctgcacagctgctggttcaactgcagcaatgcattcagcaggtgttttcgtgatgccaattgtgtcttgtgatctacagtttcatgtgtagagagccattttcttctgttcaactcgttctttaatgcattctattttaaactatatcaattcatgtactttatctttttttatta

SEQ ID NO: 106152 - DNA, 176 bp, Arabidopsis thaliana columbia
ggtttatgatcggtatcagaatcatataaaaagattatactttgtttatatctaaaactctagctatctgtatccaaggtaacatgatgtagtcatgtacagctaagacctaagggatactccaaaatatagtagagactctaaccacataaatagtcacatgaattacatgttct

SEQ ID NO: 106153 - DNA, 299 bp, Arabidopsis thaliana columbia
caaaaagaaaatggttaagctcagcaatctcctcgttgcaaccttcttgttcttctcgtccttaacggctgcctggcgaggcagtcacttggggttcctcctcagctacagaacgagtgtaacctcgacaacctagatgttcttcaagccaccgaaactatcaagagtgaagccggtcagatcgagtactgggaccacaaccaccctcagctccgatgtgatggtgtttccgttgctcgttatgtaattgaacaaggcggtctttacttgcccacctttcttacttccccaaaaatttt

SEQ ID NO: 106154 - DNA, 171 bp, Arabidopsis thaliana columbia
acagccttccggaaaccgattcacaggggtgagagtaaaacacacactctcacgcgcatataaactctgtggcgacacaaatctgagttgtgagaggtaccccactaggagatataccaaagggttcacaaatcacacccagaaacacaggggggcaaaagttacacactc

SEQ ID NO: 106155 - DNA, 481 bp, Arabidopsis thaliana columbia
ctctctctctctctctctctctctttagccactaatctcactctgttttctctccctcgtttcttgctttcaatggagaaacagtacctcactttcatttctttttgtttctccatcaccatttgtgggttcctcatagtttcttggcttgcaagaagcataatccgtaatgggattagaacattaacatggagaaaggaaacgaagaggaagaaaaagaatcaagaagatgaaaacaaaatgtctctcctggatttgccggacttaaccttagactgcatattagagaagctctcaccatcagagctctgtgcaatgactagtgtttgctccgagctaagagataagtgtgtaagcgatcatctatgggagaagcatatggagacaaaatggggaagattgatgggtgatgcagcgattcaagagtggaaatctcacgttgctacgataatgagatgtcttacaagtagtagtagtagta

SEQ ID NO: 106156 - DNA, 343 bp, Arabidopsis thaliana columbia
caaaaagaaaatggttaatctcatcaatctcactagatgcaacctggttgttctcctcgtccttaacggctgactggcgaggcagtcacttagtgttactcctcagctacagaacaagacgcaaccgtgacaacctaaatgttcttcaagtcaccagaactatcatgagtgaagccagtcagacagtgacatgggaccacggaccaccctcaggatcaaatagaatgaagaatacgaagcacagatatgttatcgtacatgggccggactaaacgttcaactgcataacttagaagctattaccatacgagctctaagcaacgactattatctgctgagagct

SEQ ID NO: 106157 - DNA, 513 bp, Arabidopsis thaliana columbia
  unsure (1)..(513): unsure at all n locations
cggaatttgccgggatcgactcccacgcgnntccgcggttacccaagagcatgatnngcctgaaagnntggcccnnatctagtactccanatgtattgtcncnnctgttgattgggggagtccctgtgcgnntcggttcgctttaccttgccttnnggctggattaccttncnntagctgnngttcggtgnnnatcggctttttaattggttnggctttaaccacntnnatttctcnnnctcttcaagccnnncggttattagtcncnncagcggctttctaacccctatcggnngcttgcnnaatgacagnnngctttttaagcccctcgggngnaatgttcnnggtctanacccnngggcttaagcttcannatctcaattgggtcaatgaaccctatctnnntcgtgggacaaaggaaggactgggtgcctgaagcaatttggaagtattgctaaagaaggagaatgtgcttgatgcccggttggctacccgcaggacaannaagggcaa

SEQ ID NO: 106158 - DNA, 453 bp, Arabidopsis thaliana columbia
caagtagccaagggcgttgctggagatggaggcggagttacgtcgcctaagacggccacacgaaggtacaagcttctcaaagatgtcatgtgttagttccacctaaacgagaggtattagaagacttactataatcatactactctttcgagactgtgtgattaaattatgtataattagccactacggagagagcaaattaaaaaagaaaacgtcgttgtttgttttcatccttttttcctttttactttgtgtttatatatatgaaatgaatgtgtgtttggcgtgagcttgtgttttcttaatcaccatataagctattaataactgcaatttgcgtaaaagactcctttttctttaaaacctttcgtaaagatctttattaaacttaacatccacgtatatatactggttcctttaggttttcgtcgtaaataccattaataatgcgag

SEQ ID NO: 106159 - DNA, 390 bp, Arabidopsis thaliana columbia
aattttaatacgtgactagattttgttttttctttcttcacacatattatccaaattcggggtcatttttcacctttgaaagaatctatctccttgctctgttatctccagttctagggcatacgccgatcacatccctagctccttttggctctaataatacacgaatcttaggttttcggggagtgaatcgtgtattggtattctagttttagctcaagaacatgtttttcttcggcgatccttctactcggaagcgagttgatttaggtggcccgagcaccaatgagagagatgctcggaagcttctcgagcagactagaatggagcgtaatccgtcgttactacagaagcagcaaaactctgctgctcttaaaatttcaaaaattc

SEQ ID NO: 106160 - DNA, 400 bp, Arabidopsis thaliana columbia
atttgaatcatcagaaactatggatggatctgatttctcaaagtgaatttatgggttttctttctaattttagagttattattggtatgctaaagtcttaatcttttatgtatgatacttggtccaaagtcattgcattgtgtttcttttgcttacctgtgattgattgatgtttgattggttattgttttgcttttgttggagtatcagggatgcaagcctttacctggtgagatagctgggacttcatctcgagtaactccatattcatcacagaaccagagccctctttcatcagcctttcaaagtcccatcccatcttaccaagttagcccgtcttcttcatcattcccgagtccttctcgcggtgaaccaaataacaacatgttctctacattct

SEQ ID NO: 106161 - DNA, 370 bp, Arabidopsis thaliana columbia
tgaatactgaaggaggatgagaggaacccaccacattcaatgtgccagaacaaagaaaaaaaactcaaagcacgcataacttacctgtaatcaatgcatgccacaataatatctctttctgataattgctgtcctaagagagaaccccacgccttataactgtatcaacacaagacattctgtaagatatttgcagttctttctcctcgtcctcaaatgctttagaatgaaaatagtgtccattgggtatcatactcacccaataatccaggctccaccagtcacaaacgccacaactggttttggtccagtagagttcttaggtagatacaagtcaagcctgaagaaaccaaaaaccacttataccaac

SEQ ID NO: 106162 - DNA, 344 bp, Arabidopsis thaliana columbia
acggaagatagatgctgaatggtaagctcgatatatctaggttgcttcagttgatcgtcgatctagtttctagatcttttctttcttccgcgaaacgaaaatgagagagtgcatttcgatccacattggtcaggccggtatccaggtcggaaatgcttgctgggagctttactgtcttgaacatggcattcagcctgatggccagatgccgagtgacaagactgttggcggaggtgacgatgctttcaacaccttcttcagtgagaccggtgcagggaagcacgtcccacgtgctgtctttgttgatcttgagccaactgtgatcgatgaggtcaggactggta

SEQ ID NO: 106163 - DNA, 437 bp, Arabidopsis thaliana columbia
cgaaatggtcgaagaactagacttaaccgatgatcaagatatctcaacgatagctaaaatgatcgacacagagatacattcacacatccccgattggaccccttctcgacttatcggtgatgattcagcggtacaaaaatgtttgtcttctccagagacgctccatttagatagatttccttcagggagaaaattctggtcctctcctaaagctggagctggagactcacgttcaccgtttgcgccacggtctaattctaagttgtcgtcagcacaaggaccgatcaatcaagaagttggggttatagtagagaaacttgagtctttgttgaggaaacagagagaggagattgaagagatgcagagagatcaagaacgtattgttactgagttcttaaaagagtttcctcctgagatttgtgaagaggctttggtga

SEQ ID NO: 106164 - DNA, 428 bp, Arabidopsis thaliana columbia
aatttaacaaattcagaaacttgttttgcttttagactgaattcattaaaactttaattaaattgtaattatttgggggaggaatttacattcaagtttcgatcaactgatgaaattgcgaggcaaaaagctctaaattatgtctatcttcttccaggtacggtatcacaatctaatggttatgctgagccaaaataaactatttgttattgagaaaattttaaacaatcgtgtatatatatttttttgttaggagttagttctgcgacattttgtgaacgaagcaactaactaaccgtgaagggagaaagaatcgataaggctaaaataatgaggaagatagatcagatttttcaacctaaaaaattcgttcttttcgtgttttagtcccaaatactaggacatggcgtttatttctgactttacat

SEQ ID NO: 106165 - DNA, 229 bp, Arabidopsis thaliana columbia
cggacgcgtgggaccaaatacgaggatttttttttcacacagaatcctaaacaatggctacgggggcataacatgagccctacgggaaacaactatatctactcaaggccctccaaccacataaaaacataataacaaagagcagaactatcgaggtcctccaccaccatgcactcgatcacaaggaatccccatttgctctatcagctaatatgcataaattcaacat

SEQ ID NO: 106166 - DNA, 325 bp, Arabidopsis thaliana columbia
aaagaaaatggttaagctcagcaatctcctcgttgcaaccttcggggttctcctcgtccttaacggctgccttgcgaggcagtcacttggggttcctcctcagctacagaacgagtgtaacctcgacaacctagatgttctccaagccaccgaaactatcaagagtgaagccggtcagatcgagtactgggaccacaaccaccctcagctccgatgtgttggtgtttccgttgctcgttatgtaattgaacaaggcggtctttacttgcccaccttcttcacttccccaaaaatttcctacgtcgttcaaggaacgggtatcagc

SEQ ID NO: 106167 - DNA, 351 bp, Arabidopsis thaliana columbia
gtttctctctttcgcatcgtcactctctttcgattccttgatcttcaaatctgggtttccaattttcggattcaattgtttcttcgattgattcgtcgatttcttcttagtctctgatctgatctatgaatatcgcaatgtctccgacgagctcagtttttccataaatttgatctcaatttcttctgtgtgatccataatccagccgagaccctaagcttgattcgatctaactctggcttatcaattctgatcttgtcgtttcgcaatggtggtctgcaaatgcaaaaaggctaccaggctgtattgctttgttcacaaggccccttgttgcggcgaatgcatttgttt

SEQ ID NO: 106168 - DNA, 416 bp, Arabidopsis thaliana columbia
ggaaagtgaagaaatctctcttgcaagtaccttataactttttctttatattatataaaaaatacttggacgaaaacaaatcgttgattctgaagattgttgagtctcaaaactctggaaagcttagcgaatgcgccgagaatcaagcaaggcttcaacgcaacctaatgtacctagctgcaatagcagattctcagcctcagccaccaagtgtgcatagccagtatggatctgctggtggtgggatgattcagggagaaggagggtcacactatttgcagcagcaacaagcgactcaacagcaacagatgactcagcagtctctaatggcggctcgatcttcaatgttgtatgctcagcaacagcagcagcagcagcagccttacgcgacgcttcagcatcagcaattgcaccat

SEQ ID NO: 106169 - DNA, 426 bp, Arabidopsis thaliana columbia
ggacgaccgagctatgatggaagctgtaggagtaacgagcttctccgaacttcttatgttctctgacggcgttctcagctcctcttccgaccaccaacctgagggtaatgtcggcgatggtggagaagacagtttaggttttgtattctccggcaaaactggctcaagaatgctctgttttagtggaggctatcaaaacgacgacgagtcactcttcctagaaccttctgttccaacctccggagtctctgatcttgacccttcatgcattaagattgattgcaggaactcaaacgacgcgtgtacggtcgataaatctactaaatcatcaaccaagaagagaaccggaacgggtaatgggcaagagtcggatcaaaatcgaaaaccgggcaagaaagggaaacgaaatcaagagaaatcatcagt

SEQ ID NO: 106170 - DNA, 319 bp, Arabidopsis thaliana columbia
cactcgtctgggaggaaagcttcctaagggtgtgttgcttgtcggtcctcctgggacaggaaaaactatgcttgctagagctattgctggagaagctggagtgcctttcttctcctgcagtggtagtgagtttgaagagatgtttgttggagttggagccagaagagtgagagatctttttagtgctgcaaagaagtgctccccgtgtattatatttatcgatgaaatagatgctattggaggaagtcgcaatcccaaggaccagcaatacatgaagattacattgaaccagatgctcgttgagttggatgggtttaaa

SEQ ID NO: 106171 - DNA, 432 bp, Arabidopsis thaliana columbia
gaaaaaaaaaagacttgggaaacgagcagagtcagtgagagaacaacactagtcacaagggacaaagagagaggaagaagatgatatccatagctcaattggtctcaacccttccgtagtttagctctttcttcaatctctcatcttttcttcattacatttcgatctctctgttcttaaaacatttcggaccaaaagaggaaagctgcagccacagttgcagagtttatcttcaaaggacccaaaagagagtgttttagaactctaatctcaagcaatgcagactccaaaacctaggccgggatcgttggaggtgcctcagaagaaatctcctgcatcaactcctaaaactgctcggaagctcaagacttcagaatccgaccctgtctcgtctcctaacacgaaaatcaggacaccgaaaactcaaagccc

SEQ ID NO: 106172 - DNA, 406 bp, Arabidopsis thaliana columbia
aaatattttaaaatagatattccaaaaaggaaaattgaaataacgatcagttgttctgttgattgatgatacgatgatgcatctattgagattgataacgttagaaacgagatccaacagagtaatatccataatagaacacaagaataaaaaaagaataaaaggcaaaaaaaaaattgtaattgccacgtagtagcagtctcctcaagttaaaaaagctcttctctccatattaatgtattttcatttatttttattacaattaaattagagaacctgtgatttttgagcagagaaccttctattggaagtgctctaagttcgtcgtagacaaagttaatcaccgttctggtattaaccacatgacctcaaatagacatagattttttttttcttttaccttttt

SEQ ID NO: 106173 - DNA, 343 bp, Arabidopsis thaliana columbia
gcgaaaacaaaactcatttaggaaacttcatttggttaccaaaaaagacagtacatatgatgacaagcaaaacattgaggaaggacaacaaagttagcaagtctcacttcttaaatacagcccaaacttttttttgcagttctggatccgggggttgagcgtgcataagaagctttgcatatgtggaaagaagaataggaatggtgggagtcctgagaaaaaaaacgaaaaaaagctattaagacatacccaaagacgagaagagcgcaattcaacatttgtgttgtccttacgatattttaggaagcttctcatgtaagatgctaaagagttcacttgcact

SEQ ID NO: 106174 - DNA, 466 bp, Arabidopsis thaliana columbia
  unsure (1)..(466): unsure at all n locations
cacgccgtccnnngcgttattcnntaaatctnnccggtcatcaatgtgccanntgttctcgcnnatcgtctcgcgaccgaagtgagtcgcacccttccgtgatttccgaacgannttctccactctnnatctcgtccctcccgnnatttcactcnnccgtgccnnatcgttattaccnnngagatctgnntggtgaagccaatcgaccggcnatattaatcgatccctcccgcgaggattggttctcgacgacctcagtatcnagtatgatccatacanctggagaagattctttcatgccggataatgaaggatgcgattttaatcattggttaattacaatgaatttccctaaagataatcttccatctagagaagaaatgatttcgatttttgagcaaacttgcgccaaaggacttgctattagtttggaagaagctaagaagaaaatttatgcaatttgcac

SEQ ID NO: 106175 - DNA, 141 bp, Arabidopsis thaliana columbia
acaaatctacaggcaggcggacagcgcgcagatgcagatcaagggcggggatctgatgatcgacaagcggcggcagatcgaagtttctgacaaagccacagtaggggacaccatgaacactatggataaccacggctaaat

SEQ ID NO: 106176 - DNA, 555 bp, Arabidopsis thaliana columbia
gtccaggtcttaaagacgtcgtcggattttgtttctccaaaggtggatttcagtttgagaagattctcgacttcttcactgtggttggatctcgatgaagctagtggcattaaaaagagaaggcgaacgataaatagtagccggagcattgttctctacgtcggaaggattaacaaaaaaaaagccgtggcgtttgaaattttcgcattcaaatatattttatgttatttccttaaatggattttcttacattcatgcacaccaacacgtttgcatcagcatataattttgtttccaagttaattttttcttttttcgtcctaatttctttttttttgtttttatcatttatgtgttcttgttgtgaacattgaatgaaatatagtacctaaatgaagtaaaaactttaattataaaatggtcattgtaggcgaaacaacataagggccaatggttgtgttgggctatgtattagaatcgctagaaaaggcccgatttgacttatggaaggcaacgtgacggtaagaaatcaaaagtcaaaactgaagaaaatat

SEQ ID NO: 106177 - DNA, 525 bp, Arabidopsis thaliana columbia
ctcactctttattgtttgtaattataatccttttctttacttcatcatttcatcaggctatatagcttcaagcttgtttcttgtttttggttttactggttatcttctttttgtatgttcataattcacagaaaaagatttagccctttttgtcttgaagcaattgcttcatgtgattagaaatcttttctacttgtaggattcatcaatattcttcttgcaaaacccatgacagatttcagttttctcatgcaaaagcttttttgctctttcttgggtttttgtctttctttcttcgatgtctttttcttctctttggtggacactatccagatttcctgacaaaagcctacttttgcacctgaaataaatccagcaaaacatcatcttttgtgtcatatgattatatctggaatttctaatgcttgaaattttacgttcacacctctttatttgtcttatcttaacaaattaaagcatcttcaagtctcacgtctatgtcaaagatgcaacacgttcctgaag

SEQ ID NO: 106178 - DNA, 465 bp, Arabidopsis thaliana columbia
aaatacaaattaacgtaattttattaaattactagtcgttgagtctacgagttcttttgtagaactgaatagaatgacaatggatgagccaatttttagaaaatattgtttatatatgtaatgtattgcagttcagtataaatttttagtgttaaattatatgttttaacatccggtcgtaaatcaaacatgaaaaataaataaataaaattcatctttgtggttataaacttactccaaataaacaaaaaagtttggctattttataagaggaaacaccattttcaccatggccggaataatcggtaaaaaaatgttacatctagcttgttgttggcaccttatgttcatgcatgtgaaagtataaagatctacttaaccatccaaaaaatttatgatataccaaatacgcaatttttttgggtagttacttaaattttaaatcccgttttttctggtaggttt

SEQ ID NO: 106179 - DNA, 465 bp, Arabidopsis thaliana columbia
acgatcatagctcaagcattgaaaatcgacgttcaaccgctttatggtttcttcgcccttaacggctgccttgcaaggcagtaacttggggttcctcctaagctacagaacgagtgtaacctcaacaacctaaatgttctccaagccaccgaaactatcaagagtgaagccggtcagatcgagtactgggaccacaaccaccctgacctacgagaacatggactaccctgctcgtgctgacgtgtacaagcccagcctaggtcgcgtgaccagtttttacatctctacaaaatccatctcggagtttatcaaagctcattgccactcgagacgttctccatgataatgcgatgctgctttctaattacaacatgtacgctgacgacatcttggtctgcactggaagacacggcaggatccacgtggtcaaccacaacggacagaacgtgttggaccaacacgtgc

SEQ ID NO: 106180 - DNA, 341 bp, Arabidopsis thaliana columbia
gtggagtctacatagctagggctaatctaacgcctatctaaacatgtctgacggaatcaaacaattcacaatcgtcgacctcaatatggcagactgagagccggcatttctttgatgccagttgatttcagatccacaaagctcatatatgaaaaaacgaacatcaggctaaccgaaacaggaggatgagaataaaacagagctccatcacgcagataaacattatcgatgatcgaacgtaacagatcacaggttgaccagcgtgtgctcatagcaagaacacatatatgtcacatgctgaagggctgtggttatcgtctaatacaaccatcacaactcag

SEQ ID NO: 106181 - DNA, 503 bp, Arabidopsis thaliana columbia
gaaaaattcagattttgaaatgaggatatcaagatgccgcttgttttcgacgccaggttcttggatatccaaaattttgaaacggaatgttatgactctagagattttgtttacctctctagcaatagttggttatatatgcttacctctctaggagttatttatcttgtttcaaaatattagttggttatatatgctttcgagatctttctgatatttattctgccaactcatttttcttcctctttcctttaacctttaaatcgatttaagtagattcctatgcatgcctctctttcactctcctcttctatgcaagtaaacacaaatcctcagttttctacttgtttacgggatctggatattgactaggagcagaactttatgtaatactatggtataatggtttagcataaagagctattcactttgtgcccaaagacagcttctgcatagatgttgcagaccaaataaataaaacttcatgctgtgtttcgacatgc

SEQ ID NO: 106182 - DNA, 205 bp, Arabidopsis thaliana columbia
accgaggatacagatcaagcttagaatagcgaacatgcatacagctcttctgctcaagaaccaagatgacatccgtggaaacatcgctcgagtccaagggcacggcggtgtcattaggccaacatgagaggcgccagcgacctcagtgcgaggcagaagaccaagaaggaggacatggaccacaccacctaggatctaggagacc

SEQ ID NO: 106183 - DNA, 326 bp, Arabidopsis thaliana columbia
  unsure (1)..(326): unsure at all n locations
cgggncgacccacgccgcccggaaaaaaccaanacaaaacaaaggccaggcgcaggcaaaaanggccaaccctggaacaagagaaggngccaccggaacaagaattcagacaagaaaggggggcgggccgacgcaagagtgaaaagaaatgacaaaaagaaaatgggacatcgacgcgaaagagacgatgagagcaagaggacaaaacggacagggcacgaggaaatggaagactagaacggcacctgaaatagaagcaaagcaaaaagagaagcaaaagagaaagccgactagaacagcgcgtcaaaaaacagaagcaaggaaaa

SEQ ID NO: 106184 - DNA, 526 bp, Arabidopsis thaliana columbia
  unsure (1)..(526): unsure at all n locations
cccacgcgtccgcccacgcgtccggcggaaaatgtgcctgagcatgcaactgattccatgcatgtttctcaaaacaacgtgaatgatacttctacagctttggctattgaacacgatcatagagatggcacaatcactgctagtgccaataagattacagatacggttgacgagaaaggtgacaaagatgaggattataaggagaaccttcatggagtgaagttggaagaaactctttatccagatgttcctgaacggttggaagagcttaaggaagtgaagggtaatgatggtgatgccaacaaagcggaagttgaaggcccggaatgtgttgaggaaaatgctctagctaatagaacgcctgcagaatacattagcagtgtatcggatagctccgtccacaaatgcaaggataaaggcaaaaattctgatgtccctcttacacaattagttggaaatgctctcttntctgaaagcaagactgaggatcttcatgacaaggataaagatgaaaaagatgacaact

SEQ ID NO: 106185 - DNA, 294 bp, Arabidopsis thaliana columbia
atccagagtgattcctaatatagagtcgcaatcaccttttgattatcttgtgcgtgttacatacagtatgtgaatgacgttaaaaccatcttaaaaggtgcaattcatattcatgaacaagcaatttgtgaaaaataaaatcttttagttttctatatataactatataataaaactatcaaaatgctattaattaagagtaatttaagactattaaaccatattttacatgttttttttacattactatcatttaatggtgctttctagttttttatatgatggatgagtcta

SEQ ID NO: 106186 - DNA, 389 bp, Arabidopsis thaliana columbia
  unsure (1)..(389): unsure at all n locations
cagacgaagcttttaggcccttgtcatccattctcaagaaacggttttggccacttgactcttttcccaaagtatcagtctctggcgatctctgaagtgttttccttgaataagtggctagagaagaatgccttctgatactcctgttaatagacgtcgagccatcagtctccattttgctcatcccttgctcaggagtcttgtttgcaaccctaatgggtggacacgtaattatgctgctgagcaacacctagatcagtagagaccatcgcttcaaaaggtctgtccgtcctttnaggagttaaccaattatctttggacgtattacataatgatgacccttcctcaagagggaaatcttttcctcccggcttagagattttatctgc

SEQ ID NO: 106187 - DNA, 369 bp, Arabidopsis thaliana columbia
aacacatacacacatagcggaaaatggcaaccatgtggttcctggaatgcgcaggtttcgctttgtgcttactggttaccaagggtggcatctaccggacggtggttgtgttcgaagaagatggcgccactaacccaataggcccaataatgaggaaatgccgaacggagtttgagaaagaacatcacctaagagcttgccagcaattgatgctccagcaagcaaggcaaggccgtagcgatgagtttgatttcgaagaccacatggagaacccacagggacaacagcatgaacaacagctatttcagcagtgctgcaacgagcttcgccaggaagagccagattgtgtttgccccaccttgaaacaag

SEQ ID NO: 106188 - DNA, 106 bp, Arabidopsis thaliana columbia
  unsure (1)..(106): unsure at all n locations
agtcaccgcaagaatgtttgacgtgcatactctgattgcagaccggcctaaaccgtgaggtgatcatgctcnattctccgcctatattatcataaataccttctac

SEQ ID NO: 106189 - DNA, 420 bp, Arabidopsis thaliana columbia
cggaagagaaggccctcggacatggttgttttactctttgcagtaatttattgaaattgtaacaaacgagagaagtaataatgatccttattcgaaagaaaaaaaaatgatccttatttgtgcttgacacaaccaataaaaatatatgcaactccatacgaagggaggaaacgcccctatgatggtttgaagacctaaaatattggttgttccatcttgaagttgaagaatccaagcaacactagacgtttaatccttttgtttttaaggaccatcagtataaaatgtgaaaattatggtttgtaaatcacttgaactatctctactctgacaatccactcaagccttagctatgaattagatctcactttttattgaccgctaaatcatgcatctccaaagttgttcgatcgatgactt

SEQ ID NO: 106190 - DNA, 441 bp, Arabidopsis thaliana columbia
cacacgtggccgttactcctggggaccactgagcctgagcgtctacttctaattagtctaatcacattaatttgattacccgttcattattattagatttcgaagaaaaccattcggttgtacaatagtaagttaaagttattacaaatcgtattgaatcaggcaccactaaataattatttgattaaaaaaacaacacatgaatgattaaataatttaactaattaacatatcatatatagtataaggttggttgattatgcgatcagtccacccacgaaaggcactccggtttgtccaatccaaccttcaccaacaaggaaattggtgaccgtgaaattggaagcatcagttgcgttgatgacgtgataaccaggccatagtgactcgtgttgttgtgtcagatccaggtccggttttttatatttcgcgtagaaagtg

SEQ ID NO: 106191 - DNA, 506 bp, Arabidopsis thaliana columbia
ccttacttgccgcctccacaatatacttctccgctttgtctacatattgaaatggaacgttttcgataaatttacggatcaaaaaataaaaataaaaagaggtcagaggatgaattaatggattggttacctatagtggcaggagtatcgttatagacggtggaggattggacgattgtaactcgcacggtggtggatggggcaacgccgttaaaaggagttgcgttttggacagttgacatatctttagtactagacatatcaactcgagtctttgttttttactttggttcatgacactcagagacttgagagaagcaatatatagactttttttttgttttttttttgtggtcacgtttattttcctattggagacggtaacgaagatcgaacctgtggtggaaatgaaacaaggtgggactagcccacgtggtttcttttctctgcattgaaatgtttttgtttttttttgtaaagttcacatcaaacctacttattattga

SEQ ID NO: 106192 - DNA, 353 bp, Arabidopsis thaliana columbia
ggaagcataacgaacaccaactcggatggagaacatctaatttttggtttagtaatagcacgcaagataaagctacatgtctaccttaagtacactaggtctgacatctgtgcctttttactacgagtgcgattttgtcgagttctatgaaactgtgtctatcactctcttgattagcgacactgtgttgttaatgtgaggtgccagaacataatggcgacatgaggttgaagagcatactgtgtcggtagagccgatgaggctacgcaccctgcctgcactagagcatctacagctgtgtgttttttcacgtgggtcttggtctatgcagcttaaggctgtattccctgtct

SEQ ID NO: 106193 - DNA, 538 bp, Arabidopsis thaliana columbia
  unsure (1)..(538): unsure at all n locations
ggaaaacttactgnttattttatttttatttttattttttcctttcctttcctcttatgttaaatgatgaatttatgttgtataatcagaagagttaggaatgaaaatggaaatatatagtgtacaaaattatactaaaacaggtcagttttgttaatatacattatacttttaaacatagaaatatatagtgtacaaaaaaataagggactatattacttttcaaatgcaatagaatacaatgctatttatgatatgtatgccatcaatatatattttagtctagctacatttattgaaatttgcataacttatgtgctacagtacttgaaagaaatatattctcagaaaattatatattcaacatattcagttttataaactngtgagtaatttcaaaactaattaaatttgctattagcaaatatgagttgtttctttagaattttctttnttgacacacttgtgagttgacttggatactctgctntgctgtgttcattttggatattaataaaaatcaaaactttattttgtt

SEQ ID NO: 106194 - DNA, 506 bp, Arabidopsis thaliana columbia
gttcaaaaacatggaagcattgacttagagtggctaagagatgttcctcctgacaaagccaagtaagaaaattatttacaaatcttgagattatatgtagcctctggttaaagaatatatctcagtaaatggaatcgatagtaattgagatacatataaatgagagatacttgatagtgactactaatggttgcagggagtatctactaagcataaacggattaggattgaagagtgtggagtgtgttagacttttgtcactacatcagattgcattccctgtaagtcaatgaaggatactgaatactcagaccctaatgaatgtggaacagatacattaatagttacgtatttttacaaatgcaggttgacacgaatgtcggacgcatagctgtaagactaggatgggttcccttacagccattgcccgacgagctgcaaatgcatcttttagagttgttagaaaaaaaattaaagatcattcttcaaccatgaaagggaacatg

SEQ ID NO: 106195 - DNA, 290 bp, Arabidopsis thaliana columbia
gttaacactaaactggtttatgtaaaacggattcataaatgtatctagacattcacttacataaaatgcatcacaaaatttcacccaattacggttctgattcggtatagggaccacctccaaaattacccaataaataaagagtggataacaactagcataaaataatcaaagcatccactaagacacaaaacacaagttcataaagatgatgatgaatcacataactttaaataaatattctttcaaaaaggcaaaacttttaaataaatatcattcgcctgtcggcc

SEQ ID NO: 106196 - DNA, 349 bp, Arabidopsis thaliana columbia
cagccttatattccatatataatatgtggcaagtccagaatgttatcacgtatgtcatagttatatgtgcccaaaacctggaaccaagaaacttgcacccgtcttagttgataaaatagaaagctgcacaataccatcacacactttgttaaaaagaaaccctttttatttgacaacagtctgtaacttgcagattacaacatgtcaccaaacttagcaaggtgcttacatttaccctgaactgagagaaagcatgattgaataatatcttggtgagcctggtggcacattttgtattgacagcttatcgacgttactgaatgtcaagtcatcgatattttctagagtt

SEQ ID NO: 106197 - DNA, 529 bp, Arabidopsis thaliana columbia
cttcaatttcactctctctcttgagtttattcttctctgctgtatcatatcaaatcaacggagtttgagtttcttttccgattccggcgatggggtcagtcctcgatccaggcgagttaactgagttagctcagccgagtttcgaggagtttcagaaacagacgtcgttgatgactagctgtactcttctatggcaagagctctccgatcacttcacttctctagagcagaatctgatgaagaaatctgaagcgttgaagcagatgattgaaactctagataaccagactcagaccttgctcgagtctctgaagcgtttgaggtaacaatcgaccatatcgtttagatcgtaattgtgaaagtaggtgtactgagctatagcttattttgaatcttttgagaaagcttgttgattttgttgttcaagttcatattttgttttctcttatgtttcctattattattgttttttatattttcttattattttatctcttattttatgttttttttttttcatacttttttt

SEQ ID NO: 106198 - DNA, 503 bp, Arabidopsis thaliana columbia
agaagaaaaagtggagattgttcaccatggtttatcaggttggtcccatgttcacgacatatataagtaaatatggggttttatccattaattggtaaggcaattttttttgtttaaatgatgctgtgccgataattaacagaacaacgaaaacatcatatgatattttaaatttaagatataattaaagaacaatttaagcatcatatgatatttttaaaaagtgtgccaaattatttaaccgatagcaaaagttgaactagaagtccaagttcagcctcataaaaaaaagttgaactagaagtccattgtccccaaaatgttaaaaagttgaaccgatagcatcaaataattttaagtttaagatgtagataataatcgtatgcaatgccatagaacttatgatttatatctatggcattgcatacttatttatttctatctcatgtatttttacacaactcgctatttataatctttgattcatttagtaaaagttttgt

SEQ ID NO: 106199 - DNA, 412 bp, Arabidopsis thaliana columbia
gcagatgttgaggataatgcagctgctggtgaagatgatgcagacattgctgtctctgccccatcaaaggacactgtcgaggaaactgtggtggagactctcgagctagaaggatagaaacaaatgcagatgttgtttttgctgagaacaatggagatgttccggttgcaaatgtggaaccaacagtaaatgaggatccgaacgaggatggagatgaagaagaagatgaagctcaagatgatgataatgaagaaaatcaagatgatgacgatgatgatgatggggatgatgatggatcaccaagacccggtgaaggatccataagaaagaagctttggacttttctcactacataaccatcgcacgtggttgatctaggagattgtactttcacatttatgtggaaaacaat

SEQ ID NO: 106200 - DNA, 491 bp, Arabidopsis thaliana columbia
agtctacatgactactcaagtttgttttcatggagatcttgaaaacttaatccgccattgcttttatgtaactgggcaaatccatatttaaattgttgggtataatgttttgtacccacaatctgataggataaacccgtgtaacactttttttatctaatcgatttttatccatttttaataccccgactcggctcctccttatagtggtctaacactacaatgaatcaagtctttgcagtagatagaatgcgattggtttccttatttgcatttcactatcttcacaattacgtcttgtcaattccaaaatctcagttttatctctttggatttaaaacgtttcaccaataggaataattggtagataaaatgtcattatctgataaatagtattcacaaagatgagaccacgcgtcgcttgtttagttaacgtcaacgaatatttggagttttcatcgaacatcataataagacgtcacgtaagctta

SEQ ID NO: 106201 - DNA, 126 bp, Arabidopsis thaliana columbia
aggataatgggtgggtcaaatcgggtacccaaatcggtgacctgtcccgtgggaggaactgtgtacagttggtgcactgcgtttgatgggggcccagggatcgccgtaatacttctctcacttgac

SEQ ID NO: 106202 - DNA, 490 bp, Arabidopsis thaliana columbia
  unsure (1)..(490): unsure at all n locations
cacaatcattatgcgtttagttacacacaaaaaaacagcaaatggcccaagattcaagctgatcaatccgattccagaatgttattaccttttgcagttctcagggaatcacatagcatgagcaaggcttcaggtggcataagattgtaggatgcgtcgattgagatgagttttggtgccaagggtatgagctttgacaggaatctagcggtctctagtcctccacggtttttgctatagcgtgaaaccacaaaacaaacgtgaggccactgaggcaaagcgatgcattgtatacaaaaatagaagctatggattttgctttggaccttatattaatactcagcagcttcttcgacactttttcaagttttctgcctaatgcaagaaacccgagaggacctagtcctatacccataatattgagcgactcgatggagattgtgaaagagttactacagcctctgcaacctcgctaaagaacangaataat

SEQ ID NO: 106203 - DNA, 311 bp, Arabidopsis thaliana columbia
aggagagctgaatgctacaaccaaacactgcgcgtacacttgttattttgcaagccgctggctcgcaagagattacaacgtagatgtgtcctaacaagcgcgtatcatcaactcatgacgtatacgcgcgcatcatccgtatatgattatccgaagtacacttatacctatgctgagcataccgcaacgcagcaactgctgataccacaacgacgctcaagtacgatgatacttgatcaacatgagaagtttagtgacaaaactgcgaggaatttaaatattcactggattactgtattcaaaattctcta

SEQ ID NO: 106204 - DNA, 556 bp, Arabidopsis thaliana columbia
gctaaatgtgaaaaaatcattaacgaaaaaatttgaacatcactaatatagtacctttgatatctcagggattgacaaatgcttaactcctcctaaaggcatatcttcttccacatgcttatctccttccgccggtttatctttttgtggcggtttgtcttcctccaccggtttatctccttccgccggtttatctttttgtggcggtttgtgtccctccgccggcttatctttttgtggcggtttatctttttgtggcggtttttcttcctcagccggcaatttatcctcctcgaccggcttatctcctttcagcagattgtcttccttggatggcttgtcttttctcggcagcttatctctttctggcggcttgtcttccttcaacggattatctcctcctgattgcttgccactttctgccagcttattaggcccatcaggcctaccttctcgtgcatgcaaagtagctctggaatactcttctttcctaagtgtcattcacacatacataatgttaactaacaccacaaataaaaatgtggtcaatgcatgt

SEQ ID NO: 106205 - DNA, 316 bp, Arabidopsis thaliana columbia
aagaaaacggtatcacattagaggaaaacaatctaagtgtaagtaagtcggaaggttataatggtggtgtggctcaggttatagaacggccatcatggaagtgtcaggacttaaagtcaccggaatgtgtgaagcagaacaaagttgtacgttcatagtcttcttatatgtatttacacctaaaagagggtaaaaggtgcagattcaacagcattgtcattttcagtacaatcttaatgttgtttattttaatcctgtttggctttttggggtaatggggtggatttattgtggattatttggggaataattttta

SEQ ID NO: 106206 - DNA, 552 bp, Arabidopsis thaliana columbia
  unsure (1)..(552): unsure at all n locations
gacggattcgatttgatctctgtttccacatggaccgtaataatagtcaatacatatcatatagtcaagatgtcggcgttgaatatgtttgggtaatgcaattacgcgttgtatataattaggctataaccggtgcaagttatatctccttgaagcatttggaaatgtatactgaggcaatgtcttcaccatctaatacaacttctcaaaagttcatccaaatttaagtaacccaattgatctatccaacaaacataagatttgagagaaagtttagattttggttcatatttataagaaaatatcgaacaaagtttatggtcatcttcaaatcgatccgaccgttggaagagatttatcacaaacggctctattgagataagtgatttctgtttttctatgaacaaataaataaaataagttaccgaagaagagccaaagtgtgggcttaattcatctntcagatctcaatgaacgggaatgaggcccaattagtttataatgggcactattgaaagccactagacatgtcttatgttcacaaatgatgat

SEQ ID NO: 106207 - DNA, 492 bp, Arabidopsis thaliana columbia
gttttggaaatcttaaatgactaacagcagaatcttttcaacatttaaattttaattactatatctaaatacaaaaaccaataattttttttttctataagaagctattgcattttatatatggaaatatattttcttttgatctcaaatggcaaacatataaataaacaaataataaagggaatatcagtatttcatccacccagaaaaatgtatgcatagcactttccatgaaattaggtttgtgggattttgttgacaaaaaaatattcgtaaaaataaacatgtgtagatggaatcatgatggcattcacacactagaagatatatcgcgaattatcttcaaacttgcgttggatgtttttgacgatatcggaagaggagtgaggtctaaaggatgttcctactacttgaaggagatgttagaagaggtaattaatataaaccattttttcagtaataggagaaaacaaaaacacacacacatcagta

SEQ ID NO: 106208 - DNA, 294 bp, Arabidopsis thaliana columbia
ccggccggattccggtcgaccacgcgtcgataatgaactctgtgagtcatttattttgagaagcttcatcgtttctggaaaatgctcatgcactagcggaataaaagacagatcttttatccactatagaaaccgcgttttctgaaaatgcggctgcgttttgcgatgaaatccgacgttttagcggacgctatctttctggtgattattccactgttttgcgtcggaatacggatgatttcgggaagactgaccggcgtattcgccaccgtcggaaatggctttgatctgggg

SEQ ID NO: 106209 - DNA, 500 bp, Arabidopsis thaliana columbia
cgactggtgggtttcttgcaccggaccctcctccgtccgggggattaatagtcccggacatgattgctgaaaattagttgcctgcaattgttatcaataaacattatttaaaatatagaaatgaagtaatgactagcttcttaatgtgttaatgaggtatagttttaaaccttagagggagggtattattatttggaggaactgtagattttcttgagagattggaatgttgctgcgtatttatataagttgtgatatatttaaaagtcaactctcaagatcacacaacgtgaatttctttttatttttttgtaagataaaacatgttgcactttgataaattcagcgaaagccaacatgataatactattaaacaatattgaggtgtataaattaatatggttttgtgaggaatgaaatatcaaaaggttgacttttggcaattatgcggtgtgaagataggtctaaaaaaagtatacataaaattactgttccaaata

SEQ ID NO: 106210 - DNA, 468 bp, Arabidopsis thaliana columbia
  unsure (1)..(468): unsure at all n locations
aaaggattaatctttcattcatctatgttcttagttatcgaggatgttcttgggtcatctggtgatgaaaattgagctcagattattcgtgttttgtattacaggttttacttatggttaatgcaatcaaaggagtgttcgtctcttggtacttcttaccgttgttacgattcctaagcaaatcttgatgaacacaattgaatcattcattgtttctttgtatcttttgtttgtttgcagcgatattccgatgacacaattcatagtgaacatgaacaattcgatgcctccgtctcagaaattcataattcatgtacttgatagtactcacttgttcgtgcaaccacatgtagagcagatgatccgcagcgccatttctgattttagagatcaaaactcttacgagaagcccacttcttagatcacatcacatcacactngcttcttgttttctttcatttgattcaa

SEQ ID NO: 106211 - DNA, 458 bp, Arabidopsis thaliana columbia
gaactcggatccaactcgcagttcaatgacccgacctgacaatccgacccgacgcatctccactcgggttcttgatcggcaaatatcatcaccatcgtgtggaacgcctctaaagcccaagcaatacacgtcaacacgaagtgtttcaactgccacctcccaaactcgccgcaatatctttgtaacatctcatctatgcataatctctcctctccctccgcttctttcttcaccggaattttctctagcagcggttgtcggacatcgttaccgtttctatcctccggagattccataatttatgttttgatttttacagtgtttttgtttttgtgtttgtgtttttgtttaaaaggcgttcttgatttggtttgacgcgaagaaggaggtggcttctttgtcgtatttatatctcttggttatcggaaaacaatttttccttctttttttctctagcg

SEQ ID NO: 106212 - DNA, 459 bp, Arabidopsis thaliana columbia
gggacttatagttgtgctggttgtggaactgctctttataaatcgaccactaagttcgactgcggttgcggttggcctgcgttcttcgacgccatccccggtgctattaaacaaacagtaattcgttgactctctttctctatagcaaataacatatttcgagcatccatattcgtgaaactcatttatatatgtgcatttaattttgacgtttttttagtttgaacctaactgatatattggcggaacaacatgagacatcacatgcaattatgcttaaagtactttttgttgtttttataattcatcttttggcttcttcttttttatcgtatgactttttatagaagaacccgccaattttattggccaccacgtcaagattctcgtatgtaaaaaagagttaattagttttttggtgttagaaaagtaattccaaaacaactttaaaagattgac

SEQ ID NO: 106213 - DNA, 167 bp, Arabidopsis thaliana columbia
aaggcaaacaaactcggtctgtgcttatcaactaacggcctgggcttcctactcaccaactcttccatctaccacactgttgtctagtacttctaatatgacaccagcaaccacatcctcccaagacataaatgtcatatgtaattacaaaattcacagcacctaat

SEQ ID NO: 106214 - DNA, 467 bp, Arabidopsis thaliana columbia
cgatttttagggatctgacttcttttcttttttttttgaattttttgctaggtttctgaattaaatcactcgtcctttattgtgtaaataatataaacctagaggtccttaaacggaaatattatgttttatcggcccgatccgacccaaactgtatacaccaataataatataacacgtggagattcgatcttttttcttttatgagaaacgacgtcgtattatattttgtttgccagaaagaaactgaagaactcttgactgtctctctgcggcgaaaaagagagcgaagcttgaaatctccgattaagccatgaatgctcccgaacgatatgagcgattcgtcgtccctgaaggcaccaagaaagaattgaagtttctatcactcgaaatcatactcgatagtcctcttacatgtgctaaaccctctcgatttctatgttctagggtttcttatgatagggata

SEQ ID NO: 106215 - DNA, 371 bp, Arabidopsis thaliana columbia
  unsure (1)..(371): unsure at all n locations
gcgatcacanaacgagtacagaatacaanattcatattttgtcataaaaaatggcgaaacacagctctgtnctggtcttgcgcaactgttcggcctcgtgcattcctactcaccaacgcgttccatctacccgcacctgttgtgcgagttacgaccgaagatgacgaccagcaacgcgccatgggcccaagacaagaaatgtcagaacggagtttcagcaatcacagcacctaagagcttgccagaaattgatgcccatgcaaatgaggcaaggccggggtggcggcccctcccttgaccatgagatcgattnggaagacgacaatcagaacccacacggcccccagcagggacaccagatccttcagcag

SEQ ID NO: 106216 - DNA, 502 bp, Arabidopsis thaliana columbia
  unsure (1)..(502): unsure at all n locations
ggaanttcccgggntcgaccccacgcccgtccgtatttaagcatcatnncattatagttttgggtctcccctttttttnncttcttcttttcttttttcttttcttagctacgtcnntcttcttcaatagcttagatcgagagatgttagagatccattaccggtaaggaaagggtgttcttgatccggattcttgatcnttgatacctgaattgggtattggagaggctgtgaattgggttntggttaagggccaaagagacctggagaaatatctgaagaaacaaggattctctgggaattcttatagaattttaatgggagatatgagagagagtaatcagatggatcaagttgctcactctcttcctcttcctctcgacgccgattttctccctcgcatgatgccttttctccaccacactgttctaaaacatgggaagaagtgtttcacatggtacggaccgtacccgaacgtgatagtaatggatccagagacact

SEQ ID NO: 106217 - DNA, 380 bp, Arabidopsis thaliana columbia
  unsure (1)..(380): unsure at all n locations
ggcttagttttatattcggtctgtcataatcgccgtcattactcattaaatatacatttattattggataattacctatatatatactagtaattgtatgattattacgtcgatgagtcataggtagatcaattaaattaaatattttgatattattttctttctttttcggtcttctgctgtcaccaggttgtggacaaatagtaatatttcaacctaacacgacaaattataagtcttagtcgtgttgataacaaattctcacccacgtaatcaaatttattttcacttgtgtactgtgtacaataaagcttttcaaacgtgttaggttaaaaaggacaacgaaacttgaaacatncaactcattttcatttgtctga

SEQ ID NO: 106218 - DNA, 467 bp, Arabidopsis thaliana columbia
gaaatcgcttttggagaggaaggctaagggtcgtgcagctgctgacaaagagaagggtactaagtttatcaagacgaagcttcgttatcacaactttcgacggctgaatcccaacgttcacggtggttccattcaccttctctctggtaatcctctcgatgtgaatcacccacttgcgacggtaaacctgaacaactttgccttcacgtcccttgtaagtaccacgaacgatctgaacctcgtcgtctttacggatcggcatggatctgactcacaaacgagtaagaatacaaatacaaatagcaaaaaaaatggcaaacaagctcttcctcgtctgcgcaactttcgccctctgcttcctcctcaccaacgcttccatctaccgcactgttgtcgagttcgacgaagatgacgccagcaaccccatgggcccaagacagaaatgtcagaaggagtttcagcaatca

SEQ ID NO: 106219 - DNA, 467 bp, Arabidopsis thaliana columbia
agcttcttctcttcttcattacttccgatcaaaatttgccggtgtttactgttgcaatagccgtcgccactcgccaacggtggggtatcggtagattgatttctagaattagagggagaaatagaggaggctctcaatttatttcgtgaatgttaaagacggtcaacgcaaaatcacttgtgaagaatctgatgctttgtgtcgtcgtggtcaagcaatttcagattgatccgaaaacaatctgtcagatctttgtgtaaagagagtagctttgagggagctgatagttctgttcgttgcccatgattagagatttagtatattctcacggatgattcagcgagacctgtttcatcgattagcagatgaatggatggggtttcttctgaaattgacacgtagtccattgttttaggatattcaaagctagaggaaaacaagtttttggttgattcttttgatttcat

SEQ ID NO: 106220 - DNA, 281 bp, Arabidopsis thaliana columbia
  unsure (1)..(281): unsure at all n locations
agtgcctagtctcgaccacgnnctcatatgcgccctcgagctcttcacactgtacctgnatagagcgaggcttgtgtcgcattcgtaggtcgtgggacccaaccacngtnctcctcagctttccgttgcttcagcgtgtcnntcctttgcaccgttaccaatcatcgacgtctaagcgcgtctctaccttcgcccnntctttctttaacactctgcgaagtctctctcttctgtggctaaaaggaccgaggttcttatgcggaaaaaggtgatctcctgga

SEQ ID NO: 106221 - DNA, 359 bp, Arabidopsis thaliana columbia
  unsure (1)..(359): unsure at all n locations
cacggcgatgaagtgtcaatagaancttctattgtacacaaatgatctaattattcaaaccacaacattgtcttctttgatgttaatatataagtcttgcatcttatttagagtgtttgtgtttggttccggttgatctgtgtaactgtctttatgtaatcacacaagtgtatgctgtctggttagtcggagacagagtaagaagacatcctacacatgacattggagaattataaggtaaaatcttgaaccatagatttctaaagacttttgagaaccaaagtaaggattgtattgaacattacaagtttcattggggaatttccacaaacaccttagcttgccaataaagcattaac

SEQ ID NO: 106222 - DNA, 378 bp, Arabidopsis thaliana columbia
  unsure (1)..(378): unsure at all n locations
cnccaaccncttccngaacaagangttgaggtggttttnnnaagcncanangacggagaggggganattagngaatctgaaatggatgattatggagacaaaatgtacctaaaccttaaaggtgggaagctgaaagtgagactctctcctcaagcttttatctgtccttattgtccaaacaagaagaaaactagttttcaatacaaagatcttcttcaacatgcttctggagttggtaatagcaattctgataaaagaagtgcaaaggagaaagcaagtcaccttgctcttgtcaaataccttcaacaagatcttgctgattcagcttcagaagcagagccttcatcaaagcgtcagaaaaacggaaaccctattcaa

SEQ ID NO: 106223 - DNA, 407 bp, Arabidopsis thaliana columbia
  unsure (1)..(407): unsure at all n locations
gaaagaagtaaggaagctcgctgtnctagaactttttcagtagtaaacaagttcactcgatacaaccgatgaaggacgaggaggtcaagaaactgatcgattcaatctccgaatcagctgctcagaagactccgatcaacttgaacaagacatttctggctttaactgttagtgtggtctgcaggacagcgtttagtgtgaattttgagggaactgtgctcaacagtgaacgattcaataacatagtccgtgaggcgctcgagatgttgggaagcttttctgcctcagatttcattccgtatgtcggaaggatcatcgacttgttgacgggtttgcaaggacggcgagagagaagcatgagagatcttgatgccttctatgaacaaatgtttgatctgcataaacat

SEQ ID NO: 106224 - DNA, 349 bp, Arabidopsis thaliana columbia
  unsure (1)..(349): unsure at all n locations
catccgctagatccagcctctggccggccgagtgnttttatcgaatcgcaaacgaacagacactaataagaatagtctgacaaactctgcaactggaataatgacaacgagcaatttcttgaaaacgctctatctttgaggagtgattgatctcgatgggacctcaatcaacacagacggcgttggtggcgacatgttgaggaaatacttgcgcgaatatggaaaacacaagggatggaagagaatcatagcaaatagacggcaaaactacattagaagctgctactacgatcggtgaagattatgaacttgcttgtaaagatgacgaatacaattctggactctaccc

SEQ ID NO: 106225 - DNA, 442 bp, Arabidopsis thaliana columbia
  unsure (1)..(442): unsure at all n locations
cactctcacacttcganancnccgtttgaggtgtcntagagccaacngnccngagaggncgggtnctccaaacgcggggcctgcgccgccggcgaaactatgtctcagtctatccaattctccagtccttcacacactcctcaccttctccatctccctcactcacaattcaaccgtcctctctcctctatctccttccgtcgcttccctctaacaaccatcaaatacacttccatcagagcctcctcgtcaccatctccttcaccggatctcgattcatcgtcctcatcatcatcctcgcaagtacttctctcacctaacggtactggtgctgtgaagtctgatgagagatccgttgttgctacggcggttacgacggatacgtctgggattgaggttgatactgtgacggaagcggagcttaaggagaatggattaggag

SEQ ID NO: 106226 - DNA, 153 bp, Arabidopsis thaliana columbia
  unsure (1)..(153): unsure at all n locations
ganctctccctcccncnncnccgttttatttcattcaacaancnccaaagaagagggaacgcagnctctncangggggaacaccccacccgacnccgnagaaccagagaaccacgacccaancgagaaggagaaacggcggcaacgncgagga

SEQ ID NO: 106227 - DNA, 129 bp, Arabidopsis thaliana columbia
  unsure (1)..(129): unsure at all n locations
gtttcgagttacatactaaaaacttncccttnnatttattaggaagaaacggggattacaagtgaggggcgcgcagacacatatttgacacgtacgttaaaggtaaagggaagtttcgagttacatact

SEQ ID NO: 106228 - DNA, 157 bp, Arabidopsis thaliana columbia
  unsure (1)..(157): unsure at all n locations
ctnngctctcagngancgganaaaattttcgtggtattaagngaagnnnccggcaagcagagggganaagganaaggagagggggcaccaacaggagcggcnngaagcncagaagacagaaacaagcgnngacgaaaaagccgcagcgaaacaacac

SEQ ID NO: 106229 - DNA, 414 bp, Arabidopsis thaliana columbia
caaatggcctagaggatggcttctctacggtcttctcttgataccggcaagacaagcttggtccgtgctgttgtccaggaatgtgatgcacatttgattgttttaagccctcattctgtacatcgagcacatgctggagaaagcgagaaagtcttaagggaagctttcgctgaggcttcttctcacgctgtttcagacaagccttctgtgatttttattgatgaaatcgatgttctttgtcctcgtcgtgatgctagacgagaacaagatgttcgtattggcttctcaactgtttacacttatggactcaaacaagccttcatcatctgcaccaagagttgttgttgtagcatccacaaatagggtggatgcgattgacccagcgctaaaaagagcgggacgatttgatgcttt

SEQ ID NO: 106230 - DNA, 481 bp, Arabidopsis thaliana columbia
  unsure (1)..(481): unsure at all n locations
ctttgtccgtttggttagccaaacgcgggcggtgnttttgatcgttgggcttcgattatcaaggaatagagactttacaaataaagcccgaagattggcattctattgctgtaattttatatgtatatggttacaattatttacgttcgcaatgtgcctatgatgtggcaccaggtggcctcttagccagcgtgtatcatcttacgagaatagaatatggtgttaatcaagcggaagaagtctgcataaaagtatttactcacaggagtaatcctagaattccatccgttttctgggtttggaaaagtacggattttcaagaacgggaatcttatgatatgttaggaatcacttatgatagccatccacgactgaaacggatcctaatgcccgagagttggatagggtggcctttacgtaaggattatattgcccccaatttttatgaaatacaagatgcttattgaatgataaaaaatga

SEQ ID NO: 106231 - DNA, 363 bp, Arabidopsis thaliana columbia
tgaggtaggaagagaattattaaatgtttcattgaatactgagagatcacgaggctgatggatgggaacgttctgatttcccaatcatctgtgagtcttgtctcggtgacaatccttacgtgagaatgacaaaggcgaattatgataaagagtgtaagatctgcaccagacctttcaccgttttcagatggcgacctggcagggatgcgaggtacaagaagactgaagtttgtcagacatgttgcaagttgaagaatgtgtgccaagtttgtctcttgggatcttgagtatggtcttccagttcaggttagagacacggcgctcaacattagtactcatgattctatcccaaaaagtgatgtg

SEQ ID NO: 106232 - DNA, 455 bp, Arabidopsis thaliana columbia
gctgtacttacacaaaagcttcaaattatcgttatacagtaattttaaatttcatgggccaaaaacgctgttttgttcacgtcatcctgtcgaaattttttcttattcacgtgggtgggtctctacttgggcccaaatcctcgacaataactcacaaagtccataaaggttaggaaacatgtgggcgtttatcttctcgagccttttttggtaattcgcgcccattgtgatattgtatagttcgtaattcaaaatgtcatcttctttttcaataacaaggtaactctaaccgaagtacaaactaaagttcagaatccatagtacagcccatcgagcattttcaccatttaatgtatgcaaattatctacttatgattgaaatcccattgaaaagatttgaactctactccttcaacttacataacgaatttggtaccaacaaaatgtaagtgatc

SEQ ID NO: 106233 - DNA, 386 bp, Arabidopsis thaliana columbia
  unsure (1)..(386): unsure at all n locations
aacaaaagtctctctctctcgatcttctccgtatcgtgctccttncagatttaaccggaaaagttgaatcacactggcgcatctctcacagtcgtcggagaagaatgcacggtcgtccaaggaatgcttctaagccagaagaggaagcagcttcagctgctaaagctgttcagcttcgctctctccagtctcagtttatgacgaatcatcacgataaaatttataccaatgaagctattgagttaagcacgaagcttctagaaatcaatccggaggcgtacaccgcatggaactaccggaagcttgctgtggaggatcgccttgccagaattgagcctgatccaaacttggtcagcgcaattcttgatgaagaactcagagtggta

SEQ ID NO: 106234 - DNA, 192 bp, Arabidopsis thaliana columbia
  unsure (1)..(192): unsure at all n locations
acccaagaaaacagacacaaanagcaaaacattgtnatacaagcacggccgcgccagcacagcgggggccctctgaaggcaacgagggacaacaaaaacaaccggaccgnngccgaangcaaagaagaagacgccagcaacccagaacgcccaagacagagacgccacaaggaagcgcagcaagcacaacac

SEQ ID NO: 106235 - DNA, 282 bp, Arabidopsis thaliana columbia
gacacagaaaatcgccaaaatagtgatgttacctttttcaggtggctacctcttaacctccaaatgactgattggagaggaaatattttggttaatcccctaacaaaatgatgatgaataattttaaaaatacagttttaacaaaataaaaataaaattatgaatatgtgtgatgataaacattaataatctgacaaacccttatccgccaactaatgtataatgaatggataaacccatagggtccaattggacaacaactttctaactttttgttccctc

SEQ ID NO: 106236 - DNA, 371 bp, Arabidopsis thaliana columbia
cccacgcgtccggaagcaagctttcttttatactctaaatacatggtattgattgtgcaaaagtaaattctacttgtagatgctactaaaaggttccaggcaatcaaagcctggtggcaggacatggccaaccaaaatcacatttctgttggaaaagctaatagccatactctgcaaggctccttgtctagaaaatgcaccacggattcccaacgaggtaattcaagttccatatctacccttctcaagttttacatcataagcttgttttcgatacccatcaccttttcatgatctgactcttatagatgtcacttgattgtattactgtattttgattcggtgattatttatctactttttggtacttg

SEQ ID NO: 106237 - DNA, 381 bp, Arabidopsis thaliana columbia
  unsure (1)..(381): unsure at all n locations
ggaannccggggcgacccacgcgnccgagggacaacaaggaagacaaggccattttgtaaatgtcagggacaacagggacaacaagggcgacattgacaacaagggcggccacgccaaggacagggacagcagggacaacaagggnnccgngacangcaccagaaggnggaacaagngagacgcggagacgncnnngccaacacnccaggcgcggcccacnggagcnacaacncaggagaacagccacnnggcaacaacgcacnncncgacaacgccaacgaccaaaaccaacncgaccgcaacccaagagngggccaagnggccggaaacaaccagcagggaggcnnnggcggnncacagcaacaacaagaacagaaaaa

SEQ ID NO: 106238 - DNA, 317 bp, Arabidopsis thaliana columbia
  unsure (1)..(317): unsure at all n locations
attttatttaaatttatttctattancatcgtatttagaaaaattgatgttaatgatgcaaatgagaaatttatttgaacaatgattctcttattagctgaggcgaagcatactttaaaaaattgaactttctcattacaaatcgtttgcatatagtgttttgcatattgtagtgtaatatattttgtggttaccaatgcacgtcgatacctttatgtaaatgctaaacattaggctagtataaaataatctcatttttccaaagtattcttaacatgattaaaaaaaaaaaaaataaaaaaataaaaaaattaaat

SEQ ID NO: 106239 - DNA, 323 bp, Arabidopsis thaliana columbia
  unsure (1)..(323): unsure at all n locations
gaaaacagcgcgacccacgcgaccgggccaacaaggccaaccangggaaggatagatacagcagggacaacaaggnaaccgagaggggcaccagaaggnggagcaggccacacacggagacgncnnngccaacacaccaggcacagcccacaggagccacaacncaggagaacagccacaagacaacaacgcacagaacgacaacgccaaccaccaaaaccaacacgaccgcaaccccagagngagccaacnggccggaaacaaccagaagggaggcacnggcgggccacagcaacaacaagaacagaaaaccgggggagcgg

SEQ ID NO: 106240 - DNA, 431 bp, Arabidopsis thaliana columbia
  unsure (1)..(431): unsure at all n locations
gaggagttgncnacannnaatcttccattgnttgcaaaaacnnagaaangacaggcgaattttacctgctggaaagtgctgagggaagcaaggatagaaccaccaatccagacactgtacttcctctcgggtggtgccacgaccttaatcttcatgctgctcggggcaagagctgtgatctctttgctcatacggtctgcaatacctgagaacatagttgtaccaccactgagcacaatgttaccgtaaaggtccttcctgatatcaacatcacacttcatgatcgagttgtaagttgtctcgtggatccctgcagcttccattccaacaaatgatggctggaaaaggacttctgggcacctgaatctctcagcaccgatcgtgatcacttgtccgtcgggtaattcatagttcttttcgatggaggagct

SEQ ID NO: 106241 - DNA, 390 bp, Arabidopsis thaliana columbia
  unsure (1)..(390): unsure at all n locations
aattagtccaaagacagcaagtttcattattctctactncagnnnagaaaagaaaagggtcattttgaatccgactggacatgcataaagaaacaggaaccatggaggaaatacagaagaagtgccccaataaaactatcttctcagtatccgtactaaaagattaatatctaattcatgctcaaaagagacaagtggtaccttgtaatatcttgcagccatgttgagcctttctatctcacaaaatatattcaccgctcgctctaggcaagacgcagcctctgcatataatattaggacgcatgaaaacacataagaattcattaatcactcttgcattacagagatgacaattacaaaaggagctttatacataccattagtgtcaac

SEQ ID NO: 106242 - DNA, 307 bp, Arabidopsis thaliana columbia
  unsure (1)..(307): unsure at all n locations
caagaagcaaaacanggcnaacaagcattaactcgtctgcgcaacncncgcccacaggaggggccacaccaacgcgggcagggaccgcaccgangnncgaaacgaagaagaagacgccagcaaccccgnagggccaagacagagangccagaaggaggagcagcaagcacaacagccaagagaccgccagagacggaggagcaagcaaacgaggcaaggacgnggnggnggnccancccacgacgaagagagcgagaacgagggcccccagcagggaaaccagcgacaccagcagagcngcaacgag

SEQ ID NO: 106243 - DNA, 431 bp, Arabidopsis thaliana columbia
  unsure (1)..(431): unsure at all n locations
accgacacgatctggngaatcgtatcctanctattcgagagaggaaaggtttgaatgttctttctgaatgctcagtgatattggaacgaaggaggtgtttcctctgattgggttttagtgttcccgtgaaagaagaagaaaacaaaacatggacgcggagcgatcgtcgttgtgcaactttttcgtcaacttcctgatggaggagaactacctcttgacggcgtttgagcttcttcacgagctcctcgacgatggccgcgatgcccaagcaattcgtcttaaggagttcttttccgatccttcccgtttccctcctgatcagatttctcggtataattcaattcgagttgcggatccacaaagnttgttggaggagaaagaagctntagctgagaaagtagctatcagcgaatatgaatttcgtctagctc

SEQ ID NO: 106244 - DNA, 137 bp, Arabidopsis thaliana columbia
  unsure (1)..(137): unsure at all n locations
acgggggcagacgaancgaggaaaggtttaatcttgtattacgaaacccgngcaccggccgggccgtttttcgttgcgtctatccacctcataggaaatatatggccctcctgcctacagaaagagagtctctttgc

SEQ ID NO: 106245 - DNA, 414 bp, Arabidopsis thaliana columbia
  unsure (1)..(414): unsure at all n locations
cttttgaacatgagaaggaaatatgtattagcttgcaaagatagntngnacctgagacacaggacagcagtagagatgtctgaactccttgtgatgtttctcaatgtaactttctaatttaggaatatcttctctacggaaaatgtcccaaagagctccatcatcagtttcaacattttggacttgttgtctggaattttcaagaatctccatcatttcctccttgttagctactgagctatacagctccttgagatcttgttcggcatgcttctttttcagatttccaattccaggttgcatattgggcacttcagatatgtgcgtcaaaatattcacctggaataaccaaagggtacagatattaagatactaaagaagaaaagttaagataaaagtggagtaaacttatta

SEQ ID NO: 106246 - DNA, 347 bp, Arabidopsis thaliana columbia
  unsure (1)..(347): unsure at all n locations
ggtnnggaaaacccgcggcgacccacgcgaccganggnggagagccggaaacaacccacattggcattgtattgcnacanaggccnaaagcggcaggagcaaatcaacaagcggaagggccccncaccagagancnnggcncaagccnncaagaacaangncgagacggcncagcagcnccagaaccagcaagagaaccgnggcaacaacggcaagggcaacggaccnancggcgncaanaggccaccnccgagacgcggcgaaggcggccaacaaccacanngaaaagcnacaagggnagaggagaccccgngcaccacgcgaggcacagaaaaccncgaagaccc

SEQ ID NO: 106247 - DNA, 428 bp, Arabidopsis thaliana columbia
  unsure (1)..(428): unsure at all n locations
cagttgccgcgaagacgaccgattaactantttcaatcaacngagataagagcaagcgctctgttattcaagaaagagaagatgatgtttttttctttctcttcttataataaaagaggaagaaggaagaagtaaagtactaatgactaacaatgagcgatgaagaaacttgtttgtgatgatgtatgatgctttctctcctcataaaactctgtggtgctaacaactgtcttcagtgcgcttaaccaattttttttcttttttatatgatcaaaacctattcgaaatgaaattaggtgaagaattgagcctaaacccattttagatggtacttaagataagaaaaagattgaaacgattttttactaaacttttagttcacattacccaaaaattaataatctgattcgagctttcctaaacctttt

SEQ ID NO: 106248 - DNA, 422 bp, Arabidopsis thaliana columbia
  unsure (1)..(422): unsure at all n locations
gcttcgactggtgacaaagtgctactctctctctatacaancttcaattgacttcgataatcgaaacgctctaaaaatccatggagatcgagcaattttgacttcgaacttacctacactcaggaggattccgtctttgccggagcgagatcgccggagaaagttgttactctgctccgggagagtcgttaactcattgaaattcactggaaacacttccgtcgatctatgtggtattcctcgtcatcgattaagagtttcttgcagcgatgctcgccgtacaccggaagaaacggcggcggagttgacggcgcaacccaatttttcagaatttataacgtcggagagagtgaaagtggtcgcgatgcttgcgctagctctggcgctgtgcattgcggatcgtgttgtgatgttcgtcgcga

SEQ ID NO: 106249 - DNA, 328 bp, Arabidopsis thaliana columbia
  unsure (1)..(328): unsure at all n locations
ccaaaacatccataagaaacgagacgcttcatttaatttcacngccancnccagcaggcaggccggcgagaaaaaaaggcagcaccggccgnncncnccncagnancancncncaaacccnncncnnaaggggcaacgagaccgactagnaaagcnncannagccncaagaacccccggaggcaaacacgcngcncgnnggaacccaacgagaaaccccccnagggggganccnncgagagcagngacaaacaacagnggcaccacagagannncngagaaagaaacagcnccaaggacccacncaaggcccagaaacaagaggccaa

SEQ ID NO: 106250 - DNA, 218 bp, Arabidopsis thaliana columbia
  unsure (1)..(218): unsure at all n locations
catttgcactcagncnagagacttgtttgtttagtagaaggggncaaagacggagaggatggacagagacgcaagggcgaccgccccccccnaagcgccggncacnnaccaacgccgagcccgagaagaccnggaaganagaccncccaaaccncacaagccaagagcacagcaagcaccagacagagaacacccggacggaacaccaggccanaaga

SEQ ID NO: 106251 - DNA, 341 bp, Arabidopsis thaliana columbia
  unsure (1)..(341): unsure at all n locations
ggcgaagacgnaccagacggcctcacttttttttncgangagaaagancagggncagttcgcctccgtgcagcgctgtcgccgccggntaaaaagtcattctctttggtgttcctggtgctttcactcccacttgcagcttgaagcttgttcctgggttcattgagtaagcagaggagctgtagtcaaagggtgttgatgtgatcattagctttagcgtgaactatccgtttgtgatgaatgcttggtgttatacattcccagtgaacaatcatgtgttagtttgtagcttgatgggtcttttaggaattcactcacctatttttggattttgtggtttgt

SEQ ID NO: 106252 - DNA, 272 bp, Arabidopsis thaliana columbia
  unsure (1)..(272): unsure at all n locations
gcggggacccacgcgnncgcaagggcaaagccagaggnnccgngcctcgctccacaaagaggagcacannaagagaggaggttccaaaggcacaagagccggcgcaccccannnggtctacaacgacggacagcaaccacgtggcagcgtcagcagcttcgagcgagccaggcaccaaaaccagctagaccgcagcccaaggccaatggacgaagccggaaacaacccacaaagtcaagcatggccacaaggacgagagccacagccacaga

SEQ ID NO: 106253 - DNA, 446 bp, Arabidopsis thaliana columbia
  unsure (1)..(446): unsure at all n locations
cggtttcggatattcccggcgtcgacgccatcgccgtccgaataaaaatataaaaaaacccgaagnggggtccgtgatttaatttatatcaaccaanncnnccttcacggaatttttcattctgagaagaatggcgaattcggtcggagactggaaccccgccggatgaatatgtttatgtattccgatagagttcgaaccttagatgacaagcggagaaggataatatctccggttgggacctcagcagcgacctgattggagcaaagagggaaagatgatttttccaatagcgattcgtgatgaaggtggtatcggttttcttcgagccagttgatgaatatccaacggtcctttatctatctggtctctttctctttcttctttcttcttctcgtcgacacctcctgtcgccacctgtagtctgtgatacacgaggtcaaagc

SEQ ID NO: 106254 - DNA, 307 bp, Arabidopsis thaliana columbia
  unsure (1)..(307): unsure at all n locations
gagaaacgtccttcaaaagtttcctcatatttatagacanccnaggttgtattcgttttttccaagctgtgaagatcttacgttaagtaatcttgtaatccctgacttttcattttaatgatatttacatgcgtttttttttttcgtcgtgacatttacatgcgtttttcagagttttataaagtaatctttaaagtattaattttgttaaaagaaacattacaatgatcaagtatgtatatctttataaatcggttatccactttcactagttaatggaacaactagctaaaactatattacttgt

SEQ ID NO: 106255 - DNA, 301 bp, Arabidopsis thaliana columbia
  unsure (1)..(301): unsure at all n locations
gggaaaggggccaagagaacggctctcgtccatggggnaggcgancccaaaagacgggggaaacccgccggagagcgcggaagcccaaaccccgaaaggggagccggnnaaaaaaccggaaccgggacgcggcgggagacggcaacgcnagggaggccggagacgccagcgggggccccgggaagaagaaacancncagnngaacaacccgcccaccccggaaacggcgcaaccggaggaaggggccaacggccggaagagcaccgcacgccgcggggaggccggggcgcccccggcgggc

SEQ ID NO: 106256 - DNA, 157 bp, Arabidopsis thaliana columbia
  unsure (1)..(157): unsure at all n locations
ggtagtctcagtctagctnnaagtcccctccccttaggctncnncatatncgntgggagggacactattgggtaggagggcccacatctagaacngnaattccttgaaccttccttgattaaagggctcgcattgtattacaagcctatcgatttca

SEQ ID NO: 106257 - DNA, 418 bp, Arabidopsis thaliana columbia
acgttagttaaaagagcttttattttatactctaaaaactagcatacgacaaaaaaaaaagaagtatatgaatttgaagtacagtttttgagctagctagatatacgtactacaatgaaaacatgtcgaatttcgataattacaataacaatagtaagtagtaatcgattattggtctaaaaattctgacaatttttctattttcctcacacattcatctccgaaacaagtctgctcgatgatgttcactgtcagccgatttctcctccagttgtcgccacggtcttctccaacacatcatggttagtttaatacgagagaatttgatcgctatgcataaccaatgaaatacggcattctcttattgctatgttcaaacgtcttagcttccatcataaagaatatgtcaagttttatg

SEQ ID NO: 106258 - DNA, 308 bp, Arabidopsis thaliana columbia
  unsure (1)..(308): unsure at all n locations
agaaaaaagggncgagncncncnaccttcnctctctcttngacacncnnganccggggcagtggctacacngcccaacaggggcccaacgagngccagcncgancaacncaaagcgcgcgaaccancccaaaacancaagagcgagggagggcgcaccgagggcagggaccaccaagcaccccagcgccggcgcgccggcgangccgcagagcaggccgacaaagagccacagggaccgcgcacgcccacacgccagaacgccggcaaacccacgncagaaggacacggaaggggcccaaagggaaga

SEQ ID NO: 106259 - DNA, 400 bp, Arabidopsis thaliana columbia
gcgcaaaacaaaaaaagggcaacaagcttctctttgaaagaacagcgcccgcgcgggggtggctactgaccaacgcggccagctaccgcaccggcgttgagagcagaagaagatgacgccaccaaccccacaagcccaaaaaagaggaaaagccccaaggagtaacaaaaagaacaacaccgaaaagcccgccggcgactgaggcaccagcaagcaaggcacggccggagcgaggagtgagaggacaaagacgacaggcagaacccacaggggcaacagcaggaacaccagcgatcccagccgggcaacaacgagcagagccaggaagagccagattgggtctgccccagcaagaaacaagccgccaaggcccgcagactccagggacagcaccaaccaa

SEQ ID NO: 106260 - DNA, 218 bp, Arabidopsis thaliana columbia
  unsure (1)..(218): unsure at all n locations
aaaaagaaaaagggaagcncttttctttcttttttgcaaccnncggggatcgactgagtcctttacggctgcgcgtagcgaggcactccacttgggagntcctctctcagctacagtatcgagtgtaatcctcgtcaactctagatgtttctccaatgccaccgtatctatcaagatgtgaagccgttcagatcgattactgtgaccacaaccaccct

SEQ ID NO: 106261 - DNA, 270 bp, Arabidopsis thaliana columbia
caaaaaataggcaaacaaggtgttcttcttcttttcagctctcgctctctgggtcctggtcaccaacgcttgcatctaccgcaccgccgttgagttcgaagaagatgacgccactaaccccataggcccaaaaatgaggaaaagccgcaaggagtttcagaaagaacaacacctaagagcttgccagcattcgatgctccagcaagcaaggcaaggccgtagcgattagtccgttcttgaagaccacatgcagaacccacaggtgcatca

SEQ ID NO: 106262 - DNA, 404 bp, Arabidopsis thaliana columbia
aaacacatgaaaaatgtggttttatttttcttcaaatcgagacgctcgttttagctcatctgtggcactgataaacaactttcactacatcaccaaagcagtacatcttcctaaaataaaaggcatcaaattgcttcagagaaacgtaaatcagcagggcctggtcccagtattcctttttgttcaacaatcttccctagtccttgtgatggatcttctgctggtgcacttgcgtcagtgatcaccgtgataactggcaattctctctgcaaagttgtcaaaaacaatttaataaatggatcaactacaataacatccgggcaaggagctgagactgaagcactgttgtgctacaaactgaaaactatacagtccatactaaagctatagccagactctttttc

SEQ ID NO: 106263 - DNA, 272 bp, Arabidopsis thaliana columbia
  unsure (1)..(272): unsure at all n locations
acccacgcgnccggcgnagaagaagaaacagggnaacgcttttgttttttttaggggacagccgaaacgaggaggttacctgcccgaggcgaccaaccgcaccccacaaaaanatcaggcatttgagaagttcttagaggaaaatgcatattggcgtggcaaatccattgtactttaaattgcagagcccacatcgtactgccttggtgaatgtaatgtttttctatttcttctgcctttttcataagctattatgcgcatcatatttatat

SEQ ID NO: 106264 - DNA, 117 bp, Arabidopsis thaliana columbia
  unsure (1)..(117): unsure at all n locations
agggccagcacggncagcagnnaccgaacgagagccagcncgaccagcgcaaagcgcccgagaccgcacacgaaccgaagagcgaggcgggccgcaacgaggagggggaccaccacg

SEQ ID NO: 106265 - DNA, 197 bp, Arabidopsis thaliana columbia
  unsure (1)..(197): unsure at all n locations
acatattaataatggcaacaggctccctttttttttagcncncgcacactgggngcttttctccaacgctgggatctaccgcaccgtcgttgagttcgaagaagatgacgccactttccccataggcctatatattaggaaatgccgcaaggagtttcagaatgaacaacacttattagcttgcctgcaattgatgc

SEQ ID NO: 106266 - DNA, 401 bp, Arabidopsis thaliana columbia
aaaaacacgaagccctaaatttcgtcgtaattggcaacagttaagctctttgctaaaagctgtagctgagaagcgaaattcgaagtgaagaatgtctaatcgcaaattcggaatggaaggattcggcattaatcggcaaactagctacagtttcgagcgatctcaagcaccgcaacgtctctacgtccctccctcgtctcgcggcggagacaactccgaagatgccgatcttgataacattgattacatggaaaacgaagaagctgaggaagatattgaggaaggcggttctgctgcggctagcggtggcgaggttgatgagatcgatccattacatgcttttatggagggaattcaccaggagatgaaatctgctccaccttctaagccaaaggagaaac

SEQ ID NO: 106267 - DNA, 404 bp, Arabidopsis thaliana columbia
agaaaagccgcgaatttttatgtttttctttgtgaattttccggtaaactcatcggaaaagtgtttctgtctcaccctcctcaagtaatacaaccaacttatcatacagttaacttcttacctcgctctcctctgaagccaccgtcgtgttccgttgctttaaacaatccttcaatttcctccggcgccggagctaaaatctctaataatcagctaattcaatcattgtgcaaagagggtaaacttaaacaagcgattcgcgtcttgtctcaggaatctagcccaagtcaacagacttacgagcttctgattctctgctgcggtcatcggagctctctttctgatgctctacgtgttcatcgacatattctggataatgggtctgatcaagatccttttttggc

SEQ ID NO: 106268 - DNA, 435 bp, Arabidopsis thaliana columbia
aaaaaacaaaactttaccggtagatgacgactgtatcaagctttgttgtctatggaagctttacctttaggtttcagattcaggccaacggatgaagaactcatcaatcattacctaaggttaaaaatcaacggccgtgatttagaggttagagtcatccctgagatcgatgtttgcaagtgggaaccatgggacttacctgggctatcggtgataaagacagatgatcaagaatggttctttttttgtcctcgtgatcgaaagtatccgagtggtcatcgttctaatagagctactgatattggttactggaaagctactgggaaagatcgaactattaagtctaagaagatgattattggtatgaagaagactcttgttttctatcgtggaagagctcctagaggagagcgtactaattggattatgcatgag

SEQ ID NO: 106269 - DNA, 446 bp, Arabidopsis thaliana columbia
aatttatggacgcagaacggaaatggtgtgagatggcttgttctacggcgaaccagaaacctctcctggtgtcgtgatcatccggatctctgtctctgcgacacttcacgtcctcaccttcactccatccctatcccaggtgccaccgttgccatcaagtgccacactggatccaaaaggaggtccaaatggattaaggctgttactgatgaattgggagagtttgaaatcgatcttccctcccaactccatgcgattccacaccttgaaaacacttgtttcatcaagccagtatatgtgcctaggccctatagatgctataacacctctaccaatatacacaaacctatcaaacttgtttcctctaccaatggtttccgtgtctacacctcagggaagatcaggttacagggccacagttcgagatcatagcaagctcgttgaga

SEQ ID NO: 106270 - DNA, 434 bp, Arabidopsis thaliana columbia
attcaccacagtaccaccaatgaaggacatacttggccacatctctcggttcttaagcatcatactgtctgttgacatccaatgctgagattgatcattactctgatggttattgctgttgttgttgttgttagtatcccaaatctggcttaaggatttgatcactttggtctcgtcgtctttggcttcttggtcgttttctcgagcttcttccgcttcagcttgctctttaatagctgcccagctttctgagttgacaagaagatatgatttactatctattttcatttgtagtgcctcggctgctcgttgaacgtctttcagaatctctcctaggcttaggcttagcttctccattttctctactttttctccaaacaaacgtaatacttttgctccttcattaccaactctccgaagctcgttactgaaaa

SEQ ID NO: 106271 - DNA, 401 bp, Arabidopsis thaliana columbia
atctcaacaagaagacattgaagtagtccgttagcaagtcgagacagaaactgctagaaccattcttgagttgcaggaagaggtgattgctctccagtctgaatttcaaagaagaatctgtaacttgaccgaggaaaatcagtcgataaaagatactataactgctagagagtcagaaataagagcacttaaccaagactgggaaaaggctaccttagaactgactaatttcatcgtcgatgggtccaaatccatcaaaaatgcctctacacagattgaaagtatcatctgttcatttccacaagtgaatgcgtggataggtgattatgttgagaaggctgcaaaaaattgtataaaaaaggaagaaacaattttacttctacagaaaagcttggaagatg

SEQ ID NO: 106272 - DNA, 439 bp, Arabidopsis thaliana columbia
caaaaatgaggaaatgccgtaaggtgtttcataatagaacaacacctaagagcttgccagcagttgatgctccagcaagcaaggcaaggccacaacgatgagtttgatttcgaagacgacatggagaacccacagggacaacagccggaacaacagctattccagcactgctgcaacgagcttccccaggaagagccagattgtgttttccccacctcgaaacaagctggcacagccgttagactccagcgtcagcaccaaccaatgccatgtaagaaaatttaccatacatgccaacacttgcccaacttttgcgacatcccacaagttgatggttgtgcctctaacattccttcatttccttgtttctactaaatatcaaacaaaaccctaaagcgtatgaaaagggggcagttgatatatacacgttgacacttga

SEQ ID NO: 106273 - DNA, 340 bp, Arabidopsis thaliana columbia
ctcttctcactgtttcctatttcgtaattttctcgagaaatcgtcttttcttgtttacgctaatttgatttctcgagaaaaaaaaaaaggaagcagaagaagattcttattttatctttacactgttcagaaatcttcggtggacggataacttgcagagttctgattgaggctggttttgtgagaattatagttgcagcaagaaagcgtttcagatattttttaatggccgctgaggatcgaagtgaggaactaagcagcaatgtagaaaatggaagttgcaattccaatgaaagaattaatcctgaaaccagcagtcattggattgaaaacgttgtca

SEQ ID NO: 106274 - DNA, 417 bp, Arabidopsis thaliana columbia
cgaagaaaccgagagacatttttttttttttggaggatcatcaaattcaaacatcatttctgcggcaaattcgccgtcggaattatctcagagagggattgagctgcgaagtggtgatttttgtctctaaatgtcgagtagctcggggagtttctcgggaagcagtagctcggcgtgtagttccagaagtgattgtgagaactcgtttgatgttgaagatcttttgcagattgggactacacgcagggagctaaggaaacaaaaggacttgctgagagaatcacagccccatagtattgaactagtcagaaggttggaacttcacacgaagtcattatctgaatctcgcttagaagacacagcaagaattcagatgatggagaaagaattattgaattgctataaagaaattgatta

SEQ ID NO: 106275 - DNA, 411 bp, Arabidopsis thaliana columbia
  unsure (1)..(411): unsure at all n locations
ggtcaacacacgttgacttactcaaaggctctcatactggtcgagccactacgaaccaccgcgtctcaatcttaggggttcttatggttcttggcagtaacgtttccacctcactttggttactattgcaggcaaaaataggcaaggaacttggaggactttattggaacacaagtttgatgaatggggtgggaagtttggtgtgcgtgattgttgctctctgttcggatcatgactgggagcaatggcaattaggatgggatattaacctcttagctacgctntattcgggaatcgtggtttcgggaatggtcgtgcctcttgttgcatggtgcatcgcaacaaaaggaccattatttgttacagtctttagccctataaggcttgtgatcgtagccctaataggatcat

SEQ ID NO: 106276 - DNA, 426 bp, Arabidopsis thaliana columbia
cgctatcctttagctctatagtttaaatagtaagtgaaagtcacacagccctaatagaatgatatgttttgtgcaagtaaccatgcaaaagcttacctatcatatccactttcatggagatcacatataatatctaaataatactagaactcatgatcaataaataaagatcatgatggtatgaacagatttttacctgtaaaccaagattcgccttcaaattgaccaacgcaaactttctgtagagaaaagaaaacgacaaaactgaataacctagagacatatcacatgatgcataaactcccaccagaaagtttcacctgccggcactgatcaaaatctgaagaaatttgcaaagtatagacaacatccacagatattcaacaagcataaacagcagctacaatgaaccttcacgactttctc

SEQ ID NO: 106277 - DNA, 430 bp, Arabidopsis thaliana columbia
catttaatagattccaactgtagtaatatctgaaagcaatttatgaatgcgtgacgcattggtttgttatactatatgattatttaatttttataaagaaaattcacgaaaaatacataacttccattgattgccattgactcaatgaaaagaaaaagtctcaatttaactataagagaatccgattcgaacaacaatagctactagaatgccttttagtttattggaaaatacattaaccaattgatgattttctagtggctatacttttgttgattcaaaccaaatgatatcaattttgactagatgaacacatttgacccactgtaaattccataaaatggttgtgaagtaacttccattaggattatcgtgaactaactttatcacatatctcaaagaatactactctcatgattctttcgttttt

SEQ ID NO: 106278 - DNA, 426 bp, Arabidopsis thaliana columbia
attttacatacatgtttttttgaaaaaactataaatttttataaagcgaaaattgtcgtaaatgtgatcaaacagagcactatgccttgtatgaagggctaaaatgacaaaaaaaaattatcttcctaaatagttatttattagtttaaatgacgagactaaccttggaaatttggctccgagaatatccttctggccgtactttctccaactgaatccatcgtccagcgttctatcaacaccagctccaggggcaattctgacttttgaactccaccttggcattgacttcttcgaactatagtacattttcaaataactatgagtttatgagaaataaaacaaaaatacgttaggacagtttatagatatgaatgtacctcttgatgacaagtggttcttgatcggaatcatcgctcttggggc

SEQ ID NO: 106279 - DNA, 266 bp, Arabidopsis thaliana columbia
gaaacatcgaaaaggctggagtctctcatattctataggccatgttaagactcctgatgcgatccaagggtttcccatctgaacacggtctgcaagctcagcagcttgcgtacgagcgccagacttaccagactaatgcacctgaaacatctcacgtgctgaagggcggggcttcaaccatcaccgcgttagtccaccacagcgctaacgtacttgggtcatgaagatactgtgcgccttacatcatctccaatgagggcacttac

SEQ ID NO: 106280 - DNA, 393 bp, Arabidopsis thaliana columbia
gtcgaaaacgagcctttgcgattgtgaagaatagagaagcgtgggagagtgggattgttacagggaaacaaaactatagcacaaaggagatttgggctggggctataccaaagcaatggggtaagccttggagttatatgaagccaactacagaaatcaacggaagtttaatctccaatcatcggaaaatggatcggagatggtggagagcacaagcagtgagatacttgatgagatatcaaacagaatacacttgcggtttgatgaacgttgctcgaaattccgcgtttggaaaagaagctgccaagattgttctttcagctggagattggagaaagaagaataagaagatgaggacagagattgaggaacaagtgtggtcggatcacaaag

SEQ ID NO: 106281 - DNA, 363 bp, Arabidopsis thaliana columbia
ccggcgataatctcggagaagtcaccgggaacagaggcagaagctgcggctcagaatctctcggagttgaaatcggagaccggtgcaggtaataacccttgtctgcgatacctctctcttcctccgataatggcgacatcttgtcgaaaggatcgccttcgtttccgttggttccctgctttaacggcgtcacgggactgttaagtgcaagcttggggaaatcaagacagctaggcgacaaaatctcctgatttctcggcgagaatcttggacttccggcgccaccaccaccgatcatgagtgtattaatcatgagactgttcttgaggttgttgttaaatccgccgtgtgatcttctctcgt

SEQ ID NO: 106282 - DNA, 430 bp, Arabidopsis thaliana columbia
ggcggttaaacctgtccggttatgaatgttccggtttactgcagaacattttaccaatatcgttactgctttgaatctgttctgatatgctgctatgtgtaaggctgtgttaccgtcttgatcacgtttgttcaaaaactgcatctctaacgattcagcgtctgtttgacgaagtctttgtacccatcccaagagtacttcaagctcttcgtatctatcgtttgaaaccgcgatgtgtagagcggtttcaccgttcacgtttgcatctctaatgcaaccaggacaagctaagaggaactctgtcataagatcagtttctcctcttcttactacttgatgaaacggcgtcataccttgtattcgaaatcaaactatttcaaccatttatagtaataacaaaagatcaaacaatttcaagaaaacaaaacac

SEQ ID NO: 106283 - DNA, 433 bp, Arabidopsis thaliana columbia
catttacaagaatattgacaagatcggtgcttttacctgtcctgtcttagtaatccatgggactgcagatgaagtggttgattgttctcatggaaaacaactttgggaactttcaaaagaaaagtatgagcctttatgggtatctggaggaggacactgcaatctagaactctatccagagttcataaaacatctgaagaaatacgtaatttctatttccaagggaccaagaactggttcgaacaagactgcaacgacggatgcagccaaaaaacagagcaagcctgcagagaacgggcgtgctgatacgtttcaacttggctgttgccttccagaagtttctagaaacagtgtagacagtcagctggagaaatctaagaagactagtaaacccgagaagtctcgtatgagcattgataggtttagaaggaaa

SEQ ID NO: 106284 - DNA, 397 bp, Arabidopsis thaliana columbia
ccggctctggttccggcacgcgccacgctttagaacacgatgcttcttatgctcgcctttgtttttctattagctttggcgacttgtaaaggtgacgagtttgtttgtgaagagaacgagccattcacatgtaaccaaactaaacttttcaacagtggcaatttcgaaaaaggcttcatcttcggtgttgcatcttctgcttaccaggtggaaggcggtagaggccgtggacttaacgtttgggatagcttcactcaccgattcccagagaaaggtggagctgatttgggaaatggagacactacttgtgactcatatactctgtggcagaaagatatagacgtgatggacgagctcaactctactggctacagattctccattgcgtggtcaagac

SEQ ID NO: 106285 - DNA, 377 bp, Arabidopsis thaliana columbia
gtcgtgtcttgtactagaacataatgtctcactaagctaagtggagtatttccactggtgcgctgccccttctatttatttgacactttgttcactttaattttcagctgttgcagatggaacgtaaagtccaatcagcgaaacatcatgagttagtgtactggcatttagcctctcacggtattcctaaaagcctccattgcctttccctcagattaactgaagagtactctgtaaatgcaatggctcgaatgcgtttgcctccgcctgagtccgtatcacgtctgaccgacccatcttttcatcatattgtcctcctgactgacaatgtccttgctgcctctgtcgtcatatcgtctactgtacaaaacgctgtg

SEQ ID NO: 106286 - DNA, 276 bp, Arabidopsis thaliana columbia
ataaatcatacataaatcgcaacacatggctaacatgtatctttcaagtatattcaactatggatgtgtgatttaaactcacgaacgctttcatttactctacctaaaatcaaattataagaagattgacctctgcgaccccgtttgttcaagtcagcgagcccagctggagcgtcagcaaactccacagactaagagcttggcacagattgaggatcacgcaaacaaagacaggacgaacaggtggtctttccatcacaggtgagcacgatagcg

SEQ ID NO: 106287 - DNA, 247 bp, Arabidopsis thaliana columbia
aacaagggttccgtgacatgcaccagaaggtggaacatgtgatacgcggagacatctttgccaacactgcaggctctgcccactggagcgacaactcaaaataacatccacttgtcatcatcgctcttctcgacatcgtcaactaccaaaaccaactcgaccgcaaccctagagtgttccatttggccggaaacaaccagcaaggaggcttttgcggttcacaacatcaacaattatcacaaaaact

SEQ ID NO: 106288 - DNA, 404 bp, Arabidopsis thaliana columbia
caaaaatggcttctcttgctcccggaatcctcttttatactccttcaatgcatgaactgcggcgctcgtcccaccggagatcacagatctgcaatcttacaagtcaccggaatcgtcccagctctcgccggctccgatctatggcctaaccaaggcttctacgtccaaatctccgattctctcaactccacttacgtctctctctctgaacgcgacacagatctaatcctcagtaaccgtctccagttaggtcaattcatatacctagaacgcttagaattcgctactccagtcccacgcgccgccggaattcgtcccgtctctggtcgtcatgccttcgtcggaaaaccagagccgttgattgcaagagtttctaacggatcttaacgagatttcgttattca

SEQ ID NO: 106289 - DNA, 426 bp, Arabidopsis thaliana columbia
  unsure (1)..(426): unsure at all n locations
cgtccgacacatagaaaaaaatgtcaaacacattgtttctcttttctccaggtctcgctctctgcttggtgctcaccaaccctgggatgggccggaccttcnttgaattcaaacaatatcacgccactaaccccataggcccaacaatgatgaaattccgcaaggagtctcataaagaacaacacctaagagcttgccagcaattgatgctccagcaagcaaggcaaggccataacgattagtttcatttcgaagaccacatgtagaacccacaggtacaacagcacgaacatcagctattccaacagatctgcaacgagcttcttcacaaagaaccacattttgtttgccccacctttgaacacgctttcaatgtccttagactcctaggacagcaccaaccaatgcaagtcaggaaaatttacc

SEQ ID NO: 106290 - DNA, 384 bp, Arabidopsis thaliana columbia
aaaaaagaaaatgtagtataactcatcaatctcttctttataacctaaaatattacttctcgcccttaacagatagcctggcgaggcagacacataatagtatctactaatctacagaacaatagaaacctctacaacctagatattctacaagccaccacatctatcaaaacagaagccaatcagatcaacatctttcaccacaaccaccaccaatttctttgagtcatggatagcagcgctcttgtcttaatttaacatagaaattacatacttgtgtactctactcgccttcactaacaatactctcctccattctatgtcctcctttcaaaactagatctgttcctgtataaggctagaccactattcactttctatctt

SEQ ID NO: 106291 - DNA, 317 bp, Arabidopsis thaliana columbia
  unsure (1)..(317): unsure at all n locations
aattttnnttttttaaataactattaaaatcctttttataacccaaaatattacttttggcgggtttataaatccgatgagatgacacaaaataccattaatcaatttattctttaataaaaaatataaacttatagacattctacacttctccacatttacatcaacaatgttttaaaaaaacaacatcattcaacatcatcatcactaatatattccaatcatatataaaatctccttttccttatattttcatataaaaaacatcctctttgctttactctcctccattttcatcactctccctccactctttg

SEQ ID NO: 106292 - DNA, 446 bp, Arabidopsis thaliana columbia
cgcaggttagcttcttctaccattattgctttcgcattcgttctggggtaagggtttgggcatgaactttcgccagtgcggaggttgtaacttttagaaaccacactgttaatttgcacatatattactgttccatggctggtactgataaccgccgctctcgccacgacgactaaagccctaaaaatcccaacaagaagaagaaaggaaaccgtaatccagaaaagagtctccttatcaatcttcattcatgttccaagagaaaggatctctcagctgcattggctctttatgatgcagctatcactttcagtgacattcgccttaaccagcaacacttccaatcccttctttacctctgctccgcgttcattagtgacccattttttcaaaccgttgccatttaccgtggctttcaaatttttgaccgtattgttaagttttgg

SEQ ID NO: 106293 - DNA, 375 bp, Arabidopsis thaliana columbia
gagattattgagtctctttgttgttgtttttgcttgcagtctttgagttgaggttaagagaactggcggtggctgtgccattaatgtgctgctccgcagatatgatctctgttccgtcgaggaaacaagttgtattggttggttctaagtcttccccagagcttaccaacatgctttctgcagcacattcagtctatgatcctaataaaacggtaagagcttaaaaaattatccaaatttctagattcaagatttgtgacttttggtggttttactgagcaggtgattcacatagatccctctagttctgatgaaatcgagttttgggaagagcataacagtaatgtagctgagatggctaagaagaacagaaac

SEQ ID NO: 106294 - DNA, 172 bp, Arabidopsis thaliana columbia
acgcgtacaaaaaaaaatggtgaaagatctggttgcgtatagattttatccaaccggacattaattcatacgccattatctaaagaacaggatgttgggtaaaacattcctcgtctactaaaccattaactagatcaacatctgtagttactaccctatttacttgccttct

SEQ ID NO: 106295 - DNA, 194 bp, Arabidopsis thaliana columbia
ctctggaagatccaagttgtatttcctaatggaacttcttctatgaacacaagagtctccggaggagatgtcttctggatccggagagtgacttctcgatattccataacctatctcttaccgtaccatttgcgtttgcaggattcaccacatcagctcacatgaatagacctcatttcctagttggaccaaac

SEQ ID NO: 106296 - DNA, 167 bp, Arabidopsis thaliana columbia
tattttttatatctcaatgatactacaacaatttttttcatcctctcattcttcattcaggcggggatctcatcagcagccggggccatcttatccccaacctaaaaccatttttcattgccctaaacaacccacaataactatacttccttacacaattctaatca

SEQ ID NO: 106297 - DNA, 146 bp, Arabidopsis thaliana columbia
gttccatccccacaggcggccgttttaatacgagggtggtgcctaaaaacacaactatctttctctacatcaaacccaccaccatactacaaattatgattctaactaaaactaacaacagtcatatcttttataatccaactcat

SEQ ID NO: 106298 - DNA, 315 bp, Arabidopsis thaliana columbia
  unsure (1)..(315): unsure at all n locations
gcgtncgattanttctatacttctttctttctctctctagtttttgttctctatctctctctcgcatgcggcagatcatattacgagacggtgccgttaagaacattccatcactcttccttcttcacatctctgattttctatatttggggattgtttccacgatatacatatctcaggtcttgagatgcctaattgacagataatgctggaagtttccgtagaactggctgcaccttgcttgggtcactggctccctcacgtttacattctgagtctatctctattgttttttgcccaattgtcacatatttt

SEQ ID NO: 106299 - DNA, 316 bp, Arabidopsis thaliana columbia
  unsure (1)..(316): unsure at all n locations
acgagaaaacatacacnaaatagctaaaacatggcttttctattctcttccntcgtcntgcgcaacctctcgcggcgtcttcttactacgcgagggacggcttccatataccgcaccgttgtcgaattcgaagaagatgaccccagcaaccccgcatgtccaagacagagattccagaaggagtttcatcaatcacaacacctaagagcttgccagagatggatgagcaagcaaattaggcaaggacgtggtggatttccttctacttgcgctcacatctgttttaaaacacctcaacaaagatcccattttcttc

SEQ ID NO: 106300 - DNA, 298 bp, Arabidopsis thaliana columbia
cccacgcgtcgaaaaatttgtgagtaacgaaaaaaatgttctggagacaagttaaaggggtaaaaaggagctgggctgggctagaactacatgccatgaccggttggaacaaagtactgttggggggtaaccactccatattgtacactacgtttcatctggatagatggcatgtctggccagggtctttcctgtttgggctcgatgacacgtacactatgttcgggcggcataacggtacacgttatcgtgtctggccaggtgaatgtgctctgtgggagcttcggcgacttattaa

SEQ ID NO: 106301 - DNA, 427 bp, Arabidopsis thaliana columbia
gttccttttgcattttacacttttggttctgttaatgtggttctctgtttcgcccgttaccgtttagattcagttctgttttttttcttacccgatcgcttgattcggactgtgatctttgatcttttttcttctccagtgccgtgaaggatgtgtggtcttgctaagaagctggatatagaggatactttgacatcactgtcagaccaagagaatgaatctttggccaaacccaggaatgatgctgctgaatgggaacattcgttttctgccttgcttgagtttgctgcagacaacgatgtggaggggtttaggcggcaactctctgatgtgtcttgtatcaaccagatgggtctttggtacagacggcagaggtttgttagaagaatggttcttgagcaaagaaccccgctgatggttgcttcgt

SEQ ID NO: 106302 - DNA, 427 bp, Arabidopsis thaliana columbia
gtgaaactagtaggttgtctcagtcgtctgaatcgttgttaagaactgtggctcctacgaaaagggttgtgtattccactactaggccgggtgatatcaaaacaccgtatgagaagatgcttgggaataatgtggaatttggatcgcctgagaagcgttctggtggcttcttcaactctgcattgatagctcttttctacatagcggtacttgctgggcttattcgattccctgttagcttctccacgagttcaaccggccagcttaggacccgaaaggctggtggtcctgatgggggaaaagtctctggtggaggtgaaacaatcacttttgcggatgttgcaggtgttgatgaagcaaaagaagagctagaagaaatcgtggaatttcttaagaatcctgaaaagtatgtccgtctaggtgcacg

SEQ ID NO: 106303 - DNA, 354 bp, Arabidopsis thaliana columbia
gcgaccagatgtccatgagaggcgtctttgtacctcttccacaatcacaaagccttggccctgtgcggaaagcaacagaaatccttgagttacttcaagtagaactactaagatataatgtaacacatgtaatagttgttttcttttgtggaaatatgtatctcatatgattataacctgagccaactccaaaatctggttatggtctttgttcagctctgtgggtactgaacggacaagctttttcttgccaatagtgataacctcaaatccgctacccaatacctgaggagaaaatcccaagataccagcaagaacagttcaaaattttcccattgattaaaaatctgaaag

SEQ ID NO: 106304 - DNA, 430 bp, Arabidopsis thaliana columbia
attagctcaggcaattacgttgtcaacttgtattgttgctcacaacaatgccttgttggcccttctggtgtcaaataactttgctgagatcaagagcagtgtctttaagcgtttcagcaaggacaacattcatggtctagtatatgcggattcaatagagagattccacatatcggccttcttggtgtcagttttggctcaaaatattctcgagtctgaaggtgcatggtttggaaatttcatctacaatgctactacggtcttcttctgtgagatgatgatagacatcatcaagcattcatttcttgccaagttcaatgacatcaaacctatagcgtactctgagtttcttcaagccctctgcgagcagactttgaacattcgtccggaagatagaaagacaaatctcacctttgttccccttgcacct

SEQ ID NO: 106305 - DNA, 437 bp, Arabidopsis thaliana columbia
ggagaaatatcgagaacggaaagatttgagcttataggagaaagtcattgcccttagttatactctacaagaatcatggaagtaaggaacgtaagtacaaaactaattaaccaactcacgtacgttcacacaaattttgtaacaatggaccacaaacgtagaactaaacaaaccattatgtaatcatgtaaccaacccatgtccataactttcttgtacaataagtcatagattcattggagcctaaaagtgtaggttatataagagataaacaataagaacttatgtctcccaaaaatctatatatttactcaaacgaaagattaagaacttacttctttttcctcttccacttgctttgttattcaacagaaatttgcgcagctagatcgtttcagatatgacgaaatcaactattgtgagtaagaaaatttggg

SEQ ID NO: 106306 - DNA, 430 bp, Arabidopsis thaliana columbia
ctcaaggtagtgttgttaccttggagttttcctctgcctcctgctgtagaagcttggattcttggacaactctctccatgatcgcttcttgttcagcaaatgccttgcgtgcagacccttctttttcctgtttttcttgctcagcagcattttttatccccaaagctgtcgctagtcttatttcaagatctacacgcatctaaaagtaaaaacaaaagaaacacaatcagcaaaatcttacagtgtgaaacaacagatattagtagcgtgtattgttaaaggttaatggagctgcaaatgaacaaaacagaaatactgagtaaatcaagtaggatctaatcgtgtggcctgcacggacctcatcaagaacagagagagagttgtctcgttcttctgataagctgatcaagcgattttcaagctcattaac

SEQ ID NO: 106307 - DNA, 387 bp, Arabidopsis thaliana columbia
  unsure (1)..(387): unsure at all n locations
caacgcgttccatgctacccgcaccnnngtcgttgagttcgaagaaagaatgacgccgactaacctccatgaggcccgaaaaatgagggaaatggccgcaaggggacgtttcagaaaggaacccaacacctacnagagcttggccacgcaattgatggctccagcaaggcaatgggcaaggcccgtanngcgatgagtttggatttcgaagaacgacatgtgagaacccacaagggacaaccagcagggaacaaccagctattccacgcagtgctgcaacgaggcttcgccaggaagagccagattgtgtttgccccaccttgaaacaagctgccaaggccgttagacttcanggacagcaccaaccaatgcaagtcaagaaaattt

SEQ ID NO: 106308 - DNA, 192 bp, Arabidopsis thaliana columbia
caccatcgcaacaccatatgttttagttcattggaaatacaacaatccaggggagcctttaattattggcgcgacccaccattctcgccagaaaccaaaaccagcatgaacgcaactatataccatttttgatagctcgaaacaaccatcaatttcaggaaaggacaccaatttctaaatcttacattaaca

SEQ ID NO: 106309 - DNA, 130 bp, Arabidopsis thaliana columbia
gctagacgaactgcgagctaggaaagctacagacgaactgggagctaggaaggctttaggtcggttgacttatgtataagattcgagaagaatattttagttctacgtagaaaatatacaaatgttcctc

SEQ ID NO: 106310 - DNA, 277 bp, Arabidopsis thaliana columbia
gttcttggtttcctttttctggaaaagttatttttgttcctttcttccatcctggggttatgtctatcttcaagatctcttccactggctttgactttctgatatcaaaacatgactagatatattgacacgaagctaagaaaaatcaaacgtagcaacaagaaaatagtaaggaagatcaatcatcaaacaatattaacatcactagagataaaaacgcaattaaacaaaggaaaactgtcaaaaaaaaaaaaaaaaaaaaaaaaaaaaaaaataa

SEQ ID NO: 106311 - DNA, 430 bp, Arabidopsis thaliana columbia
cggacgcgtggggtttcagggaattgttgttgcctacaagaacctgttacaagaaattgcacagaaagagagttctctgttaccattttatgcaactgctacatctggtccatcgcatgcgcctacttttacttcaactgttgagtttgctggtaaagttttcagtggagaagaggcgaaaaccaaaaagttggctgaaatgagcgctgctaaagttgcattcatgagtatcaaaaatgggaactcgaaccagaccggatcgcctactttgcctagtgagagacaagaagatgtaaattcaaatgtgaagagcagtccacaagagatccattctcaaccttcttccaaggtggtgatgacccctgataccccatcaaaggggattaaagtgaatgaagatggttagttttctttgaatactacactacat

SEQ ID NO: 106312 - DNA, 355 bp, Arabidopsis thaliana columbia
gcgaaatccacaggaacatctttgggtagcgcagaatgcaacggaaccacgggggtgaagttaccggcgatggaatgtaccacacttttgatcaacggacagtttattgatgcttcttcagtgaagacatttgatatgatagtcccaaggaacggcgattggattgatacattttctggacgtgacaaactacacattgcctttggcgctaacccttaacgttacgcattcgaccatggaccttgagcttggatgatctggttggagagggcaacaattataaccaaattagttgacttaatagatgaaaacattggagatttgtctaaacttgataattgtcgctgaggaaaat

SEQ ID NO: 106313 - DNA, 404 bp, Arabidopsis thaliana columbia
aaagaagcagatgaaaatgcatatgctggttgattaggcattgtgtgacgcgcactgtgttgttttaacaccgatggcgctcttgtagagagttaccaacggttatataaaccgaactgtagtaatgtacggaaaaactgactccagttgcgcctaagacctctagacagagatggtcgaatgggcgctagtataaacagtatttacaagttcgacaacaatgggggctcatgcataggtggaaacgcacccgcggtggatgatacgtactctgtcagttcgatgggtgagagctgatcttaaaacctatcaacgactcgagtagacacaccatacattgccgcaatgctgcagcaagctcagcccaaaagagtcattctaggcctgacctatcttgacacaag

SEQ ID NO: 106314 - DNA, 431 bp, Arabidopsis thaliana columbia
ggtacacttatttacatcaaatgcttgtgctttgatctaatgcactgtcaaactctgctttgtgtttaatgaatggtctagcttttacctttcatggtggtgtaaagtttgaaccaaaatttacaaccctttcgttgcagcttctctagcaagcagtagccctctaccggaagtagttttatcttcttgctgttggatattaccggactggggaactcgataataggatcatggtgttaaatttttgtcacaactcgataataggctcatgatattaaatttttgtctacttcttactcgtttaatggttggttccatagattcaacatcattggaggcaatctttggtcttaaagaaatccattgaagacaagatcgcttagggtaattgatattcggttttgaatcattttcacacacaatctgaacaa

SEQ ID NO: 106315 - DNA, 488 bp, Arabidopsis thaliana columbia
aaggattcccaaccaattttttcttttctcaaacaattaaaactcttgttttttaaagagaaaaaaagaaccgttatatacgaacaaaaatgtcaccccgaaaagcttttaagctctagcatatttttgttatggtcaagcaaaatttgcggtgaagaagacaaataatatatttttaatataaaaccatctataggcatcaaatactctgcttaaacccacatctagattcacatggaataactaagaacaatatgtcattcaaataaaaatcatatatatactaacaacaattttccaaagttaaatggtacgagaataaagttattatgtatattataagtcctagattacaatcatggggtcttgcatgcttcacgaacagtaaaggtacggcgttttcatcaataactaagaaccatcgaatcatcgttaagtccacttgtctttaaaagccacagattcaccctcaaactctaaaatcatgt

SEQ ID NO: 106316 - DNA, 531 bp, Arabidopsis thaliana columbia
cgcctctgaaaaattcttggtgaacatccttgagaactttcaaaacattcgccaatgatccctggttcctactctcgtctctcttctcctctgcgtaagattttgactccttatcatgactataatctctgaagtaactgtacttggtaatctgtagcagattcctctcatgatcaggccaaacatgacgagtgtcatccacaatcacaactccacactcatcagccaacacaagatcaagcgtcttcgaaaaaccactctcgtctctggtaatgactctatccccaaagtatactttcttcggatcaatccatttcagcacagcctgagcgtagtcacgattccccatcgtgtagacatacatggagaaaatctcgttggcttctttcagaaactcgtgaacaaaaggtcgaagttttatcagcatctctctgtcaagtgtccaaagatcttccctaaaatctgactcttccaatagatacttctctccttcggaaagccgtgaaatcataatagaatggagaagcgtgt

SEQ ID NO: 106317 - DNA, 496 bp, Arabidopsis thaliana columbia
cgactcacgcgtccgataatttgtcaatgaacatatccatacgcaatataccgcggatcaatttatagtactcttacattataggggtgtttaaaatgtacattataaatttgatttaaaattcacattaaaaatgttaaatgttattcttcataggaacattaagagcaataaactttacaaatccggaggtaagaaaaaaaaatactgttattcgattgcatgattctagaataatgttagcatatataacttttgatataggcttagttattctaggatgaaaaatgagtataacttttggagttacttaaattttgattaaatgtatataaatcttggaataattattttcttcataataaaaattaaactaacttattactttaaatatatgtgtatatttcagtcaaaataacatattttggaagtatattagcttatcgtcatctaccattagttggtcatatatcatacacttctatttcaatatgtt

SEQ ID NO: 106318 - DNA, 529 bp, Arabidopsis thaliana columbia
acttagtctctttcgaataattaaattaatgattccatattctgagagtttaagctccatatatactataatgttgcatgtagtctatacgcatggatatgtgtgtgttcacacatgcgtgtctttgtgtgcttttaaactttttatttgttgaaataatataaacacagaaatgcatgcgaaaatgtatacacactaatctatatgcatatagtatatacattcgtaacaattattagcattcagtttgatttttgctaataatatagtatggaatttcatactgaaactcattctaaaatttgaaatatgtagaaaaacagttaagtagacacctgtttccagttttgctaatatatattgcaaattcaaaatatatattcaccggctaaccatatataacaggaaaacttgataattagtcttctaaatatgtatgaatcaaaaaatttagtaatataatatgtatatatacatattttgaagaacaatatacgactagtactcataaaacatagagaatgttctt

SEQ ID NO: 106319 - DNA, 326 bp, Arabidopsis thaliana columbia
gataaacctgcgtttcattcccctacaaagctctaatctttcaatctgtatacctctctctctatctctgagaatgtatggcggcggctgcagcggcgatgatcgggttgacacatgcgtatctggaagggaaggaggagaaggaaactagtgcgatggttactgcactctgccgccagttatatactcaacgcactgagtttggcacatatagtagcatcacgcttaacgatcatgatgcttcaatttgtaaatcgctgcaaatatacgatatgatttcatacggagacctattctagaggatgcaatctgtggtaaagcacata

SEQ ID NO: 106320 - DNA, 394 bp, Arabidopsis thaliana columbia
cggacgcgtgagtaaaaatgaaagtatcatttaagttaatatttttaatatcttctgtcattgcatataggcgtatgtgagaaatgatctttgttgcctatcaaaaataattaacaattaacaaaacataattaactaaaaaacagaaatccacatgaatatttagaagccaaacattgttgaaaatatctattttttatatgccataattgcgcaagtaaaagttacatcatggcaattaattgtaaatgagttaaaagtcataaaggaaaatattctcattcaacgtcattgacaagatatattctatcagcggtttttcttaaaatatcctatagagacttatggagacatgagttcattgatacaagaatgacaacagtcggtatagtaa

SEQ ID NO: 106321 - DNA, 342 bp, Arabidopsis thaliana columbia
taccacactggcattttttttttttacggcgctcgaaatgggtgaatagtgtttgtcaagcctacgaccccaccatccttccctacattgtatcacatcaccattttcattaccatgctgcggcagaacaagagttcccaaattgtatcaagactttacaagatggtaagactgagaaacttatatcttcctcagaggttagagccatactactctacaaagtctgctgacaaagaatccactctacaatgccttcccataaaacaaaagcgtcatataaatcctaagttctacagaaattatccttaaccaacaaaaagcatgtttgaaatataataccta

SEQ ID NO: 106322 - DNA, 178 bp, Arabidopsis thaliana columbia
  unsure (1)..(178): unsure at all n locations
gactccacgcgtnccgtctattccgtcaaaacgcaatgtgtgcttccacagttggaacgctatacgtctatacgctatgtcttatacgtgacgagagcggggtgagcaccaatatccatgatcagtataacgacccaatggtatacatgatgtgttatgacgcgaccaagtactctca

SEQ ID NO: 106323 - DNA, 398 bp, Arabidopsis thaliana columbia
gcgtccgagaagaggaagagccggtcgtgttcgacctggacagtgttaccatctttacccaaagtgcgtatatgatgcttttgcagaatatcagttgcctgaaattttgaggacgcctttacactcactgtgcctgcaaatcaaaagcttaaacctcggaagcatatccgagttcttgtcaagggcgctgcaatctcctgaactactagccgttcaaaaggccatcgcatttctgaagataattggcgcattggatgagaatgaagacctcacgactctaggtcgttatttgtccaagcttcccatggagccaaagcttggaaaaatgctcatactaggagctattcttggttgccttgatcccatattgactgttgcggctggcctgagtgtgagag

SEQ ID NO: 106324 - DNA, 148 bp, Arabidopsis thaliana columbia
tggctggaaagagatcttgatttttgacgggttattaaggaggcatgttacctgtgtgagacactcaaagaagtgttgagctcgagttgtagaaggagggacattgtctattcggagatcttaaacagtaggagtctttggttgcgga

SEQ ID NO: 106325 - DNA, 508 bp, Arabidopsis thaliana columbia
atcgactcccgcgtccggaaatgcgggaggggttgaggtagttgatacagaacgtttcctttctattggtctgagaaaaaagcaagagtctgggaatattttttggagcgtggttttatttagatgggaggtcaatgctctagcctgagttgttgcaggaacacttcacacaagacagctgttcttgaagctcctgatgttgataatggagagagtagtgagatcactgatgttcctaatttccgggagtatactttagaacagcttaaggcagctacttttggttttgccgtggagtatattgtatctgaacatggagaaaaggctccaaatgttgtctataaagggaaattggagaaccaaaagaagattgctgtcaagcgttttactagaatggcctggcctgattcacgacagttcttggaggaagcgaggtcggttggtcagctacggagtgagagaatggtcaatttactcggatgtcgttgcgaagtgaccagaggttact

SEQ ID NO: 106326 - DNA, 393 bp, Arabidopsis thaliana columbia
tggatattatataacaagatgtaataagttgaaccatatgcaataaccattccaaaacgagtcgattgtgctatcaattatcaaactacttttagttgtgttaagttgtcatctgtcagaatatttcacatcgtaaatcaaaaaatgattttaacattttcattatgcaaagataatggatctttcaggatttttatcaattaattttgaattaaaacaatctttttaaaaaaaaaaatagtattagtgctatttgtgaaatgatgaattttcggatttttgtcttttgccgcaaagaaatttttgaattatataagttaggcaagaaaaaaaaagaatatgtgaataaactattaaagcacgattaaataatcaatgattgtgtttattagt

SEQ ID NO: 106327 - DNA, 541 bp, Arabidopsis thaliana columbia
tataatcacaggcaaaacatataggctaagaatatcaaacgtgggtctcaaaacatgcttaaacttcagaatccaagaccacgatatgcttctagttgagacagagggtacgtatgttcaaaaacgtgtttactcgagcctggacatccacgtaggccaatcatactctattcttgtcactgccaaaaccgacccggttggaatttaccggtcttactacatattcgccacagctcggttcactgattcctaccttggcggtatagctttaattcgatatcccggttccccacttgacccagtcggacaaggtccactcgcacctgctttgcaagattttggttcctcagttgaacaagccctttccattaggtaaagaaatactctttttttataccaaagaataaaaacttttatatgaaatatttcgtttagtatttgttcttgactaataaacgttaagtgtacgacacagaatggaccttgacgttggagcagcaagatcgaaccctcaaggtcgtaccactatggacgaataaac

SEQ ID NO: 106328 - DNA, 401 bp, Arabidopsis thaliana columbia
cgactcacgcgtccgaaacctaactctttctctatacaagagcgcaagctcgaatgttctcttgatctcatctctaaaacctccggagcaaggaccctcataggaactttaaaacactatgtttctagtaattcacacacaaaatggctattaaactagcaattctatttaccacatttgctctttttagcctagtcgacgctagaatccccgggatttactccggcggcgcatggcaaaacgcacacgccactttatacagtggtagctacgcctcctgcacaatgggaggagcttgtggttaccgttacctatacagccacggggtccggaccaacacggttgctatgagtacggcgctgtttaacaatggtctgagttgatgagccttgctattgtgc

SEQ ID NO: 106329 - DNA, 111 bp, Arabidopsis thaliana columbia
aggaaagatagcgatgtattatgcacaccctcgggcgctatggttttacttaattgatgtctctcaaaccatggaggaagcgtgcaccacatatgttaccgactgggcttt

SEQ ID NO: 106330 - DNA, 513 bp, Arabidopsis thaliana columbia
agcggcatttagcactgagacaactcctgttacagctgagaaaaccttataaccaactcagaccaagataacaactgaagcttcagctggtgttgagacaacaccagccccggtgttttcagaaccagaggttaacgctgtgccattcgctagtgatgaagatgagaaagagaaagttgatgatgttagagacatagctggtcttgatagttcagtggttgcatgtgatgcagcagttgtgcaagtggcgtctagtgagcacaaatctgagaataatgaaccatttagtggattggatggtgggattctaaggctcaaccatcagaggcagtgcttgaaaaatctgctatgtacaaccaggtatctgaggtcatccccgttacagggtttgaggtaaaatctgattgtatttctactgattctgtgtcaaataatgaaaacatagaactaaaggataacacaattgttgataatgtcaaattagaacaaaatgttaataagttcccagagcca

SEQ ID NO: 106331 - DNA, 509 bp, Arabidopsis thaliana columbia
ctcgtcctgtcaatagccaaaacatcaacattcttaaggaacatatctgttttctactagtgattacttgagcaatgaagccaaaaatggacttacttgacagatgatgcactttctatcagcaactgttgtatcttgccggcatggtttgactttccgaagacaactttcgatctgcatttcagtaagtccagtgttcacatgcccaattctttcaccaagctccaaaagttgctgttttttttaacaacaaaacaaacacaacaacactcaagaacctagtgaaatcatcatcagcttctttactagtactttgagagaaaggcactaccaacctcgtatgtcatgttatcgacattgagcctcatgtcacggaattgatcgaatgagcttaatactcctcccatcacaaaaccattctgcatcatcatcatctgcaatgaaacacccatatgtaagaaaaatacatattggaacacgcttcatatgaaacttaagtcaaaagcaac

SEQ ID NO: 106332 - DNA, 373 bp, Arabidopsis thaliana columbia
  unsure (1)..(373): unsure at all n locations
acccacgcgnccggtctgcttctttttatttaatctcccattgattcgcctcagatctctcgctctttcgtcttattttgtggtgctggccgatttgcccatcgtgctctgtcatcgatttcaccgagaaagttaccgaattttcgtgctttctctggtaccgctatgacagatactaaagatgctggtatggatgctgctcagagacgtcttatgtttgaggatgaatgcattcttgacgatgaaactgatcgcgtcgtggcgtaagacagctggtatcagttacatctgatggaatgtatagcagccaactatttgctggacacgactttacgtattcatcatacacttcgatctaagagtggttaatcta

SEQ ID NO: 106333 - DNA, 290 bp, Arabidopsis thaliana columbia
gcccgggtattgctgcaatgattcgtttgtctcgctctccaccttgcaggaggttttatcagagaaagcttatatcctgtttttcagccgttcaaaccagaggccagcgtttgttaaaactctggtaccatccaatgggactccatttaatgaagttaatggttgggggacatcaaatcccaagaggttaatggggcccttaaagggtttaaccatgaaacctaaggccgggcagtctttccagaggggtaccctgcttttttaaaggcccattaaattaatagggccca

SEQ ID NO: 106334 - DNA, 473 bp, Arabidopsis thaliana columbia
ccaaattttaaccgaacaaaccgaattctcaagtaattgagtgcaatgtaaactctctttaactcttacaattcattcctagagttaagcaatcgaaagtagacatttttctggaaatcagaaccaaaaatgaataattgaacttatcaaattcttaaacacatagagtacaatcttagttgatgttagacgaacctgataatctaaatctgaattcaaaaaggaaggatcttttaaaagcatcaaatagaaacagacataaactctaacaacgataaaccctcgaaatgaattgagagatgaaaagggattgataccggagacgatgagattggcgctaggttcagcctgaggacgagccggtgttagatattcagcttgtggtgacagaaaagagaaccttgaagcatttgaacagaacagtcgtttcagaccaactcgcgctgacgctacttccgtcacagctatagata

SEQ ID NO: 106335 - DNA, 191 bp, Arabidopsis thaliana columbia
cccacgcgtccgcaaatgtacacaaacgtacaagacttgggtgagaaagacgctaattctggacttttgatctaaagaaacgttataggagtggtccacgatcatttcatctagacatggacattgaccgggccagctaagaactccgttaggattcatctagagaggcagagacttccacctgggaaaat

SEQ ID NO: 106336 - DNA, 531 bp, Arabidopsis thaliana columbia
gatctatgccatggttacaaaagaggacaaaaaagctacttggagcacatatgttggtgaacagagaacaagttatcctaccgcaaagaatataatattcaacaaaacaaaagtggatggacaatataatttagtacgcagcataatatgagatacatatcaataagaaaatgccatgacatgctcaataagtactatggagaatgaaaattcaacatagtatgcagaagaataattagttaccaattgggtggtattagcaaggccaagaccttcacccgatgctaaaaacacttcattggcaagtacattcgggactccttcaagatatggcgcaatctcagaaggtttaaagaaccagagaagcttgactttctttgggatatgcttattagcgtgttcccaaatttttatgatcatgccaatgaagggctcagtagagtctggttcactggcattgccaactaagacacagtcataaagacggtattcatcgtcatcataggtgaaagattcatagaactggacatc

SEQ ID NO: 106337 - DNA, 469 bp, Arabidopsis thaliana columbia
aaaattgtattgggggttaggtcgctggacatgacatcctattgcttgtttggtatttatggatcaaatcgacggagaccaaaaacaaatatgaaagaatcctatacaccaaaagtggaggagctcgaaatagccataagaactatattagcaataatattgtacggccttggaatgaatacaaaagagatataagcaaaagagttccaaagcaaagctaaatcatgaattgtgtgcaaattgtgtctaagggtattagtaatgacaattgcggaattgttacataaaactatatgctaaatctcttttgtgttgcccctttgatataatagatgagtaatgactgttgctgtttctcaatgataatgctccaacgtctgaatcgttttagagaacaaattccgggtggaacctaattaaacaactgtgacccgaagtatggactcacctaatatttaaaacgggaaag

SEQ ID NO: 106338 - DNA, 583 bp, Arabidopsis thaliana columbia
  unsure (1)..(583): unsure at all n locations
cgtcccgcannaagcgtgaggtganngatcggnngaatcagacccatcgcctcncnngtctctcaaatttcaaaccgtctatctcnncatctcnncttcctcgcgcccgcgcgctccatggnnaatctcnncgaagaannttctctganntcccgagccttccnnntctattcnnatcatctntnncatctccgagannntctttcctnncctcgacccaggtgcctnncaattccaacctnnncaacgctgcatnntcgagaaatnnctccttctccggccccccgcgtnntcctctcctacccgtcgatgtatttcttcggaagggaatttccttattgggcatctcccaccgagcnccagggaaggggatccgagatgtanttcacctgccttctacgctgcttgtacctttggtggaattctcagctgtggtcttactcacatgaccgtgactcctctcgatctcgtcaagtgcaatatgcagattgatccagcgaagtacaagagcatctcgtctggttttggaattttgctgaaagagcaaggagtcaaaggctttttccgtggatgggttcctact

SEQ ID NO: 106339 - DNA, 361 bp, Arabidopsis thaliana columbia
gccacgagaagttgctggaatcatgtacttctgcattagaaaaatattttgtcggttcttgtgggcctggtggattctatggtacaattgatgtccaccttgactgcgaaaccagaatatccaaatttttgggtactcctgattcaatcctttactcttatggactttccacgatgttcagcacaattccttgtttctgtaagaaaggcgatgtcattgttgctgatgagggtgttcactggggaatacaaaatggacttcagctttcaagaagtacaatcgtgtactttaagcacaatgacatggaattccttcgaattacccttgaaaaaatcatgacagagtacaagcgctcaaagaa

SEQ ID NO: 106340 - DNA, 442 bp, Arabidopsis thaliana columbia
tacacgaatagcaaaacatggctaacaagctcttccttttttgcgtcttctctcgccctctgcttccggcgcaccaacgcttccatctaccgcaccgttgtcgaattcgaagaagatgacgccagcaaccccgtaggtccaagacagagatgccagaaggagttccagcaatcacaacacctaagagcttgccagagatggatgagcaagcaaatgatggcaaggacgtgagggtggtccttccctaaaccatgaggtccatttcgagggcccccagccgggataccacctactccaccatggctgcaacgagcttcgccttacccttgagaaaatcatgacaaagtacaagcgctcaaagaacttgaggcgttatattgtagctgaagctgtatcattacaatcaagtaaaattgaccattcagatgagattgtaaactaa

SEQ ID NO: 106341 - DNA, 179 bp, Arabidopsis thaliana columbia
  unsure (1)..(179): unsure at all n locations
gaccgactcccgcgnccggcgaggcagtcactattggttccattctatctacagaactttttttttctccacaacctatatatttgcgaaggcaccttaactatctagagtgtaacccctcacatcgttttctgtgaccacatccaccctcatcctcgatgtgtaggggattttaatgc

SEQ ID NO: 106342 - DNA, 395 bp, Arabidopsis thaliana columbia
agatcttcgagaaagatggactcttgtataactgtgccttctcgatatgcgatttgggaaaagggcgtaatgagtattgtattatgcagctagtcacggtacccgatagtaacctgaacatgtacttcaagagagggaaagtaggagatgaccctaatgccgaagagaggctcgaggaatgggaggacgaagaagctgcgatcaaagagtttgcaaggctttttgaggagatagcagggaatgagtttgagccatgggaacgtgagaagaagattcaaaagaagcctcataagtttttcccaattgatatggatgatggaatcgaaagaaggagtggggctcttggtctaaggcaagctggcatagattctgctcattgcaagcttgattcgttg

SEQ ID NO: 106343 - DNA, 278 bp, Arabidopsis thaliana columbia
aaaaaagaaaatggctaagctcagcaatctcctagctgcaatcttctttgttctactcgtccttaacggatggcttgcgaggcaggcacttggggttcctcctcagatacagaacgagtgtaacctctacaacctaaatgttctccaagccaccgaaactatcaagagtgaagccggtcagatcgagtactgggaccacaaccaccctcagctgcgatgtgctggtgtttccgttgctcgttatataattgaacaaggacgtctttactctgccacct

SEQ ID NO: 106344 - DNA, 364 bp, Arabidopsis thaliana columbia
gaagataaaaagaaagagactgtggtgtgttgttggaaagctaccgtgtgagttagacaatctataaaagatgtaaatgtgtaggagagaaattacgtgactatttccatttttttgcgatttgtttttccttttagtcactagtggccggtgactgcatagtagtatggtagtaccttttaatttcggctaataccgaccaatgaagaaaatgacttaaatgtttaagcgaagggaaataaacgttgcaacttgtgcaagactacttggaaactgcagattttgtgtaatacactattcccgcagatctactacgtacgatttagtactacttgtgaattgtcacacattttcataattttca

SEQ ID NO: 106345 - DNA, 369 bp, Arabidopsis thaliana columbia
  unsure (1)..(369): unsure at all n locations
atccaaaagnnaagggggaaacaacgggnncaaacgctgnnacagaagnagctgcgaacatgggagagaatgtaaaatttaggagaggtttcttgatgtcaaaatcttcaaaanccgtcctttctgcatatcttcacacaagtcctcaaccagggttgggtcgtatagctgggattgtatctctcgaagtagaaggtgaaaatactcaactagaggctattcagcgtgtaggctcagagctggctatgcatgttgtagcagcaaagcctttgtttttgagcaaagaccttgtttcttctgaagcaatggcaaatgaacgcgagattctaaagtctcaggcagaaagtacaggcaagaatcagatggcga

SEQ ID NO: 106346 - DNA, 403 bp, Arabidopsis thaliana columbia
gtagaagtcttagctctgctgatgaacaagtctcgcagctgctacattcatcactgtatttgaaagatctgcatgcgaggatttcgtttacagatgaaggtcctcctgggaaagtgaagtactctgtgacgtgttattatgctaaggagtttgaagccctgaggatgatttgctgtccttcagaaacagatttcattagatctcttggtcgttgtagaaaatggggagcccagggtggaaagagcaacgtcttctttgcaaaaagtttggatgaccgttttatcatcaagcaagttacaaagacagagcttgagtccttcatcaaatttgggccagcttacttcaaatacctgactgagtccatcagtactaaaagccctacaagccttgcaaagatcttggg

SEQ ID NO: 106347 - DNA, 481 bp, Arabidopsis thaliana columbia
tccgggcgaccacgcgtccgacaatgctaaattcttcatatctatccttcgcacttatctttttctgctgcattttgttctccgctctcgcttcgtctttgcccgtttccgaccctgagcttgttgtcgaggaagtacacaggtatatattctaacaaaaatgttaaaacattttacatacactactcaaatgtttggtattaaatattgtttccaagttctttctattcaaggctaattttgatcttgatcacaaactcacttgttactattgctgcattaatagctatgacttatgagtacgcctaattacgtacgtcaagaatatataattaatgctaatatattggctggtggttaatgctttaggaaaataaacgagtctatatcaagaaggaagctaggtttcttctcgtgcgggagtggtaatccaatcgatgattgttggcgatgcgacaaggattgggagaaaaaccgaaaa

SEQ ID NO: 106348 - DNA, 415 bp, Arabidopsis thaliana columbia
taatattgcgcggagcttccgagacagatggatacctaagcattttagaaaaccttggcgcatcaacagggaggagagatcggagtctatgaggtcacctataaacagaaggttcagagcatcacaagaacctcgatatgatcatcagtccccaagacctgcagaaccagctgcgtctgtcacatcatcaaaggctgcaactcctgaaacagcatctgtatctgagggatattcagaacctaattccggtcttcctgagacaaatggacgcaagcgcaaaagcagatgggaccagccgtctaagacaaaagaacaaagaatcatgactatcttgtcccaacaaacagatgaaactaatggaaatcaggatgtccaagatgaccttccacccgggttttcatcaccctgcacagat

SEQ ID NO: 106349 - DNA, 315 bp, Arabidopsis thaliana columbia
cgcgtccgcaaaaagaaaatggttaagctcagcaatctcctcgttgcaaccttcggggttctcctcgtccttaacgggtggcttgcgaggcagtcacttggggttcctcctcagctacagaacgagtgtaacctcgacaacctagatgttctccaagccaccgaaactatcaagagtgaagccggtcagatcgagtactgggaccacaaccaccctcagctccgatgtgttggtgtttccgatgctcgttatgtaattgaacaaggcggtctttacttgcccaccttcttcactttcccaaaaatttcctacgtc

SEQ ID NO: 106350 - DNA, 392 bp, Arabidopsis thaliana columbia
cggtatcttagttcctcccacgtgtccggaactccaaaaccactatgttattttttttgtattttttgccgtctcgtaatgttttgattatataatatttgtttcggattcaaattagaaaatcactcttttagttatctaaactttgggtggtttaccatttcaacatgacagatatacgtaacaggtgtgcacactatacacaaccaaagcgttagataaagagtatagtaccacgatttatatttacgataatatatacttttgtacattaatttagacaaattgcaatgattataattgtatatataattcaaacatctaaacagacttaatcgcttgctgaatgctgatcgcgaacgcttacatatcatatgagtcatatcccaaac

SEQ ID NO: 106351 - DNA, 408 bp, Arabidopsis thaliana columbia
ggaacaatcgttacgaatcttactttcaaattaaggtggtgtctctctctctgtgtcttgttcttcttcgtggtgtgcttctctcgtctcgccaacaagaatgtgtttcaagatcctagtacgaccttgttaatttctcttataaagggcatgtaaagactaaaaagaggcatatgtcctacactaagtaggactctctttttttttcctacaaaagtaaatttgcattatttttactttttagccttccaaatagtgcaattctttcctaatctttgattttttttttattgataaaaactaaaacaacctaacaaaattgaaatgagaattaatgtgccaattcagcttataaagactaacataaaaacctaacctagcttcaatttattgaaaaattaaaaggtt

SEQ ID NO: 106352 - DNA, 355 bp, Arabidopsis thaliana columbia
atcaatatgttcgtagtgatataattgtcattaacttttttttcttttaactgagaaaatatatctcaaaacattgctcatttatattttatctagacatttaatatccaaaattctttggttggaaaaaaaattatacagttaaattgtgcaatttaattccaaacaaaatacaaaaaaattgttacttttgtactcacaatctcataacaaaaataaattcaaatttactcaaatcatctcaatttataattatttctaaataattgttattaatatttcgtttttattaccaattgttttaagaaatttaaataaaaattaaaagaataacaattttcattttcaatccact

SEQ ID NO: 106353 - DNA, 425 bp, Arabidopsis thaliana columbia
  unsure (1)..(425): unsure at all n locations
aactgattggagattcttaaatctagctaatagaaagttttttttttgtctaatgttattttctatatagaatttatataccgtcttttaacaaccaactttattatttagtcgcatctttatgagttttttttattattatacgaattttatagcgacagtaggaaaatttcacataaaattctagatatttaggaaaagaaagtattgttaagaactttggggaaaatctgaaaacacaaccatgatcatcaattagatatttcaccatttggatctttgtgacataaaatatgcaaagtcgtgccaattactaattagagatacaatacaaactatacaagcataagtttgaaaaagctttatccagaaattcaataatactatatgatatatgtgcacggntttatttggtccccccaaat

SEQ ID NO: 106354 - DNA, 540 bp, Arabidopsis thaliana columbia
ctttagacacacaatccaccaacataaataggcagtgatataagttaatatcatagaaaacaatcagaaaataattcagaagagaaaacacaacaaaaaaaagaaagaaaaagaaagaaagaagaagagatgagtgagcttctctactctctccccacttgggatatccataaccttggatcactcttcaagcccgattttaatcttggtaatatatacattaatatatagacacaaacatattttgtgttttttcaatcgtaaaatattgatacatatacgcatatgtaatatatgaatcgacgcgcatgtatttatttacaagttattcaagaactttcttattaaagtgtaatatgtttgcagatacatgtggtttcatgaatagatcgccggaacatattttcggatcaccggagattgattacctccacgtctccacaggttaccctcgaagacgcacttatcgagtccggtgagagaagcaaaaggagacgtctcttggttcgaggatccgtccaaatcttttaacgatgatga

SEQ ID NO: 106355 - DNA, 464 bp, Arabidopsis thaliana columbia
cggacgcgtgggcggacgcgtgggcggacgcgtgggttcgaacgtgtggatcgctggaaaaattaaactttagggtcgctagattacgattgcttcgctttttagtagtagtaggctacaatcgattggcaaacatctctatatcggccataactccgtcaagctctgcagaggctgcttcatcagtattgagagacttcctggtgattgattctcatgtctatgtctgagtttggcattgtctacgccatccatatcatcaccgtccaattcggctccgtcgtctcgaaagtttgtgaatgtcttctacgtaaaggacctctttcctcacgagacatctctcgtttagctgaatcagatatcaaccataacaaagttaaagatattctctatctcttgattcagcacaaatgtgttcaagctttctccattgaacctcctgatggttctgagagcaaagctat

SEQ ID NO: 106356 - DNA, 484 bp, Arabidopsis thaliana columbia
gcggccgctctacatctctctgataaagaacgcaaacatcgataccgggtctttttatttgaagtacagtcgatcaaagtcgccttggttgatctaattcgaagcctctgaaatggttttatatcatccaaaacttgtccattttctaagagacgcattgtcatcgttccattctcgatccttaagtactccacggccttccatgtcccccagcagaacacctcgaaagctaccacaacagacaaaacatagcattttaggtaaagaaacagcagtcattcaaatctcaatgcatgacattttaggtaagaaaataaaacatcagatcttgtaaaacacttacgacatggattaaatggatggttaaactcaaagtaatgctttctcttcatttttttctttcccttcaagaacacttgtggatccacatatgatcttctggaaccaatacatgtatagcctcattaggattcattcactcact

SEQ ID NO: 106357 - DNA, 270 bp, Arabidopsis thaliana columbia
gaagaagtgactgtgaactgcggtgagtcacgagaagagagcgatttaactctaaaactgcaatgtcgggggtgccgtttgtacaatccatctgcggtggaagtttttctcgaactaccgaatgctcgacagctttattgttcaatcagatgtaaaacgattgatgctccagggcatttagatctaaatggactactactactttcttcacaactgcatcatttgaattcggaaccgatcctcagtctacattgaccgcgccttctacat

SEQ ID NO: 106358 - DNA, 515 bp, Arabidopsis thaliana columbia
gccgactcagattaaattggaaagtcgttttagtcagtacgttgtaacaaattcaccgacttggttccagcattaaaaaaaaataatcacccatcccttaattcatattgcatctttattaattagtagtaatatagtaatcttaatttatttctttgatctgttcgtattattgaccgacgaactatacatgtacggtgttaccaatattttatattgaatttttttggttgaatgtagaatttttattggttaaatgttgattattgtgtacatattatatatgtgacatctcatgtataaacaaacaataatataaaggaatttttttcgtctgactacatataattgtgatttaaatacagtggtcatatatcaaaaattaaatcgttaataaaatagatttttttttaaaacataactttttaatcacaatttttttttaatcactaattacaacgccgtgaaaattggtgatttgtcgtaaaatggttgaaggtccaaaactcaaatgt

SEQ ID NO: 106359 - DNA, 518 bp, Arabidopsis thaliana columbia
  unsure (1)..(518): unsure at all n locations
gtgacaagtatcatttcagggacgtttttttcgtggctgacaaaggggagcggtcgtaagagtgatcagatacgataggaagacgaaagaagccaaagttatcatggacaatctcgtttgtaacaacggtttggctctaaacaaagaccggtcttttctaattacatgcgagtccggcacaagtcttgtccaccgatactggattaaaggtcccaaagccgggactcgtgatatctttgcgaaggtcccaggttaccctgacaacatccggctgacatcagctggagactnttggattggtttacactgcaagaaaaatctgatagggagattgattgtgaattacaaatggctcgtgaaattggtagaaaagacaatgaaactggagtacgtgattgcttttattaacggatttaaaccgaacggagtcgccgtgaaaatctccggcgagacgggagaggtacttgagttacttgggacaaagaaggaaagacaatgaagatgtaagcgaggcttat

SEQ ID NO: 106360 - DNA, 348 bp, Arabidopsis thaliana columbia
  unsure (1)..(348): unsure at all n locations
cgancttacagacagcacatcaactacaaaaccaagatgacatcttcttatacaacgacctaaaacaacaccctcgtcgcctttttaaacgacccatcaaacccctctatcctcataatgtcccttattccactcatgtactaaccttgtatgtcatttaacctatacgatgaacgctcattactatagcctacttgacattatccggttaccttatatgactaatcctaacattcccgttacttctaattttattcctattatttaaccatacaacctttttcatctatctaactatgacttcattccttgcttctattaccatatgtttcaccacactattataca

SEQ ID NO: 106361 - DNA, 392 bp, Arabidopsis thaliana columbia
ggcgattactgctgaccaatctccttttgattactacgtggtagtttcgtctcgggggacggataaaatcataaccaccaccggggttcttcgctacagaggctcgtgtacccctgcttctggtcctattcctggcgggcccactattcaggttgattggtccttgaaccaagcacgtgccatcagggacttatctttcttgcatatgtgattaagtgctttatgctcctctccaataagtgctatgaataatttttctttcgtagaaccaatatgacagctagtggaccaagaccaaacccgcaaggcttataccattatggtcttataccgctcattaggacaattgtgttcggttgatcagccggtcagataaacgggaaacatagata

SEQ ID NO: 106362 - DNA, 238 bp, Arabidopsis thaliana columbia
gtccgatcacatactagtaagaatacttttcttttatcaaaaaaaatggcaaacaggggcggttctattctgcgcaactttcgccctctgcttcctcctcaccaacgcttccatctaccgtactgttgtcgagttccacgaagatgacgccagcaaccccatgggcccaagacagaaatgtcataaggcgtttcagcaattacagcacctaagagcttgctcagaaaatgatgcgctt

SEQ ID NO: 106363 - DNA, 335 bp, Arabidopsis thaliana columbia
  unsure (1)..(335): unsure at all n locations
ggcgaccccacgctgtccgggagagcaaggcaaagngtgatctttattctttgaggaaaattcttaagatgtacgggtactgtattatgtatctaaaatggcaatccgtgaacctcgatgcacccgtcaacatttgacaccatggctatgaacgaagagctaaagcggtctgtgatgggagatcttgaccggtttatcagaaggaaagatttttacaaaagagttgggaaaccctgtaaaaggggttacattgttgttatggaccacctgggactgggaagactagcctagttgcagccatcgctaactacctcaagttttgaaatctatgaact

SEQ ID NO: 106364 - DNA, 389 bp, Arabidopsis thaliana columbia
tgacgttcccttctctttctgtctcatttctcttctttgccttcatattcgttacgcatgcattcgacctcagcatcatccaggttcttcttgttttctactttctggctaacaaagtaaccagaaccggttttctcacttgtatatttgtttttttgagaaaatcatgtagatgcaacagggaacatgtccgtacacggtggttgtcatgacaagctgtctttctccggagtcgacaagagatcagatcagcattgtttttggcgatgccgacggtaacaaggtgtatgcaccgaaactagggggtttggtaagaggaccagggggtttggggaagtgttcaacgaacacattccaagtcagaggtcaatgtttgaatgaccctatct

SEQ ID NO: 106365 - DNA, 199 bp, Arabidopsis thaliana columbia
cttattatagacatccacaaaaaaaaatatgtaattggtttggccctacttttgtattttgtaacaaatttgtgggaatcagtggagccaatcagttgcctccacgtcatcgtttgcacgccatgttagccaaaatgtggtcatgcatcacccatctaacaagtcaggtgtaatcgaagcatccgagatctcgtcagac

SEQ ID NO: 106366 - DNA, 396 bp, Arabidopsis thaliana columbia
aacaaaccattatatttggattaatcgagtattcagcaaatattcatattgtcttgttaatgattaagagcctagaagtctttaaaatatccatcaagattcaaacattatgactcaaactagtgtggttttgtccattatactcgaaacgaaatggtattttttcaacttttgcttgtaaaacttagccagtgcatggcctttattaaatcaactattgggtcactgcatgacccatttatcaacctgtaactgaatattgggctttggcaaagatccaattagcttcattcgtatttcagaaatttgattttatatccgactgagtaggtacgtatatgcaatacgttatgtcctattagccttatgggactcacgggtacttatgcaggagat

SEQ ID NO: 106367 - DNA, 270 bp, Arabidopsis thaliana columbia
gtaaagccagggattctacctcgaagaagagcttttggtccagacatagtaataaaagattaagtcattctttttcaagcgttgagggccttaatcaggcaacatgacataaaataggactggctttggattagagaaaagctcccttaaacattttgtatccctttttacttttattccatgtttaaatgtcacatggggaaaatatgtgtaccaatgaaacaaacttgtcattttgtagaatgcagaagaaacaaaaaaggataaact

SEQ ID NO: 106368 - DNA, 392 bp, Arabidopsis thaliana columbia
caaaagtgcagaaatggacgtaagctaaacagtcacaactagaaaaaataaattaaaaagggttttaaggaggatttaagttttaatttctaatgaaatagttgattttttcgttgccttactgcatcgtatgtagaaatatagacattcataataaatattttttgtcttttaattactaagaggttcggatctaggtctgtttctcgggtaggaaaccataacatttaatatagtttccccttaaatgttattcgtatcagtgacttctaaactttgcatagatgtattatcaattaagctattaacacttaattacatgcataatatctcaaaaacttaacaagacttagttcaattcatgaaaacatttataaaagatatcttaatgt

SEQ ID NO: 106369 - DNA, 217 bp, Arabidopsis thaliana columbia
attggtggaggagattgctttttttttatcacttcttcttccatcctccaggggagttggaacttggaagtggtctttcttcaatctgtataagaagatgggaagtttgaaatttgctcggctttgattttgagtatagcgagcggaactatgggaagtgtttctcctgatgctcaaaagtatgatcttgagcttgcagattcattttacattgatt

SEQ ID NO: 106370 - DNA, 406 bp, Arabidopsis thaliana columbia
gagaaacgatagcaacaaactttctagaggtgaaatttgaagctggtgggttcttcacgaagattgaaaaagacgatcgaaacggtgcgtttttaacagtttctcaaacgcgccgttttaagagattaccggttctattgtaaccggacatcaccggttgactttcaaatgtgctaattatgaagataccgaaccggtgaagctctttctcaatccataaaggaaactctttcaatatgtatcattatatattctggttcattctctagtcaactaagagacatttgctctgtatgtatgatatagatgatgtgtacacaattgtaaaagacgtcgataaggttgaacatggatcatatgacaaaacctcttccatgctttggttggggaatcggatggttccgtg

SEQ ID NO: 106371 - DNA, 375 bp, Arabidopsis thaliana columbia
cttctcactccacttatagagagtaattatacactagggaaatgaaaggtggcatgttaaaatgttgagttagaagttcaagctatgaatattgtaatcaataccactactttgagggagtatggccaggtgatgcctcatgaccgccgtcagatttttacgtgtttttatgtaaagtataaagtgcaaagttggtcaaaatgagctagtcacaatttactttcattgtcctttagcattccaagacagattcttaggtaaatgcaaattaattcgaatatcacctggcgtgatatagtatcttgacggtcccgattatgcaacattaaccgatcgaggcacatggaccatatcaccatgatctctcccaagagt

SEQ ID NO: 106372 - DNA, 349 bp, Arabidopsis thaliana columbia
  unsure (1)..(349): unsure at all n locations
ccacgcgnccgatccatttgctgatatctttgtaatccgatcgtttttgagatgcggataacgttgcgagatctgccgttccatcgaccaaacgctcgtttcaaaatccacacacacatcgtatttaactaacaaataacaatttcttgtaattacctgaacggtgagaatagaattgcatggaccagttaattgaatagacttaaggagataagtattccctttaggaactaggagattaacagctccatttgaagaacatgctttcttccacgcattcacgaacgcctaaacaatgcatgcatggatcattagtactaaaaacagttttctaattaattatacgatg

SEQ ID NO: 106373 - DNA, 222 bp, Arabidopsis thaliana columbia
cgacccagcgtccgtctcgtcttaagttaacagatttttttataccctaagaaactgaagatgggggcgttcctgatgaatggacatgaacatccattgacgttacttaggtacaacagagaaggagatctgttttcttcttgcgccaaggaccacacacccaccctatggtttgtcgataacggcgagcgccttggaacttaccgtggtcacaactgtgct

SEQ ID NO: 106374 - DNA, 406 bp, Arabidopsis thaliana columbia
tttcgatttgggagggagagagaaagagagcttcatggtgatgattgttacctaggaaattatccggcgagagtcgctacagtcgacacttttggttttgagaggtggtaattcatcatataaccagtttactgggcctatgggccatccctcatttagcacgtgtcttccttttttgttttgcctatgggccagggtttttattttttgttttgtctgttattaacacttccattattattattatttttatttttattttaaaaaacactaacttcagaaaaaataaaaataaaaaccttcagtaaatcttataaaaatcaggtcttgaatccactacgtttcagttttcactcatttatgcgttcattatcattttatcgacaattattgtgaaagcgtggtg

SEQ ID NO: 106375 - DNA, 252 bp, Arabidopsis thaliana columbia
aaaccacttctgttatagaattcttctattttagaacaaaaataggaaaacacgttggaaatggtttaagagactaaatctaagttaaccaaacttaatttaatgaaatataaaatcgcagcaagaaaatacgttgttaactagctactgcaaagacttttagcgacccttttttatatattctgtaactttcgtataaagactatcgagacctaaactattatttaatagcactaaactattactagcaag

SEQ ID NO: 106376 - DNA, 270 bp, Arabidopsis thaliana columbia
atctgcttcacaactttcacttttttatatccatcattatctttctcgagagggggttgtgtgacttgcttatgaactgatgattgctctgagattgaatttggagagattatcgtctcagctgatattacaagcggatacacatcttcttctaagggtttagacagatcatcaagaacaaagaagctcatgtcagtttctgtccctgaaggctgcataaacttttgtccaggacctatctgaaaatggaatcttgtgtgtgaataaacc

SEQ ID NO: 106377 - DNA, 193 bp, Arabidopsis thaliana columbia
tttgtcactctcagcaccccacattggcaaacaaagctcattattcaagaaaaagaccacttgagaggactcaaacatgcaaaagatgggattagattaatattcaatcaacttcatcattccaaaagcatttacaaactacaaatctctctaaagctttttaagcaatgcacaaaaacatataactaacccc

SEQ ID NO: 106378 - DNA, 228 bp, Arabidopsis thaliana columbia
aaaaacatacacaaatggcaaaacacggctaacaagctattactcttctgctcaacgtttgcattgtggttgctcacggccaacgcttccatgtaccgaaccgctggcgaattcgaagacaatgacgccagcaaccacgtacgtgcaagacagatatggcaggatgtgtgttaggaatgacaacaactaaaagcttgtcatacatggatgtgcaagcaaatgaggcaa

SEQ ID NO: 106379 - DNA, 175 bp, Arabidopsis thaliana columbia
accgccggaacgggacccacgcgtcgaaaaagtcgagtctataatctttttttgacacttgatcctgaatggctacatcacgggggcggccatacatatcctgccatcaaatataagcggggcgacagttggccaccatcccactcgtgtcgctgctgcgtcgcatgcctaggct

SEQ ID NO: 106380 - DNA, 376 bp, Arabidopsis thaliana columbia
  unsure (1)..(376): unsure at all n locations
aactcaacaatctcctcgatgcaaccttctttttttttctacaccttaacaactaccttgcggggcaaacacttggggtgcgtggtcanatacaaaactagtgtaacctaaacaacctaaatgttctccaagccaccaaaactatcaagagtgaatccggtcatatctactacttgcaccacaaccaccctcatctccgatgtgttggtatttccgctgctcggatatgtaattgaacaaagccgtctatactttcccaccttcttcacttcaccaaaaatttactacgtacttcaatgaactgttatcatcggaagagtatgccctcgatattcctagaccttcatggacttgcaaacaattcaaggacaacaac

SEQ ID NO: 106381 - DNA, 428 bp, Arabidopsis thaliana columbia
  unsure (1)..(428): unsure at all n locations
aacccgggtcgcccgacctcgacattacacaaatagaaaagaagaaaatatattatgatttgcattattnaagcggcgatttactctaaccgcatggcgtcttnaaagacttcanatgtatccaaatcaacttcaataatctacggaaaaactctttacttgcctcagacctatgaccgtgttgtcgctaacccttctctaatctctcttaacatctccaaaacgattggtatcagttatggctccaaacacacccccttgtatgaaatgcactttgccttcccatgcttgagcctacttaaccctataacactcgtctagacgcaacatccattgccgcaatccttcgccacgccaagcccaagatcttattcctagaccgcaatttttaggccttggctagagaaagcctccatttattatcatct

SEQ ID NO: 106382 - DNA, 428 bp, Arabidopsis thaliana columbia
  unsure (1)..(428): unsure at all n locations
cttactctatagtttatatatataatcgacatggcaattnaccgggtgggaaatacatgtggggcgcgctgacaaacatnttcatcaaccaaactacnaanatgatgtcngttttggtggctatggcggttatggtgctggttctgattatatgagtcgcggcccctccactaaccaaatcttggcacttatagcaggagttcccattggtggcacactgctaaccctagctggactcactctagccggttcggtgatcggcttgctagtctccatacccctcttcctcctcttcagtccggtgatagtcccggcggctctcactattgggcttgctgtgacgggaatcttggcttctggtttgtttgggttgacgggtctgagctcggtctcgtgggtcctcaactacctccgtgggacgagtgata

SEQ ID NO: 106383 - DNA, 319 bp, Arabidopsis thaliana columbia
  unsure (1)..(319): unsure at all n locations
cctgggaaatataaaaataacaaattctctatctctcttctttctttcgttggcactaagacgctttggctggtacncnctcaacagtcacagtcagcatttcaacagtccactcaccactcaatcctcagcctcacactctgaaagcgagctgtcgatcaggtgtggccaccacctcctcactccgttctcagtgtctcttgcacgttacatatcagtctaaggtctctacttccctcttttttaacacccaagctcttttctggctaaggacaggcttattgaaaaggatcctgatgcccgaacattccagactatc

SEQ ID NO: 106384 - DNA, 430 bp, Arabidopsis thaliana columbia
  unsure (1)..(430): unsure at all n locations
gttcaacaacacttgagaaccaactttgaaccctttcctgttctggtaggcaacaaacaaacagttggatcggaggagaaattgtcgagggcttgaaggcgaaaacgatttttcttttttctttaaataaagtatgcgtcaacgtttgtaaatcacccgtccctttactctttaaccgtacccgtgtaaaaatatgtgtcttgtcggcacctcactttgtaataaacaaactttcttctnncataaataaaagggaaagtttgcgagttaannnaanannaaaaaaannaaannaaaaaggggcggcccgcttctatgaggatcccaagctttacgtacccgcgtgcatgcccgacgtcatagcttcttctattagtgtcaacctaaaattcaaattcacttggccccgtcgttttaacaaacccgtcgt

SEQ ID NO: 106385 - DNA, 156 bp, Arabidopsis thaliana columbia
accgccgaacccgggtcgcccacgcgtcggcgaggcaacagttcggacatgcaccaaaggggacagagacgggctcttggcggtggttccatgataactagaaacagcctgatatgttttgcatgcactccaaccactgccgaccctaaggtcatt

SEQ ID NO: 106386 - DNA, 317 bp, Arabidopsis thaliana columbia
  unsure (1)..(317): unsure at all n locations
tttaaaagtggggagccgttggtcgggtaatttacgggaatgtcctttgaaatgaaagcaaaagacttggtttttgcttaataaacggggaaacgaaaagattcccttttttctgttcgttgntgnttcagatattacggagctttgctttgcctttttttctaatctgttgtttttggggaaacttgcatgtgaagggatttgcgtttaactaatcatcgtgactccgattttcttcttgcaacactgtgttgttgttgctggtgtcgcctctcacttatcttctctcttaacactttactttatatttcttttat

SEQ ID NO: 106387 - DNA, 381 bp, Arabidopsis thaliana columbia
actaaagcgcattttcatcaattttcaagctttttttaaaaaagcaatggcttcagacagacggaatgctgagagggccgagggtgcctaaaaattagctgtttaggacttgcatgacattaacaaatccggtcgtgctgatctcacaatgtataatgcgacagagagaacaactgaacatccaccgacacaagatatgccctgtgtgataagatcagcgttcacagctgtccaaagaacgtattagcatgccagagacgctctatttggaaaaacccacgaaccgcctgattctaccaaagaaagagctgatatagctttatagaaagcgtttgctgcaaaagacgcaacctacatgaaagctaacgaaacctcttatta

SEQ ID NO: 106388 - DNA, 445 bp, Arabidopsis thaliana columbia
  unsure (1)..(445): unsure at all n locations
agtaattaactaacaacaaatggcgaacaagttctttctcgtctacgcaactatcaccgtgtgtgttaatactaacacagcgggtccggctatcacacnnttntcnanttcnaccaaaattactccagtaaccccatatgcccaatacataaatgtcagaaggagttttatcaataacatcacctaagatctttccagagatggattcgcaagcaaatgtgtcaaggacgttgtggtggtccttccctcgacgattagttctatatttaagactacatctataaccctcaaatactacatctactccagaagtgctgcggcgagcttctccaataatatccaattttcgttttccccacctttaaacaagcttccaatgctctttaaattccatttacagcaacaccaaccatagcatttcatgaaaatttaccatccacctaaa

SEQ ID NO: 106389 - DNA, 394 bp, Arabidopsis thaliana columbia
  unsure (1)..(394): unsure at all n locations
gcgtccggnttgaagagttaccaaaaaaaagatagcgctactttctctttctctctggcaccattatcgcggctgctccaattattaattctgtccgcgccaatnaaacttttgcttgccggcgtcgggattccaccttcctttcaccgctgcttcacatcttttctttctttgtttgttctcctttgaaatcattctccatcatttttcctctgtttaacctctatcaaacctctttaaacgttttgtaccacctcacttcgcttctcggcccatcttcatcatcaagtgaagaagaaaagatgagttatctggcaaatccttatctccatttcttcctcgtagccctcgcttcagatctgaacccttggagctttgtctcagtttctgatca

SEQ ID NO: 106390 - DNA, 373 bp, Arabidopsis thaliana columbia
  unsure (1)..(373): unsure at all n locations
acacaaacacaatctaattcaaataattaatatatttattccacaaactaacactatgcttctcgtgataatcgatactgtgtgtcggcgncaccaaaaagcaaatcaaatatttatccactgacaccaaaataagctcctttctttcaaaaactactaccaactgcattataactcatctttcttcaactggcacaacttacaccaccatcagtttcgttagctatgctaatgcttttaacaataccaaatgtccactaaccaattcattctaaagtgccaacacatttaccagctgacaattcacttccaatggtcgcaaggcaatagtttattatgcaattccttcttccgcttaaacctatcctgcatc

SEQ ID NO: 106391 - DNA, 428 bp, Arabidopsis thaliana columbia
cctcctccaactcacatttacactcccaccttaggtcttctaaccagcctcaacaactctacggtgaccatataacagggtggcgggccaacaacaacataaaaacttctccagcgtaatgccacacagcttactaaatacaacatgaacactaaccagaacttgtactacactctacaacaccaacagatccaaatggtcaacaacaaccgacataacgtactttaccaacatgtgcagacaccacaaatacaggccatcccacacgagtactcataccatccacatacccaccaaaacaacttccagtggatctctatcaaaactaattaaaactcaatgatcatcactttccctgctagaacctacctcttcaagccattaccatttcaggtcatctcaaatagcttccatatctctcccaatta

SEQ ID NO: 106392 - DNA, 435 bp, Arabidopsis thaliana columbia
atctcagtgagttctcataaaatgagagggatgtttatttttgccgtttgaactctctttggtgctttactataacaggggctgtgtgcttctattgcttccctaaggttttaggattccaaaacatactacttatcttctcccttttgcttacattgaacttcttcattacacacaccttcttcttctaactgtggaagtccaccttacgacccttctccttcaactccttctcacccttcacctccattacatacttcaactcctttcacttcattacacactccaacttcacacacttcattacacacgccaacttcacacaccccttcttttaacttttgaaatccaccttaccaccctttcacgcctttacaccctttcactccttttgacccaacgccattacaccctccttgttgtggatattactta

SEQ ID NO: 106393 - DNA, 416 bp, Arabidopsis thaliana columbia
  unsure (1)..(416): unsure at all n locations
ggttatttcgtttattaattagtttcgacactcttacaaatgttttgtcccttacctaaaggggagaccgtcatgagcggggcggggaaaagagtcngtgtaacgccacatcatcccatgactcatattggtaaaactatcttctctctttcacacttcttctttttactttggactaatgatttaatcaaagatgtcattttaacatatatgtataaaacgcgtaattgggaagatacacacacacacataccagctatgacgtgacagtgtgtgttagatattgagatgatgagctggcatcaacctctctatagtctctatataatccattctttgtcctctcttctctttacatgtaaattcacatatctctctctcttatttgatcataaagaatttattgcttcttaggt

SEQ ID NO: 106394 - DNA, 325 bp, Arabidopsis thaliana columbia
cgccaaacatacacactacaaatgcaacagtttttcgctccacttcctcttggtctctacaacgctgcttaccgaccgcgtgatcgaaaaatacccctacccaagcccaaaagagaagcccaggagttcaaagacacacctaaagctgcacaattgagctcagcagcaagcaggcgacgatagttgattcaagacacagagaccccaggcaacacagaacaacactattcacatctgaacgagcttgcagaagagccagattggttgcccacttgaacagctgcaagccgtagacccaggccagaccaccaagcagtagaaatta

SEQ ID NO: 106395 - DNA, 466 bp, Arabidopsis thaliana columbia
  unsure (1)..(466): unsure at all n locations
ccggaacggaaggtccggcgccacgcgtccgggtacattctcctattaaataaatatggtgcactcttatgttattagctaaaatgttcagatgatagtgcacagtcatatcatgggtaggattantattaataaaataaatggctttttggcaaaacggatttggagagacgggtttttgaatcaacattaataaaaaatatatataattaatccaccgtttgaatacgggttaaatctttaattaattattttttaagaccactaatattaaacatatcaaatcatcctaatttagaaaagattatataaaaccaaaaatgttatgtggtatgtataatgttactatatataaaattaaactataaaatataaatgtgttagagaatgatacaatatgcaaaacttttatatataataaataattcttaaattttaaaaattactacgttaaaaaaaaaaatac

SEQ ID NO: 106396 - DNA, 427 bp, Arabidopsis thaliana columbia
ggttcataacgaaaacggagtgggcaacagaatgggtgtggtgctaaatccaaagagaatcgagcgccggtcaagagtcttccttgcgattgctgcgcgcttacgtttttgccattcgaagatcctgtgtgtacaatcgacgggagtgttttcgagataacaacaatagtgccttacattaggaaatttggaaaacatcctgttactggagctccattgaaaggagaagatctaattcctctcatctttcacaagaactctgaaggagagtatcattgtcctgttctaaacaaagtcttcactgaatttacacatattgttgctgtcaagactactggaaatgtattctgctacgaggcaatcaaagagttgaatatcaaaaccaagaattggaaggagcttttaactgaagaaccatttacaagag

SEQ ID NO: 106397 - DNA, 428 bp, Arabidopsis thaliana columbia
  unsure (1)..(428): unsure at all n locations
atcaaatcagattaatcatcgtctcgctcntataaaccctaattcctcaaagatcccgatttttatcccaaggaaaaatcgatcgaaatcgaaatggaaacagaggttattaaaattgttaaaacaaaattgaattcgagaaaagaaagaaaaagatcgaagctttaattaccttagaaggaggaggaaaaatggatccgagaataccagaagaggaaggagaagaagggttttctctggaaccaaaaagctcagaggttaacgaggaagaagaacaaggagaggaagacgaagctttcttctttcttccttccattggaattcgtcgctcgctctaaaaaaaaacactctttcagctattatacgtatatgtatgatgtatctgtctatatacgtatgtgtaaatacggagagagatatatatatat

SEQ ID NO: 106398 - DNA, 312 bp, Arabidopsis thaliana columbia
  unsure (1)..(312): unsure at all n locations
gcttattctattttgcaattggacctcctcataattttcanncannncagatngnaaagagnnggtattggattggatctaacaaaggagactaattggaccttcacggccttcctaagaagtaagaacggtgatacaaaatttcaccatgcttgaagacatgacaacaaaaagtccaaaagacaagttatccaaatcagaaaaacaaaacccaaaagacatgacaaccctttaattattttaaatcacaaatgtttgtggaataaaatcaatcatatgtaaaaacatacaaaattagctaattactgtttt

SEQ ID NO: 106399 - DNA, 450 bp, Arabidopsis thaliana columbia
  unsure (1)..(450): unsure at all n locations
gtaccggttccggattccccccacgccccccacagacccctaaagatacccacccttattgttttttcctanncnctctatatatatatacgcgggtcaaattcaaaggctcaggttttgagctttcttaacagccgccgaatcgatttgtgattttcccgctcccgagagattcggatctggatttttcgagctgatttgtaggaatttctcgttttctcgcggtgaattatatcaactgtggaaaaaaggaaaatttctgggtttttttgcctttccagatcgtgaaaccttttagagatacgcgaaaacgcctgaggaggcgaattcccgccaaaaaaggacggcgttgaagagggttttccgaccaagaagccaccaaggcagctcgacttcactggtggctccgatgaacattcactgtctaaaccagcgggtcctaccgtcgta

SEQ ID NO: 106400 - DNA, 247 bp, Arabidopsis thaliana columbia
  unsure (1)..(247): unsure at all n locations
aggacagctggagcccggaccttttnccttttttgnaaaggcaaanannagaggcattgggggcgcaacgcgcccgagccacccccaaacnnnaaaaaggnaggacgcggcggccgcccngaagagccggcacacggaancgagagccccaagggggccacccccgggaagcagaaccggcgaagcgggaagaaccggaaagccggnnacggggcccaaccgcgcgccaacccaaaacccacaaagg

SEQ ID NO: 106401 - DNA, 442 bp, Arabidopsis thaliana columbia
  unsure (1)..(442): unsure at all n locations
atccttaccctttgagagcancngangttctatttctacttaaaaggacaacatattgctcttaaaagtttgacaatgcgtaggaataaagcgcaaacgaagttggaaatatatatatgcataatcagaagagtcttcatctattagatcaatgtaaaataagattttctttctaccatctcagactgttttcaatacggccttccaactactactgtcttgaacatctatagaaacgatactctagtgaccaaatatcttcacatgcaacaaattcttaagaaaaaaaaaagaggatgatgagctataagagaaattttgcatcacactgttaagatttaatgcttattacgtacgttcaatggcagcgacgggacgtctttcattacactaaccaccattcgatgcaaacactaaatgccaacataaccatatacttact

SEQ ID NO: 106402 - DNA, 251 bp, Arabidopsis thaliana columbia
ttttggaaaaaaaaatatactttttatattataatccgcatctgccttcgtcttcttgcttgcctctaaatggaattacccattttttccgataaatttttgttgaggaagaatttttgttgtaaagagagtttaattaaattatgccttcaatagaagatgagctgtttccgtcaacgccgggtaaattcaaaattgaccggtcaaaccggcagctccaccgttgtttcgcttttacgagcaccatgttt

SEQ ID NO: 106403 - DNA, 256 bp, Arabidopsis thaliana columbia
  unsure (1)..(256): unsure at all n locations
cgaagaagcaaggagggncagagggcaacacgcgggagaccaggccgacccacagcagnggcccagcnagcnacggaaggccaagagnggcngcagcnnaagagccnaaaaccgcggcnnaacaangaaccgcnacccgaaaaggaaaggaaanagnacgnagnaannanaanaagggacgaaaangngacaagggnnggggagggggaccnngaaaangccacnccnnnncngaanaaaancnnnccnnccgaac

SEQ ID NO: 106404 - DNA, 436 bp, Arabidopsis thaliana columbia
  unsure (1)..(436): unsure at all n locations
ancaatttctattagctacaaaggttattctttcttttcgaccnactgaagacactttcaatttcagtcggcctatgaaggcggccgaggtcaaggtncagatgaaggtgaccgggttacggtggtggcggttacaagagcatgatgcctgaaagtggcccatctagtacccaagtattgtccctgttgattggagtccctgtcgtcggttcgctacttgccttggctggattacttctagctggttcggtgatcggcttaatggttgctttaccactatttctcctcttcagcccggttatagtcccagcggctctaactatcgggcttgcaatgacaggctttttagcctcggggatgttcggtctaaccgggcttagctcaatctcatgggtcatgaactatcttcgtgggacaaggaggactgtgcctgagc

SEQ ID NO: 106405 - DNA, 275 bp, Arabidopsis thaliana columbia
  unsure (1)..(275): unsure at all n locations
agacgacataccactaaacctttcgcattcantaggccagacncagcacgggtggggtccatttaaaagagagacccggcagaccaannacaaaagancagaganggagaagagaaganacaacnggagcaaacccaagcaaacccagacccaaaacgggaccaaaccgaggacgcagagagacaagggaaggaaaagcngaaagagaaggaagaggagcgcccccnggnccgacaaanaacgaaagcggaacaganccaccacccccaacagga

SEQ ID NO: 106406 - DNA, 211 bp, Arabidopsis thaliana columbia
  unsure (1)..(211): unsure at all n locations
acacnaggagcggnganacctttgccctcactaccggngnagcacaaaggggccgcgaccacttacaggggccaccggccacccacagcgncnncnancaagccaggcaccagaaccagccagaccgcaacccaaggccaagaaacacagccggaaacaacccacaaggacaagaaaggcaacaaggccgagagcaacagccacagaagaa

SEQ ID NO: 106407 - DNA, 236 bp, Arabidopsis thaliana columbia
  unsure (1)..(236): unsure at all n locations
gccacttgncaacancgcncttttcgctccgttaacnaccaaaaccaactggaccggaaccttagagagggggatggggccgcaaacaaccagcagggaggctnnggcggnncacagcaacaacaagaacagaaaaaccngnggagcgggngcgacgcacaggacaaagcgcaagcaaagaaaaaagacgnacagcaggcacagcagccccagaaccaacaagacagcagaggaaa

SEQ ID NO: 106408 - DNA, 156 bp, Arabidopsis thaliana columbia
gttctcaaaatattagcattacttatctcatactctcggagagattattatgattcaaatatccaacgtaaggtttggggcacacgtttcgttgtttggtctcaactggcaatgcgaaaagctcttccatggttttcataattgattcctggaagc

SEQ ID NO: 106409 - DNA, 414 bp, Arabidopsis thaliana columbia
  unsure (1)..(414): unsure at all n locations
agattattataacatataactggngtgctctatttttacacatatgctnagttctacttatacaactaacacacacatacacagttattgctcatttgagagtatctattggaaatttgagtttattatgcataagagagaaatcagaaatagatcataagactggcttttagtaattaatgtttctagggatgatgattcaatatttattacaatattagctgaatacagaacaacaacaacaacacacccaattgatacaagatgttccaaattaatcataagaaattaacaaaagtctgcataaccgtaaccataaagttcattctgcatcaactgattcaaccaggggttattcacagattcttctacctccgagtaatgttgtgtgcttgagacgcaaggatgttcaca

SEQ ID NO: 106410 - DNA, 179 bp, Arabidopsis thaliana columbia
  unsure (1)..(179): unsure at all n locations
cacaaagagtttttgcttttgtngncgccaaacaagnggaggcgagtgacgattgaaaggagacacggcccacacgacacganngaagaggangacgaaccaccacacgnggagccgccacccnanagcccnaagcgnccaaaaccaggccgcgagagacaganncaaagccagaaaga

SEQ ID NO: 106411 - DNA, 437 bp, Arabidopsis thaliana columbia
aacacacacgtgcactcctttttgctctgttttcacgtgtgatcttgaccttctagaatgctatatcattgactaaataagaaaccaacacaaaaagagttttcgaagcggaatacactctcttgttacacagattggactcggatacgaggatacgacaaaaaacaagaaaccctacaaattactattgatgaggttctttgtacatatagtggttgttgcatatcatcatctccttttcgttttctttgctttttgtcattcgtttctatatatcataaactttctttatgtctcaaataaaagctctgtggtattggtcttcttgagcaagtcatttataaatgacaaaatattcatggctttcttcttaagcggttcggtatcgatcgcttcaattttacctatgaaaatggttatacaagtttttttttttt

SEQ ID NO: 106412 - DNA, 212 bp, Arabidopsis thaliana columbia
  unsure (1)..(212): unsure at all n locations
ccacgcacccaaaacnccagaaaaccacagcaagcaacctcttccttcttcggggagcaccacaaccggaacaggtgccttgcaaggcggccactggccgccccaccncagccacagaacgagagnaaccacaacaaccaagcaagccgccaagccaccgaaacaaacaagagagaagccggccacagcgagaacaggcgaccacaaccacc

SEQ ID NO: 106413 - DNA, 383 bp, Arabidopsis thaliana columbia
aaacttcagaaaactagattttggaaattctatttcttcagaagaagaagaagaagaagaaattgtttttgtgattgagtaatatggcggctatgcagttaacgagaacggttttcttcgggatctcgaaggctttccctaaaagccaagctcctagaactcttgcggtagcgattggtcggaaaagctctcgtgtcttttttgcatcgtcggttaaccattctaagggaagatatgatccagtagagaaagcgagagactcgagggccgatttggcatatgattcgaaaaaatggagagaagaatcaggagaatacgcagaagcaggtaaagagaaagcccacaagacaaaagagggagctaaggacaaagcttacgatttg

SEQ ID NO: 106414 - DNA, 154 bp, Arabidopsis thaliana columbia
  unsure (1)..(154): unsure at all n locations
cacaaaactaacaaaagancataagctttgnctncacngnnganaangnctaccacgcggacagatnatgcgaggcagagccgccgnggcangggaagccggaaagccacnggggancgaggaaagggagggggcnccaccgcagaaacacgaa

SEQ ID NO: 106415 - DNA, 273 bp, Arabidopsis thaliana columbia
  unsure (1)..(273): unsure at all n locations
gagaaagaaaaagacaaagacaagnacctggatcgttattangagaggannnagnaggggcaanattgaaagcaaacggggacaccgcgcaccccccnccnncnccnnnnacggccaaaagggagacnccagaaacgaccaacgaaaggcagccagcaaaggcagaaaacgccaacaacacgaaagaaagcacccccccgagccgaagcgcccccaacaaaaggangagaagaacacacaccgccaacggcgacaaaaaaaaaaaaaagacac

SEQ ID NO: 106416 - DNA, 439 bp, Arabidopsis thaliana columbia
gtcatgaactccattgctcgtggacagatgattcttcttttctctgctgctggtctacctcataatgagattgctgctcaaatttgtcgtcaggctggacttgtgaagcggttggaaaagactgagaacttaattcaggaggtaaatcatttgccccattaccaccaccactaaagtacttttgttttccaagtatcaaagtgtaagtgcctgtttctgcacattcactttctaactgatgtagaaagatttaactatctctaaggataggtacatttaaagggttataatttgtgatgccattgacttttcataatactcaacttctatgaagattgatatagcagtcagtctctcaattcctgtgtagttttgtttgctttgtaaactccattattaacattgtgcttttccaggatcatggagaggacaattttgt

SEQ ID NO: 106417 - DNA, 305 bp, Arabidopsis thaliana columbia
  unsure (1)..(305): unsure at all n locations
cgaaaggactcngcctgcngcaagnncctctcgtgttccaagncccannctcgaaatgcgcatgtgaaatagttctgagtaccgtcactaaatcttccttacacttctcacactcattgatttgcttgaagacagctgagtaaacaagcttaaacccttcttccgggctaatctgagtcatgtttggtaagttacagtaaatgcaacccagtgtttcatcttctctatgtataaatataggcctgaagaaccaatgagcagccgagacaatagcaatgtttgtattcggtagaccattaaaccac

SEQ ID NO: 106418 - DNA, 129 bp, Arabidopsis thaliana columbia
  unsure (1)..(129): unsure at all n locations
agctagggggctcgnacgaccngacgcnggaatgacatagatttcgaacangncccgcaacgggcaagggcactaagaaganggggcggaaccaccagaccnnccnnngccccaaaacggcnccaaccg

SEQ ID NO: 106419 - DNA, 271 bp, Arabidopsis thaliana columbia
gagagaccaaagaacgccgattaaattgtgctatagcaaccgccacaaaaggggcggagaaaaacgaaaaccaggcgaccaacaagacacaggaaatggctgcaaaagaaatcacaagccctacgatagaggaacatgaaaccaacgaacaagaaacgaaaacaccaagtgtgcctgcagaataagcaacggcacgaccaaaagggcgaaccacggggcaaaaggaaaggcgagacgtaggcccctccgaaataacgccacaaaaaacagc

SEQ ID NO: 106420 - DNA, 240 bp, Arabidopsis thaliana columbia
  unsure (1)..(240): unsure at all n locations
ggaaaagaacaaanagaancaacgaanggagagaccaacgagaanacancgaaaaaaccgacgaacacaccgcgaacaaaccaaaagaaagaccnggagaagagagccaccccgcgaccgaacacaaaagaggagacgaagaagaagaagacagagagagaagcacagagnncgggcaaaaagagaacaacggcggaccccgagaagggaagagagcncacgggaaccgcgcagaggagc

SEQ ID NO: 106421 - DNA, 197 bp, Arabidopsis thaliana columbia
  unsure (1)..(197): unsure at all n locations
ccgagaagggancgagcgggagcacgccagcatggacctgaaaganggcgaacaaagccngagcgggggaaagccagaggaaacgccggcggaacgcccgcagcgaaaccgacgagcaaaccgngcgaccgacaagggaagaggggcgaaagacaaagcgaaccagccagcagcgggaccccgccgaagcggccaac

SEQ ID NO: 106422 - DNA, 349 bp, Arabidopsis thaliana columbia
  unsure (1)..(349): unsure at all n locations
ccgnccgaatcccggtcgcccacgcgtcgattgtttcaacattnngccggaatttatggtttttttgggcaggacaanacccggggatggatnctatttgggtcgataggctcaagcataatcaagattcatgttaaacaaataaaaaaaattgtcgtcttctatttaaattacgatcgccattatttattactttcattcatcatattataataaagctgaatatatttttaatggttaatttttttgtttttagcaaaggattgtatatcaatcttttgccaacatgtaatatgcgagtatgttttcttatggttacaaattaacaatgctgatacaaatttcaaat

SEQ ID NO: 106423 - DNA, 182 bp, Arabidopsis thaliana columbia
  unsure (1)..(182): unsure at all n locations
aaaanggggcgagcctcaacaacaagcacgtttagatgacactctggagccccancaaggggtacactgcccaacagaggcccaacgagcgccaccccgaccaacncaangcgctcgaaccatcccaaancatcaagagcgagggcggncgcaacgaggaccgggaccaccangcaccccag

SEQ ID NO: 106424 - DNA, 463 bp, Arabidopsis thaliana columbia
  unsure (1)..(463): unsure at all n locations
cgcatgtacttagcacttttgacatgttacatttttgttgttnggnctactttagttgcctggcgatttcttgtaatatatcgcaaagtctaattttgtgtgatgacattgatccaattgtgaaagtgttacatgttatggtacattcatgagaaatgctcaatacaatcaaaaccagggttgttttctactaagtgagaatctggtttttaaactcaagtataatgatcaaatcaggaacaaaatttgttgccaatgacaggttttgctacaattgcttcttctgccacttgaataagtacgacgtcctttaacacagggaatgcattcgtgctggccaagacactgcaaaaactttcaagcttgaacctgattatatttgaatctcattattcgagtctgcattgctactattacttcaccctcaaaccatatttattacatgtgagagacatcacgctca

SEQ ID NO: 106425 - DNA, 463 bp, Arabidopsis thaliana columbia
  unsure (1)..(463): unsure at all n locations
tcttcatcttctcgactctgctgcgtttcaataatttctgaggaannnngaatntcatatctgcaaagtaatctcttttccaaggaagttcagtaaaaatcttaaaacccccgatcagagtaatccggggacctatctccgccgttgatttcagtctgagggtttctccgatttcagttcgatctgtgtccgggattctctctgtgttgctttctcattgcgtttacgattcttcttcccctttcaagggttttttttctccgctataagcttcaatccttagtccactgggattcttgaacacctcccggagaatttaggagggaattagctcttctccagaacttgcttagctcttgtacagaatggcgggtttgttaccccattacctcattattttggcattttatgcactgtcggggccattgctttggcttttatttcatatctacaagcacctatt

SEQ ID NO: 106426 - DNA, 255 bp, Arabidopsis thaliana columbia
  unsure (1)..(255): unsure at all n locations
aaagaccgaaagcgaacaagaaccgagagggaaaggagaaaagaaccccacgacgggagggcaanacagaaccagagagcccacgcgaacaaacagaccaaggaagaggcaagcgcacacaccccaacggagaacccgaaagcaagacgggacaacgaggaaacgggaagagcgagccaagccaccaagagaaagcgcaaaccaaaagaggaaacaaccagcccccgcaaaccgacccgaaaccgagcaaacaaa

SEQ ID NO: 106427 - DNA, 438 bp, Arabidopsis thaliana columbia
  unsure (1)..(438): unsure at all n locations
gaaagaaagaaaaaaatggagaagagnggatgttgattgntttggangaganaagaagcncggagagggcacactggnncgagcgcgggcatcctccacgcaaccgcatcgcagatnccnnccggaaagccgccggagagggagctacacaagccgnggcaagggaagcttactttaccgtggttgacggtaagaaactccggcgggtttcttcttacttatgatttatatgtataagaaatgagcatgtaatgtaagagtgacaatgaataaatagagaacgtactttagtttgattatacattttaggggcaggttttgactcgaacaacgggggttcaccgtcggagactacagggaacaagacacatatgtaccctaatctcagagggggaagcagcaaatctcttgtagcatccgtgaagaacacaggaaaag

SEQ ID NO: 106428 - DNA, 427 bp, Arabidopsis thaliana columbia
  unsure (1)..(427): unsure at all n locations
ctgcgttaggaaatcagaccgagcggtccagtanttattttgancggncaaccatnagggaccggctgttgaaagccaaaatggatcatcaccctctactggaccgattggtctacacagtcttctccctgcttcagattttctcgccctttctctactccaaaaagctcaaaaccatccagtcccgtcacaattacctaaaacaggcaaaatacagaaggcacaacccaaaagacgcaaaacacggactacgacatgttaaatgactcaaaacgaagagacctaagacattaaaaacgcaacatatcaactcctccctacttagctctttgattattcttaaggaaaacaaaaatcttgatctggaggagagatttgaaaacaaaagaacccacattttactttgggatcatgcttttatcaattg

SEQ ID NO: 106429 - DNA, 332 bp, Arabidopsis thaliana columbia
  unsure (1)..(332): unsure at all n locations
gcacgcgaccacaaaaagaaggagagttcaaataacaatggcaaagacacaaaaaagaagccggagacaagaaagaggcggccggccaccacacagcacccgcnaaaaccaaaagcccnccaacaccagcagcagccaccgacaccagcaacagcaccaaccccggaaaacgagaaaccaaccgagcacaaaagaagagcagagccgagccacacagccacagacaaccaacgcccaacaggagacaaacagaccaaccaaaaccaaaccgacaacacnaaggaaggcaacacaaaccaagacccaaaagaaaaaaccaacaaagcacaaaa

SEQ ID NO: 106430 - DNA, 359 bp, Arabidopsis thaliana columbia
  unsure (1)..(359): unsure at all n locations
ggggcgagccacgcgnacggacgcggcgaaggcggccaacaaccattngattaagttaangggnnagaggaaacngggggcgccaagctangcacgggaaagggcccccaccagccggacgcngacgngnacaagccancacacggaaacaanagcacacnnaacagcnacaagcgnccgagccgcagacnaccccgccaaagcgcacaacgaggcgccacccgaaaaaacgcgagggggcgaccgaaanggaacgnaaacgcaaacgcggcacncgacgagacaaacggaaaggcgcaaaaacaaaaggagaacgacaacggagaaagagagancgaccaagagaacaccagcggaca

SEQ ID NO: 106431 - DNA, 454 bp, Arabidopsis thaliana columbia
  unsure (1)..(454): unsure at all n locations
gaaaccaacctgtaagcgagggnaagtacatgatttattactccccagngnccatactatggagatactcaacagtagcaggtccaacatagttaacactcttagccaaccttctagcagcttgttcaagtttcttgacagtttctggcggagccacagtaattggaccctcctctatgatctacgatccaaacgataaagtaagagctcatgcaataatttgcaatcgctaaaagggactataactcagttggagaataaaaattgatgtatataactatataagaataaatggacagaatgtttttctatataaccactaaccagacaattaaaaatccagaatcaactactaacaaaccttttgatgtcttctctggacgctacaatcacggctatgcagagctgaaacatttccatgcttgtcacagagcagctggacctctagatgccg

SEQ ID NO: 106432 - DNA, 464 bp, Arabidopsis thaliana columbia
  unsure (1)..(464): unsure at all n locations
gccgtttnctctggtgatcgtctcagacgctttggnatancttctcacccaggnacctgaacaaaactgtgcctgaacttactcgcgtcgcttcagatggtgtcgntcttttagcaggtaaccctggtcaacaaaaggctaaaggtgcggaattgtcgaaatttggacggcctgctaaaatgcgtagctcgtcgtggtggatccgtttcttctcacagacgaacttagaggaaaacgaagcagcaagcaagaaattcgaacaagcagcttccaagagttcatacaaaccagcttgtcaagttttccacctcaagccattacattagtacacactattattactggtcttaagacatcaaaccagatatctctcctctctgtttaatacccttttttccgctatagaaagaaactaaactcccacaaattgtaattcattcttcacgatttgattataatttaac

SEQ ID NO: 106433 - DNA, 291 bp, Arabidopsis thaliana columbia
  unsure (1)..(291): unsure at all n locations
agggacccatccagattgtgaggccaccacnaaaacaaccggacgggagcnaggagaggagagaccgacccaccccacacggcaacggccnagaagagacaaacagcagcaagagggcccacgagaacaaagacgacccagcacgagcagacgngaacaagcccagccaaggacgagggaccagaggcaacaaaaaaacacagcccaacaaggagaacgacaggcacagagccacacgaggcgggcacaaaggaaaggcgaaggagcagaccaaacacaacaagaacgcaa

SEQ ID NO: 106434 - DNA, 246 bp, Arabidopsis thaliana columbia
  unsure (1)..(246): unsure at all n locations
aagagaagggggaccggacacccacaacaccggccacgacgacacaggaaagccgacaaccacgggacacangaacgacaaggggggggggaacgacaagcgagcgagcgagaggaccgagaaggaggccgccgagacgaacaagagggcccncaagaacgcaagggagaaggacaaacaaaaggccgaacgngagcgaggcaaaaccaacgacacagcccgcnggaaggacgagaccaccaagga

SEQ ID NO: 106435 - DNA, 302 bp, Arabidopsis thaliana columbia
  unsure (1)..(302): unsure at all n locations
accgcaccgnngnncgaaanncgaaagaagaagagcgcnncagcaaccccgnaggggccaaagacaagagaggcgcagaaggaggggnacagcaancacaaacaccnaagagacncgccaganganggaacgagcaagcaaacgaggcaacggacagnggaggaggaacccaccccacgacgacgagacccgagaacgagggcccccagcaggganaccagcnacnccagcagagcagcaacgagcancaccaggaagagccagncagcgnnggccccacccagaaacaagcagccagggca

SEQ ID NO: 106436 - DNA, 279 bp, Arabidopsis thaliana columbia
  unsure (1)..(279): unsure at all n locations
aggcgacagccagaggcgcccngacatttaatgaatattgacgcacacnaggaacggcgaggcgacngacacaacaaccggcgcgggcacacacaancnacaccaacggacagcaaccacaggcaagcgaaagccccnaccaacgagccaggcaccagaaccagctngaccgcaacccaaggccanaccacacagccggaaacaacccacacggacccggagaccgacaacgccgagagcaacagccacagaagaacacgcgcaacggaagaggacccc

SEQ ID NO: 106437 - DNA, 254 bp, Arabidopsis thaliana columbia
  unsure (1)..(254): unsure at all n locations
ccatgatccatctagagctctcggtgacttaaccggaatcaagaagcatttctgtggaaaacatggtgagaagaagtggaaatgtgataagtgttcaaagaaatatgctgttcaatcagattgcaaggctcattctaagacttgtggcaccaaagaatacagatgtgactgtggcactctcttttctaggagggatagtttcataactcatagagcattttgtgaagcattggctgaagagactgcangagaag

SEQ ID NO: 106438 - DNA, 490 bp, Arabidopsis thaliana columbia
gcaagtagagacccttagactctatgatttaacgtgcaaaggagacacctgagcaggggagcttatgagcgtggtggtcctacacctttatgctactagtctcactttttattacatgtgatatattttagtttttatatttttatttatttaaattttttttgttatttattttattattttattatttctttttttttatctttttatattttattttttttatattataaggattttttttttttttttttttttttttatatttatatatattatattatttttattattttttcattttattattagttttttttttatttttttatttttttctttaaataattttattattaataatatttttaatgtattattataattcataattattattttttattattatatatatatttatatttatattatttaaatatttttcaataatacattaatattattttactatatttttttctcttta

SEQ ID NO: 106439 - DNA, 500 bp, Arabidopsis thaliana columbia
taacaacataagatgttccacttaaattatacataacattactgtttctcatgtgagtggtatcacataaaatctgaaaaaccttatcataacttaacatacacttactactattatcaaattttgattcctttattcgaaacacaatttaactcttccactttccaattattttttttacgttaatcttaatttttataaatttaaatctttcctttcacctttttttgtaataaacaaaagctcaaaccctttcctctcttgaataaatctatttccttctttaataaccaaatatcccttaaatcaccaaatccttaccccttttattccaaaccttttttcatcttttccctcttttaaaagttttttttatacctataactttatatctttttttctccccctctttattttgtccttatatgttaaacttttcctttttcctttcccctctatattatattctctattctttccctatatttttaatatatttt

SEQ ID NO: 106440 - DNA, 405 bp, Arabidopsis thaliana columbia
cagttttcaacaatctctctctatccattctctatcaaattctaaaatcaaaagatggctctgcattcgagatcttctttttcatcaaaatcgactttactcaatattctcagacacaacctcggtttcggttctaggagccacgtgactcggcatatccgccaaatcctaccacatgaccccccgcttcgaggttcacagaatccaattagccgtctctgtaataccatggcggagccagagacactctctagttttgttcagcacgaatacgccaacaatcatcaggtaatggactttccaggaggaaaggtagctttcacacctgagattcaattcatatcagaatctgataaagagcgtgttccttgctaccgtgttcttgatgacaatggccaacttatc

SEQ ID NO: 106441 - DNA, 173 bp, Arabidopsis thaliana columbia
tattctgattatttttaactacatttacattatcctcaaaacaagaccttaaggctatggttgtattataaaagacatgtacacaataatatagagactaattgagcttaatagtgtagaccctcttattttaaatcttattaattcaaaaaatagttttatatgttcttctt

SEQ ID NO: 106442 - DNA, 227 bp, Arabidopsis thaliana columbia
ctgatccttctgtcttggagacgtttctaggaaggattcctatggtgttcaatgtggtgaggttgtatccgcatgggtactttccccaagccaatgtcttgggtctgcctgatactggtggacaggttgtctacatttttgatcaagtacgtgcattggaaaatgagatgctccttaggatacagaagcaaggactggaagttattccaatagaatttcattttaac

SEQ ID NO: 106443 - DNA, 365 bp, Arabidopsis thaliana columbia
cacgcgtccgcacacatagcaaaaattggcaaacatttttttttttgtttgcccagttctcgctctggggtgcctcctaaccaacgcttccatttaccgcaccgtctttgagttcgaagaagatgacgccactaaccccataggcccaaaaatgaggaaatcccgcaaggagtttcagaaagaacaacacctaagagcttgccagcaattgatgctcccagcaagcaaggcaaaggccgtagccgattagtttgaatttccaagacgacatggagaacccacagggacaacagcaggaacaacagctatttcagcagtgctgcaacgagcttcgccaggaagagccagattgtgtttgccccacc

SEQ ID NO: 106444 - DNA, 412 bp, Arabidopsis thaliana columbia
  unsure (1)..(412): unsure at all n locations
aaaagtcactgtggttggaacaatcccttcttctagcatcctcttaaacgggtctgaagcttcttttatctgaccggacttaccatacgtatcaatcatcgtgttgtaagtataagagctcaagcaaacatgtgaatccgccttgttttcgtcacacgaccatttcttgaaaaactcctctgctttttgaaactctcttgccttcttatacatttgaagaacaatccctgttgttacttcatcaggctgcatcccaatcttactcatcttccctaaccaacaaagcgcatgtactttaagcccgcctttgctataaacatcgatgagagtcccatacgtcgaattaatcggcttgatacctttcctaatcatttcatcccataaacttttgacatacctncacttacaagct

SEQ ID NO: 106445 - DNA, 225 bp, Arabidopsis thaliana columbia
gggggagggagggatcctggccttttggtttaaacaaaattcaattgttgtttttattgctaattttaacggagacttgagtgtctttgctggtgccacacaacttgaaaaagaatttgagacccaagggtccagcaaaaaggagtgtactgagaggagcggtgatttagagttaaaggcctatggttggtgtgcacgtgcaaactactttttttattaaggtcc

SEQ ID NO: 106446 - DNA, 419 bp, Arabidopsis thaliana columbia
cttgtttttcaacattttctatgtacttgaccaagattttgcattgtaataattgggttttggaataattatgttgttgcaaagcaattttaagaagtttgattttattaggggtgcaaaatttgtaaactaaccaacccaataaaaagctaacctaataacctaacccattaatggtctcttttgtttttttttcgctggtcatgaaatggattaatccatgtaaaaggattgcaataaatttatcacgaaaaataatttatccaaaatgtatatggaataacgcattttttttacttatacacacatactaatttttcaaaagtgttatttattttaaaaaatctaaacatggcaaaaacaaatgttcatagtagacttatgatattaaattaaatgaggggacacattttggacca

SEQ ID NO: 106447 - DNA, 423 bp, Arabidopsis thaliana columbia
ccgggaccccttggtttttggttaggaaattgccaaccaaaaaccatgaatggttcctatgccggggtttgggaaactgcttgtcccatgcaacttggactcgttttagggtccacaccatccccaaatccagatcgtgtcatttacgcaactgatatctttatttccattcaaatgaaataatataggaaaacaaatgggatggtccactctccaaattcccatttctaaaccaatcttgaaaatttggtatagcctaaaaaacgtttttcaccactaaaccaaaccattgagactcacaagtcacaagtcgcgcaacagtttcacaattcccattacttttcatatattttgatttgtaggcatgtaggcatataactcttggagtagtcagatcaaacaaaggaaagcaaaaatggcacg

SEQ ID NO: 106448 - DNA, 427 bp, Arabidopsis thaliana columbia
  unsure (1)..(427): unsure at all n locations
ccggcccccggggggaaatgtaaatttttttattttctctcccacctctcaaattttttagggccgttcccatattcttgggttggaatttgtcgcctcaagttttttgaagtacaaaacatatccgccagttgatgattatttttagctataagtttgttaaatttattgtaacttggacgatttacttggttttataattaaataattaatttaattaatttcatcgatatgagagttgtattgattcaaaagtgaaacaaaataaccaatgtagaaacaaaggactcatgaaaaacaaatgttcaattaaaaatttaagggtgatcgatatacaaagggttcacacaaaagtttcgaatttttcctcttcatnaagtcgctaccacacattttttttatatgtcattaaaaaaaccttaaatgt

SEQ ID NO: 106449 - DNA, 419 bp, Arabidopsis thaliana columbia
agtgaaaatcgaaatactcatgttaacaagccattacaaacaaaagacctttatgagaaggcaacttttataggattttttagttaggaagtcttaagagtgtagcaagaatgacaagagactacacgtctacacttacaaaacattaaagttttaaaaccaaagcagatcactaggaaaaaagaaaatctacttggttctaagaccaggaacgtttttgagacccatcttgccaagaacatttttggggatagctggtgggctgtcaagtcccatgctgcggctaaactcattggccagctccaccagtctggtcgtgtctcttgcaatcatcttctgagatttgtagtaacccaaccacgcctgatacgccgccttcttgttcttcattttcacttggctcaaccctttctgcacct

SEQ ID NO: 106450 - DNA, 299 bp, Arabidopsis thaliana columbia
aaaaaattacagaacgggttttattttggaattgcgttatatggcggacggatggggatcattatttatcaaattttaaaatattattaatatgctaggtcaatagagattaaaactacagacttgttaacacacatctcactctatccgtgcattaagattacctaaccacaattattcactgggaaataagaaaatctacttgaatataagaccagcagcgttaatatgtcctcacttgtcaaaaacatatctgcagatagctgttttacctttaaatccacatgctgttgaatacc

SEQ ID NO: 106451 - DNA, 418 bp, Arabidopsis thaliana columbia
  unsure (1)..(418): unsure at all n locations
cggacccgtgggtcggcctttgccactttttttaagcaaaggatgagcaacccgaggaggggcaagtttatgggatgtgttaaaggagctagaggagcttcggggctctgcattggccatggaggtggccagagatgccaaaagctaggttgcaacaaaggtgctgagagcaaaactactttctgcaaagcccatggcggaggaaagagatgccaacacttgggatgcacaaagagtgctgaaggcaaaaccgatctctgcatatcacatggtggtggaagacggtgtggattccctgagggatgtgctaaggctgcacgtggcaaatctgggctctgcatcaagcacggtggtggtaaaaggtgtaggatngaaagctgtacaccaagtgctgagggacaagctggactttgtattt

SEQ ID NO: 106452 - DNA, 373 bp, Arabidopsis thaliana columbia
aaagggatggttttttttattgtggtccaccaccacttttctttctccaccatttttcttttcttattaaaatactccatcaaccccctatgtccaagacagaattttttccattatgttttttaattacaacacctaataactttccacatatggatgatcaagcaaatgaggcaaggacgttgtggtggtccttccctcgacgattagttctatttctagggcccccagcatggataccagctactccagcagtgcttcaacgagcttcgccaggaagagccagtttgcgtttgccccaccttgaaacaagcttccaaggcagttagcctccattgacagcacggaccattccaatccaagaaaatttacc

SEQ ID NO: 106453 - DNA, 250 bp, Arabidopsis thaliana columbia
taaaacttaaaacgcatataaattgcatttcattttagcagcacaaaaagaaccggtgtattcaattaaccgattaatactccaagttactgtgtgtttgaaagacctcactaattttttatacaggtactgtttagctgatgaacgcctcgaagaagcggtaaagtttctggatcttggtgatagagctggttgggaattgctccaggtatctagtcattccaattttctctgcatcgtggttcacagt

SEQ ID NO: 106454 - DNA, 275 bp, Arabidopsis thaliana columbia
aagatttaggcccattatataaactccttccgcgattgaattcaatcggttggtttgacccaacaacaaacccaatttcaagttcgttttactcataccatgtctttttttttttttttttttttaactcataccatatcttttaaaaatcaaaactaaaacttaatcaaatggaaggaaaaatattatatttatacttcaaacttttatagttaaaagacacattatcacaagaatttaacgtttaacttgattcctataaggctatactttcc

SEQ ID NO: 106455 - DNA, 439 bp, Arabidopsis thaliana columbia
  unsure (1)..(439): unsure at all n locations
gaaggggcggggcaggcgacccgaaaaatttcatacgtccatcaaggaacgggtatcatctgaagagtggtccctggagggggggagactcttgatggactcgcagacgatgcaaggacaacaacaaggccaaccatggcaaggacgacagggacaacaaggccaaccatgggaaggacagggacaacagggacaacaaggaagacaaggccaaccatgggaaggacagggacaacagggacaacaaggacgacagggacaacaaggccaaccatgggaaggacagggacagcagggacaacaagggttccgtgacatgcaccagtgggcatattctgtattgttttcaaatactntttttacattatattttatttttattattattatatataatttatatatatttttatttatttcttttatttgttttttattt

SEQ ID NO: 106456 - DNA, 422 bp, Arabidopsis thaliana columbia
gctttatgttccatccattagtgagcagagctcagactcgtcagtctcatttctgtggttgttaaccttttttttttgcttgcgcagaggtagcttgtataggttaattcacaggcctaataaccaattagatgagcgaaagcgtctgaggatggctcttgatgctgtactattactcttttctctttcgctccttctttacctctactacgtatttgtatcttctagattggttcttacaaaaaaaaattcaaccgttgtaggctcgtggaatgaattatttacacagctgtaatccggtaattgtccatcgtgatcttaaatctccaaaccttttagttgacaaaaattgggttgtcaaggtcagtaattcttccactcgggtttcaattctctcttctatgatatctctaatggcttac

SEQ ID NO: 106457 - DNA, 362 bp, Arabidopsis thaliana columbia
tcctctctcgctagggtttctcattcctatccataattctagatgtcgaggtattcttttgattgagctccgcttttaaccaaaccatcttagattttgttttcatgattggatcactgaattgaaattcttctcttctgtctttagatttcttctcaggtttttaactgagacctgtcaaataagctaaagcttcttctaagagcttcaaggaaagcattgcattgttgtggtcttgtttgtgtccacagaaggaaagaagagtgagaagctcaggatgtcaagcaatcgaaatacccactggtgtcacagatgtcagcgtgctgtccgccttcacggccaagagcctgtatgcttttatt

SEQ ID NO: 106458 - DNA, 420 bp, Arabidopsis thaliana columbia
ttacaatgcagtgggtctaatcgtgacaacctcggatgagaaacctcctctagacaggatccgttgtgtccgttccgacctgaccgatcaatccgagcctgacgctctgatatgggaaactaatgggtttagcgtttcgagttctaaacctgttaacagaggaacacaagcctctggagtctgcgttggcacgtacttctcaaactctccaaatccggccttaccttgtctgaaaaacaacaacttcgatttttcttgtatgccaggcaagccccagatcgacgctctgtttcaaacttacgccccttggatctatttccacaaagatgagaagtatctcccatcatctgtcaactggttcttcagcaacggtgccttgctttacaagaaaggtgatgaatcaaacccagttccagttga

SEQ ID NO: 106459 - DNA, 320 bp, Arabidopsis thaliana columbia
aatccgatctatatctatgtttcttttttcttcatatggtacgtcatccgggacggcaattggctcgattagattgacctgtacctatcaatcaatccctgatctgtttaagtttgatctcctgtgttatctcctaggcctagatattgttcgattctcgaaaaacaagaagaagcgatggtattgggattttagggattaccgcagcctgccgtatatatatatatagaagctgagcgatgctgtgttgtgaaaaacacaagagatcctgtttactttccgcacgaaagttacttagcacaaatacaagcgacagaaga

SEQ ID NO: 106460 - DNA, 407 bp, Arabidopsis thaliana columbia
gtcgagcgacaccaaacaaatgcaccaaattgatcaatttcttaggagttggtttgtgaaacacccggagtttatatcgaatcctttttacgttggtggagattcatattccgggaaaattgttccaggagctgtgcaacaaatttcacttggaaatgagaagggcctcacaccactcataaatattcagggttatgttcttggaaaccctgtgacagataaaaacattgaaactaactatagagttccatttgctcatgggatgggacttatttcagatgagctctttgagtcacttgaaagaagttgtggaggcaaattcttcaacgtagacccaagtaatgcaagatgctcaaataatcttcaagcttatgatcattgtatgtcagagatatactcagagcata

SEQ ID NO: 106461 - DNA, 254 bp, Arabidopsis thaliana columbia
  unsure (1)..(254): unsure at all n locations
ccggnacggaannggagaggcggcccagacgtacgcaaaaagggacgcatgaagccagactcggtttttctgcccaacaaccacatgaagtggctggtggtttagaggagactttgtgcaccatgcgatgcactgaaaacctcgatgacccgtcagatgctgacgtgtacaagccatcactcgaatacattagtacacttaacagctacaatcttcctatactgagactactaccacttagcgctcttcggggc

SEQ ID NO: 106462 - DNA, 402 bp, Arabidopsis thaliana columbia
cgacattccaaactaccaataccaacttgaccgcaactctaacatgcatgatttgggcgtaaacaaccagctggcacgctttggcggttcacactcaacaacatgaacagaaaaacttgtggaatatgtatatatcgttagaacgagaaaagattaaactatgctgattcgttagcacaaacttcaatgattttacaatatacgaatttgaatcaagaaggtgttacaattgcattacttaaacaaaccactatattaattgttttactcggatgaacacatcttaatacaatggggatttattattacttaacaagaacatttaaagcaggtagatcaatgagtttccatcaattttgtccaaagagaaaagggttgagtgaaatattgttttttttttta

SEQ ID NO: 106463 - DNA, 296 bp, Arabidopsis thaliana columbia
gatcaatccaaatttgatttaaccagtaacttgcgaatttgacaatcatgttgaggggtatagttttttctctaacacatgttaattcacgcactcgagctctcgatgctgtataaccaaaaatatgtatatattgtagaacggaaagatgaactatctattggtgcaaactaaggttacattcaattgatagaaggtccatgttctaacaaccattttatgttaggggtacattatcaggatatatctaaaggcttaagggtgacaagtcatattgaaaaaaaggtgggaaattt

SEQ ID NO: 106464 - DNA, 401 bp, Arabidopsis thaliana columbia
gaacaatgcaaatttcatttaaccagttactggcaaatttgacaatcatcttgagggtatagtcttttctgtaacacatgttaattgacgcactcaaactctcgatgctgaatatccaaaaatatgtatatattgttagaacgagacaagatctaactatcctgattcggtagcacacacttcattgatctgacactatacgaatgtgaattaaggaggtgttacaattgcattacttaaacaaaccactatattaattgttttagcccaattatcacattttcatacaatggggattcataatcaactaacaaggactttaaaagcaagttgatcaatcaagttccaataattttggtaaaaaagaaaaaggtagagtgaaatattcttgttttttttat

SEQ ID NO: 106465 - DNA, 415 bp, Arabidopsis thaliana columbia
gaataacaggggcgaccgacgcgtccggtggatttattctttaaaacgcaaaatttctttcacaggggaacgcaaacgctaacgcgtgtgtttacgtgacaggcggtgaagcccaaaaccagaacgataacgacatattacactggtgtgttcagggtagcacctactgagacatttgcaaattcggctccaaaactcctgaatgctcctacttgatccccggtgcaacggtgaaactatcatgcaaagacaggaagacaatggaagaggtttacacatacaaagctgtatcagacaaagaatgaaagtataagttcatgtggcacgacgatcacagataccatatttacgatgtttagcttgtgaaaagcttggataaaacttgctctaaaatctactttggacgtgagatgac

SEQ ID NO: 106466 - DNA, 281 bp, Arabidopsis thaliana columbia
actatacatataactgaaaatcagatttacactaatgacaatctatacggggatgatctcacttaaagtttctactctatgcacatatccatatatacacttggcttattttcagttcaaagattaaaaaaaaacatattatcgtttgtcccaaataccataggcaagattgattatttctactctaaatatcaatttatgcatttatttttcttaaaacacgagcagctcaaactctaaagaatgttattctatcttgctacaacacctcatacagcatg

SEQ ID NO: 106467 - DNA, 398 bp, Arabidopsis thaliana columbia
atttgggcaaccaacctaatcttacctcataaactgataatcttaatcgtatacagattgggtacaatagagctatacgatctaatgatctatatttttatcaccgatcgtctagatccggtatttgatatttatgccaatggagttaatttgtaaaagaaaaaaaaaacaaattctatatattataattcagcagctaaatttctcatacaagttgaagatttacttttcaaattatcaaggcaaaagttttgtacagttacgcctaaaatttgacaatattatttgatctccaagcttggaaaacccaaaagagaagtggtctctttctttgccaaccctaaaaaatcaaatccattgctcatgtcactccccttgctgctacctccgactacatc

SEQ ID NO: 106468 - DNA, 206 bp, Arabidopsis thaliana columbia
tccgaaaacattttaatatctaaaacactaataacaaactctagcgctcaatcaactctccactctactacactaaaaacccttccatctcctcacctgacttaattcaagaacataccccgcaaccctaaagatcacacaacaataccacattgacttcatggatcacatcacctaacaacttgccattatagatcatcaccaaa

SEQ ID NO: 106469 - DNA, 444 bp, Arabidopsis thaliana columbia
  unsure (1)..(444): unsure at all n locations
ggacggttnggaggggggcccacgcgtacgcggacgcgtgggggtttttctcttgatgaatctcgacgctttagtcatgatgaagattggggtaaaaaaaatcggtgaaagatagtggtacaactatcttttgcacatatttctactgatataaagtaaagatagaaggataatagcatagtgacaatgtagaaaatgcattatttgattgggattacatagaatccaatttgtttgaatataatttgttaagtttgatgaatttacaattcaaattcaatggatagttagtaaactagttaacgggaaaaacggccaaaatcaatgtgtactatttgatggcggtctttttcaactcaaactttgattaacgattgactaacaatgtcaaagtcaatgttgaattttgcgtaacatatataaatttagatttaaaattagaat

SEQ ID NO: 106470 - DNA, 227 bp, Arabidopsis thaliana columbia
  unsure (1)..(227): unsure at all n locations
gctcttaacctttactctataattttatttcttatcaatatacatggcaaatggggtcgttgatctgaaggtgcgtgtaaaccntactgacaaacgtgttcattaatcaaactacgaagatgatgtctgttttggtggcatattgctgttatcattctggtttttattataataatcgagaacccttcactaaccaaatttttgcacatatagcatgagctcccatt

SEQ ID NO: 106471 - DNA, 273 bp, Arabidopsis thaliana columbia
ctcactcaaacatttattaaccaacacctaatcaataacaatcaataacatatctgcgccggtatatatctggctggcacatcacaccaacaattgctgctataaaacttccagcaattcatacgactaaaaaacctttttccccatcaacccatttcttaaatatcgtaaagccatatacctggcacagctacctaacatcttatcaacgatggatcaccaaacacatgcttcaaggacggtgcgtaactccttaccttatccataaattca

SEQ ID NO: 106472 - DNA, 418 bp, Arabidopsis thaliana columbia
gccatggccatctggcttggcgccattcacttcaacgtcgctcttgttctctggtgtctcattttccttcctccttctctatctctcatgtatatacatctctctctctatctctctatctctctctgtttgctgttacaagtctcaaatttaaactctttgaaatcctctgtttttgtcagggtcttgggcttgctctctctgtttatctttatcccaatcgatcatcgtagcaaatatggtcgtaagctcgctaggtacatatgcaagcacgcgtgtaattatttccccgtctctctgtacgtcgaggattacgaagctttccagcctaatcgtgcctatgtctttggttatgaaccacattcggtgctaccgattggagttgttgctctttgtgatctcacaggggttatgccta

SEQ ID NO: 106473 - DNA, 309 bp, Arabidopsis thaliana columbia
gaaagaaaaaagacccagcggacaaaaagaaaatttttaatctcaaatttttctttttcaaccaaaaacatatcctgtcgttaatttttaccttccccggcacacacaaaaaataacttactaattacataaccataataaccttcacaacctaaattatttccaagccaccttaactatcaatatttaatctccacaatatttcatttcttttaaccacaaccaaccctatttccaatatgtttcatttttccttcatcaatatttaaatcaacaatacaatcttttactttctcatacttttcactt

SEQ ID NO: 106474 - DNA, 394 bp, Arabidopsis thaliana columbia
  unsure (1)..(394): unsure at all n locations
tgatcccctctagacccaacttagnggncttctcnntggagtctnnntcatcgaaccctcgcgatcgaaaaccctgttccctacgtgncgaatcncnnctctcactacttcactcactcccctcctccctccctcaaatcgaacctcaatcccctcttgtgcccgatgatcagcgccaaccgccataccgaggnnggctttgctgtttcaaccaacccagctgnngtctagatttgcgaataccaccctactannaaatnncttcagggaaagggaacgcgaaatacccaatttcaaccttccctttcccaacctaccgctaacccgaatgggattatcacannngtcttcgcccannttttcccgacccttctcatnncatgaattatcaatc

SEQ ID NO: 106475 - DNA, 420 bp, Arabidopsis thaliana columbia
aaaatcttacaaaaccaaaacaaaatttaaattaaaaggttactttagctaaaatgtttaagcaaatcttaaaataattccggctactagctggcgcttcttgattaaaaccctaatggtgtggcagatgatgggaaatgaattgacgggagagtgaattacgggttgttttaagtgaatttaccaccagatcaccactgtaggtttaacatagatgtttaattacaagtttacaactatacatacaaccgatgaaactttttagactgtgtgaattcacctgattaaacaaaaaatattgattagacaaaggatatactattgtagaaacagccaaaaagtccttttcaaccacacttaaaatttccttttttggctatcaagatatacacgatatggtgtttctaccacggaaaaatt

SEQ ID NO: 106476 - DNA, 416 bp, Arabidopsis thaliana columbia
agctgttacttgaccaccaagaaagctaaatgttcttgttcttagaaaccctaaaattcttgcttcttcaggagttgctagaggaacagggtggcaacatataggagcttatgcaaacataggatcgtattatctagtcgggatcccggtaggttcaatcttgtgttttgtagtgaaattgagagggaaaggactttggatcggtatattggtaggttccactctacaaacgattgttcttgctcttgtcactttcttcaccaattgggaacaagaggtatatatacctttgccttttttatattgtatttttcctcttctgttttgctagagttttgaatcttgttctgatttgggttttaggtagcgaaagctagagacagagtaatcgagatgataccacaagaaatcatatg

SEQ ID NO: 106477 - DNA, 388 bp, Arabidopsis thaliana columbia
accaaaataaaatatagatttggcgtttctaataaatgatataaaaaatcgaccggtgtcccttatttcacaacatcggtttcttgacctattattattgattacgtgatagagcgagaggcatattttggagatacacatatacacataaattggaagaataaaatcaaagagagtgagagatggctaaatcacatatgttgccgatattggcaatggggttgcagcaaatagggtacccaggcatgaacattatgttgaatatggctatgcacgccggtatgaagccacttatgctgatcgattatcgtacgatatttgccactatcgacacttttgacggcggatgaaatattgaacgggagacaagaccgataatcacaattag

SEQ ID NO: 106478 - DNA, 131 bp, Arabidopsis thaliana columbia
ttttataaaactctggtataaaagagattcgttttgttttatagaggaataccccattatatatgcgctaaatttgggaaattaaatatagaaatctaggggcatatatgagtaaaagagtgcacaaatct

SEQ ID NO: 106479 - DNA, 497 bp, Arabidopsis thaliana columbia
catgcattaaacttgctgatagcgggtccgttactttggttgataggatcgattcacaactcatgccaaatctacgagagagcggatagtcatgttcaaattctacagcagtgtgtttacattcctttcttggttggatcccttctattcttggtttccgcagttctcaatagcctcgacatatccgggtcatctcgtagtggattgaagcttcttggggaaagatggatttggcttgggatttccggggctatatgtttgtttgtgggaggattgctgaacgttgttaaggtttttaacttcgtccagatctctgggctccgcctcgagaaactacggggtggagctcaagaccgacttcttgaagggagagaaggatatctccctcttgttgctgaagaagaaagaataaggaaaatggaagctgatcacgaagcttctagtagagccaaaccccgtgcacacacaacctccaaaagccggagagggagctacag

SEQ ID NO: 106480 - DNA, 320 bp, Arabidopsis thaliana columbia
cggacgcgtgggcggacgcgtgggcggacgcgtggggttataaccaatgggttccaaatctcacctgaagaagcaaggagggtcaagttcaacacgctcgagaccactttgactcacagcagtggcccagctagctacggaaggccaagggtggctgcagcttaagagcttaaaaccgcggctcaacaatgaacctctagtactgtaaaaggaagttaaatagtacgaagtaataataataatgtacgaacatgtgacaagttttgttgaggtttacctgtaaaatgccactccttttctgaataaatcttttttcgatc

SEQ ID NO: 106481 - DNA, 305 bp, Arabidopsis thaliana columbia
  unsure (1)..(305): unsure at all n locations
tcgggaccagcgtcgaaaaaaaaaaaaaaaagattattcttttgccaccaccaccaccaacctaaagctattttaccggatggacgggtagtaaccggggtgtcaaagcgagctcggaggttcgggggtcatcgctaatgcctgggatgaatttcggactttaccaggggtaggtattagatacattggacatttaggcaccgtagataagctcatcatgcctatgcaggggtatngatgttgtcggttaatctgactacggaggtggataaaaatgtacgcttgcatagatgatgtagagcttc

SEQ ID NO: 106482 - DNA, 273 bp, Arabidopsis thaliana columbia
accaaaataaaatatagatttggggaaactaataaatgatatagagaatccacctctctcccttattgttttttgtgggtttcttgacctattattattgattagtaatagtgagagaggcatattttggagatacacataaacacataaattggaagaataaaataaaagagagtgagagatggctaaatcagatatgttgcctgtcttggcgatggtgttggtgcaaaatcgctacgcatgcttgaacatttcgtttaagatggctattga

SEQ ID NO: 106483 - DNA, 359 bp, Arabidopsis thaliana columbia
  unsure (1)..(359): unsure at all n locations
gcgnccgccaaaacggccncttattcaaacgtcagcagcactaacttttaaagtatgagagagctttaactcttccgctggctgttttcttctccaaattctcctgacgcgattctgttcatcttacgattttacacgtctctctagaagatttaaactttccactttacgtttctttcgatttttgaattctctcactaaagatttgtctcttccatagaaagttcttgaatttactctcttcgtgttcaaaggatttttcagaatttatagtaacccaccaatctactgattgtctccgttcattttaatctatcaagattcgatttttattctgttttttgaaattcttgaattct

SEQ ID NO: 106484 - DNA, 505 bp, Arabidopsis thaliana columbia
agaaaatattatatatacatttttaattttttttaatattatagtttttttggtgtttttgtaaatgtgtccagaggtacaggaaacataacttgatatgtggaaataaaatgacaaacttttttaggagataaaagcttttattgctcatttatttaaagacgatcgagtaggaggtcaagcaacaaagaccaaaccacaaattggacggatgtagcaataatgatattcccattggcttgagataaacgaaatgttgattgcttataacccaagtcacaggcgtgtaaaaaggcttagtttttttttcttctctttctctacttataatttattaatcaccattattcaaaccctttttatcatttcagaagctttcgacttctcctccacgtcaattcgtctagctcaatccgaatttccctttttaagattgtgaaaagcttcataaacagaataaccaagatcgaaagacccattataatactcactataccattacaat

SEQ ID NO: 106485 - DNA, 432 bp, Arabidopsis thaliana columbia
ccgggcgaccacgcgtccggtggaagacgccggaaacggcaacggcaagaagcaatgacaactgaggaaaataaaacaggcagaaataggaagaggaagagacagagaaaccctaaaccttctaaagaagaacctatcgagacgacaccgaagaatcaaaacgagaaaaagaatcaaagagataccaaaaaccaacaacatggaggttcttcagctccatcgaaacgacctaaaccttccaatttcctcgatgcgcttagagagagattatctggtgggcaatttaggatgctcaatgagaaactctacacttgctctggaaaagaagctttagactactttaaagaagatccacaaatgtttgatatgtatcatacagggtatcaacaacaaatgtcaaattggcctgagcttcctgttaactccattatt

SEQ ID NO: 106486 - DNA, 376 bp, Arabidopsis thaliana columbia
agaaaacatacacaaatagcaaaacatggctaacaagctcttcctcgtctgcgcaactctcgccctctgcttcctcctcaccaacgcttccatctaccgcaccgttgtcgaattcgaagaagatgacgccagcaaccccgtaggtccaagacagagatgccagaaggagtttcagcaatcacaacacctaagagcttgccagagatggatgagcaagcaaatgaggcaaggacgtggtggtggtccttccctcgacgatgagttcgatttcgagggcccccagcagggataccagctactccagcagtgctgcaacgagcttcgccaggaagagccagtttgcgtttgccccaccttgaaacaagctgccagggca

SEQ ID NO: 106487 - DNA, 486 bp, Arabidopsis thaliana columbia
  unsure (1)..(486): unsure at all n locations
gacaaaagtaatcctagaagtctctgccattagaaccaatctcaagagataaggaaacttcacaaccaaaaacaagagcaacagacacatagagatgagccggtgcggctctcttgggctctatgccccaaatgctttgccatctctctccttgaagccacgcagtgtcaaatctcctttctgtattacatctcacaccaaacccaacgacactcttcttcatgtaagacttctctaccttagctaagtgtacaaccaatcaacatgaatctgcagaaaactctctgcttcttcaccgtgacttattattgttcactgcagaatgttaacaagatgagagcaaaggcctgtgatatacttggagcaaagaagacaatcttggcagctcaaactcgggcagttcttgccacggtaagaacatacgagacctttatcactatcgaaactatgagacaacagtggtcagaatcgaaaatcngtagtttt

SEQ ID NO: 106488 - DNA, 519 bp, Arabidopsis thaliana columbia
atcagatataaagttgacatgtttgattgccaaaacaaaaacaaattggagaaaactctcgacttatgagtaataggtaaaatatatattatcatataaagcccaatggatccatttcttattgaggaagtaaaacatgatctctagaaaatatagttaagacttatgatagaaatattaaacaacttgatgaatacaacatagaatacacaaattttcggaatgaaataattttaaaaaagcaactaaacatattatacaaatgattttgcaaagatccattccataaagtaagcaatcaagagtagttggaaattcaatctaaaatgattttgcaaagatccattccataaagtaagcaatcaagagtagttggaaattcaatctagagttattggcatcccaccaaaacccaatcatatcgtttgtcttgaaatgtttagttggagaaccatactccatccatgaaattagaaatttccacttaaatcttcttttaatggaagagttcttataatt

SEQ ID NO: 106489 - DNA, 555 bp, Arabidopsis thaliana columbia
cggacgcgtggggccaacaaaagcatccacacacgttttccaggcactacagtacctgcttaaactctgcagtcatgcgtttggtgttctaggcgataaggtcacagagccggtggcttctgatttggcagcaatgataaatggatgttcggacattatcactgagcttcataaagttcaacactctccaaagcttgtagctcttcaggaaattttagaagaatgcggaataggttctgatgcttctagttcagatggcactcttagtgtaggccagcacagagttctgatatttgcacagcacacagctttgctggatatcattgaaaaggactcgtttcaagcccacatgaaaagtgtcacatatatgcgactagatggttcagctgtaccggagaaaaggtttgagattgtgaaagcctttaattcagatcctacaattgatgttctgctactgacaacacatgttggtgggctagggttgaacctgacctttgctgatacacttgtagttatggagcatgatggaacccaatgcgtgatcttaggcgatgg

SEQ ID NO: 106490 - DNA, 341 bp, Arabidopsis thaliana columbia
  unsure (1)..(341): unsure at all n locations
cgaaaaggctaanatcagagatgtaagaaatgcaacatttttaaccgttgttttctttagctgtttcccaattagcatgtgacgggtgatgttttgagatatacgtaactggcaaatcctaaacatcttatccaaaatgctaaagtctataactaccatcagaggaagttctctatccgagttgagtcaccacagctacctgttaaaggttcggtttagtgttacccaactaactatatataactacgctcatttcatgacatgcatgattgatggagtgtttggaatatcatgtcctacacaccttttacaacttaataaattatagttctatggacaag

SEQ ID NO: 106491 - DNA, 247 bp, Arabidopsis thaliana columbia
caagctttgaagatcgacttttaaacagcgcagaatcttgagaaccaagatgtcagccgaggaaacattgtctacgtccaaggcccgttcggtgtcattaggtccgactccgaggggccagagacctcatgaggaggatgaagaggatgaacgacgacatggacgacaccttaatggcttataggagaccatttgtagcgtctggagcaccgattacatcgatgacccgtctagtgctgacgtgtac

SEQ ID NO: 106492 - DNA, 269 bp, Arabidopsis thaliana columbia
gcggaccacatacacgcataaccctactgactttgctatttcaccgctttttttattctgctcaactaatgacactctggggctgcttaagctcactaacagattcaggaactatcctcggaaaacttatatcattgacaacgcagaacccacgctaatcgcaggacacagatgccatatggagcttcagaaatcacaacaccttagaacttgtcagagatggatgagcaagcagactgaggcatggccgtggtcagtggtccttccct

SEQ ID NO: 106493 - DNA, 524 bp, Arabidopsis thaliana columbia
ctttaacttcatcccaagctgcatattgtatatatcaaaaacattgttaatgaatcacatcagatattcaggggacaaagaaaaacatcaagattcaagggcataactaaacctggtaaatttctgaaatcaggttcaattccaccaccgttgatatccatatggttaggtgtgacatattttcctattgtcacaacaactcctgaaccatctcggagctcatacaccgattgaatcaaaccctgaaacccattaatcaaatgacatgaagatgatcaaaaacaattcaaaatcgatagattggttatgaaactagtaagcctttggaataacctttccataagttctttcgccaacaagaactgctttacagttatcatgaagtgcagaggccacctggagaaatatgacacataatatccgtttaacattcaaaaaaagaagagtttcccgtgggttaaatcttttgagattactcacattttcactagcacttgcttgtcttgtatttaccatacctgcaa

SEQ ID NO: 106494 - DNA, 192 bp, Arabidopsis thaliana columbia
ctgaactgccatgtgtaggagtttgctttgctcgacatcatatagaacacggagggacatccttgcgaacatcatttatttcagcaaagatgtactacgctgttcaaggaacagctataatgtgtaagactgacctctgaacatgctgacaccgtcatgaaattgcaggcactgcacggaccactgcaaggc

SEQ ID NO: 106495 - DNA, 531 bp, Arabidopsis thaliana columbia
ctcgtccttcatcgcctttgctagtgtctctgcactgctctttacctgctcacacttagatgctcagtttcttgggtataaaacaatgccatgaccagccacacaagttgatggtcatataaaccaagctgaactgcttagactgcaatcaaaccaaaacttgttaaaacccgattggttagaaaatactatttaccttatcgtcgagcatgaaatttatggcatcttcaagcttatgaagtgagaattcatccactgggattggtgaaggaccaacacctctagcatgcactcgttctccccaaaaaggttggtctccaaagaaaggcacgattgtagttgggcactgtgttcaaggaaaaagcaaaacactttcatattttaccaacttaagtcctacatcaagaaacagactttcgctttcacacatattaaacttaccgaggctttaagacccgcagccgttgttccagcaccaccatgatgaacctaaaagcaggggaccaacaatttcaggtttaaagatgagac

SEQ ID NO: 106496 - DNA, 532 bp, Arabidopsis thaliana columbia
gaaaagataaaataaaataaaaaacaaaacccccaaatttgtgtctcctccggaaaaaaaattcgaaattccggatccaccgccatcaatccctagctttctctctctttctctatcttcgccggcgaaaccagtagggttgctcaattcgttggtagagtactgtggcaatgaagaaaggagcgaagagaaagggtgtttcgaaagcaggtcgcaaagctgctgttgcggagactcagaacgatgaggtgatagaggagacgacgaagacgacgcaggaggagagtcaacagcatgaggaagaagtcgtcgacgaggtgaaggagaatggggaagaagaggatgcgaaacctgattccttagaggaggatgaggagaatcaggaagatgaggtcaaagctgaggaagtaaaggaagaagttgagaagaaacctgttgctcgtcgtggtggtaaacgaaagagggctacgaagaaggatactgagattaaagatgagaagaaacctgttccgaaagctaagaaaccgagagc

SEQ ID NO: 106497 - DNA, 230 bp, Arabidopsis thaliana columbia
gaacgaaaacagtagtgtagggaaacgcatactagtgcaagattgagatctgaggaaatacgttggatatagacgggagcatatactatatgttatggatcccatcacacgatcaataacgatgcccacaaacctatcattgaccaccctcagccatgtcatagtctatggggtgttcggcgctatcggatttgcttattggaaactgtgtaactatgaggtgctcacag

SEQ ID NO: 106498 - DNA, 493 bp, Arabidopsis thaliana columbia
cgatgacattttttatttttgaaataggcaacgggttcagttcaagtcggtcatcgatcactttacatattttgtgtttcaaaatgttttagaagttttttcaactcttttttttttttttttctcgtacctaactttggaaatgaaccaatatgatgaaatgtaccaaaattttaaaaacaattgataaaattattgaaatatttaatgatttttgcaacaaaaattgaaccaaatgataagtcataatattaacagttattaagagtcattttaaaatagagtgttgagtctttttgtcgataaaaagttagtttacgatgcttttgatcattgcaggtttatctgacttgttggagtaaaaagaggagttcaaagataaaatggagaaaatgagtcaagaaaatgattgactttttcactggtcggtaccgaagacatataaaatcgataagtttgcggtttctaaaagttcatttttctatgttttagc

SEQ ID NO: 106499 - DNA, 511 bp, Arabidopsis thaliana columbia
ctcagaagagaaacgtatccctctggaagagcctaaaaaacctgctgctgtatttcccaatatctcctttgcaccgcctgccacgggcttattaaatcaaaacagtggtgcatctgcagacatcaagttagaaaagactagcagcactgcgtttggagtatcagaggcttgggcaaagccaactgaatcaaagaaaacgttcagcaacagtgcttctggagctgagtcatctacctcagctgcaccaaccctcaatggtagtatattctcagctggagcaaacgctgtcactccacctccgagtaatggctctcttacttcaagcccttccttcccaccttctatgtcaaatataccttctgataattctgtgggtgatatgccgtccactgttcaatcttttgctgctactcacaattcctctagtatatttggaaagttgtctaccagtaacgacagcgactcacaatcaacttcagaatctctccttttctttcacataacctttcaa

SEQ ID NO: 106500 - DNA, 390 bp, Arabidopsis thaliana columbia
agccgtccgaaattatccgaccttaatataatccccgttctatgggaaatgatattcataggaactgacacggtggctgttttgatcgagtggattctggctaggatggtcctccatccaaatattcaatcgacggctcacaatgagcttgatcaaatcgggggacgatcaagggctgtcgaagagtctgacatgctgtctatagtatatctaacggctgtggcgacagaagtatcgaggcttgacccgacaggcccactactttcatgagcccgtctagcaatcacagacacgatcatcgacggtcgttgtgttccggcggcgaccaccgcaatgctgaacatgttggctattgcacacgatccacacctgtggcagaattcgctggag

SEQ ID NO: 106501 - DNA, 448 bp, Arabidopsis thaliana columbia
aagaaattttcagcaaatttgttattaaaaatatatatatatatatatagcaaaaccttaaataaatggtgtcgctgtgtgttttgcatttgatttgaagaaataatgtgatttcatatcaaacagtgtgatatcggttaaaataacatgacagttgttatttaaaaaacactaataaatttcacgttattgataaataaaaaaagtatgtaaaaatgaatcaacttttacaatatttctcatccatcatttttgcaactggtaaaatttggagatcttggccctgaatggatgctgattttcgattcagtttttggatttagattttagtttctcgattttagatggtagcgtgagatttttgttattatttatttcgtttcttcagttggcaacatcatttctttgattcttgggttttctttacttccttttaatataacaccta

SEQ ID NO: 106502 - DNA, 325 bp, Arabidopsis thaliana columbia
  unsure (1)..(325): unsure at all n locations
cggcgagaaagaaaacggtaagctaaacaatatattagttgcaaccttttttgtacttctcgaccgtaaccgctgcctgcctgangagtgatttggcgttcgtgctcatctccagaactacgggttatcctcgacaaccttagatgtttattcaagcctaccgaaactatcatagagtgatagccggtcaggatcgagtactgtgaccacaaccaccctcagctttcgatgtgttgccgttgtcgttgcttggaaacctcatcggaacagtggcggtgttgtctttgccgaccgttctttattttccttaaaattacactacgct

SEQ ID NO: 106503 - DNA, 122 bp, Arabidopsis thaliana columbia
caggttgtttcacattaatcttctgccagaaaccatcatgaagaaccttgaactgataccataaacatacaggggaatgatcccaaaatcttcttaacactataacatcatcatcatctatt

SEQ ID NO: 106504 - DNA, 487 bp, Arabidopsis thaliana columbia
  unsure (1)..(487): unsure at all n locations
angcgtcaggcaagaagtggttcataatcgattaccaagggaaatgggtaacagttttttccatgcaagatttaatagttgagccattcttagcctaggtaaagtccatcttgttgcgatagaaacgaacaaaaacaaataagttttagctaatgtaataaagataccaattgttgttccaaaaatttgatccctttgaaatagctccagaatagatatatacggaatagaaatattccaaccgcctaagtatagaactgttacaaataatgaggaaattaatagatttagataagatgcaacgtaaaataaaccaaattttatacctgaatattcagtttgataacctgctattaattcttcttccgcttctggtaaatcaaacggtaacctttcgattctgctgggaagaaattagaaaatgataacctatggttgcgcacaattcatcctaaacatattgatggctactttaatgcttactgtg

SEQ ID NO: 106505 - DNA, 466 bp, Arabidopsis thaliana columbia
gaataatcccatattatcattaaattaaggaaaatgatttttatttgttctttataaaagacaagctgtgattgagacacattggttcgttaacgacagcttgtctaaattttcactaaaacccaaaccaaactcttttttttctggtcttttgggttttgtttctaatcatatattcatttgcacttaatcatcgattaaagctactgatgatatgataatatatgcaggtaaattgatggaggtagcttgtagaatgatggggtcacggtttattccgtgtcagtgatttcacacgttatcaaaaaaaaattccaagcttccaaattcttaattctgtaaacatgtggaaaaaaaaaagaaagagttgaatatgtaaatgatgtgatttttgggttcgatgttatttgcatgttctatttgcaatgtttttattatcatagatatgtatatctatatacgcaga

SEQ ID NO: 106506 - DNA, 431 bp, Arabidopsis thaliana columbia
aagaaatactttctcaattttctctaatggctctgataaccttacttgaagtctcaatttctttactctttttctccttcctttacggatatttcttgattagcaagaaacctcaccgctcgtttctcaccaactggccatttctcggtatgcttccgggtttactcgtggagatccctcgtgtttacgactttgtaaccgagcttctcgaggcctcaaacttaacttatcctttcaaaggtccgtgttttgggggccttgacatgttgatcaccgttgatccggcttatatccatcacatcatgagctcaaacttcgcgaattacccgaaaggaaccgagttcaagaagatattcgatgttttgggagatgggattttcaacgcggattcggagttatggaaagatctgaggaatcagctcaaagcatga

SEQ ID NO: 106507 - DNA, 250 bp, Arabidopsis thaliana columbia
aaaacatctaaagtcaggtactacataataactagctagacctagacttcatttgattccagtataacatctagagtcaggtactacatgatgattgatgacagcagtaataaaaaatatcattgcgagatgtgtcaacatagaaagtgtgtacaagaaacagaagttgattgtatcacacatggttaatgatacagagattgtgccataagtttgcacttaaaacgccaacactggacaccaaaagcac

SEQ ID NO: 106508 - DNA, 432 bp, Arabidopsis thaliana columbia
gattatgatccacaaagagcctcgagagattgatgtcgccaaacaggtggaagctaatgttgttgttttttagacacttgtagaggacatgattgaagaggatgatgaaccaccatatgtggagccgccaccctatagccctaagcttccattttcaggccgtgagagacagattcaaagtcagaaagagtatgcacgttttgctaagatcatgtaacaactttacgccagactttctttcttacagtttgttctccatgttccaagctatagaagttaccttaaagatatcttatccaacaagaggggcattaaggtaggggttatgttagttttcaaaggagaagagtatgctcagctggaggaatatcagagacaataaaaagaagcttaactcactgatctagtagaggtgttagcaggttaagagat

SEQ ID NO: 106509 - DNA, 311 bp, Arabidopsis thaliana columbia
aaacatcataatatttttttttaatataattagtaattagattttcagtttctatagttaatctaaaatgatttactttagagtttacacaaatcatatattttctgaaatatgctttccgtgtttataataaattcttaattcgaattagtacaaatctatttaaaaccatgataaaataacattaaaagacaaaatcaaaatataacaaaaaaatggtttccttgtagattttattacacatattattattaaaaaatattttatttacattataacatttattttttatttataatatttttttttat

SEQ ID NO: 106510 - DNA, 371 bp, Arabidopsis thaliana columbia
ttcatactatgttcttaacataaacaaagagaacagttcacttcataatcataaagaccaagacgatacatggacacacgggaaacacttgcagctactaaaccggataatcgatatcaaatcaatacaagtcagaatcaaaaccggttagtgaaggaatcaagcatacggagggatgaaccaaatcgaagtctgttatcaaaatatataccgatcaattttaccatgaattctcgggaaggtaatcacgataacatataaggaaatcgaattaaagagtaagaagccgatatgaaatcggaaaaaaaaaaaaaaagggcgggtcgttgtgatcttatactagtttctatatctaggtctgtttttttttt

SEQ ID NO: 106511 - DNA, 275 bp, Arabidopsis thaliana columbia
taacggtaagcttgaggataaccaaccagttactgttgaggctgtaaactctcaggacgtttctgttgaagaaagtaaggaggtgaacattagcggtttacagaatgaagctgaggatgatagtaaggaaacgaatgatgtcgttgctcagaaagaagttgaaatcggttgcaaagaggtcagtgattgtgactctcagaaggatagatgaactaaatgctggtggcgagagttaggaagtgaatggcagtgttccttaagatgtgattggtgac

SEQ ID NO: 106512 - DNA, 400 bp, Arabidopsis thaliana columbia
cttctgatgagattcctttcaagtcaaaggaaattatctcgcgtgacgatacgtttgtgaagaaagctaaatcttcgttttatagtgatgggttgttagctcctagtaagccccaggttctggattcaacacttcatcaggctaagaacgttgcaggcaatgatggggagaagttgtgtctcataaaacttgctagcttgattgaggtatctgccaagatagctactcatgagctaaatttgcagcacaggctgatggatcagctcgaatggttttcggattctctaggcaagttatcgagtcttgtcaggctagatctgtttgagaatttgatcatggtactaccggtaaccataggagggcttatttctttagcgaggcttgatttgcttttcaatag

SEQ ID NO: 106513 - DNA, 294 bp, Arabidopsis thaliana columbia
cacccataaaggattcaaagacatcacggaagtcacagtcccaatcaaagtcaagatcattcaagctataaccattcgaagaggagcttgcagccgaggcaagcgggtcagtgtgggtagagaagaagaggtccaagaaagcctcgtaaggataattcatggacttgcaggtaaaaaagaagaaacgggcaatgcaaaattatatagatagcgtagtatgacccaagagagtacgaggttcataattataagtgaatctttgaagacaaatgaagaaaactgaaagaacaaaaa

SEQ ID NO: 106514 - DNA, 303 bp, Arabidopsis thaliana columbia
gcgtccgatggacgaatgatatttagtgctcagcgagcgaaactgacggatcttgtgcatattagccgaccaattattgttcataatcaaactaactagtgcttaatcataccattgttatatctttggtttaaaggggttcaagttctggttatataatgtggccttgcgttctggcgagtgtgcaagtgatagaactggccttgccttttggtgaagcccaaattctattgtggcctccatgtatatatccattaataaagccttaaatatataagccttttatcttgcattcatttaaaa

SEQ ID NO: 106515 - DNA, 238 bp, Arabidopsis thaliana columbia
aatcatttggacagagcgcataacaagagtgagactagagacgcacaaactcgacacgggggaggtctgacccccaatatgcggagaaggtcgcagccatgaaccaacgcaccaaagagaacggagacaccggcgacggagaccggaagaaagaagaaaggtgagaaccgaaagcacaaccaccgggcaagatcggaggaataagggcggctaggcccaaacactgcggggttaaaga

SEQ ID NO: 106516 - DNA, 308 bp, Arabidopsis thaliana columbia
gagccattcacaaatcatcgatatccataatagattggctcttgtaaaagatctctcaaccgacttcaactttctgattgcaatatttcatgattttgaatatgaaacccgactttagctagctaccacgattatgcctcattttttgctaagcgtagtacatttatatccacgttttcttaaatcttggcatttttgatttccaaatataccaaattattaatcggtttgaagatgtattgatatttatagatgacaaatttatttgtaattataatgaatgcttctacagatttctttttatcata

SEQ ID NO: 106517 - DNA, 295 bp, Arabidopsis thaliana columbia
aaggtcaaggtcagggtcagagtcaagggttccgtgacatgcaccagaaagtatagcacctacggtgcggagacaccattgcaacaccatttggtgtagctcaatggttctacaacattggaaatgagcctttcatacttgttagtagccgaggttctagtcagtaaccatgaaccagcttgtccgtaaccttagaccatttttgattaccggtttcatccttcatggtttggaatggcttctaggtctttaagcaacatatgctatactacacttttaaatggtttcgcacctg

SEQ ID NO: 106518 - DNA, 293 bp, Arabidopsis thaliana columbia
aaagaaaatggtcctggtcagcaatcttgtggttgcaaccttcaggggtctcctcgtacttaacaggatgccttgcgaggcaagcacttggggtgcctcctcagctacagatccagggtcacctcgacagcctagaggttctacaagtcacccatactttcaagagtgaagccggtcagatcgagtactgagaccacatgcaccctcagattcgatgagctggcgttccctttgctcggattggaattgaacaaggaggggtttacttggccacctttttaactttcccaaaa

SEQ ID NO: 106519 - DNA, 176 bp, Arabidopsis thaliana columbia
atggcatatgttaacatacttgtagcgcctggcatctggtaactgataaagcttctataggaaagttcgttctgactccaacttcgattatttaactctgatttgtcttccatttctttggctttactcttccagaggacgagattctgttcaagccttcggttgttcgctttaag

SEQ ID NO: 106520 - DNA, 114 bp, Arabidopsis thaliana columbia
atcttgtcatacgtttctctataagatattttaattatacagccataaattcatcggaagaggtggtagattatgcaagaatcagtcgctgagtctgaatctgaaagggaagag

SEQ ID NO: 106521 - DNA, 442 bp, Arabidopsis thaliana columbia
ccgggagactttgctaacatcccagactgtgtatttccaagtggctttgctatataccgcctcttgtggagagagacgtataagggtacacacatctgttgcaccagtggttacagatcttggggagatgtatagacaagcagacactggttccattgtgtctttatatgctagattagcaattgagaaatctttgtccgcaaaattggatgatgcacggaatgcaatacagcaaaagattgttaaagccctcaaagaatatcgtaatcttcacgcggtgcagcatcgcttggggtccagattagtatacccagagtctctgaagttcttgccattgtacggattggcaattactaagtccactcctcttctaagtggacctgctgatacttctcttgatgagcgctgtgctgcatgcttcaccatgatggctctgcctgtc

SEQ ID NO: 106522 - DNA, 400 bp, Arabidopsis thaliana columbia
gcatgtcctttgatatggttacagaattgtgttgcattgcatcattagatatgggatcagtttatcgatatatcatatttcagacgtttttagttcgacataattttaaagaaaacaacattaatgatatgttcattcgatgtttacaacctacaagatggatccaaattcatcaaagtggagaaaaatcaattgtattgggaacgaagcattgtttttggatcatggaacaatagttgaagccaaagatggagaattagggaaaattgcatatatttttagtatgatgagtatgggagatacgacaacattagtttacgaagtactagtcttgcgtctacgatattcaaagcggattgattgtccaaagtttcaacaccttgctgattcatcttcacac

SEQ ID NO: 106523 - DNA, 116 bp, Arabidopsis thaliana columbia
tcgcctagagaaagagcttttgatttcgattagcagtttatttgtttaatcagtaaagaaagcgttcatttttgcggatagttacttaatcagtattctagtcttttagtacacat

SEQ ID NO: 106524 - DNA, 356 bp, Arabidopsis thaliana columbia
cggactcaaactgattacgttttctagtagaagatctttcaaatcttaatctccttcgaatgtttgttcagataggtagagagatcgagtttcattaggaagatgcccgacatttccattgacgcattgggccaaactatgggggactatagtaatcctgagaaactaggatttgatttaggagcattagttggagactaggcttttgaagaagattcaggcagagaggagatttcattggaagggcttcaacaaagaactggagaatgtgaaagcgatgagggtggggccaaaataccgtctaggggggacaaaccatgagaatatgcaaaaaggggtgaaaacaatctacgcaa

SEQ ID NO: 106525 - DNA, 294 bp, Arabidopsis thaliana columbia
tatgaagaggtggaagaaatcatatatggcttggaatctggcattttattcggatatctttcagtgcccataaacatcaaagagcatattgttttcgcattatgtaccgagcctctgatgtttaccgattatctcctatatatccattaacatgtgctgttaattctagaaaacataaaaggaagaacctatgtcctggtgtctgcagaaacatttgagatagagaaaaatgtatttgtactgattttatcgtttgttgcgttgctgtcaataattttttatcttgctttgatc

SEQ ID NO: 106526 - DNA, 383 bp, Arabidopsis thaliana columbia
gtaaattaggaacaatctcttttacgttatgtctccaaatctaaactgatctccgaaacacttggtaaatggtttagctggaaatattctccttttcaaatttatttttagagggcaaaatatatataattcaattatcattagttttcaagtatcaccgatttctcttagttgagttattgctcaaatctgtttgtacacctttagtactatccgagttgataattcataatacactattaacggcataaattctcctatattcgtttgttacgaactaattattgctactaacacgtcattaactaatacatatgtattccgatgtaattattattttcaatccataatataatgttaccgcggattatcttttatggata

SEQ ID NO: 106527 - DNA, 329 bp, Arabidopsis thaliana columbia
aacgaacgtaatgtatatgagagaaactatactcttttttaaaataaataaaaatagaaaaatacatcgaagatgattgaatgggtgtctagactacaattgaaaaatatgactatctataataacttgaagcaacaaaatctaacagatttataattcgccctacagatcctatagaatcagggatttgaccactcagaccacatcccacacggatcctggagagtgaaagatagttcgtttaagatatgcaatagaaacaggatgttacaaacgggtcatgcatgataatgtttgcttacaaattctacaacttcttaaggacacca

SEQ ID NO: 106528 - DNA, 448 bp, Arabidopsis thaliana columbia
cggacgcgtgggtttcattgtttttctatgtgttttctttcagctttaatttatgaggttgtgtttaacaaataatttatgaattttccaagtttaatttagtaccatattttattctaaaaaaattctagtgttttttaattttgatagaagaataatttacatgtaactgtaatttacatcttaaaaataacactaaaataaatatatgtcattttcagtcattttatacactatgcattgagatgcagatgcacattgttaaaaaaaaaaatcaaacgaacacatctgcattcacatgattcatctagatgcactatcaacttcataaacaaacatcatctaaatggtgtatttgaattgatcttctggatggatcacccaaatgcattacctaactgatcacacgaacaacaccatatttgaaaggaaatttttttggaaatcg

SEQ ID NO: 106529 - DNA, 408 bp, Arabidopsis thaliana columbia
caaaacccaaatctctgagaaagaatcaaagttcaatattcgatcaatcaagctggagtggaagaaagggaaagtgaacccattcgtgaggggaataagatcgaggttaattaggcccaaatcgatgcctttaaatgtagtcaatgatcgtgatggctcttctcgcattcttttgaccgaccctgccggatcaactgctgaggtgcttttgtatggagggcaagtggtttcttggaaaaacgaaaggagagagaagttgctttatatgagcaccaaggcgcaattgaagccaccaaaggcgatcaggggagggttacctatcagctttccacagtttggaaattttggtgcacttgagcgacatggatttgcccgtaacagattctggtcacttgataatgatccttc

SEQ ID NO: 106530 - DNA, 419 bp, Arabidopsis thaliana columbia
gctcttgtagccctgagagtacttaacaacatttttgagacatttggtcctcaacaccgccctgtgatagaatttgctgttgataatgtccagaagctgaagatacgagaagctaagcagcagcagtttcagcaacgcgagaaacacaatgaatctgatcagcagcaggcgaacggcgaagcacaggcacctgacaataaatacaaacgaaaaacgagggaaggggataacactggtccaaggaaagagaatgcagccaggtttaagaagggaccacgtgaagagagtaaagaagaagcaaaatccaatatagcagtaaaagataatgcaacagagaaagaagagacctatacgcacacaaggaaaaaccgtcttcaaacaagaaagggccaaattgatgagacagaaaagagacaacc

SEQ ID NO: 106531 - DNA, 438 bp, Arabidopsis thaliana columbia
ctttcttgtgttgattttgttaccttgatctttaagctaccgtaaaccttactcttcccggtcaatccgcagtcatggaagccgatggtcagaaatactctgtgcttgcgaaaacacaagtccgtgagaagatgatgaaagaaattgaacagatctcggaagtcttcttggtgtcaaaatcggatgcaaccgtcatcctaattcgtctcggatggaactcgtttaaggcttcagatcttcttggtgacaacaaggagaagtttctggcgaagttagggttggctcgagttctcaattccaactcttcttcagctgatcgtgagacgggtgatggagattacttagtctccacgcccttttgctcacacaagttttcaacaacttgctggagtgaatatttcagcgatgctctgtagaagaacaaggagcagagaggac

SEQ ID NO: 106532 - DNA, 457 bp, Arabidopsis thaliana columbia
atggacattatgaacaagacaaagacctactacctaccttgaccagcagagttctgtgagctattcattataatagtatcatatccaacaactctgtttataagaagttgctgccacctgaaaaagtaatccaattttagaagcttatcataaggatacagctctagcaattaaaatcactgtttccaaattgagggccaataacgtgaatattacctgttgccaaagcagggatgccgtgccgatatgctgacatttgcagtgcgaatgttatgccgtgattttgcttcatcaggcagcaagaagtaaccctatatggaaaaagaacaacacaattgtgagaccgaaccagaagttcaaccgaagaattcctcatttcacatctttctttgataagatgctccagcattttccactagtgagctttacattcttgagagagaataacgtttacctt

SEQ ID NO: 106533 - DNA, 421 bp, Arabidopsis thaliana columbia
cgaataatgtgcttcttttatatgggcttttattattaaaggcccaataagtagttggtgaggatcctgaagtgaataagagaagcccaaggcttttaagtgggtcgctttattctcccaatgcttcggccttgcaactataggccagtttctgcaaatgtcttttacaatatatttcttttttgtttttttgttctcttttgggcatgtgttaacatatgtgttgcaatctacagtcttgagaattcacgcagtagatgtacaagtacgaaactcattcatgatgatgaacatgatattgataggtcttatccattaaactctatcagcttttgtgttctatttgatacttgtagatagactgtagaatttatgtatgtatttacgagtttacaagttgaataggtattcttgtaaacag

SEQ ID NO: 106534 - DNA, 446 bp, Arabidopsis thaliana columbia
ctttgatcaggatcagtgctgcccgtcatgtacgatgccagcggaagcacacattcattgttatactcataggcaaggtagtctgacaatatctgttaagaaactgcctgaattgctacctgggcaacgtgaagggaagatttggatgtggcatcggtgcctgaaatgtcctcggatcaatggctttcctccagccacacgcagaattgtaatgtcagatgctgcgtggggcctgtcttttggcaaatttttggagctgagcttttctaaccatgcagcggctagtcgtgtggccaactgtggtcattcccttcacagagactgtctccggttctacggttttgggagaatggttgcttgcttccgctatgcttcaatcaatatttacgcagtgactctgccaccagcaaagctttattttaactatgagaaccaggaatggcttc

SEQ ID NO: 106535 - DNA, 464 bp, Arabidopsis thaliana columbia
gaagaaacctcatctgttgagtaagctctatatttagtgagaccagcagccacaattccctgttgtcgttcacattcagagaaatgaaaacgaatgagaccattgtgttcttaattcttatctaaagctcaaagagacaaaatgtaatgtcagttttatgtttacctgcttatcttcacggagaatgagaggtctaccaggtgaaagcaaatctctaacagtttcattataaacctcaagataagaaagatgaacaacatggttcccatctaagcttctctgtctaactttagcaaacaaatctttgattgctagaaccattacacctggattctccattgtccctaacatcgtataagtcttgcctgctcccgtagcaccgtagcagaaaactgaaccatttctttcttcaagaactgcttcaacaagatcttctgttctgaattaatcaaaatggaaagaca

SEQ ID NO: 106536 - DNA, 262 bp, Arabidopsis thaliana columbia
agcggacagttactagtagtgccacaatttttttctggcaacgaatacacactgtgaggggggtaattgctcattaaatcgagtataatttgtttgttggttactactactctgataaccgtatctatattaaagctaattcgttcaatcaaaccccgacttatggaatggactcattaattttataaaaggtcgacacggtctctatccgttgctcttaagaatcattgatacctcgttggatcgtatggtctttgtgctg

SEQ ID NO: 106537 - DNA, 475 bp, Arabidopsis thaliana columbia
accacgcgtccggccatgtgagactaaaagtaaatattttagttactgagctaatctcaggaacgattatggaacggtttctgagatgagtttggccgaccgttgtgctgttcacgagatctatcgaacttgagcaaaagggaataccgtcgctagacatttgaactgggcaatcaataacatcagaaccatctttgattgccttctcatatgccaattttgtacatccaggatactccccacttgcaccattttttgatataacaagaaaatccactgaggcacgcaccattggtagatggtaatgtttttgttctattagtaagaacagaaaagaaatgtaaagcaaattacactcattaccttgttttgtagcgtttctgccaatgtgggagaagcagtctgaagaaatacaaaaataaaatgtttgattttgagtattacaagtaatgttttaagaaataatattttgtct

SEQ ID NO: 106538 - DNA, 465 bp, Arabidopsis thaliana columbia
ctgaaattacgagtgaagggatatagatggttcacgccattcagcgtctttagcgaaggtgcaatgcgtgttcctgttccaaaagaagatgggactgatcaattgcagctaagagtacaagtcagaagcgggacaaagaactcacgttatgaagttatcttcaggccgaactctatctctggcccttacaggatcgaaaaccgttccatgtttcttcctattcgctatcgccaagtggaaggtgtcagcgagtcttggcaatttcttcctcctaatgcggctgcttcgttttattgggaaaatcttggtagacgacatctatttgaacttcttgttgatggaaacgatccttctaattcagaaaagttcgatattgataagataggtgattatccaccacgaagtgaaagtggacctaccagacccatacgagttactattttaaaggaagacaaaaagaatatt

SEQ ID NO: 106539 - DNA, 407 bp, Arabidopsis thaliana columbia
gacccacgcgtccggtggatttctccttttgtgttttctatgtttacatggtttttttccgtagtcatcatcatatatgttttacattcgattgtcttttccaataggtggtcaagctgtatgaaagatgtgtggttacctgtgcaaattacccagaatactggattcgttatgtgacaaacatggaagcaagtggaagtgcggaccttgcagaaaatgcccttgctcgagcaactcaagtctttgtcaaggtatgaattgtgtttctccaacctttctgggtagttaaatttcattattttcgagtggctttgcagaataattctaaatagtcagctttgagtctcatggttatttatctgctttcttttctttcatagaaacaaccagagattcacctatttgct

SEQ ID NO: 106540 - DNA, 444 bp, Arabidopsis thaliana columbia
atgttctcttacatccgtctactttttgcaataggcattccatagttaaatgggttggcgaggaaagctattgcaatgtttctggtcatgaattttcttgatgtctccaagatatttttaacgtatgtagcaataaactgcaaaaaatcaatacacttgaaatcttttacggctacaatcaataagaagtcgaggtagtaacatacttgggtctcaagactctcaacaataattatctttgtaaatgcttcatttttttctgctttttgtaatcctgtagagtgtagactgtagtcttgagcaagtaccaaataggaaattactccacccatcacgaggtgtaagttcttgatcggttgtacttgtgatttccaactaaagctaagatacaatgtgatttcaaatcacaaatatcactctaatatatattaattatattattct

SEQ ID NO: 106541 - DNA, 470 bp, Arabidopsis thaliana columbia
ttacaacgtacgtacaatagctatgaatccataggacggtgatagctaaacatgtacatcctaaacatgtatgggttgatgaagaggcattagttccaagcaggcagatcccacatcacagcatttagttttactatgaaactgggacttgctttgcttctacaaagctctcaactagatgatcctgatcccttcagaggtgaaggaactgctgggtaaatctttcttagcttcttctgctctccaaactggtgtatggcgtcttgaatccctgcaaatgcgaccacaaactcggctgtatccgtttgattcagcagcttcttcatcaccagctccaacactttatacctgccaagcataacaactttctctcataatgctgatcaaagctttcacttcactcaacaaaactaagacatcattaaccacacacactatctggtgtcagctatttgtttctgttcattctc

SEQ ID NO: 106542 - DNA, 466 bp, Arabidopsis thaliana columbia
ggaccattggaattttgcacccaaaaatatttaccgttggaacttgaacctgtgatatccggcgtggagagaaaacgaagagtgtcttctggtccacaccgtcctttataactttcttttcaaaatagaaaatacaggtttcatataagcccattaacttatattcaaagcccaagagagcccacgttatcaacacagcctgtcgtttttagttggtaagacgacactcattttagactgtttgggcttcaaagtaccccgcctttttcattgtttcaaacggtgtctaatgttggtgaaaaggaagaagacgaaagataatgttgcgtctgaaccactcgatgcaaagctattatctgaacgtctaatgagcctaaatccaaaggatcacaataactagctcctttcccgataacatagcttatcataactacaatttgtggagtcctcaccacttttttctaat

SEQ ID NO: 106543 - DNA, 100 bp, Arabidopsis thaliana columbia
gaaaaggttaagctcagcaatctcctcgttgcattcttcggggctctcctcgtccttaacggctgccttgcgaggcagccacttggggttcctcctcagc

SEQ ID NO: 106544 - DNA, 494 bp, Arabidopsis thaliana columbia
aaaccgggccggccacgcgtccggtatttcggtcttattgactttctccattatttctacatacgcaagaagcttgaacaggccgacgatatctatgcagtatgatccgacatccatctcagccgttgatccgaagcaatactcacgacgattcaaggatttcatctccagggtctccgttgaagacgcttgagagaacaatcatctaacttgcacgccaaggcccaacaaagttgaggtttttctttttgctagaattttttccttctatatagaaatatctgtaaatttattatgttatttaaccagttcaccaaagtagagaaaaattgattcttttgtaactaaagttcaatactctgcacctttctgttgttgatgttgttgttattctctgtactttgtttcttcaaacgtgaaaaaaagtatttgttcaggaaccggtgacctggatttatttatttaatacctttcatccaatcttcatatattac

SEQ ID NO: 106545 - DNA, 451 bp, Arabidopsis thaliana columbia
  unsure (1)..(451): unsure at all n locations
attataccacacaatttatctactttattgctcatgcgcctgaaattcattagtttttgttaaaacaagtatatatctcacttctttgtacttagttgccctagaagttagaagattcttatttttatagagaaaaccaattacatgtgcgtacatatatatatatatgtatgtgtgcaacatatacttaatgtatacgtatttaaatatatgatgttaggagtacttaattactattcagtatacatacacgttgcggaaaattacaaatcggtgctaaaactgtttttacattatatgaaaattgcttcaaaccatttttcattacaaatcaattatcatgtaagcataaaatctatacttatcgacattgagagggatntgaatattataccaaaaaaaatggcgtagaagtggggaccaaagcaccgcctaaaacatgagaatgatg

SEQ ID NO: 106546 - DNA, 372 bp, Arabidopsis thaliana columbia
gtcgcggtgattccttctttggttgtccaaactcagacagctcaccgtttttagagaacttgccggagttaccgtttggcgggatattctgcgatggtgaaatcggacgcagcttaatcttggagaagggagaggaaaagaaagaagtgagcatccaaagatttcttcacgtttatagttcggtatatcttattgtctcgtatacatcttaatattaaggggtctggttggttttatgcttattaagagaatgataagttaactacaactaggacttatgaggcaataactcttgctttgctttccatctgttattaatcttatctcttgcttatttttcttggcttctttcactttgatgatttgggtatg

SEQ ID NO: 106547 - DNA, 434 bp, Arabidopsis thaliana columbia
ggcccattgggccttttccatatatagttctattttcgtatttatttatgattacgtgcaatgaaacatcacgtttatgtgattttgtcctttccttaattagtagtactatatttcctataatatatatttatggtgtttaggagatttgttagttagtagattttaaatacaaaaccaaaattatgtgtgatttgtgattttcccattgaacttgaggtttttgttaaaattatgcattattctttctttcttttttgaacaaccaattatgcattattcatctaataaatttgaagtatcagttgaaattcataattgtttggtcataagtcataacatacttttataaacaaaaacttcattaatttcctaaaactattataaggatttggaatataaattcgaattggcaaaacatagtatatattttt

SEQ ID NO: 106548 - DNA, 345 bp, Arabidopsis thaliana columbia
gaagaggatggctgatgacgagagagttcgttacagagatcaacatataaggtggatagaggggacaaatgctactacttaaaggacagaggattggatacgcgaaaaaaaaaacctgggtcgcatcggccaattcatcggtccgggactgtatgtatcctgcctcacgggcaaaaagcctaatatgtacagggctctggtggctaagggtggtgatcctcgacgtcaagaaagtgaggtgactggtgacgtgcaacatttactgggaaacaattgagtctgagctgtatctacatgtgcgacagatgggttaacgagaggattggacgtggttgatatgggcaa

SEQ ID NO: 106549 - DNA, 446 bp, Arabidopsis thaliana columbia
atcaacatagtcttcttatggtgaaaactgaacatatatattgttaatcgtatatttaagatagaaggatatgtagatgtcgcgctaattatgtgtttgtttgtcttgtttaaataaaaaatgagagtgatagctagtgataataactttaagatataccaagaatattgagtcccatactgttcatttcatttattgcaacacaatagatttttatggtccaataattatgatactgatgcagcttacaaatattcaatgcgttctgtatatatatatatctaatttgagaaaaattaattattctgtatcatagtatttgttgcgatagtgaagtactcttcatatttatatattcttttaaaccccaatttttctgattatatgtttgcactgcatttaaaaaccagtatagccatttacgataatgaatatttaaacactct

SEQ ID NO: 106550 - DNA, 452 bp, Arabidopsis thaliana columbia
  unsure (1)..(452): unsure at all n locations
aaaaaaacataaaaaaacaaaccagtgtaatgtggacactaaagatgaaagacaaaaaaagtaagaaacttcaacatttctatcatcaaacttgacattaagctttaaaatccccagaaacccaaaatgtgataacatttctatcctagatttctagttttagagaaagatcaagaacacaaaacaaaagaataactctcttttattatttaggaaactctgtcaaaacctaaatctcttgatctctcttaaagtcatatataaattaaacttatgtatattgaagcttaatatataaattattttgttttatgatttaagaaataagaaagaagctaacaatatatgaacaattgaattaataagaaaactaagagaaatttggttttgggttattacaaaaaaaacaattacagtattagccaagaaaagagagagnttgctcttatagg

SEQ ID NO: 106551 - DNA, 367 bp, Arabidopsis thaliana columbia
aacaaaaagaaaatggctaagctcagcaatctcctcgttgcaaccttaggggttcttctagagcttaacggatgccttgcgaggcaggcactcggggttccttctgagctacagaacgagtgtcacctcgacaacctagatgttctacaagccaccgaaactatcaagagtgaagcccgtcagatcgagtactgggaccacaaccaccctaagcttcgatgtgttggtgatcacgccgctcgttatgtaatcgaacaaggcggactgtacttgcccaccttgttcacttgcccgaaaatttcctacgtcgttcaagggacgggtatcagcgtgagagtggtgcctggatgtgccgagaccttcatgg

SEQ ID NO: 106552 - DNA, 443 bp, Arabidopsis thaliana columbia
  unsure (1)..(443): unsure at all n locations
aaatgataactaacattgaagtctagagaattcttttactttttctacgatggagatttctgggatgaagtttctgtttttaggaatctgggtttattattactctgttcttgactctgtttctgccatggatagtcttttatctcccaagggtgttaactatgaagtggctgcgttaatgtcagtgaagaacaagatgaaagatgagaaagaggttttgtctggttgggatattaactctgttgatccttgtacttggaacatggttggttgttcttctgaaggttttgtggtttctctagagatggctagtaaaggattatcagggatactatctactagtattggggaattaactcatcttcatactttgttacttcagaataatcagttaactggtccgattccttctgagttaggccaactctctgagctngaaacgc

SEQ ID NO: 106553 - DNA, 454 bp, Arabidopsis thaliana columbia
catttcctgaaatacatttgcatgcatggctagaaaagttagtagcagtataaatatcatgaaaatatatctgagtgtcgaaagtcacacctcgagcatggataaagtaagaggagcagcaattctagcgtccaatacatacctaaaaaacaggttttgcaaaacggttgtgccataagcttgtcaacagttataaaggaagaatgattaaaaatcttaattaacatactacataagataagataacatattataaaacaaagagcttacatgtcgataacaagcttaattaggacgctcacagccacatccatcgacggctttccagtcttgctcgttaattggggtgatacagtcatttgatttgaaggggtggatgatgcctcagaacaaacagcagcgatcacttcacctacctcggcagggtttaggcgcagtggttgttgttcactgc

SEQ ID NO: 106554 - DNA, 446 bp, Arabidopsis thaliana columbia
agacttccatgtcctgccaaattaacagtgtgggaaaagacaaaggaaggcacatttctcgggagacaacatggtgtagtatcctaaaggaagagtgctcatgtatattcagcagatattcagagacctgtatatcttacgttagctgtccatggcggttgggctttggaaaaggatcctattcctgttttagatatatcttcaaacgacagcgtgtcatcattttggttcgtccatcaacagagcaaaaggagattgcgtgtaagcatagaacgtgatgtgggagaaacaggggctgcaccaaagactataaggttctttgtcccatactggattacaaacgattcctatcttgcactaagctatagagtggtggagattgaaccttcagaaaatgtggaagctggctacccctgtctgactagggcttgcacaatctttaagaa

SEQ ID NO: 106555 - DNA, 259 bp, Arabidopsis thaliana columbia
cttttgctctcgcagtgttagtaacacatgtttgtttttttagctcgtgtttggcctcctctgcggttacaaactctgctcctaatgggtttcatcattggcccccgcttaaatggggtccaaaatttccatattctccacctaaaccacctacaatcgagaaatattctccacctgtgcagtttccaccaccaatctagaagtatccaccgccaccatacgtgcattcaccgttgcagtatccaccaccgagcaagac

SEQ ID NO: 106556 - DNA, 406 bp, Arabidopsis thaliana columbia
ctgaaatcttagttcacatagtaataaccttgatactaagcattcaaacttcaaacggtacgactttcactttgaacaatttagataaataattgaaatcaaaaccatataaaaatgcttgataaataaacaattaatcaaaattattagaaaaatacacttgacgaactaaaaatgatagaaacattgcaataagttaaaaaaaaaaaaaacacggcaaaagttatatactactttaataggtggatagtttttgagttagaaccgttgggataaagacacgtgacggcgtctaatctgagttgaaacaatggatacaagaccaccgagcggtggcctcatctttgacctataagtcatctcatcgtacggtctacgataaaacttgagatactgaacgaacgaa

SEQ ID NO: 106557 - DNA, 343 bp, Arabidopsis thaliana columbia
gattaatgtttggcactaaatcccaggttattagctcttcaccgcagaaatctcctggtctaggtgtgatagagttaaagaatgctgaccgtccaccatctgtagttgaactctccatctgacctctaataatgaaaagcatctcgtttacaggatcgccttcgcgtataacataggtgtcttttgtgttcaaggacggaactagacgctcacatatcgcatccaagagctggtcatccatctgcgcaaagaacggcacctgaaaaattaaaagaacgtaaaattagggtttgttacttgagtggaacgtaatggaattgtggtgttattctggtgtggcttt

SEQ ID NO: 106558 - DNA, 451 bp, Arabidopsis thaliana columbia
gcaaaaagaaattagaatttatgtggatggattcaactctatacaaaagtttagaaatattggtgctaagcgatcaaactctcacctgtacgtttgcaatattgtcgcggttccatagtggcaaaaacaagcgattggcaaaccgaagaaccaactgcactaacgatgaatgcgttagattatatctttatttgtctaaattaataaactaatgactagaagcaaatatgtgttaccatgttttgaactaactcttttcccagatagtgatcaatacgataaatctgtggttcttcaaacaaggctccaatctgagaactcagctgctctgcagattccaaatcctttccaaatggtttctcaacaacaatcctagtccatccaccaagatcagctggaaacaatatacatttccaatgaagttattacctaatattctctatctaataat

SEQ ID NO: 106559 - DNA, 109 bp, Arabidopsis thaliana columbia
ccgacaagccaaccaggcaggacacaggtcacaggccaaccaggaggcgggggcacaggcaacaggagagacccaaaaaggaatgaagggacacaggacacaaggcaca

SEQ ID NO: 106560 - DNA, 453 bp, Arabidopsis thaliana columbia
tttgtctgcgcggagcttttctgataaggtgttttcttatcatcaccagattttgaagctcgtacaccttgatatgaaagattagccttccctgttggagttggtgtgaccactttgtccttctgcagtcttttctgggccggcgagtaagcttcagacggattgctctttctctttgatggcgtatcaggtttgactcgagaaatccgtaactctctttctctaagcttcaagtatcctttcttgagtacgagatttgcagcttcctatagttaacaaaataaaaggactcatcagatctaattagtttttattactcaaaccttacaaagatcaaagtttacttcaacatacccgtgttttaaacaagacgtaagctattcctttcccaatgttcaagtgaggatctctaatgacacgaacagcttctatactgttctccagattactctt

SEQ ID NO: 106561 - DNA, 364 bp, Arabidopsis thaliana columbia
aaagatccgccattttcaccgatctctgtttcttctcgtttggatctttggaaattttagagtttgttcgttctctctcgtatctcattttggaattgaatcgttagtggatttgatcgggaaatgagtgttttcgcgttcgattagtgtttatcagtctctggatctgtgattttgattttgttttctccagttttcgttttgaaatggcgaggaagaagatcagagagtatgactcaaagaggttggtgaaggaacatttcaaaaggctttctggcaaagagcttcctatcagatccgttcagattaatgaaacaactgatctaaatgagctagttgaaaagggaaccttggctctcgtctg

SEQ ID NO: 106562 - DNA, 368 bp, Arabidopsis thaliana columbia
ggcgctgggatgcgaacgacatatattacattcatgtggaactgaaactcagggctattcttataggttatgctaactacctactgggccaatgacaaccgacgcaagtcttaaatcaataaggaatattattttaaggtcttggaaaagcacagtgtcattattataggaggatctacgattgcaggagagtataggggaatggcacgatgtatcgcggattccttacaatcatgacataaaagagcgtaccttaccatatgaaaacagcatcgatgttatcgttctctcatctacagtgggatcatgatatccaagtacctttccttgggactcaagcttggataagatcgctcaactattctatc

SEQ ID NO: 106563 - DNA, 397 bp, Arabidopsis thaliana columbia
gtaaattggcagatccatggaatattgaacgcagtgagttggggacttctatttcccattggagcaatgatagctaggtatatgagaatctttgaatcagcagatcctgcttggttttacctccacgtgtcatgccaattctctgcttatgtcatcggtgttgccggatgggccaccggactcaagcttggttcagaatctaaaggtattcagtacaacactcaccggaacatcggcatctgtctcttctctatagccactcttcaggtaaattaaaccgttgctaatactcattaggaccaaagagtgttatttgttatattagtggatattgcaagttggccatttaaaaagatatgttttgttctgttattgaaacgatgctttgtgtcttttt

SEQ ID NO: 106564 - DNA, 389 bp, Arabidopsis thaliana columbia
ggtgtcacgaaaacgaacgaatcagtgtcggctcttgggttccgaacaaaaacaacattgtacgtcggatccaaaaaacgcgcgttatataaacgcttaatttctccaggattcttcttctgcttccgccattgctcgaaaatcgcgtcttctgacaatgtgctgaaactgagtcatcgtccgagttagcaaagtgaaacttcgaagtttctcttacactaatctcaggtttgggattttgtaagaaaccgcgtttacaagtaagtgcgtttgcgtctgaaactttctttccaagaaagatttattcttttcccagtttgcaaaagcaaaactgatacctttctcgttaatccttctacgtagaaggaaagatttcggattttatttgc

SEQ ID NO: 106565 - DNA, 388 bp, Arabidopsis thaliana columbia
cttctaaagaataagcttcgctctctgttcttcttccgcgacgcgtttcttctatctctggcaatctcctaagagagcttgagtacttccagaatcggctctaatttgaagcaattttgagtttcaagtcgaaagctaatgagtcactgagtgtaaaaatccgatctttcgtctgtgctttcatttgaaatgtcgacgaatgatgaggaaaatggatctgtaatcgaggttaagaatgttccataaccaagcccatagacttggtatagtgtttttcttcgtcaagcttctgtctatggtgtaactgctggttactgtctctcagcttctcttctcttaatcatcaacaaatgggcaattatgaagttttcttaccccggcgcattga

SEQ ID NO: 106566 - DNA, 403 bp, Arabidopsis thaliana columbia
caattcaagaaatcttttattgtgttataataaaaaaaaataagcatttcagttgcagaaaataagttgaaagtgaagtgttaagtggactgtttggtcagatccgtagactcaaaatatattagatattgacgaaattgccccttaatatggtcatacagtcaaagcaacccactatcttgagacccacaaaacagtaaaaaaaaaagctaatgaatttccactagattctgttgtttttattagtaataaaaaatttttgagtgttaacattttgatattgtttgtatttgaaacaaccagaatgcccatcggaatgtgataggaggtgtaaaaagacacagtaccacaaggcttgcattacgttctgcaacaaatgctgcaggaagtgtctctgtgtgcc

SEQ ID NO: 106567 - DNA, 284 bp, Arabidopsis thaliana columbia
ctccaattcgttttaccattcgaatctgaacaaagtggtttattgtacccaattaattctcctcttccttctgggtataggaaaagctgctttttatattatcatcctccgcatgattccaagatgagtttggttggaaatgataggggaggggtgtttggtttattcgggatgcagactaatccgtgatgattatatggcagagaacatccaccgcgttcatacttcgactccctcagggggactactaaaccaggagtcaaggggcactgttcaggatggct

SEQ ID NO: 106568 - DNA, 402 bp, Arabidopsis thaliana columbia
gaatttagaggaaaactactttgaacaagtgggagctttcaatgatcaagcagcggttgttcgtctcttacgttattcaggagaatcaaattcatctggagaagaaacatgtggtgcctctgctcattcagattttggaatgataactcttcttgcaactgatggagttgcagggcttcaagtttgtagagataaagataaagaaccaaaagtttgggaagatgtcgctggtattaaagggacttttgttgtcaacatcggcgaccttatggaaagatggactaatggtcttttccgatcaacattgcatagagtggtgtcagtgggaaaggaacgtttttcggtggctgtatttgtcgatccagacccaaactgcgttgtaaagtgcttggagagctgttg

SEQ ID NO: 106569 - DNA, 356 bp, Arabidopsis thaliana columbia
caatgggtagttgaaaagtgtctagaaactagtctgatgacaaacatccgagctcgcatcatcaggagaattgattaactatggtcgtcttgatcaagtgatgttggatccttatggaaattatgtcattcaagcagctcttaaacaatccaaggggaatgttcatgctcttttggttgatgccattaaactgaatatctcatctcttcgtaccaatccttacggtaaaaaagtcctctccgcacttagctcgaagaagtaaatcggcaggtttttggttttaaagattcaaagagacaaaatattcaaagatctaatctacaattcctctgtttcgactaatataaaattatatt

SEQ ID NO: 106570 - DNA, 303 bp, Arabidopsis thaliana columbia
caacaacagatcttaaacgttctactccgtgctgcactactcatcctaaatggccggctggacaatggctctctgctgccgtgccttcgcctttaagaccttctagctttaccccccggcatgtgaagtcctcggaagcgcccgagtgacaatgacgaagactggtgccatagccaaaaggcccatcaagcagaccatggtacggatctgaccgagtctagaactggggtccaagctctggcgaatcaccgagctaccttaccggcgagttaccctgagaccactgatgggacaccgacagac

SEQ ID NO: 106571 - DNA, 413 bp, Arabidopsis thaliana columbia
acccaccaccacgaaactggtcagctagagaatactagcgaccttaccgaggctagcttaacgagctctctctgcgaggatagcagcggttataccaccaaatgaatcaatctacatccagaacctcgacgactggatcatgacagaggtattggcgagatctattaaaacatttacacgacagctatgagttctctggacgatgaaagagctatcggtggctcacacgtgtatgaacctgttgaagaaccgaccgagcctgtttctccttctgatgttacacttgatctgaatcctattaaagatgatgaggtagcaaactcgccacctagcgaagaagcttggtggaaaagaagcgttgcctctttgattgcccaagcgaaagaaactaatacagtttggtccatctgcat

SEQ ID NO: 106572 - DNA, 397 bp, Arabidopsis thaliana columbia
tcgttttgcatcgccattgttgtgttgctggagctaaatagagagaaagagagagagtgtgtgtgatggtgatgagaaagctacagttaccgttgagccagacgcagaaggttaggtttgagagagcaatcgagcggcttcaatcactgtcgtcgtcggctaactctgacgcttctgttatcgtcaccgactctattcccgtcaaccatgacgatgccttcctcaagggacatggaacttccgaggtcgatggtgagttgctcgcgacggtctgtggagtagtggagcgtgtggataagcttgtctatgtacgcaccttgcgagccaggtacaagcctgaagttggggatattgtggtaggccgtgtcattgaggttgctcaaaaacgttggagagt

SEQ ID NO: 106573 - DNA, 406 bp, Arabidopsis thaliana columbia
acgcagctggtcagctagagaatactagcgacataaccgaggctggcttaacgagctcactcgaagatgttaacggcagatataccaccgaatcaatcaatctacatccaaaacctcaacgaaaggatcaagaaagaggaattgaagagatctctttactgtttgttctctcagtttgggaggatacttgatgtggttgctttgaagactccgaagctccgaggacaagcctggggttacttttagtgaagtcactgctgctggtcatgctgttcgtcagatgcaaaattttcccttctatgataaaccaatgcgcttacaatatgcaaaagcaaagtcagattgtctagctaaagctgagggaactttcgttgcaaaagataagaagaggaagcaagaagaaaaa

SEQ ID NO: 106574 - DNA, 349 bp, Arabidopsis thaliana columbia
gattgccagacctaggtgaaatatatcccctaggaggtgctgcagacagactaggtttgattgattcagaaactggagaatgccttcctgcagcaatgcttgctcattgtggacgaactttgttggagggacttattagagatcttcaggctagagagttcctttacttcaaactttatggaaagcaatgtgtcacacctgttgccattatgacaagtgctgcaaagaacaaccatgagcatgtaagttcgctttgtgaaaggcttaaatggtttggcagaggtcaatcaaatttccgactctttgaacagcctctcgtcccagctgtcagtgcttgaaatggtcaatg

SEQ ID NO: 106575 - DNA, 142 bp, Arabidopsis thaliana columbia
ttcaacagattcacctgaagaatcctctatagaggctgaatcggaagcaatggtttacagagaaccgacacagtaccaaaatttgctggtgtctcttggttcatctaacaaggttgttgctgatatgaacaaaagaaggcag

SEQ ID NO: 106576 - DNA, 228 bp, Arabidopsis thaliana columbia
ggcccaccccttccggtcttggtctggtttttactaagtggggctgaaaagaaaggcccctggttttggtctggttaatggcgctcttaactcctaacaatggcgtttaatcacagaaaaatgcttctttcatggctacaggttaaagatttacgcttttgtttccggcaatacccttccccggcaccaacaacaccggcaccgagggagctcttttttctacttccc

SEQ ID NO: 106577 - DNA, 301 bp, Arabidopsis thaliana columbia
gattctaccggatcctaggctcgctatcagcgtccgtaggccggggctggaccttagcacagatcgcggacatcatctggatggaaacgagcagccctgatctcaatagaatgcacccaattcgccacaggtatcacagttcaagacactcggaagtcatgctcgcctacaatctgtagacgagcttcaactggtacgattcctctatgactgaacaccagatggttgagatcattccgccgattgctaggcgcggatattgaaggcagctcataacgcatgggggtttacatgcggatgc

SEQ ID NO: 106578 - DNA, 255 bp, Arabidopsis thaliana columbia
gaaaattctaatcggggtttaaatacaaaaacttgggaaatgggggaacctaactggaaaacaatggatatgagacgtgcttcgatgtgtatgatgttaatttgcgtctccttggttctcctttcgggttttggccagtttgtgatctgcagtgaagaaaaaggaacgtcaacgacacgtctaaagataagcttggggattagcgattcagaacatggacggtgaaaaaacgagattgcctctcgtgtcagacca

SEQ ID NO: 106579 - DNA, 294 bp, Arabidopsis thaliana columbia
ttttggtatcccgcgcaactttttcttctcagtttcagtgtctctacatcgattcatcgattccactctcttgattgctgtttagatcaatccgtctcgaacccaggggttagtatatagtggatcaaactgatccgacccgacccgacccgaattattaatgtcggaagttaatgagatgagtggtggttctattggcggcgaattgttgagagcgtcgccgaaggttttaacggccggtgatcggaaattactcaaggtggagcttcggccaggggatacgacgtatgtttt

SEQ ID NO: 106580 - DNA, 233 bp, Arabidopsis thaliana columbia
aacactcgctacttttgcgcgctatatctttttcgatggtaactttctaccaaaaaagcactgggatgcattatggtgatggagcttgggtggatgaagatgaagctgttgatgggcactttatggagaatcaccttcgtgattaagatgatgatgatgatcatgttatcctcatccatacgccttactaacttgagacacttttgtgtcaactgctaatctggaagctattg

SEQ ID NO: 106581 - DNA, 290 bp, Arabidopsis thaliana columbia
ggtaagtcctattgctagtcctagcataagccagaccgcttcttcatcttcttctccatggaagcaacgctccttgttgcccccttctcctcaaggtccaaaagaagagatcatggatgtgttgaagaagcttgaagccgagataacggaaacaaagacagaggtgaagatgttgaaggagagagaatcagagacagaggttgctttggctactttaaacgcagagctacataagaacaagtcaaagatagcgaaagccgaagctgatgctgcagggaagagcgcggcag

SEQ ID NO: 106582 - DNA, 296 bp, Arabidopsis thaliana columbia
aatttatcatcctttctctttcgtcttctcaatttctgaatcaaacccaattcccttctcgaaatctagtttctctacagtgcgaaaatcgaggttaattgtgttcgtcggaaacgatggcggtgagtttgacggagggagtggtaatgaagatgttgaacggagaagtgacgagcgagacagatatgatgccagtgctacaagtaacggaattgaagctgattcagagcaagcttcatcaaaatcaggaatctagcaatcgatataagtttttattatcagatgggactgacttg

SEQ ID NO: 106583 - DNA, 299 bp, Arabidopsis thaliana columbia
cttagcgtctccggcgaatacccactacgactgagtatggcgctcgaaatcgaagctcgagatgtaataaagattatgcttcagttctgcaaagaaaattccttgaatcagacattccagacattacaaagcgagtgtcaggtttccttgaatacagtagacagcgtcgagacgtttatttctgatattaatagtggaagatgggactcggtactacctcaagtttcccagcttaaacttcccaggaataaacttgaagacctttatgaacagattgtattggagatgatagaacttcg

SEQ ID NO: 106584 - DNA, 154 bp, Arabidopsis thaliana columbia
gcccgaaattccgggtcgccccacccttccgaaaaaagatccaaaacccttaaatttaacaaaatcgatgggctgccaaatttttttccggcgattttcctcgagtgaaattcggctaaaggtgattatagcgatcatcgaatcaaattgattg

SEQ ID NO: 106585 - DNA, 302 bp, Arabidopsis thaliana columbia
gtttcttcgtctctaaagattagatttttaagttttgaatagaaagcgatatgtcagagaagttttcaccgactttgaggctcggagatctcaacgatttcattgctccgtctcaagcttgtgtcatatctcttaaggactcaaaacccatcgtcaagaagtctgatcgaccccaggttgtgattgccccaaaacagcagcttgaaccggttaaaatttctctcaaggattgcttggcttgcagtggatgcatcacatcagctgagacagttatgcttgagaagcaaagcttagacgagttt

SEQ ID NO: 106586 - DNA, 113 bp, Arabidopsis thaliana columbia
gcctcttgcagagaaatctgcggtcaaatagttttctaaatgcaagtgctcagcgttctgggagggctgcatatggagtaaagtctccttttaaacttcatggacctgatgat

SEQ ID NO: 106587 - DNA, 297 bp, Arabidopsis thaliana columbia
caggttttctggccaaaccccttcagtcttttcaaatagggaatctacctggcatagctctgctaacttaataaacccgtaaaactcggtttcacaatcgaaaattagcatcagcttcttaatggcaggttgcttctttcaaaatgcttctttgttttgggtgagcaaacctgaaacaatccatggagctatctttcagttctcatacacagaattagagccagcaaccaataaattctcaagtaacagtggtataagacatggaggaagtagttgtgtttaccggggacagctcaa

SEQ ID NO: 106588 - DNA, 189 bp, Arabidopsis thaliana columbia
cccacgcgtcccgtcagagaacatctttggttcatgtggccggaaagaatattccactctatggacgcggaattactcaactttcatacagtgcatacagtccactcttctaactcaggacgaagaaaggagctctagtacctatttccgatctgctcggactatcagataaagttccaatgactctca

SEQ ID NO: 106589 - DNA, 379 bp, Arabidopsis thaliana columbia
  unsure (1)..(379): unsure at all n locations
acgaaaaaaggcaggtgaatctgcaagttttgggtcnttctacatgaatcttgccccaatcgtgagcaacttaaacgatgaagagactaagatccagcgacgaccttgatttctgtaatgataagaatgttgacggagaacctcccaactcggaccgtccggcctcttcctcccaccggggcttcttctcgggcaacaaccgtgaccgcggggaagatgctgccggcttctccagggctttttcccgtaggcgatccaatcgtgacttggataatcatcggccagatgcccggtaccatcgatctgagagcgcctgtttctcaaggagggcttttccaaagggatttcgttctgagagggagaggcccaatagggatgc

SEQ ID NO: 106590 - DNA, 258 bp, Arabidopsis thaliana columbia
  unsure (1)..(258): unsure at all n locations
ggggcgccaccagaagaagcagcatcaaaccagaancaccancaagactgcgggcagctgaaaacgagtcttcgatggggcttgtgggacgggaaccagcacctgatggatctattaaagtcgcaccatctcccagctggtgcttactcggctactgcgggggcaagctgtaaaggcggagcttaagcggttctcaccctctgcctatgcttggttcgagactgcgatcacctttctacttacaagaaccctgaggag

SEQ ID NO: 106591 - DNA, 453 bp, Arabidopsis thaliana columbia
catgctcgagggctctagcagccgcttgcgtgatgagtgacgaacgccgcacgcaaaaacagtcttatgacaatccaggggcgcaactaacacggcataggcataggattcggcaaccaggcgggtccgatataccactcggagatggctgcagcaaagaacaaaggaactgtgaatcagcattaccagctaacaactggcataggaagacgacgcgctaatgtgataaacgacacaacagagcaaatacatccatggagatggagactctatctagggctagccaccgtcccaggtatactcatgttcctcggtggactcgttatgcccggaacacccaacagtctcgacaagcaagggaagctagagaaggctaaagccgtgctgatcaaaggacgtggcacaaacaatataaaagctcgactgtcggatcttgccgaagacagtgacgct

SEQ ID NO: 106592 - DNA, 454 bp, Arabidopsis thaliana columbia
  unsure (1)..(454): unsure at all n locations
gaaaaacatcacaaaagagatctgnggnttggaatggatcaccatggaaaaagtagaggtacgaccaatttataaccatccgctgttaccttttactcgtttttcctacaaggcttgtaaagggtgtgggtatgttggttacatatatggaggctaccattgcaatgagttggggtgtgaatctgtgtttcataaagagtgtgccgacccgttaccagaaatcaaccactattctcatccagaccatcctctaaagctcctcataaatgtcgaaccacttgcttcttgtagccagtgtccatcttcgtttgaaaatggttatctttgttcgatttgtgacttcaagttggattttcgttgcgcgacgaggttgcctttggaatttattcttgaagaatccactgtccacgagcatccgattcagctctctgatggaacccgtgacggttttgtg

SEQ ID NO: 106593 - DNA, 452 bp, Arabidopsis thaliana columbia
gtgatgaagggcattccggttatagcagagtggctttatttcaggccccgaagcttacactggggctaatgtattcccatggatgctcacagtcgctgcaactaacatagaccgtaccttttatgcagacatgacttttggaaataacattaccataattggtcaagctcaatatacaggtaaggaagtatctgctggtttagtttacattgaacactataaaaccgacacctctagcatgctgggaaaagttgtcctgacgtttgtgaaagaagattgggaaatggcaagcgcattggcgactacaactatcaacaaggcggcggggctgatcgtggcacgaagtggtgattatcaaagtgatattggctataatcaaccattcatctacgtagactatgaagtcggagctaagattctacgatacatccgctcgtcaagttctcccacga

SEQ ID NO: 106594 - DNA, 553 bp, Arabidopsis thaliana columbia
  unsure (1)..(553): unsure at all n locations
caacgcgtcncnngccttaatctcaaacttttnnngtgatcgnnttttcatccannntcgcggtnctcaatctcaagcaaggtacagcagccgatttctcactcgtgcaagaagatggtgaccccatacctnnttactangcnnatctgnnttgctgtctttcaaggaattgccnatctcttagccnatggcaatnngcatctcttatctaccaatcnncatcaagagnncagtcaacgcaacccgttctggctttanngtccaataccttcacctnngctcggtaggannatcttgcttgggttttgattggcttcanngcggtagatgccaggtattaggtgcccagtgtttgtcccttttcgcccattactttcagtccctcttatggttgctggattaccctccgaggcttgagtacanccgataaaatanttatcacttgccacaagcatttccaacctgcaaagaaccaagagaaagtagtctgcttatcaatcatagtcagtgtcgtttactctggtttcttggtgactggaattggaggagcaac

SEQ ID NO: 106595 - DNA, 274 bp, Arabidopsis thaliana columbia
  unsure (1)..(274): unsure at all n locations
acccacgcgnccgcgcaaacaaagtctctnccnncacccgaataagcgttcgcannnnacccccgagccgggggggggtcattaacgaccagagtcgccataatcgccgatgcacgtggccgggtttatcatttactgctggatctcgttgtcaattttgagtcagataccccccaatcgagagattctaggcttttaagatgattgaacatgggaactctacctttgattaccggagtcttagagaagacgttgcaaacgccggtgcctgagc

SEQ ID NO: 106596 - DNA, 376 bp, Arabidopsis thaliana columbia
  unsure (1)..(376): unsure at all n locations
caaaagcgaaaaaacttncncncaagtttaataaccgtgaccaagangcagancnnnagggganacttttaccggaaagacggggcaccctcaaagaggaaagctccnacaccatcgacaacgttaaggccaagatccaggataaggagggcattcctccggatcagcagaggcttattttcgccggcaagcagctagaggatggccgaacgatggctgattacaatatccagaaggaatccaccctccacttggtcctcaagcaccgaggaggtatgcagattttcgctaaaaccccaacgggaaagacgattactctggaggtggaaagttctgacaaccaacgacaacgacaagggcaagatccacgacaaag
